United States Patent Application Publication US 2014/0057251 A1 - sequence listing, part 170

SEQ ID NO: 330791 - DNA, 1320 bp, Cannabis indica
ctctctctctctctctccatatttgaaccctagaagaatccagctaaatcaaggttttcttttgtacttttggacgatttttggttcaattcagaagctataaccctaggtaagaaccctaatctcttcttattagttttcaagttgttttgttagttcaagtatgcaaaattgtggttttgctactgttcaaagtagggttagtgtttgaatgttttctactatatagtgaagttgttttacgcttgttattgggattatggtgcctgattctttgagttgagcaaattttagttcaaaaaactcaaattttactcaataatggtccatttcaaattttgtttctatagttgtatgttgttgttattgcttgaattctgttgttaggttatattgtaggtattctttaaagtttggtggggtttgggtttgattttagagagatatgaagttttttttgggttatcgtaagaaatcggttaaccggttctgctactactgtaaaaccggttagccatttaaccgggcagaaccctagaaactggttttccattttgggaatctagtttaccagtttgggcagtttctaaagccttaattttgatgtttcctcgatattttggatttttccatgctatttatcgataggaaaacttttagttttgagtttaggtgcccaaaaagagttttagcaagttgtttacctatttatgtgaatgtgacatagggtatccattcaacgcatgattttccatcaagattgtccaacacacatgaatttgcaatttaggtaagactagcatagaatatatttatatgttgtgtatgtgtattatatgcaagctcattatgtgactcatatactaccaacactagtacgatagtcatactgagtgtattggtacagtgtatgatgttcaaagggtacgatttggtgttacaacacttagtagtactcggggtacagttcaaaccctaccaacactagtacagtagcaatacgtagtgcatgtggtatagtggccgtaccttaattaagaacattcttaatcagctgattatcattgtggataggtgtatgggtgcctaaatacaattcggtaatataatgtatgttatattcttttattactgagtctgttgactcacagatattgcattcgtgtgtcggtaaagggaaaatcaaagctgaacaacagagagtctagatctaggggatgattgtactgctgggttttatggcctaaataaaactcatttcaatataatcagatttacttattaatatagatcagaaacaacatttaatgttgcatggtt

SEQ ID NO: 330792 - DNA, 1015 bp, Cannabis indica
gatgcagttatgacattgaagtgggcttcttaactttagggattaaaataatcaatgtcttgttaaagattgaaaaatcaccaccatcattaagaattttcaagatagcacttgtaactaatttacctacaatgtgccagtaattggtataaaatattattgagtaccatcagcaatatatgcacgtgtaagatctctgttcatatcctcaatgattgtataagggacctttgaagtaacatactggagagtatcattatccaatccatctgtagtataaatattaccaaaatactgttgtattatattgccaatgccattatgagaagagtgttcaattccattgtcatccaccagttttttaatggtattgtaattgcgcctgttattagccttctaatggaaaaaaaaaagagtattagagtcaccagattccaaccatttgatgtgagcgcattgttatcagtagtcctcttcttttgctaagagatcatccaatacagcttcactagaccaaagttccttgaaatgggcaacactagtgtcaagagagttttgcaaagcatccaccttatcatgagacatcttgattttcctaggaagctcaccaaattaagaattgtgccatgaatggagctgagatgaacaagtggagagattagtcattacttaagcaatagagtcagccgcaccagatttccaataattggagataatgttaagaaaaccatcttccttaagccataatttctcaaaccaaaaccttgatttttatttttgaggaggagcttgcagttaagaaacaatggaacgaaaaaattccaagagtgataaaatgggttttaggaaactcttaagccaagcattattgacaaatctatagtccaatgtttcctcaacgttaaccccattaacactgttattattaggggtgtacaaaaaaatttgtaaaccgcttaaaccgaataacccgcccaaaccgaaccgaaaaaaccgataaaaattacaaaccgaa

SEQ ID NO: 330793 - DNA, 1109 bp, Cannabis indica
ttgataggttattattatttagttgatgctggatataccaatgatcaaggttttcttgcaccttttagaggaacacgatatcatcttaatgattagaatgatggacaccttccaaatacagcagaagagttctttaatatgaagcactcaagtgttaggaatgtaattgagcgttgttttggattgttaaaaatgcaataagctattttcaaaagttcatgtttttatgacataaaaacacaacgtataatttttatttgttgtatgctacataattttatcagaagagaaatgagcatagatccaataaaaaatgagatgagtagtgtactaagaaatcatcccacagcagataataattatattaatagtatcgaatcttcagatttatagattatttggagacaaaatttggcagaaaaaatatgaaatacatagcagggaactagatgattagaatatatatgttgttaattttaccatttttatatttaatttgagcagttttcaattatgatttgatgtaataagaacatagggatatgattttgtcccgtgatgtactttcacgaaatgtattccgtagtacattagataggtctcaaggtacattaaatgagtatcagggtacgtttctactttttaaccctaattacccctagatcaatctcaaccgtcagatcaaataactctctcatctgacggctgccgtacatcactgattacaatccgtgaaagtacaataacgagacaaaatcatatccctaagaacatatgtctatatttatttgatatatatatatgtttatttttgttcaatttttttgtgtttaatttttaaagtattaatttatgtgttcttttaagttttaaaatttatatcttttttattaatattaaaaaaaattatatgaatatataagatgaattcaagctttaatagagatcaaagagggagaggtaaaaataaatattattagacaccaacacaagatagtgtattgattgagtatcttctagagttgagtcaaaatctaacatggcgagctaattctgaatttaagaatggatatttgcaataaatggagattatgttagaggaaaaatta

SEQ ID NO: 330794 - DNA, 814 bp, Cannabis indica
tcttaaatagaggttctattgtagttgttttattttaatttagataaaattataaaactaatgcaggaaaaaatgggagaaaatacagatttttctcttttttttttacattcccgacagttttaaaccgtcgggaaacctacattagcgacagttttgaactgtcgcctattctacccgttttacgacggtcgtataggcgacggttatagaaaccaacggaaaaatgtcggaaaaatccatttttgtagtagtgtgtttcaaattcaccaagcctcctcttttttgtcaaagtctctttcaagaactttatataggttcgcattttctccaaagcctccaccaagggaatgttgatatggagcttctttagaacatccaaaaactttctgaattaaccatcttgctactgttttctgaatcgttgaggaaacggtggagatggcttgtgcaaagtctattctagagcaagatgctgatctgatgctgtaacaattgggggagtttcaacagctgcagttgctagttctttactcgtttcctgctctttttagattgaagaggtgatacaaaatttttaactgtaagcgtacaatgttgttgtagcaaagttttaattcaaaaaaaagttgtcaaacccacatggattgattattaaatttcactaattattatactttatgcttaattagggaattcaaagtgaataatgattgtgaatgaaataataaaataactaagaaaaagatagacaaacaacgatttcaatcagatagtaaagacctagagctttgatttccctatttcaaactat

SEQ ID NO: 330795 - DNA, 669 bp, Cannabis indica
tttattatatttcaagagcaaatattctacttgaaccctactgtcttataattcaacgtaaacatcttctccatcataaacatcccattgtaagttgtaactcaatctccttatcactatctaccatttttttcttgtttgaaaacctattgactttaatttgattgtcaatttaaaagaaggaaaaaaaataaattaatttctatcaagacacatatacaatcacccatatatgaaagaatacaaaattataaacgcaaatactcgtaatgatataacaaaccatgtactaaagagccatagcaatataacacgaagttgataaaacaaatagtactataagtactcataataatatggaatgttagaattattattgtggactaatataatcatgagcttaataccataaacacaatcattaactatgtgcctaatatttactcactaccataatgggatggtcaataattaataaatgtattagaggcacatgagagcaccctaaaacctaataattggcccacttaaattaatagtccaccactaattatactcattagcccaataagcctaagcccccttagggttacggtgttggatatatatatggggttaatatgtgttagtataaaaaaagagaagtgtgtgtggtgatgagaataaggg

SEQ ID NO: 330796 - DNA, 934 bp, Cannabis indica
ataactaaatacaataatcactagcatcatcactaataatttgagtctatttgtggggatggggacacatcaattgaatcatcatcgatagcattatcaacaagtatgtcatcctctgcatctaagatttcttcatcttcatcatcatcgataaaaccatcgtcatcaggaactgttagtaaactttgagggaaatcaatggatgttggtggatgattagtttgttgtacatctaacacatccaaatccacgaatagtgaaaaatttgacgaatttgtttcatgtacaatattgatgacagcatcacgtatgtcattcattggtgccatcatcaattttgtcccaaagttggcgatgattaacatcttggacaaccctccaattatgacctctaaccaaatcatccataaaaaaaaacttgtttcgcttgattgcctagaatgtacagctcatctttgtaccattgactactcacacttatactagtgatgttattttcggtgattattttcatccttcttggatctgtgctgaaccatttgcacttaaataatacaaccgaataagcaccactaaaagacagacgcaaaatttcgaaaagttcaccataatagtcaaaaccttctgtccccttaacaaacacaccattattttgagtgaagcgtttttttatctctttcgagtgtaagaaatcgaatctcattcattaaacacactgaataagagtaaaccacaatatcatacccagatgctagagctagaagttcatcaccatgctctaaagactcaagacaatttagttgataaatctgcatatagtaaaacattgtaacataaatttgagagtaaaccaaaatattctaacaaatatcttcaaagtccatgtgtgcaatattgggttttgtgtcctaaataaaacccattacaatctgat

SEQ ID NO: 330797 - DNA, 327 bp, Cannabis indica
caattagatttttaaaatttgcatccgatctgatccaattatgattggatatccgattctattggatcggttgggattggatcggtcggttgggattggatcggtcggttaggattggattggatgactttctgcacacccctacttctcaatcgttttttcagagaaccatgaaagtttttttttttgacgtataagcgaaccatgaatttgattcaatgagaaaatataataatcgtagaccagaaatggcacataatttagtaaatgtcatgcaatatttacattgatattttcaatctaatgcattagctagccagcatttag

SEQ ID NO: 330798 - DNA, 939 bp, Cannabis indica
tatttatgccataaaaagtaaactgttaagattttctcatttggataatttttatatatatatatatatatataaatattgtcagaactgaagagaagaaagccaaaatctttaattcaaatcaaaggaaagaaaaagaagaagaaaaagcactgttagagtaataatgttgaatttgtaaattaataaatataatttacaataattagaaatttcttcatgattttgtagtttttcttaagcaattttttgtccatatgtaattaatatcacaagggccaatttattgtgtcatatcagagatgtttttgtcaatgtattaatttttttgagaggaattgtcaatttattacatttctaattatggtaagattatttgaacacaatttaaccaagaccccacacaaacgaaaacccatgtgatgtagggtcctcttcttccataccgtacaaatgaataatacaaaaaatatatataatagataaaacatatataatgatttttgtgttttattcttacagtaatgtatgtatattaatatccatatgcatatatgaacatatattgactaaatattaaatatccatatgcatatgtggaatatgctatactaatactcttacattgactaatttgattattaatgtataaattaatgctaaaattaaaaaatgactcaacagtttgacactcttgtaaaaaaaaattatttacgccttaaaaatctataaatacattctatttacataatttttattttacataaaataaaaaattattttctttcttattcatattcttaaaaaactacctatcaaacaaaaatatatactttaaatattatatcaaaaaattaaaataataaatatacaaaattttattaaaaaaattaaaaaaaaatagacatgattaataaaaggagaattatcccatatact

SEQ ID NO: 330799 - DNA, 718 bp, Cannabis indica
tgtaaggctaaataaaaaaaagaatcattaaaccaagaatcgttaaaccaaaaattgccgttaaataggcacttttaatatataaagatatatgtttatagagaagtattattatcaactttatgttataatttctatactcgaaagtgaatacatgttgaagtttttttaaaaaaaaataaaaattcataacagtgttcgttaaagttacaatattatctctataaaattttgaaaaaatttgaatagtttacagtgtcaaaaataggtttaaagtttcttaaacactttaccacagggaatatcaagaactcggtattgtaaacgattcagaatttttcaaatatttacaagataatattataactataacaaatatcgctataaaaaaataaataaataaaaagtattttagcatataatttctaagagattgtaataagattataataagaatttgtaactaccactcttcatcccactaaattaaataaacatagttctttattcctacaaaataattgctatcaaccaaatacaaaaaagtcgttttcattgatagcttttgttttttcaaaagtagctagtggtgtcaaatatgcttgcaactagtaatatatatatatatatatatatggaggaggtttcaatggttacatttttattgtaaccatcatggttacatttttttgagccattggattactattaaatggtt

SEQ ID NO: 330800 - DNA, 710 bp, Cannabis indica
ggcataaaacccaacagtttcagcaagagcgtcaacgttctcttgctcctccaaatgttatggctgctattgcttcatctagtcgtcctccttcaacccataacaacagcgccaatccttctcggagcaagaaaccctagccctactggttctcattgcctcaaacctaatcatttggttgagaaatgttattttctccgtggtttccctcatggatatggtgacaaatgcaaacaacccgattcaaccaagtccaatcaagcttcagtctctattattacgggacaggacactacctcgcagctgcagctcagccaacaacttattcaactcctgagctagcagctccagcaaccatctatttctagagatgttcctccgagtgcctttaatgtgttcggtaactctgattttttctctactttttggattattgatagtggtgttacacaccagcaataatattagatattttactgccttcgatcataatattgttgctactttagtcactttgtctaatggtcatccataatattatcaacatcacgtagttaaaaagatacaataataatctaaaacttaaaacacatcaatgtgtatatatatttatcggtatgtataagcattaaacatacaacacctactgatgttgtcaatttcaaaaagaaaaaaaaacgaaaaaaaaatttcatccctggcatttaaat

SEQ ID NO: 330801 - DNA, 1031 bp, Cannabis indica
ttaacctcccccatctctctcctctcatactctctgtaatctctcccgtaaaaaaccacctaaactaaccaccgcgtgtacactgcgaaccaagccccaagcagagacatcgaaaatcgttgagcgacgactaaaccgtcgagattcacctttcattctcttgctttttgtttgggcgattcccaaactatatgtatacaatttattttaatagataatttacacattttgtgtttgtgttttgttaatgttttgcccaaaaatggatttaaatcttttgtttttttgattttctaattttttttgtgatgatttgcaatattttgttaatcatcgctaaacttcattactaacctcagaattgatctatcatcgtgaaatatcgcaataaattgaaaaactagatgaaaaaagaacacataaaatgcaaaaaattcaaaatcaaattttttggccaaaaatcaacaaaacacaaacacaaacgagagaaaataaactatatacatgatatagtttgagaatcacccaaacaaagaacaagagaatgagaggtgctcttggcggttcgtcgtccctcaatggtttgtgatgtctcaaaaggggccttggttcctagtgtgcggtgataaacggagcacggtgataagtttagctggtcttttacaggagagggaacaaagaaaatgagaggaagaggagagagaatggggcaagttgaaatgagatgagtatttttaggtttaggtggaacaatagtatagttttcttatttttattacgggtgaattaatttgggtctataatttacatttaagcatagtaactaaattttccttttaatttctcacaaccacacgcaaccttaacgtattgtatttgaatttgaggaattaaatgttataaatatgattagttgcacgattgtttggcggctaaaccctaccaagtgtcattttacttgcatttagttctttaagctcaaattttgatggtaaaaccctccaaactactaaaatgttagcaaatttaag

SEQ ID NO: 330802 - DNA, 1173 bp, Cannabis indica
  modified_base (1143)..(1143): a, c, t, g, unknown or other
ctaataaaaaatttcctctataatgttgtatataggtgacttggggaccatggacctatattttgaagctccaataaacaattgattattatcgatatcattattagaataatttagtttattaattacattattactcctctataaataaggaattgcactctttgataataaaaaattatattttttaatttttactagtagtctattgatataatcaatataagtaattcgccctccaattattaatttataattagagtttgtcaaaattagtattttacccttctaattatatctcttgattccttatgtaccattcattcaatgttagcagttaatctataacctattatagattttgatccaactgttagaactccgagaactaacactataggggaaataatatttgatctgttagaaagcttggattctatttttttataacatgttcccacccacttttgttattatgctcccaaaataaaagttgtaagaattatcttctctaagaaattttaacgtgtgaatcaaatgcctcaataaacacaaataagagttcatgtatactcaggattaagactaatctactaatgatcattcttatgatatgaataactctttcatggaaaacgacacattaatgaaagatgttatttcattacgatccaataatgtataatcaaattacttacaatacatttactatatgtctatctacatatgtgatctgaatcaaaatcacacacacacactagagtatagtgtatagtaaattatacgtagtagttctatattaaagattcctttactctactcaatttcgaatcactttattcatatcagacattcttaattctcttgaacatccttacaagattatacctcctccatatgaataaggaattttcaaacatttattaattatacttctatagttaatgtactcatttatcttataatttatttcgtatattctataatatgttacaattaattccttgcttttagggcataatcccaacattacaccccccccctctcagatggactatatatgtcatatatagacatcttaccaatgtgagtggtaagtgtagtagaggtaaaggctagtaaaggcttttggtgttgtagttntgtctaacttgtatgagattgatggaggag

SEQ ID NO: 330803 - DNA, 540 bp, Cannabis indica
actttataatattttattagttgccgaaaacctcggtcaacacatacgtttcaagaaacattggtagaattatgtcaagacttaatttaaccgactaggaagaccaggaaaagaattgctcaggatgatctaataaagaaattcttctcatcacctcgaagaaggcataaacatatatgttcgcgagataacctttcatttagaagatagaacaaccttaatttgctcgagatacacaactctgagaatatcgcaattgtgctttgcttgagtacactaagtcatagctcgtttatttatttgtattttgaatttatgtgattattcgtattttcctctctcacatacatttgaatatacctaaaacatgggatataaccccatgatatttaactttctactaagtaaggttgagtaactgctatcctactgttggaattaattttactaggatcttagatctactcacaagtatgttgattgaacaacctaaatatgaacttctaaaacgataaacaaaaacacataaaaagttaagaa

SEQ ID NO: 330804 - DNA, 1022 bp, Cannabis indica
ccctgtgtactgataaatctaggaatacatttaatcacacaatcttgtttactttccactgtgttgacaacacaataaacaagaatatcaatgtgataaggatttggatgaatttattaatcaaataagtaaataaatgatcacatgaaccaaataacacattaaacaagtaataaaattacatctgtttctttattgataattgaatagaaaagattacattgaaatagagttttatttagggcacaaaacccaacaaacctaaaatctatttctaaaagactgagagggagaaaattgtgactgaaagagagagattctgatgaaaaacttacagcagcgaaatgtggacgaaatttttagtttgggggtttcgagaggtctggagtttgatggtggcgtttgttgcaccgtcttgtggccggagaaggcacaatcacatttgtttgagagatcgtgagtagagaaatgcagaagatgattttcacggggaggagcatagttcaacgggttttcattgtggagaaggagagagacagtgggtggagagaagactagatctgggtttttcgtggtggagcagaggccaaatgagttttacatttggttcgattttttttctgtgtcaatagtgattattgcggtggtggtgggtgatgggtgtggcagcagtggtggtgggtggtggtggatggtggtgtagtgataaatgtagaagaagagaaaaaaaaatatgaaaaaaaaagagagaaaacaaatagaaaaagtaaaaaaaaagaaagaaaaaaaaagaaagaaaaaaaaaaataaataaaatatatgatttcagtgatgttggaaaatagtagagatgtcttctatcaatcttggtaaatttgggaacagtatggggttttagaaaaagagaagtaaaaaaagcttgtgggttctgtttgtgtgcttatgatatcttgagccaaaattgtcttttgcctatccctgaatatctgagccatactacctaagccttgaaaagacctaat

SEQ ID NO: 330805 - DNA, 827 bp, Cannabis indica
gaaccccaaactgcccaaaaattcgagggcgggccgcggcatgcaaaagccatgccgcggcacctgggacaaatcccaggttccaccaaaaggggcaggccgcggcatgctcagaccatgttgctgcacttgagtttcaaacccagaaatcaaccagcttcaaacacgattttcagcaacaaaacacatgcaaatcctcccaaatcacatcccaactctcaaaacatgtacacaaattatcaagctcaaagatagggcattaaagtacataaaacatgcataaaaaaccacaatataccctgaaaattcagattgcaaatccatgaaagttcaaagcttcaaactagtaaaattcaaattcataactagagcttaaacaccattcaatcccaacaactttcagcagcaaaaatcaatacgtaaaattagattcaaacatgtaaaacactctagaattacactcaaagctcatccaaacacaaattcttactcaaacaagcatgaactaccaagattaaatcaatatccaactcatgtaacctacgcccaacaacaaccctttttcatgctctttcaaccgaaaattcagcaagaatttccaaattaaattagtagaaacactacctcaaataaagcaagaacctccttcaattccaagttccaaaatcaccaaaactttaagctaaaaccaaacacttttcttctattttcaagattgaaaatcaagagggtttagagagagagagagaggggtcgggtgagtggaaggaataaaccagaatttttatttaattttctcaaaatttcatctttaatcaattaacaaa

SEQ ID NO: 330806 - DNA, 496 bp, Cannabis indica
tatgtaaattttcataaaaatataaaagaaattgatttgaagtataaaaaaaactatttttaacttaatactaataattctagcttaatattaattatactctatgttttaaattattaggtttaaattattattaagagaatataaagtttatattgatatttttttatatatattatagtaaataattaacatgcatataatctaaaaggatcaatagattctttttcattttttttttttaaataaaaaagagtttttatgttctgaaaaggatgatatatatagaataataatatgagataaaaagaaagattgaaattaatataaatattatggtgtgacttaggagatgactaactactgaatactgatatcatgagaatataataaggtacgaaaggtagacatttctgcaataaagtaatttaaactaatattgtttttgttgaccaaatgaataaaagtgtatgtgtaaatatatatatatataaag

SEQ ID NO: 330807 - DNA, 622 bp, Cannabis indica
agggcacaaaacccaacaggaaacacatgaccatgtcttcttttgttgtgttttctctaaacaggtgtttgaagacatcaatacttggatgggaaactaccagtggcctggttcgatctctcaaatgcttaacagatgcagaaacatggcccatgatctccaaaatcgagtcataaatgttgttatagcagcaactttgtatcagcatggaaaaacagaaataggtgcatatttgagttgacttgtgcttcctctagaagtctaagtttgaaagttaggagaattgttcaacttagaattatgagtaagggtccttttaaaacttgtccaaaaaaatttgtatttacttaatgtaattagaaattggtagtggtggtgggctgtggttgcttcttgttgcagctgctgccgtgagttgtgttgtggcttttgccttcgttgtttgtagtttgcttgtttttttgaataaaatttcctctttttcaaaaaaaaaaaattaataaaataaaataaataatacacttgaaatgtaaacagtttaaggatagaaaatgtaaactctcgattttacaaggtttggtagaactaagccacctacctcctttgtcttcaaagctatgga

SEQ ID NO: 330808 - DNA, 1399 bp, Cannabis indica
tctctctctctctctcgttctctagggcagctagggtttgtttttgttcttcattaattcaaggaatttcagctggtttttaggtgatcttaactaacgtaatagctttagcactactctctttaatttctttatggtttttagttgagtttttgcatgttttgtgagattaaatgctgtattagctagggttgcttgtatctattttttggagtttatttgtggtgtattatgttgaattgaggtaaatttaagggctgttggaaggtttgagcaagcttcgagtttaagaactcaagcttgactctttaatggtaaattttgattttgagcatgttatgttgttctctggcttgggttatgtttattagggtatattaagctgacctagaaggtttcctggtttgccttcagaaagttaattacctgttattttagttttttatccaaatttttcccaataaacacacatttagtgggattgtttggatctaaaataaccttcgccagcccttcaattggttttagctggttattctcgtcttggattctagggtctatatcatcttctttcttctcgccttcatttgttatgaccaccaataattgataattggctcttctattttgaagttcaacgcgataacattcgcgagccaacaactagtcgcctcgtactacaccgactctaattggtgtttggaattttaatgataggtgtttgattgaactgactgcccaaagtccaatcaatgcagggcgacccatcaatatgttataaactgatggtagatcaacaactaagaactcctgcattagtattgtggataatggtggctcttctacagttaatgggagtcgaatgatgtcttggctggcgacactatcaccaataaatctgcataagctcaccatgcaaggttttaattttgcatcttgtagccccaatttcttcaacgtatccctgtcaaggatatttattgagctctcattatccaccaacactctttttattctcttgttggcaagccgaactgtaatgacgagaggatagacatgtggatgcctcatgtgctttgtatcttcctctgagaatataattggaggttcttctgttttggcttttttagtggctctggagcaaacactgatttctcgttttttatttcattgacatatattttttgggcattattactctctccaccgagatgcagccctcccgagataaccaatatatcctcgccctcaatagggggaggatgcaatctttggttatctggattgttgggctgattaggctggtttggctcgtgagattaggctctctatctcatccttcaattgtccacactctccgattgtatgccctatgtctttatgaaatcaacaaaatttt

SEQ ID NO: 330809 - DNA, 598 bp, Cannabis indica
aaattattatattaaattacataaaatttgatatttaattatagagaaatgttaaaagtgtctagcaccctcctacgtatcaaggtcgctattggtgcaattaagtattgagtctcatataatttaatataataatttttataaagtatcgctaatcaatcacaagataacacgtttaaaagatgttaaataccactagtacccaacatcatactcatgattatatagtgccttttaatattaataaccaatttatgtagcgaggtgaacaaagtaggcattatgaaaattggggatattgattgaacacttacttttccatggtacgtccatctgtcccgcatattcgttgagaagtcatcaaaagaaaataaacgacagtaatggtacctactaagtcctatcattataatatcgttactcgtgtggtttaaaatcaattcttaataattataaaagattactaattatttattattataaaataatataaagtagatgagaagaaagaagaagaaaataaagagaaaaagagaaagtgaatgaaaattttttagttgtttattccaatggggtgaacccctattatacaaataca

SEQ ID NO: 330810 - DNA, 632 bp, Cannabis indica
aacttataattttatatccattttaattttgtattagtattattaaatacaataatatgtttggtattgacatgtattaatatattgtgtgaagataatttatttttaataaactctacccaaccaacaacgggttgggtcagggtctaaatttggatccgggtctgagtttgggcccgagttagggtcttgggtccgggtccgggtctcggtctgggtttgggttcgggtccaagtttgggtccagattcgagtttggttccgggtttgggtcttggtccgggtacgggtttaggtcccaagtcctggtcccggtccgggttcgtgttcgggtctcgggtctgagtctgggtcagggttcgggtctcgatcccagtcccggtcccgatcccgggtccagtctcgatctcgggccttgggtctcggtcccagtaccgggtcccgggtcttgggcctcaggtctaaagtcttgggtcgcagtctcggtctcgggtcctagtcgtggtctcgagtcctgagtttggtctcaagtcccgatccagttcgggctgggtccggatctgggttcgggtctcggtctaggtcccgatttgggtcccagtctcggtcccgatctgggtttgggtctgggt

SEQ ID NO: 330811 - DNA, 614 bp, Cannabis indica
aaggtattgatgtaatattgttgagtttttatatttttgatgtaaattttcctataaaatattgtactccgtatttgttgttacctaattattactatgaatctaagcactatttcattcttttaagaaaacagttgttctgaagcgtcatccatcataggggatgtgttcgaatatttgtggaaacaatttagaagatatataaattttaaaaaagtcattttatttacattttgcacatttaattttaactttatttatttctttctttaacattcaaaaatgttatataaaaattatttatttattattttttacatatagttaaaaaaaaaatgggaggccatggcaccctctccccctgattccgtcattgtttatattatatgttcgaactttgaacatagtcaatttttttgacaaaatactgaaggcagaggacaatattaataattaatttgagaattactttatatatcatgattttaattttttttatgaagtttatggtttggattttcttactaatttttatttttatgtgagttgctatatggatcttgattgcaatttaggttgctcatttagttgctaatttttagtaaaaaaaaaaa

SEQ ID NO: 330812 - DNA, 858 bp, Cannabis indica
taggaaagaaaattacagttttacaaacattgggtacttatgccgctaaaaataaatattaagtttatgtcgcttataaactttaaactttgggtacttatgccgttatttacccgcgtatatattatataaagtttgatgtttattaataaggaaaaaaataagattggaagatttaaaagttggacacataagtcaatcaagtgtcatattagatcctatacttttctttctttcaaagagtcaaaatctagattacatattcaaagttatacacgtttgaatgtatttagtaaaatgtagaaaatttgtgtatatggacattttatttttagaaaaaaaagtattgagaagaaaggaaacattgctttctccaaaaaaattcataatctttttccctaaaaataaaaataaaacttttcttttttctttcccttttatgttataagcatccaagataatatttatagttgttaaaatacacatattattttaaaatattaattttttaattttctctctcatctaaataaaatttgtcacattttatttttttgtaaaaaatactttaatagttaattccacattacattaaattaataattttttaaataaaaaacaactttttttctagtgaaaaaattgacttattaccattgtgtacattaacacttcacgtaactattcaacccattggagatactctaaggtttggtagaaaaataagatactgttgccgtgtggtttggtttggtttctcataaataaaaatgatatttaaacccaactgctataagaaccaaactcttcaccacaattcatccctctctctctctctctctctctaacttcttttgt

SEQ ID NO: 330813 - DNA, 754 bp, Cannabis indica
atagaggccatgagtgaatctcgaatgaaaaggaagaaatctattaagttctgagttatatcttatttcattctttttagttgttatgttcgtttatacctgactgttagttatttctgtttctaacaattagatttgtttttcttccccttcttttctggtttcgtgtcaaatgttagttaggatattttgcctaagtttgtctaggtgttcttggttgatgcgtgtggcatcccctctgtataaatactttgtatcactgtttcacttgaatatatacaaaattctattttctccattctgcattatgttatcaaagtagggaaagaaatactttccctgaccggtcctgtgattctttggtcttcttctctggtacagtcgtcgtgttcctatcttcttcttcgacatcctgtttaccacgatattatctctattttctgctcctcattcatgtcgaatgaaaatccatccacaactcaattggaaagtgaggatccatctttaaaatcaacagaaagtccatctgcttcgactggacatggaaatcaagatttgcacttcatcaatgaaagaaatccacttgaagatcccacaaatccatactatctttaccatggcgataatccaggtaatgttcttgtctctcaacttctcaatggacaagataactatgcttcttggagtagagccatgcaactttctgtttctgtgaaaataaacttggattcttggatggatctattcctaaacc

SEQ ID NO: 330814 - DNA, 653 bp, Cannabis indica
tttattaaatcaaaatgtgtaaaaccccataaattataccaataacaatatgtcacatgttgtagtgcccctaacatttctctaattggtaacatatgttttcatttggggtgcaatgaaatgaaaacagccattcaaggtgctgcatggaggggtgtctgctttgatagctgaatcactggctagcatgggagctcacatggcttctggttacaaaagggtagctggaattcaactcagtatcaaccacttgaagagtgctcacttgggagagcttgttctggctgaagccactcccatctctgttggtaaaacagttcaggtttgttcttaaacttaactcactcctatcccttttctactatttatctctgcattttctgaaaataccatgaatggaaaagaaaaatattattttggctcttatatttcggtcaaatatatgtttaaaccttatgttttgatagattacattttgaatcccaaatcaaaatagtaccttgggctcgattttgactcttctttagccatcttagcggagaacccaataattaatttcatatttaaaattagagatatttgcggcgaaactctcttaatatttgcaattgttacacatatgaccctaataaaaaaaagttgcggcaaaagta

SEQ ID NO: 330815 - DNA, 1004 bp, Cannabis indica
tgtttgtttgtttggcagtgaatcccatgtttggatgatcagaaaattgccacgttttatagctgccacctcccaaaagatagtaactagtaacaagagtactaataacaacctttttcatttttttctcttcttttggaatgtcgttttatatgttctcagccattaaaacgacatgagaagctattaaaaaaacaaaaacaaaacatttaaacgacacgcacaacagaaacaagtatatgacttaccagtaatatctattttaaatgatttggataaatatcattttgtattttgtactctgtattttacaaaaattactgattaaactttttgttttttaaataataaaatgaaccttatatttttcaaaatagtaaaaataagactctaagctcaattttcgacaatttttttgatataaccaacttgaagataatttttaacacaaatagatacaaaaaatgtaactaattttatcatattatttgtagatcgaattattattaagttttattttgacaaaaaatcagttcaagattttatatttgtactattttagaaaatgcaaagtttattttgttatttaacaaaacagaatattcaattggtaacttttgcaaaatatatgatctaaaatggtatttatccaatctgatattgccctgaagaaaatgaattaattggttaattttttttttaaagttaatgaaatttctattaataggtaaattagacatagtctattatatttcatttaaaatataaatcatgatataataaaaaataataaaggctttgcctaacaaaatgatttataaaaaaaatagaaagagttttattcttaaacttaatgagtaatacttttacagtctatttctttcccatactatgagtgaaatgaaaaatgtaaagaagactactattaaggcagtctaagcaagattcactatgtccatgaaaattatgtcctctaagaaagaattattcaattattattcact

SEQ ID NO: 330816 - DNA, 1345 bp, Cannabis indica
aagtttgtaagcggcataaacccaatgtttatttttagcagcataagtacccaatgttagtaaaactgtaattttcagtacagactttattctgaatttattaaatgaacacttggaagtaactgacactaaatatttctttctacacttgatgatctagaatctggaccttatatgtagcctgtttaagaaaataacagagtttgtactagaaaaattagagaaaaattacagttttacaaacattgggtacttgtgtcgactaaaaataaacattgagattatgccacttacaaacttaaaactttagatacttatgccgctatttacccttatatatataaaaaaatcataacaaaaaatgttccatacgagttaaatcagttaatccttttccttaaagttagatcccaattaaaatgttctcattcaccaagtatttttacaactacaatattctaaaaaaatcagtataaattctcggatatgattctctccattcaggtcaggtgagatttacagttctttagttgtaaaatctttacagataaaagggtgagagaacaacttcgatgcaaaccatctttttttacttgattcaatctgcaaacgaagctctataaactcatcagaaacgctttttggcagacttggcagctcactgaaacatatagcgcacattaatgtaggccaatcaggtttctaacctgtcgaaagtagcagaaaatgacccatataaagctccattagagtcagatccaaactccagatatcttcagcgtaactatcgtaatttttgcaataagtctgcgaatcgaacctatccgaactcatgtaagcacacattcagacgaaggattttgcttaccccaaaattgacgatcttaacttccatttttgaattcactaacagattggctggtttgatatcatgatgaataattctgtgtgagtgaaggtagtgaagatcgttgagtactttctttgctatgtcagcaactttggattcagagaaagctccttatgacttgagaacattctctatggttcctgaatccatatatactccatgactataccaaactctcccgatggtttttggaagatgttgtggcatttgaccacatgaggtgagtccttatggcagaggatctccatctcgcggtagagctggcgataaaaatttgaattggaattgtcgtgggtgattttcagcagcgtagatttttgaggtttccttgtggcagactttgtagactgtgttaggttttgtgccctaaataaaactcatttcaatataatcagatttattagttaataaagatcagaaataacattttatgtt

SEQ ID NO: 330817 - DNA, 585 bp, Cannabis indica
ttcttttcttcttcgtcttctttgttttcttcttcttcaacccaaccccaaccagctaccggagcaccaccacgaccccaaccataaccacatcccgactgctaactccggccagccctaaccccactccagccccgaccccacgatcccaaccacaaattgggatgtaattgagattgcttgagaatacttttgggtcgctcattaactaatttggttggtaaattgacgactcctagactttaaaacgtcgtcatttttgtcgtcgaagctctctgttttgggtaatgccagagccatagaaaacagggttgcgttaaacgtcgcaacccgtacagacgatatagctgttgccgactcacctaaatgaccatttgggtgtaccgcagccgaagccactgagccagaaatcctagttggttcagtctgggcttggttgtgaggttagagctcgattttccgaaccactgaaaattgaagtggccgattgaaaacatctgtgctggagtggtcgggggttgtggttgtggttggggtcggggctggagtggggttaagggctggccggagttagcagtcgggatg

SEQ ID NO: 330818 - DNA, 1012 bp, Cannabis indica
cccagagtcacctttgaagttgagctgatagttacgaaggtgctatctatcttaggctacataggcgatatactaaagacctgtggaattgaacttgggcaatcatgccaagttagatcagcacgagagggtgagttcagttgtttccctcctgcgtgtttttcaagcagtacccgagggacccagtggtgagactagtactagtggctcggctggtatgggcgcctagagccttgagcatattagtgcaagggccatacttcctcttcgagactacttcaaggacttcataaatcacgttggagtttccccattccagatttggctgatgttatcattgagaaagaggatgcagtagtattatcctaatgcgagtgtcactactagtaatgattatgatgatcgatggtgtattgttggtacattcttgattgagagatccatagatttcgatgcaatacaacatatgatgccttctctttggcaaccggggaagggtatgttcattaaagaattggattttaacagacacctattttaattctatcacgaactagatattaaaagtatgatagatcgtagtccttggacttttaataagttcttgctgatatttaaaagattgaaaaggggggaagatcttagacaaataatgctgaatgaagttgatatgtgggtccaactgcaagatctttgatcgggatttaaaacgactacgattgtaaaaaatatagcctattatgttgagaggtttgtcaaattggatgaaaaaaatttatgggattatggcgagattatttacgtgttcgagtaactatcgatgtcacaaagccattaaagaggcgaatgaagctacagaatacgaatgggattgtatttctcaattttttttaagtaagaatatactatacatcatgaaaatctatcatgaatgatatgctgatatattgatgacaatatataaaaatatgtagcattttgtcacgaaattatgcttttacaaataaatatg

SEQ ID NO: 330819 - DNA, 1452 bp, Cannabis indica
gcgatagcttcttctccgaccatgggaggagccatcaacatcggggggagagaaatagttgggcgatagcttctactccgaccacggcaaccactaacgtcggtgaaagagaaagtggtgagaccttcttcttcgaccacgggaagcaaccatcgacgggagcagtagataatggcgctttttagggctggtggtgatccccctaattatggtaagatttttggccaaaaaattatgagttgcttctaaaatgtgtggattttttgtgatatttattttgttgggttcaattgaggctagaatggagttcagaatagtggctgttatatagtagttttttttttggaagtattgtgtgataatgatgtattcatgggtgggttccagttaggaatttgtgttttttaaaaaatattctttttcttttggcagtattgagtgtgaatattattaatctattgtgagtggatgagtttgcaattaaaaaattaagggttttacacataaaaaagttatatgttttgggattttacataacactgttggtgagaaagagtcaaaaggtttaaagtttatggttgggtgttgttgtgttattattgtaatgactttaggcatgtgcacatacaaatagtggggtccattgatttccatgcttgataagaagaatgacagattttttaatgaagctttgtttgattttgtgatccattccattcaagccaatattcatgtcgatctaacttaaaactagtttgcaaggagaaaaaaaaaattgttgaatttgaggagcaaattcatgcttctacatgtaattatattattgacttcaacttcttagaaggatataattcaagatggattttttaccttagcttttaggtttgtggcagtaggatggtaatgagaaagacccctactactcttattaatttttactccagtactactctcatttttatcttttttaatttatgttcaaacccatggttgataaaaacaggcactgtcaaccaccaccaaccaataatcaacataaaatttgagccaataataataaaagagcataatcaatataaattttcttatgtatattcatgccctctctctctgtctcttgttatgtatatccctcttaggctccaccttattttttttcgtcaagactccaactaaagtaattcaaaaagtatccatttaaaacaaaaaaattctcaaagaagcccttaagtgaagtattagtatttgtgtaaattgagaggttcatgcctcaaaatagtagggtccattgttgactaaattagttgaaaaaaaatattctgggtgaaatttttaagaggtactaatatgtttgatcttttgtctttgattcataattaaacaggtgatactctaaagtatttgacacttgcaatacatcatggtgaaatgttcttcacaccttttggtaac

SEQ ID NO: 330820 - DNA, 542 bp, Cannabis indica
ggtaataaataaaagatttggacatccacataattattaatatttataacaatgctttttaattacatgggttgacttaacacttgctgaagtgtaataaattacatacgattgaactttttcagttttaccttaaatattttttcttgtagtattgtcatcttttgctgaaatttgttttgaatttattaaacgtattttatggatgttgtcttttaatttcttttgcatttacttaaatattgacattttgttttaaatgtgggtacccagactttgcaaactatttttgaataaatacaacattagtattttgatgtaaatttatttatgctatttttattttaataaatgggggcattacataactagctactcccacctcaataaaaatttaaatattatattcacagtagtaatcagttactaccatgttactaaacatgaaaactacttatttcacagtagtaatcagttaccaatgcattaaaaaaaaaaattagtaagtagaaactatgaaaaaaaaatatttttatactagt

SEQ ID NO: 330821 - DNA, 1588 bp, Cannabis indica
aggaagaattcaaagatagggatggcatgcacggattcagattgctcaagtggaggtttgagaaagcttaatttttttggcgaagaagaaaatggtagaaagtttgagttttaccattttatgctctatatttttcaaccataagatcataatatggaagatctaatggatgaaaatagaagagaagtggaaaagacagcccattaatattattgatgtgtattggaaccataaaaccgccaaaatcaaaggcatgcataatttcaaaagggaattatgacgaacataccctctataatcatttaaaaatcactttttattaaaaagaactttttaaggggcaattgttatacccgaaattcaactggcacttccgagaaggacacgtgtgaaacatggagaatacgaatcaaccaatataatagtaattgtattaaaacatattaaaatagaataactcattaaatgcggagatgatagagtgtatttacaacttgcggactgtaaagtcttaagcgagataaggatatacaaactactgtcttgcgcattgatgagaaaccattctacatcagaagtacaaagcgaggcatcaacctcgctttgtatgaagagaagtaaacgagattatgttgattgttagaacacttagggtataatgtacattatacaaactaagcataacagttgaatgaacttgaacaacgaatagtgaggcacccatttggttataggaaggcatactctcagtaccttcactaataatcttcagatatcttttattaagattcactactctgtcgagtcagttctctcagatagaagctaacattcaaatgatgttgactgctatagttcatcttatcaccaagaactgcgattgtctgtcttcaatcgcaaaagcgacgagatttacattatcaacctcagaaagacacgggaagagctatagctcgctaccagggttattgttgctatgttcctagcaagatgtcccagaatgatacactttgcaacatatttaatacacgtatgcattgacctggtgaaatcggaccaatcataactgtgtgattctcaaataataaccgcatttattttacgtgggaagtaatcaaatccacaatttcaggggattattgttgtaagatataaattcgatttgtaattgacttccctcctatgtaactataaataggagcaggatacactaaaaaagggacggaaaatccgtaagagaaaagccctagtattgtattagaaatatctaataagatacactcgtgggctatgtatatacccaaaattcggtaagcacataagaagaagacacgtgtcaagccaggaagaacgaaggactcaaacacgcaatcataagtacacttggcataggctcgttaaaaacacaatttgcagagtatgtttataactcggctggctgaacagctttgtgcgagataaaaatgtactaactgttaacttgtgtatcgatgagaaaccatgcaaatgcaagtgtgcatgacgaggcattaacctcgtctcgtggaggagatataataacaataaaatacttagcgtatatgataca

SEQ ID NO: 330822 - DNA, 837 bp, Cannabis indica
tagagcactgatacaaatgtgagcaataccgacgctgatgataaaccgaaactagatgagttaaaggtgatgaaaaatttgaaccatgattgttcttgtaagacggccatgccctcgtcgttgaatccaccggggaatttggatacccgccgcaaatgtgatgcttgctacgattgttgctacaattaagttgacattaacaatttcattgctgaaatgtaatcctctttctccaatattaatgttgcattgttgttgtttatgttcaaatgaaacaaccatctctttctcttcttctttctctttcggtttatcgccattgacatcgtgtacgctttccaaactcgttttatagcaacgcaaatctcttatcaaatcaacaatctgcaaaaaaatgtgttcaaatcaagaatcaatgtactatccatgcttagaaaaatggaagcccaaagtgacaaaaaattatgactcccctaatagattttggcacataaattaaatgtaaaaatatttgacccaatatgagctattccactcataatcacttacttttgagataaaatctcataatttttgtcaatagatacccgaaaaattttcatataaaaatgttatataattaataaatatatttatatatatatatagggatacgattttgtcccgcagtgtaatttcacggaatgtatttcgtggtacattagatggatctcagggtacgttactattttttaaccctagcccctagatcaaccccagccctcagatcaaaaaacttccctatctaacggctgccgtacatcacggaatacattccgtgaaagtacatcacgggac

SEQ ID NO: 330823 - DNA, 1456 bp, Cannabis indica
tttttttttttttttcttaactttgaaaacctaaccctggttgggtaatggtccagaagggagtctctggtcaaaaccaaattgtgcgactgagagattttgggtcccaccaaaccaattctttcttcactcctatttacgtcaagggtttgttataatgttatgctacactcgctggccatcactatttagagacacattcattcaccatcatttcattcttttgcaattataccctttctttatttcatgtatttgaagtttgccccttttctatttattgtttccatttttattcataaattttgcaccccaagttatctttttttcctaaatataattaggagtatcctacaaaaaaatgttttatattttggaatttaaatatttataatttaaaaatgtttgaattatattatttcgataagtattaaaaataaaagggaaattactttataaactgttttttattttttttttaaatttacggttttagttgtattccggccgtttctccaataatttatatgtgtgttgctatgtaaattttagttgtaatttaagttacttcattagttgttataagagtttctatataaaatttcgtaaaaatacattaaaaaaattattttaaaatataaaaataaaaaaacttctaaatacaaatgtaagaacaaaagcaatgttatttcattaataaacaaaccgtagtcaccttgtaattctatttgcctatttggtaactcaaggtcctattagctataaatacgtgcgtatcgtgctaactcaatttatatttttttgtatttttttaaaatatttgtcgtgtcatattagaccatgaaaaaatataaattgtgccataaaaaatataagttgtgccagacgttgccatgaaatatatgaattatgtcgtgctataaaaaaatatgggtcataccgtatcatacaataattttatagggtaggctcgatacaataagcaagttcgataatttcgtatgtgctcggattcgtgtagtattttattcaaaccgacctgttattcttaaatagatcaatctattttttatacggactcaaattcatactctatattttaattttttattataattgatgaactaaatacttaaatatatgtgtattttataattttaattattttttttttcaataataattacatgcaattatataaaaaataattataataattatagtgaatattacaaatattttaattaataaataaatatttattattgttattataattaaattattagacattttaatgtgttgtgttttcgaactaattctattcgtgcttacatgtgcttttaggcttgtcgtgcaatatcgtgcttaagctctttgtatcgtgctgtgtctaagtttatattttttatgtcgtgtcgtgcttgaactcatattttttcgtatcgtgccgtgt

SEQ ID NO: 330824 - DNA, 1014 bp, Cannabis indica
tgataatttgtaattagtcacaattttttactttatttttttactttaaatataaaaatatgtaccattaattacttctaaattaagtaataaatttaaaatagaatttgtgttaatgaaaattacaatttaattaaattttgaatacttatatggttaaaaaaaatttgagatataccgcaatcaaacaaaaaaataaaaaatagtgtgcaagtttgagttatatgtgaagatagtggtttttgtatgtttgtcgttttgagcttacttttaaaagacatatgcatgcacgctttgttttaattggttattaaggcaattttatagtagcagaaaggaggcttcaattatcaagatcatgctctctctctctctatatatattcttaaatatttgttttaggaatttgagcttaattaattataatttgagaaatgctaaaaggtactagtggtgcttagcactctcgtcagtattgttattggtccaattaagtatcaggtcccacataatttaatataatagttttttaaaagtatcgttaggtaatcacaacgtgacatgtcgagaaagtgctaagtactactggtgcctaatagcaatgctctttcatattatagttgatttgaatgaatgaattaatgggtttgttttgttattggttatggatacggagttttgactgtattggtattgggatctgacggtggttttaatttgagtgtggccagggagaatgtctgtctcttgtttttattggtctcttacttcccattggctaccactctcttacaacaacggttatcatacccgaattgctaaaagatattacagtagaatttctatttaagaatactttattcaagaataatctctaatttgttataaaaaaatgaagtaccaatttgggtcagttataaataagaataacctctatattgtaattagttatacatttttaaagtcccgtattaataaaatataactctaagaataattacatcttaaaaaaat

SEQ ID NO: 330825 - DNA, 869 bp, Cannabis indica
ttaacagaatattctttttttaagtatattctgttaaaccaagaaatgctgttagatattaatatataaagatatattaatcacaaaatataagtctcatagttttaaagttatttattttttaataaatgaaaccatattattagcgaaaaactttggaagaaatgagaattttttttttaacaacattacttattgttaatgcagattttcgttaacgaataatgagcttttttccgtaataaattaaacatagatatgtaagaaaattgagaagaataataatagtaataatgacaccaagtcgtagttttacagttaaatctgcatattccacgagtctatcttatttaagatatttctggatattgaatacagtattacaattagtgatcttttctctccaagatttttcctcttttttttctgtagaatctttcctatttataggaaaataggttgctagttatttacattttgaattagaattacataaccattttcaggaaacgtgggctttgaccacattccatcatgtgtagataacactagaaatccgcataaccgtttatcattcttatcttcaaggtagtggacactgacgtgggtaaaggcatctcgctttgtatatagaaaactaaatgataacttggtttaattatatgccttccagcaatggcatgagcaccagtgtattgagcaaacttaagaactgctctttgaccataaggcctcgcagactggacaattatgtcctacatgctcccaagttattacacttagttattataatgtggattatacgctaagtgtttcaacagccgattcgcctcgtcaatacttccttatgtgtagcaaggtagatgtct

SEQ ID NO: 330826 - DNA, 1141 bp, Cannabis indica
tctctctctctctctctcattgagatataggggttagtgatagtgatttcaaagcttgcttatttggagcgcctcccgattttgacatggatcgtgacgaatggacaactttgtataattcctttgatttagatgacaacgacgatgagattattgaagccgatcttgaggatgctgttgcagaaagtagttccaatagtgtggcaaaaaacttagtcgaaaagataatctcaacaaaagcttttaatcaggagaatattcttgatgagattccagggttttggaagatcattggcaccataaaggtagaaagtgttggtaataacacctttttatttcatttttttttgaattatttgatcgacacaaagtttctgaatgtggaccttgactcattgaaaagtagcttttggcgctggttctggacgttgttcacctaacctgtcatatctatataaactcaccattacggtcaggcctgactttctttattcttttgctaagttaattctcaacttcaaccttaaaagatttgaacatgtccaagacttagacatttcatgaaatagaaataggtatgcatatcttgagtaatcatctatgaatgatacaaattaaatattaatgatcaatctaggaaggtgtaggaaatgaccataaatgtctgtacgtatcaactctaagacatccatagctcttttcacacataatttctttattttggtttgttttccttgatgcattcaatggaaatatcaaagtctaaataaccaattgaacctagaatttcattgctcaatctatttttagagatgtgacctaactgttttgtcataagaaacttaaatttttattatctgttttacgcttagtaccacttgattcaacatttaatgtttcattataagaagcaatagtgttaagcaaatataagctgtcataacaagagaaccaattctaatagtatttgaattaatagataaactaaaacaattattttcaaatgaataataataacccaatttctccaaacaagaaatagaatctaaattccatctaaataacgatacaacaaaagtatctattaggtccaaatagtaactagtacctaacaacaacctaaaataccctattgcttcca

SEQ ID NO: 330827 - DNA, 908 bp, Cannabis indica
ataatataacttaccccatcttgcaagtaccccatcttgaaactaactttggtagtctaactgagattatgcttaacattcactacttactcaaacattgattcaatacgtggtggaaattcatgagaaggaggccgtagcgatcgtggatgaaaggagaaacagagaagagagaaatggatagaagggtggtggagatcgacgccggcgatgagctagagaggtcgacttgaggttcagaggcgaacagagagagggaatcgttgataagagcaacggtgatctagtcgtcgcagtcgctgctgagaagaaagagagacatctgccgttgccgagaaagagagccgcaccgcaaagggaaggcttgagtgcactgacggagagggaaggctgcgatctgagaagagggaggcgctatagaaggagagaggagagaagtgagcgagattttttagggtttttagactcgatactgggtttttcttaaatgtccgtgctttttgttttattcctttatgcattttaggagacttttattacacaatattatttgaatcaatatctagattctgttaaaaatagtgtattaaaccaatctcactcatagtaatttgagcatttaaaaaaaaaaaaaacctgtatagatactcaatgaagtgtaagtaaatttaattagttttttttaaggtaaagtaaatttaagagaaattaccttattctattttttttaattttttttatttaaattttacggtttaagtttttaaagttaggttgtcagtcgttagttgtcagtaggtagtttctattacgtatttttatttgtcagtcactagttacatagggtttcgaatgtagaatttcgtaaaaaatacaaaaaaaaaaaaaaaacaaaaaaaaaacgttaa

SEQ ID NO: 330828 - DNA, 923 bp, Cannabis indica
  modified_base (31)..(31): a, c, t, g, unknown or other
tgatttccattccgtctcctttaatctcctnatgcctcccaggacttttttcaggaatccccgctgttgttcttgtgtttgtacacaatcttcctctgagattgaatttggcgatcgtgatggataaactcttatctatttcccaatcatcttcatcagttacttgaagattattggttttcttcaatagttcatccatggtggaggtgggaacaccaatccctgaggcagggaacccttcgtattcgagggaggaagaaggttcaatcgcagttcaaagccctagcagagcgcgccaaaaaaaaaaaataaacatatatttcattactaatttagttatattcacaacattataactaaaaattttaaatttagtattgtggtgtcacacatttcctctataaaatattatagatgaggttaagagtttcattcttcacgaaattgattttgtggctgattgaacatctaatgtcaagaatgtcatataaaatgtgcttatatatttgatataatgtataattcatcaaatcagtacaaattcaatgaccgataactaacatttgaattaacataatttacaaaaaaaaaaaaaaaaacgaataaacaaactatttgaatttttgagacaaaagtgtggtactactttggtgtcatactagggagcaaaacttaaacattgaccaataatgataataactagtaaataattctcattttgaggggaaatttggttaaaaaaatttaaattatatatgaaattaactatagttttatttaataataattaagtaataataagttatattaattttaatcttattaattttttatataattttaatttgaatagcatgaaaaaggtgtatccaacccataatctatatacaatagaacctctatttaagaatactctatttaag

SEQ ID NO: 330829 - DNA, 1110 bp, Cannabis indica
tcagccatcatattctgaaaaatacgaaagtctgagacctttcctattagcagtcgcccaacgagacaccatctggtgtcaatagcctggtcgtcttcctcttcagcttcttcataaaaaacctcctctgcatcttcttcttcaagttggacgtttttccaacgttcatcaatatcatccatgttgaggctgctagaagccatatggaacaaagccacgaaccacacaaaaacaaaatacgtacacagccaaagacagaaaagaacaaatagcagtcaatagaaaatcacaatgcatacactcaaaaagagagacagaacaaaactctcaaaacagagagaactcaaataccccttctacaatattttaaaacttaataaagcaaatgtatattctatttttatatattctatttttaggacttgcaagattccattgtttttggtgactgactgttgattgttaagtaaattgtcacataacaattattgattggtccacatcattaaatttttatttttatttttaataaaattaatgatataccaataaaaaaataatacgtaaataataatttgacatttaacggtcagatttttacagagttcaaaaaatataacttaagtatttatttataatcaggaattaaacttaagtatttatacagtaaatcactctttttctgatttttttttatattaacacttgaaataaaacagataaacattttctttataatgtataggaccacttttttgtcctagaattacattaacaaataatataaagatttatatgtctttgtctatataaaatttatctatttgatgatttcttgttagtttaataaaatattttattaatataaaaaatattctgttaaatttgacagtaaaattaattttataaatatatataaatatttttttgaaaaatcagaaagtgtattgcaataaaccagaccaattacaaactagtagaaccttttaaaaaggcctaatgatctatacaaatctcaccttagtttgacatgagataatcaaaccaaattttatcttctcttctaacatgtttaggccaaatcaataaaattctacttttaacactttc

SEQ ID NO: 330830 - DNA, 1169 bp, Cannabis indica
aaccatgcaacataaaatgttatttctgatctttattaattaaatctgattatatattgaaatgggttttatttagggcacaaaacccaacagaaataccaacagttgcatcaaaggcagacggtaaaatcgaagggttttctcatagtgacaaaatttgcctcgatgagggcactgacatgcacctactatcagtgcaatatcctaagaatcacacacccacgagactcaagtaatcaccacacatcagccatatggtgtcacatgtccagtgacaccagaatacgaaaattctagtcgggtggctagattcagattgcatggaaaacatagatcaatgcggacagcctccacaactctcgagaaaatgaaggcttagggttaaatattattcaaaattccaaatggaagacatgtggcatatatccaaggttcaatgagttttgggcctgtcatttggtccaagaagatttaccaagtattctttttccttggcaaaaataagtccagattccacgtaatactccagattcatgagcttctcaaagacaacgattatgccactattgaccaatgaaatgtacagtaatttctcaaagctaccgagacaccaccaagggtcatccaaaaatggaagtggaaagaggacccgagacagcatatagtcctgaatgatgcttacatggtgcctctctgaggggatcccaaggaatctagagacttgtccccctctgccatattttagaaaggctcacaataaaaagatggttaccttttgtggaacgcaccactactttgacattttctttcccaacaacggtgcataacacctattgtcattgtcaatagtaccatgcatggtacgacagactgctttttacaattgggcttcacctacccaggctgataacttacaagaatgttaaattaatgtattttaccccatcaatggacttttctctacaataaaccctagtacgactcgtatctataccaataagcatggctaccaataaatatggtattatctcatccatgcaaagggttcaaaactgaaaaaaagcatatgaacctgtaaaaactgcatagctaaaagcttttaaaactgtctcgtggactaaggttcattaacgcatgaaccatgtaaaaatacatttgttcttcatctt

SEQ ID NO: 330831 - DNA, 1246 bp, Cannabis indica
tgtgactaaaagtaaaattatttgtagtgatcaaaacaacattctaaaataaatagtcataaataattactccacataaccttaatattctagttgtctataaatcttgtcctactaaatctaagatatgaaaccacatctaagtgatgccaataaccataattttgaattctactattaccgagcataaacatgaaaatattataattcatacataacatgcattacacacttagaatttaattacatctccatatttaaaaaattatttctctaatgtctaaatctaaaaaatatctcttattttctactaatgcacatatagtcataaaataataattaaattataataagctagtaattatctgatgatatgtctaaatatacgatcattacactgagatactacagtcatcaaattcccttgaacctgtggttgtgacacaacaactgaatcaactaactttccagaaccttcagagaatagttcttgtttctcttgtgctaaattagctaatgttggttcatcattcccctgatcactcctttcataggcagttgtgctatcccaaaactaatcttaaactttctagactcaataacaaccttccattgtttctctattgcattattagagtctagaatattcttcaactccaaattttgaactgaattagcaggaaggggaatcttctcaagagcttgggctgcagtagcaatctttagattttgagttactgtaatagctgttggaaaagacttagcagtgattcttgaattacttatttgctcagttcgacattggtcaatacgatgaccataacccccacactttgaacatttggtaggtaaccattcataatgaatgagaacggaatcaagaagtctccattcattttcaaagttaattgctaaggaaaaatcttccttaatttccatgtcaaccaaaattcgagcaaactttacttgtaatctctctttggtagtgttgtctatcataattggggtttcgtgctttagaaaattggttccccaatattacaggcctagaccaagcaatttaatctaaataggggctattttaattattttatggtgtcaaaattaggaatccatagtcggattataactggcttattatcaaactagtatacatcccgtgcttcgcggtggatatataaaatattttaaattatatataaaaaaataaattgtgtattttaataaataataattatttagtaaa

SEQ ID NO: 330832 - DNA, 629 bp, Cannabis indica
tttctaaattaatcacaacaattgaatagtaatcaaaatggtttaaaaaaatgtaaccatgatggttacaataaaaatgtaactattgaaacatcttccataataaacaccttatatatgattatatatagtcaaacacatttatagtagctatagtactgtattgatcttattgtttaaaaatgatattatactatagaaattaacgagaaagtcgtgataataatattgataatatatataaatctttcctgtagttatgggaggaaaccgatagaaaaaatcaaaaatatgaataaataaataaataaataaataattataccataagattagctttaaagcaattcgaatagcctgatatactatatcaagactcttaaatataatgtggcaatattatattatattcacaatcgaatagcctgcaagtatatcagagtatatcatcatatgcagaaatatgcagaaatgtacaatattatattctttttggccatgttaaccaaatctctaccacttctataaaatctctaccacttctatgtgaaaactcaattgcataaaccaatccttcctaaaaaaacaaagatttaaagttaacacagcaacattactacaaatttatt

SEQ ID NO: 330833 - DNA, 1129 bp, Cannabis indica
atatttgtaagtttttttaaaaaatgccatatttagtgtaattaagtttttatgccatatatatcaaaacttatctttattttcccatatttttgtaaatagccctataatgaatcaatagtcgggctccaaggttagggttgaagttgggttggggtcttggggattttggtccaagtgtttggtcggagtccaagtccacattgaggtccaagtcttggtctaggtccagggtggggccgacatcaaatgtctagagatgagatcgagatcaaaaatatttatgaaagagaatattaaggataaatactacttagtgttttacaaaaattacagatggaattttttgtttttgttaaatgataatttagatattatatttttcaaaatagtacaaaataacactttgcactcatttttctatcaaaatgaaacttaataattacttaatttggaggtgttacaaaactaattgcattttttctatttgttcgtactagaaaatgattttaagttggttatgttaaaaaaaataatcaatgaaaattgaactttaaatactattttgtattattttaagaagtgataattacggtaaaagtcttcaaaaacttgaggttgatgcagaatagtctccaatctcaaaaattgacagtaaaaatacccaaggtcgacaaagttgtgagttcgttcatacccaatctgttagtgtaagtaataagggtgttcaacgaaatttataaacctcccaacctgaataaaccgtccaaaccaaactaaataaaccgacaaaaactacaacccgaaataatacaatgaaaatccaaatcgctcaatgaatatattaggtggtttacaaattattctaaaccgaccaattaatccgaataaatcgaattaaaccgattagtatatttttttaataaaaatgtatataatacattacataaattatatttattagtcaaaactattttgtatttgaagtttggatattttagtgtttaacttaatcatttttattgtatttagatattaaagttgaagtttaaaatctatacaatattattacttttttttattacttttattcaattatttctatgtttactcaattatatttatctta

SEQ ID NO: 330834 - DNA, 1229 bp, Cannabis indica
aaaaaatcttctttatatattaacactatattaatgtcccccttttgttaggttttgacacccgcttatttgctgatgtaatataagagtgaaggttaaaattgtaattgacaatagcttggatggaaaaataaacccttttttttttccatttatttatttatttttgaaataacaaaaaagaaacaaaataaaataaaatgccctttattgaataaaaaccaaatataagaagaattttatcgtaagtttttaaagtcagtaagaatagaacaaacacttatagatttatattcaactttgttcttccaaaaaaaaaacatagatttattaagataaagaaaaaagacaaaaacacgctagatttaggacatctgtttgagaaatttgggtgcaaaaactgtgaatagaggagaaaagggtttccacattgagaaagaagatgggtacccgaagaatgatcgttatcgatacctccttttacgataagttttctgggtttttttcttccattttgaaacaatagtttgccaaaaattgctttttaaggagggagaccaagtacatataacattgagttgaaatgtcaaaagtatcctcataactcttaagagtgcaaattctctttactttttagtctttctttgttttctataataaataaagaaaagcttgttggtctggttcgttaaagccattttgtagccaaacagtagttatggcgaattcacgagcccacgaaaacaatggttgagatttcatcgatcaatcaatgtaaatgaaatatttacattcaattaaatattaatattttgaagttttaaaaaaatttattaatattttggagaataactcttaaaaccacttaataataacttacatatcaaattatttgtatctgtaagtaaatctatgtataaatatagcacatatattttaatcatctcgccaaataataattaactactaaacacatctatattacaggagacacatctatattacaggagacaggcggagaagaagatgacataagaaattagggttttttttattaatttctaataattttttttgtttggtaagagtatttaatattgcaataaatttttaactatcatcaaattattttgccactatgtcacatcatcaaataaataggtatttgttaaaaaaaattaacagaatggagaccttaatataatgctaatattgttgggttttatgcc

SEQ ID NO: 330835 - DNA, 1345 bp, Cannabis indica
tatatatatatatatgataaaagagatggagtaagttggctattactcatgttactttcattaataataataataataataataatattgatttcaaaaataaaaataaaaataatagttaatgtattgtaaaaaggtgtgttggcatttaatagatacaagataaggtaaatttctatatagagaagagtctaaaagtattaatattattgtacttttataattttattaggggtacaatagacatagtcaatatagacactaataccatacttttataataataagaatatatataattatttttttttaattaactatatatgataaaagttaatcaaagaaagaaagaatgaaatttgcaataaaagtcttcttcttcttgaagcttcctacaggctttgctctggttcaacctcagttaggttaactgtattttttctctttgtcacttcttctcaaccaggtttgagcttcccttttcttttttcagtttcgtctttcgtttactttcagcattaattatctccctttttccttattctcgaagaatcccctctctttgttcaagttttctgcctcattaattactcctccctgactcttgcttttattttactagtacgtcaccctaatcattatgcatctccccctaatttctcgagctcagctgctgtttaatgccatctctctctcacacctgcatttaattatggcggctctatcctttcagcatttaattttcctgcacaaattatacttattccaatcctcagctcgatcccatacagctaaaccaaccgtcacttggtttcccttcttctcacacccaaaaaccatcattgcgcatcttctccgaatccagacagtctctataggcattgaagagatggctcagacaccggttccatcttcgaggcagcccttcttctccaggtactctcttctgtggcttacttctttgattgtctatttatatgcttcctcccttcgactttccctatcaccatcgccttcttcttcaacctctgcttcctttctctctctctaccagcaatggcttcctcctccaaaaaccctacccctattactgctcttgatgatgaggacaatcttgtacatgactttgatcacatttccattcactctcctactgatgccaactcgttctgtttgtttttcaaacttttgtctccaaaatcggccaagccctcttggattgagaaagccatgtctgaagcttggaccctccgatttccttgccaaatttctgaatatcattctgggttgttcttggcctcctttcaatgtgatggagataggcgtcgtgttcttgaagaaccac

SEQ ID NO: 330836 - DNA, 1910 bp, Cannabis indica
atgttttgtagtttatagttaatttatgaataatttgtattttttaacaagatttgaaaaattacaaaattacagtaaaaatacaactgtaacaatctacagtaacatattgcaattttgtcactgcagaacacagacttgtagaatcaaacaaaaaacaaaaataaataaatgcagagtttaaaataaattgaaacaagagaattatatgtcgtatcaatattctttcaaacactcctagtccacgaggccacgcccagagaattaaattaattaataaagcctcaaataattgtaaatacaattgacttaaataagtttagagtccctctaaatatttgtcgcaatcctttgtaatttacttcacaaatttgattttgaaacaccaccaaacagcgaactcccttcgtctttgatgtgtgagtgcttattgttgattttatgataataaattaggtacatagcggaagagttttgtattttctgattatcattgtaccatattgtaaaggatctctagatttgtatacattaaatcaaaacataaattataagtttagagtatacatcttgaagtctatcagggtatcctcaaaacttctcgtatgttgtatctcttaatccaaatgatgagaaaattacaattggactcgcactagtatcttctaaatcgatccaccacacacaaggaaaaatgtgggctattaggattaagtgtataagctttgttcttgttgagttctcaacacgtgagcaagaataatttagagaaaaaattgaaattctttttctctgaaggtatttcgaaaaatgttttgggaagtgagaagtttgttatgatttctcaaatcagcttttatttatagtagttaaatcaatttaattaaattatatttaattatttaaataaataaatacatatacccaaattcagttactgatatttatgagggaatctctcagctacttgagagagtatctcaacaaccttgaattatatataaccactttttaaataagatatttacctaattaaattaattaattaacccagaaatacaaacttcatagggacaccaacaatgctataggtgcctacccttgtcttttaggacaaggttggtatcttttatcctaacaacttttgtcttaataatttttgtcttttccctatttaattaatttgaaaaaattatttatttattacaaaaataaataattactattttgtcaattcaaaatagatttttccgaacatctttatgtaattttttatccctacccgtttcaaggtggtgattcggggaccatggacctataattctgagctctgataaactagattatttattgagtctcatcaactaaataatcattgtttataaattccatgattgctccactataaatataaaattgaactgttaataattatagaattatatttactgagtttcactgcagtgtccattgatataattaattccaatgattagccttccatatgttggttcttaattagttttggtcaaaataccgttttacccttttaattacttatttatcctttagtccaattatttcactagtggaattataattcacgatctcatctaaatttatgcacaacattccatttctacaattaatacttaaaggaaaccatcatttgatctattaggaaagtcaggattccataactgtacatcatgttcaagggcggagccaggacttgaatgctagggggccaaattttaatttagtatcaaataaaatttttgtaatacatatttatattcaatagtaaaatttaaaatggtttttttcttatgtcgaaaattatctataataaaatgttaaaataaaacaaaaagtactctattatttaaatttctactctatattatcca

SEQ ID NO: 330837 - DNA, 1039 bp, Cannabis indica
cagatcattgtagatctgatcttattgctgggtttgtgtttgggagtttctgggtttctagggtttggctttgagtttctcagagagaaactctctgctagggtttcgaagagaagactgagaaagagagaaagtgactgagaagattctcgagtctttggttctgttcaaacacaaaacgaagccgttttgagtgttcagactttgaaaagtctttgaacggtgaaaggtcgaaattgaccttaattactgatctgtttgttttgttggtgtagggtcaagatagtaaattctatcttaaaattcctacactaaccttaaaggatgctacatgtcctgaaacattgaaaactttaaacttagaggagattaaacggtgaccaatgaataatgagataattccacaaaaggtaagacatcatgttttgaagtagcccacaccagattcctcaattgcatcaccaaaacaacaataatagatgtgttgctcttctttacttcagtatgaatttataatgggtacattcatattacaatagacattcatattaatggtgaccaatacaagccaaccaaacagcattatgaaatcattaattaatcatcatcatcatgatcaccatcatcaaaaatcacaaacaaagaaaacacattattttcaataaataaaccctttattagaaggatcatcgaaaacccaattcaaataaaggatcattcatacctacatatacatacatacataatccattctcaatcgtataaatgaccatttctatcttaaatcgtatttttgggatttattttattatatataaataaaaagtcacccaatatatttttgggatttattttatttttattttattatatataaataaaaagccacccaataatttctcataaactaaaaattctgttatatagccacattttatatagaatagaaataaagttgcactagtcgggttgggacagctttttgcaccatcaagttgaactttaaccaaaagatcagtgatgtatttgctttgagata

SEQ ID NO: 330838 - DNA, 615 bp, Cannabis indica
ctcaaaaattattattgtaaattgctttggtgtgtcaaggatagagtactataatcaaatagtttcaaaaataacgaaattaagctaataaatttaaaaggggtaaggcaaaatgtttgattttttatatatatttatagttattctcatgtgcactccccactttaatttctaactagaaaatatactctcacaaaagtttttattttttatctttctgtgttttgtgttaatatatttatgtcttattttgaatataatatttgtacaatatatcggaatagctattggtagttttaacttttttttttttttttgataatagcatatatatatttagcatatttattatacttttttgttaagcatattaatgactataataaattaatattaattaaaaattaaaatatctatcttttcgtaacaactttaatttttttaaaaaattatgtatatatttatttttgtaccaaaaactgtttaccacctcataactttaaaatttcaaatcctcactataatactattatggaagaggtttcaatggttacatttttattgtaaccatcatgattacatttttttaagccattggattactattaaatggtt

SEQ ID NO: 330839 - DNA, 1021 bp, Cannabis indica
ttgaagcggggacgttacaagcagatggagaggtatacaatccattgttagtgttataaaccactggcttactgaaatctcttgtataaaaagctttctttaactctgtttcttgctcataaaatcttctaacaccatctttcatttctttcataacactttatgaaatactatgattgacaatttggaagaaccctccattctctgaggcttctcttactctatcaacgatctctcttcgcctaactcgatctccatcaagaccttcaaggtctataattggaatactaaattgggcatctcttagaacaggaatatcatcatgttttgatttgtggaagaaacgaggaatttgagtaattccagcatcaacaaggcctttcactccaattttggactcatcaaaagctttaacctcacttgctctatcatattcagagtttggagagacttcatctgagtttgtcttcaccattctgaatattttatctcaaaaccccaaacttgatatcaacttttataggtaaaaatttatcatatttttaaaagtgacaaattggaatattttatgattgattttccagctgtacttgcatggtagactcctataattacgtataagccatatacaaatcaatcaatcaattacatgtttccggatatatttatatatgagcatcgctattaggcaccagtagtgtttagcatgtcgcgttgcaattggctaccaatgctccctaaagttattatattaaattatatgggacccgatatacttagttgaaccaataatgattttgacacatagaaaagtgctaagcaccactgataccttttagcatttctctttatatataagagcaactccaccataactactccatccacacatcaaatataatatatgtagttctttcaaatatatatatatctttatatattaaaagtgcctatctaacgggaattcttggtttaacgattctttttttttatttagccttaacgattaacttaacagact

SEQ ID NO: 330840 - DNA, 907 bp, Cannabis indica
cgagatgcttgcatgcaagccttcccgagatacttgtatggcttgcatgcatgcttgccgagatgcttgcatgcaagccttgctagggtgcttgcaagctttgcttctcgtcttgacacttgagtcttcaagtttagggacttgaagtggggatggcttcggccccatcaccttaaatttaatgacaaaacttagtcaatgacgtactttgcttgactaatcttggaacatcgcttcactaatttttaagtttaacaatcgaatttaaaccaatctctctcacttgagccctgagaaacctagactctactcgatctctaagatcgatcttcccttagaccccaaaatagttagtaaaggcgaataatcaaacataataaagcatgaaaaaaagagatacaaatacaaatattttatagaggttcgccctaaattttacgggtacatcctctttgagctcaccttgaaggatcgaatctagatctacactatcaatggtgtaattacaacaggtgtgaaatccaaaaaacaatgattgattgctatttctgttttctttctcactctctctattctcacttatcttcttctttcattacatgtacatttggtgctcacccaaactgggagcctctacctctctttctaactttctgatcatctctctaattttctcagactaaatggtaatataaggtctggaactccttttaaagatttttgtcttagtcttcaaggtatttaggattcggttgagctgagttgtaattctgttaaattctagcgagtagagcctatgggcctaagttgtagattttaattgggaaatttacatggtatattcacttttatcatttttttttacaaaaatactgtcagacggtaatttttacttttttactgtgtt

SEQ ID NO: 330841 - DNA, 789 bp, Cannabis indica
attttatagacaatttataaaataattactacaattattagaatttaaatatagagtttgttcattaatacattttaaagtttttttttttttcatttatactataaaatttgtataaattacaaatatgaggtgtttttcataaatgccctataatcgtaattcatacagcattccaacttaatttacaatttatatcacaatccatgtagcaatcaaaattaaaaaaacataattttttttttaaaaaaaaagatgtaaattaattaccgtacatggttaattcccttttaaatatttagcaataaatattcaaattaaaaaattaatatataataatatttgtttttgataaattaagatagaaagtgttatattttagtattatgattgttatttataaggttttaacttttacactactaatttttgagcttatcgtattgcttgtaaattcatattttcatattgggtcatattttttttagtatcgtgttttatagtattcaaacttatatttttttttttgttgcctcgtgtatgtttttccgtacctcatcttgcttatatctttcgtgctcgtgccagtttagcgttgtaccaaagagtttttagtccatacatattaatacaaaaaatcttacttttaatcacaacaaaatttgtgactaaaagtaaaaaaaattataactaatataaattattattcattgttatgactaaaagttccgtgactaaaggtattttgtgactaaatgtattatttagtcacaatacttgttgtgataa

SEQ ID NO: 330842 - DNA, 1046 bp, Cannabis indica
gtgactaatacttttagccacgtacttttagtcacaacacaataatgataatttataattagccacaaattttttttatctttagtcacaaatttgttgcaactaaaagtaagattttttgtaatgatatccttttctttatatattaatcaaatttatttccaaataaaatttaatttaaatatacttctttttataaatattgtactcaaattatcctcacactctcagataattaagacataatttcaaacataataaatttatgttatatggagatagatgtgtaggtttgtgggaaagtttaagtaaaattttaattagagaaaaatagagactatcgtcaaatgatatgggtaaaattgttaaaataatagaaaaaagagatcaacataataaatttttaaaaaaactgtaaaaatgaaagacatcaatttataagagttatgtagtttgtaatttcttcaaaagctcattgaccaaaattattcattcttctattagatagtatagatatattggtgtttataagttatactttataattttacacgtgaaaatgataagactctggaatttttttcattataagatgggtctcaattcacatgttataagatgaagaataaatagtttaaatagcattattctatatatattatttgtgatttcatattaatttctgtaaggtttgcaagccgctaaaaaaatagattagtaggatcataatctcacttattatttgattaacccataatataaatataaaccctaattattaattaccaataagcttatcaaaatatatattacatcttcactctttattgaaactcctgacatacgcttagccaaagatatgcttagccaaagattcttaatggggctagcaagttttcaaactcgatgagagaaggtttagttggcccactacaagaaactgggtctgtaacgaggacatctataccgaggacatgtcatcgttattagtgttttcgcaccagcgggaaaaattcgcggtttttttgtgggtaaagtttcagtac

SEQ ID NO: 330843 - DNA, 918 bp, Cannabis indica
attcaccattaaaaatttgaaaaataacaaaaatacacgaggataaatattttactatatattgatgtaaattttttcagtttatacttgagttagattgtttgggaactccagttcaactttttgacatctgcatttcatgaatttaaaaattgaagtcaggacattagttttatgcaaattaaactaaattttcagttgaattttaacttcgtagtaggttttctacactttttttcatgaattcgaaacagtccctgttttgattgattctggtcgtcttctcaagtgaagttgccagaattaatggtcgttctctttctggttgaattttttgtttcggttgtgttggttgtgcatgttgcgtagttgcgcgatggttgcctaggaagcatggatcttgggttgaaggtgtgtgtaagtggtatatatttgtgtaatttttttggtttaggtacatatttatttatttggccatctggaagtatttttgcaatattgttatttttttttggttaaacaaggtatgaatattatttttgaatggacgttttcatttaaaaaataaagagtaatttgtggctaaattatctaaactttaaggtttggtacgataaagtcctaaactgaaatttcgagggtaaaatcctccaaacttcaattatatatattctggtctccactttttcgttagtttttgactgttaaatgccaaataaacttactaatgtacatacaattggtacatttttattggtacacctcattataattatctaaattatttagaaaaaaaatattttaaaacataaaaataattaaaaaatcatcttaaaatataaaaataatgaaaatcaaaataaatgataaataataaaaaaaaactaatattttttttaaaaaaaaacccttaaaaac

SEQ ID NO: 330844 - DNA, 1039 bp, Cannabis indica
atattttttttaaaaataaaaataaaaagaaatagaaaataaaaggaaaaagaaaaagaagagaaaaagagaagaaaattatggatgattgattgatagaggtcatagtctattgacatgtagtgatgcatgcatgaaatgtgtgtgtaagtggtaaaattgtaataaaataaagttgaagagtaaaaatgtaagcttaaccgtgtggtagtattttagtaataaaatatgtattttgtatttttagtgtaaaaatttctttatttaaagcacttaattaattaaaatatttattaagggccaatttatatatttatttatagaaaactatatcactcacatatagtcaagtgagatcataaaggaacctaagtaatgggttcctcaagtttctattcgttctgaaatggtgacagcacatggaatttgtaattttatatcatataaaagtaaataaagaaataaaaaaaggagtgatcatatatctttgacattaatctatataactaacatcataccacaaagtaaaaacaaatacaaatggcagctacaaaaggtaatcattaaagtttaattagtcaatattaaaaaattattttgtttcaaaataaaaataataaaaaattacttcatatattattttttaatttttttaaaaaaatttacgattttggttgctgtagttttcttcggtgatttatatgtagattgccatgtagactttgattgcaatttaaattactccgttaattttataggaatttctatgtagaatttcgttaaaaaaaaaaaaaaaacaaacaaactatttaaagtttaaaaatagaaaacaatatagagaaaataaaaaaataacactacaaaaactagctactttaaatgacaaccttttagttcacaacataaatttttagttgattaaatagtgactttagttcacaataaaatagttatgtgtgtactaaataatagtatttagtttactaagttagttactagtttagttttaattcacaaaaataatcgagactaaaataac

SEQ ID NO: 330845 - DNA, 749 bp, Cannabis indica
caaagatcgatcttagaaaagacggtctttctctgcaattgatcaaacagatcatctatccatggcaaaggatacttattcgttaccgtcaatttatttagctctcggtatttaatacacacctgtaaggttccgtccttcttctttacaaacaaaactggtgcacccaaaggtgaggtactctatcttgtaaattttaagtccaacagtccatgtaattgaaccttcaacttttttagctctgcaggtgccatccgatacggaactttacatacaggctctgccctcggtatcagatcaatttcgaagtcaatctcccgctttggtggtaacccagtagttcctctaaaaagacatccaatcccaacaataacccgacatttcgaatgtcaatcctaacgccctgctatttctaaaatttataaccatatttaagtgactctattggccaaatgtcgcattctactgttaccgagcataaaacatgaaattcataaaagttcacatataacatatataatgcatctagcattcgaatatatctccgtaattgataaaatattttttaaggcctatttctgacaataagccttaatttttactaagagacacataatcacataatattgaattgtattaggtcgtattgtattgtattgtattttatgcaatatttttatgtaaaactatatgtgttataaacttttatggacacttaaatatataatattttagtataaattaaagtt

SEQ ID NO: 330846 - DNA, 713 bp, Cannabis indica
atcctcatgccttgcagctgcactcattagggttctggctcatcgtacgaggttccaaacttcatcttaatgaggtcaggatttactccttacacccaagttcacccgtcaatggaggttttgaggattttgagaattacaatatttataacaaaaatttacaaataaaattttgtattacattgaaaaaatcctacacaaaaattatggtgtacatatttttctaataaaaaatatataaaaatttctaacccaaatttttcataaaaaataatgattcacattcatgcaaaataactatccattcataatatatcaacacatacattaatgcataatatccaacatagtatttaatttatgtaattgtagagatggctctagcactatttgttggtttttagagttcgtatcaatgtcgcagcagaagcatataattcgattataggtttgaaaaaatttgttgaattcgatatgaactttaaatccttgatttcaacacaataaggattttacatcttgatgcctatcaagggattcttgtaactttttcgtataactgttcgttaatttatccaatccaatgctttatgggcttgatgaaaaattcacactagatcttttaaatcagcctcaacacttaggataatggtgagcttatagattaatgagataaataaactttctgattacaatgtattctcaactcatga

SEQ ID NO: 330847 - DNA, 1532 bp, Cannabis indica
ataacagaattacatgtatacatttgcgaatacgatgcgtttttttttttgaataagtggtaattttattaatacaaatcagctataacaatagcttgcaaatccgtaaggacaaaccccctaccataacgcatcttataataataataatagggaaatttgattttttatgattatatttggataaaaaaatttccctaaactcataataactaatatttgtaagatatcataatttttatgatatctctaaattgtcttccatttacatcactcccctctctcctcttctctttttcactcttatttccgagctcccctactctctcatcggaccacacatcggacattatcggaccccacatcggaccccatattggatcccggccccatcggacttatgtctcctacctcgcaaactcatcacattttcattcgatcccatcggacttacatcgggccccatcgggcctcatcggaccttgctcaaatcacagatctgagattctaaaaacacgaactcacttttgacattgtgtctaatttggttgggggtacgctgtgggtcgatggggtgcgctgtgggtcggtggggagcatcgtgggttggtgggagtgcgccgtgaatcagtgggggtctatggggtggttcgccgggagttgggatgttgaagggcctattgaacgagagagaacataggtgtagagagagaagtaggatttcaaaaatgaaaggagtattttgggatttaatgtaaagtgaacctatttttaaaattttctaaatgataatcgttactattaaaaaagaaagtgataataatggattgttaacggaaaaagaatctaatatttgatctgaaagacgtaaacgtattgtgtgaaatgagtagtaggtggcgtcacttgtatcattcacatcctcacattacattgtgtactttttacaaatttttctaactataattattagaaaataattcaatacgtcggtgtgggtctatagtaaattgtatactatcaccctcacatatgtatttattattattattttttggaaaaatttcactgtaatagatagggaaacttacaaaaatactgaaatttgggttaacttttacaaaaatactgtcacacggaaatcttttcaaaaataatgtatttttataaaacaccattaaaacacaaagcagaacaattcaaaacaacagtagaacaccagtaaaatactagtagaacaccagtgaaaacttaacacagtatactgcagtatgaaacttataaaaaagcaaagtaaaaaagtaaaaaataccgcctggcagtatttttataaaaaaataataaaagttagtataccatgtaaatttcccaatagatattatatattttaattacattaatcacttaacaattagtttcttatgctcacattgttccactaccatttttttaaattttattcatttgtaacttaataagataacattaaattagattacataataaatgaagtttcaaaaaaaaaatagaaa

SEQ ID NO: 330848 - DNA, 813 bp, Cannabis indica
acttacccgctatttccccttacggatcacgggactactgactatcacactttgggccataagcaactagtaaaactttgggttttcttatgctagctttaagtcctgttgtcagtgaatgaacagatagtggtggtgttgtattaacaacattatctgtatgtaaatgtggaaattggtatatgagcagtggaagcattggtaactggcaagggagtagtggttatagtttcataataaatggggatttcaataaaagtagtagtagggacaacaatgtgatgtgtaggggagttggcagtaggagctgcagtgggaattggtggtagagaattgggtagaatcatgatatttttgaagacgacttcctttgatcgatgcaagcacttgatatttccatgtgagaaagttgtgttcctcgagcttgatggacaatgaatgattaaatgaaatagggtatgattttggtagagggaattgatgattgttgtgcacctaagcattgttcaatcttgatgctcctcaggtattggctgttgaattctccattgttgaacgataggtgtagttccgataccatgtaacgatatgacaagaacagaaaagagaatagggagagaaacagagtgaacaagagattgaaagaaacaattgtattgattaagtgtttgtttcaaaagaaatatatatttatataaatatatatatatataaatatggaatacttcttaatggttattactcatgaatggttactaaaaaaatttaactataaatattaattttaaaatatcaaaccatcgaattttgatc

SEQ ID NO: 330849 - DNA, 708 bp, Cannabis indica
tctctctctctctctctctggggacaaatcaaaggacaatctcatgtgttaatgcaagtccaacctactcacatggggtcagagagagtcggcaactcggctcaccatgtctcctacaagactctaacaactctctctatatctagctctgacttactcttacgaattattcctggttttattaaatatttatgcatagaaaatttagaattggaaaagtaagtgagtggtaagtactaagtaaggggcaatgatatattattattatgttcggtcgtgcacaaaattaccaaatgttttattaattgagaaatgcgtaccatttgctcaaagtggtgagaagctaaaatataatatatcacatttaacaaagagtatcctctaatctttaatggtgtaccaaaaagtaatgtaaatttgatacatagtaaattttgtgtcaaatttggtacaatatttactatataaaatttacaccacaataaatacactattttttcttgtacatttatgttatttctattattttattagtatatttaactatcacattaaattataaaatatttatattattcttttattatcttacatattaaaattataataaaattaattataaaattattagattttattttttaatataaaacattaattagatataaattttacatctaaattttgtaattgtgcattggagcacaa

SEQ ID NO: 330850 - DNA, 1482 bp, Cannabis indica
aacctcaaggtatcttaaacaataaaataacataatatatcctaaaaatataaaaagaaacaaaaaagtttcttttaatattagtcgtctttttttagaaacaaaaaaatatacattgctcacatattaaaatatttttttttttgaaaataatgattttattatttatatatgtgtaaaattctgaaataaaatttttaatgtaaaagtaatcaattgatatcttattcacatcaaaagcaactaaatagttaccttttcaaagctcccaaaaagcaaaaatttctggaaacgagacttttccaattttttctattttcggtaattgttttgaatttcggtatgtatgctgacgtgacacaacggtatttgtgcaaataattttcttaaaggtatttttataaataaaatcaattttaggtataatattaaaaaaaacccccataataatattctataaattatacctaagttttttaaaaaatttctagtaatttataatgtgaaatataaaattaaaataattcattgcatacatttaaaaaaaggtaaattgtggcatacctaacgtttatttttagaggcaaaaatacttaatacaattctcttacaccgttactaatatttccgttaactcataaatatatatacctggagggttcagatacattacatttatttttattttattttaaaacttaatattcttgatatcggaaactaaatgctacttgttccaaaaaaaatcagttctcataacaattttcacatgatattgacacttcaattcgataatcatgttccatatactgcaccagttcactcagctatggtaatttagtattgcatctctctctttttttttttaaaaaaaaacaagtattatttaatttttgatattaagaatattaaattttaaaataaaataaataaatgtaatgcatttgaacactccacgtgtctatatttatgataagttaacgaaagtggtagtaacggtgtaagataattgtaacattaggtatttttgcctccaaaaataaacattaggtatttaactttaagtataaaatctgaaacattaagtatttatgccgcaatttaccttttaaaaaaaaatacgcatatccctaaaaaaatgcaactaattaattgttttttgaaacaactaattaattatttttaaacatttgaatactacaaattatttgaaaactttctaaaaaattaatagaataataactataaactccaaaggtaaatatattatttttgatattgtgatttgtaaaaatgatttattagatatttatttttgttattaaataaaaatttagacttttaaatagtacaaagtagactctgacctcaattttctttaatatttttttaataaccaaactgaagttaaattctagcacgaatatataaaaaaaaaatataactaattttgtcatatgttagattattattaagttttaa

SEQ ID NO: 330851 - DNA, 1986 bp, Cannabis indica
tttgggtcttggtatgtgtccgactcctggtttgagttcgagtttgggttcgggttttggtctaagtcctagatctagacattgactacttgtcgggtccaagcatcgagttccgaatcccatgtctcgcggttggtcctaggtccatgtttgggtctggggtcgggtctcagatccctatccaagttctgaggccaagttcttgtcctagtttgggggcccaattcccaggtctgggtcccccatctatgttcggttcctaggtcccagttcgggtccaacttcgttttcaggtttgggtatgggtctagtcagagtccaaatcttggtttgggttcgggtccgagtttgggtcccagtcccagtctggtccgggtttcgggttctaggtctgagtcaagttcttgggtcctgggttcggcccttatttttgggtcttggtttggtgtgtacctaggtcccggtcttggtttaggtcccaggtcacacgtcgcggtctgggtccaagtcccggtatggttctggtctgagtttgggtttagattttggccttgttacggtcttttatctgtgttctattcccagtcctagtctgattccagtttcgggtacgggatcaagtcagacatgaacttgggacccgatcccacacccaaactcggacctagacatggatctggatacgaacctagacttgaaccctgacctagacccatacccactaggatcgaaacttgggagttggattcggaccgagaccaagacccaaacctggacccgtacccaagacttggactcagacgtggacccaaacctagatccagaccgggatctggacttggaccaagacccaaccctaaactcgaactaggactcaaaccctgacctagacagagacccagacccaaagccgaacccagacacggaatcgaaatcggaactgggactagcacctgaacccaaacatggacccagactagtacctaggacccggacctcgatgggggaccttgacccgggcctcagaacacagacccggatcggaacccgagacttagacctggacctaaatcaagactcaaccacaagactccaacctagatctagacccagaccgggatcagaaactcgaacacgaactcggactaggacttgaaccccaaccgggtcctagactcggactaggacctaggaaccagactaggatggggacctggatccgggacccgggctttagaaactagcgccgagacctaggacctgaccccggacacagatcctaaactcggactaggaccaagacctaggacttgaagtggaactagactgggacttgagaccgggatcctgatttagacacggggcttaaacctaacccatagttgatgtttggatgtgggacccatacccggactaaaacttagacccagactcaaacctaaacccagacccagacccagactcagacctaaacctgaacctagacccggactcggacctaaacccgtaccccgtgacctgaaactggatgcggaactgtaagcgtaccgggacccgggagcaagaccgagggactgggacccagtctcattcctagaactagaatctgactaggaccaagacccaaaccaggaccgggacacggagtcgaattaaaactcagttcgggactcgggacatgaaccctaaccaagacacagacttggacccaaacctagacgcacaacccggaccgggattggagactcagacttggacccaagtcccagacatagattggggaaccaaacttgaaattagaaccaaaatccaaacacaggagtgggattgggatccaagacccgaccccaatttcagtcctcgacacggactcagacccggacacgaacacggacacaaacacgaattaggaccaagtattcgaatcggaacgagacggggacccaagattgggatccaaatcttgacccacgacccagggcttgg

SEQ ID NO: 330852 - DNA, 886 bp, Cannabis indica
tccacgatctcttgtatgaataaagcttgatatcaacgtgcttagtacgttcatggtgcacacaattcttagttaattgaattgtactctgactatcacaatgaacagtaataaccttttgagtgagcttcaactcctccatcaacccagttaaccatagtgcttccttgatcgtttccgtcaaggtcatatattctgcttttatttgtcgacagtgccacaaccttctgaaggttcacttttcaactaatagttgtttgaaacatagtaaatacgtatccggtcaaagacttttgggtattaatacaccctgcataattagagtccacataatcattgataacatcagtcttcattatagttattcatgccaaataccaatccattctcaacagttcccttcaactaacatagaatctatttcaaggcttcccaatacttcttttcaggattcccatgaatctcattaccatgcttagtgcatatgctatgtctagtctactacaaatcgtgacatacatcaaggattcaatgacactagcatatggaactctcgacatctttgacttcccagtttcatcttttggcatttgagtagcacccagtttgaagtgttgtgcaagcagagtactcactgccttagagtaactaatttcaaaggtatctagaacctttttgatgtagctagtatgattcaagtacagtagtctttttctcatttcccttcttatatccatgcttaagatcttactagttggacacaaatccttcatttcaaacttcgtctttagttggagtctcaagcacttgatctcttgtacactctttgtaacgccctaatctatagggacgccacgtgtgtgattttataaactagtttaatact

SEQ ID NO: 330853 - DNA, 1312 bp, Cannabis indica
ttgtgtacaaatttagatgggatcaaaattacacttccactagtgaattaatggtactaaaagataaagaaataattagaatggtaaaatggtattttgaccaaaacaattacgaacaaaccgatcgagggctaatcatgataattgattatattagtggacgctgcagtagaactcaataaatataattctataattactaagagttcaatttcatatttttggtggagtaatcatggaattaataaacaaagattatttggttgataaaactcaataagtaatctagtttattggagattataattataggtccatggtctctgaatcgccaacttgaaacactgtcaagggaagggataaagagtggaataatactgtttagaaaaatcttttttgaagtggcaaaatagtaattatttatttttttaataaataaataatttttcaaattaattaaatagggaaaagaaaaaaactgttaatacaaaattacaagattcgttgagacaaaaattgttatgagaaaagacacaatcgttgtcctaacaagacttggtagacgcctatccctatgggtttgtatttttaggttaattaattatttaattaattcaatcccatacttatttaaatttgaaaagtggttaaaaatatttcaatgttggtgagatattctctcaagcagttgagagattccctcataaatatctatcaacaaatttgattatagatatttatttattcaaataattaaagatgatttaattaataaggatttatcttaatggcgcagactattccttgtgtgtggtggatcaatttggaagacaattgtgtgagcccaattgcatcatcttcatcatctggattaagggatacaacatacaggaagtttcaaggataccttgatagccttcaagaggtacatgttctaaacttactatttcatgttttgatttaatgtacacatatctggagattcattgggctatggtacaatgataatcagtaatacaaaactcttccattgtgtacctaatttattaccataaagccaacaatgaatacaaatagtttgtaccccctgaagttttactaacctttttaccatatgcacttaaaaatattagtttttatggtccatatcatagttataaaagcggaattagaatttcgataaatattttttatccaacataaaccataagccaaaggttctcaacataatgaatatagattatatctaatccattgaaagaaattcaattatctcttgatgctcatcagggtatccttgattcttttcgta

SEQ ID NO: 330854 - DNA, 1689 bp, Cannabis indica
ctttctcctcagccaacttcattccctctcagctttcataactctttcctcaacctctcaacttttgtcaccagcttctctggctttctcctcagccaatttcattccctcctgtgctttcataaccttttcctccatctctaatactttttcattaagctttcctgctttctcctcagccaacttagtctcctccagagctttcataactctttttccgcctctctaacctgttcaacagcttctcttgctttctccttagccaatttcgttccctcctcagcttttataacctttccctctttctctcttacttttccacaaagctctcttgctttctcctcagcccatttagtttctttctcagctttcataactctttcctcagcctgtttaactttgtcaccagcttctcttgctttctcctcagccaatttccttccctcctcagcctttataaccttttcctctgtctccaatactttttcacaaagctctcttgctttctcctcagccaatttagtttcctccagagctttcataactcttttttccgcctctctaactttgtcaccggcttctcttgctttctcctcggccaatttccttccctcctcagcttctataacctttccctctgtctctaatactttttcaccaagctctcttgctttcaactcagccaatttcattccctcttcagctttcataaactttccctctgtctcttttactttttcaccaagctctcttgctttctccttagccaatttcattccctcttcagccaccttcactctctccctcatgatctcataattctctcttgaaattctactctcactactcactatcctcagcctcttgacctcaagatgaaattggataatctcagactccaactgagtgatttgtttcttcatcttgttttctctattgatcagaatctcctcaacccggtcaaactcagagatcctgaatgccgatctgagattacaaatgagctcagaaacgctcagttcttcgtcatcactttggtccagactaaaattaggcggagactcaacctccataatcactgtcacaccaaaacccacaaaaaaattaaaaaaaaaaaaaaagctttgagtgttctatctaagcaaatgaaaaggcaaatgatatagaaaaccatgatttttagatcatttcctaagtttaaaaacatgaatttctcaaaaatcagatcaaatcttcactacaaagtatcaaataaaaagcaacaactatgattgtttgagcatttcctaagtttaacaacatgaatttctcaaaaatcagagcaaatattgagtatcaaatacaacaatgtaatgcaactcaaataaatttagtataattgttgtgaaaaagttagggaatgataccaaaggattaggagatgggatcggagtggaggtggcgtcggtcgtactcgtcggagtgaagcgtagcgtcacagtgaagttagggctatttcccgaacagtaacaataacagtaaagaatagtaaaaaaatttttgtatcttaagtttaaggctaattagcaatttttttatctgaattttgacatgtactaaattatgcccctttaacttttttggccattaaagatttctcttgaactattaagattgttaaatttaaagacttttatctaattttagtaa

SEQ ID NO: 330855 - DNA, 3279 bp, Cannabis indica
aaataatttccaacactactctcctgggcttcttggcaacctcagtctccaccatttttccattgcgctttcggtctagaggagggagaatttcaccttcttcttcttcttctacctccccatcctcgtcgattaaaacgacttggtccaagggaaagttggaagaggacctcccgggagtcaccgtcgggtcttgtgcttgaggcaaaactgggtcaggagtgtaggtttgggcaagagcatccaagatttcatccattggcttcgctgcttaaagagagggagttagaacattatcgagaagtcatgcatgcaagaacaaagtcataaaactaacctaccctgacgatctaattttgccctagcaaaagcatgcattaaaaggctggtgtcgtcgtccccaagaaagttgtccgaggggaggaaccagctagaagataaataggccgaatgatccaaagggataggtacgggaggaccggatcccatccgggatcggcctaaaaagtgacctaagttggaaaaataaaaacccttggcatgatcaccccatcgaataggaggcatcctaaacctaaggagatgttcatcaaactctactagcctacagccagaataatcttgaacggattagacgtgatgattaattaatggggacttaccaaatccggaggtactagcatcaggagccccagtgttgggaatcgggaacgaaagcttgggccgggaggtcacttgctcttttcaggcctcaatccaaagaaccctcctggcggcagtttgggctttgatgtaagccaattcttgttccctcctgaagaggtactttatataccggtcctccacggaagcaatgatgtccgcccaaagcgccttctcggagtctgggctctctgtgatcaacttggccctcctacagtgtgcagtcgtgaccaagtccccaacattcagcccatccttgtcgtacgtggaaaagacctcggcgtgttgaaggaaaagttgtgtagggtggtgtggtgcatcgaaggtaccctgacccactccgtaagcagcttcggggctttatggcttggaagccagacgagaagaaaaaccagtgacggtattccttaacatttttctgaatattaaagggaaccggaccctcattagtaggatgggcccgaagtgtgaaaaaattgtctttaagtttgtctcccttcttggggacggatacaagttcataaaattacaaaatttcagccgggctaggcgaagcccatcctctggcaacagaaaagataaataagcgtgaaagcatgcgatatgcttgggggataagttggtaaggcgcaaggtcaacaaaaactaagaagttgatgaagtaatcctgaagtggcaacattgcttcggacatgagatgagtctgactccaagctctgaagccaccatagttacgattaggcgtctcctcatctcttggaagacggtgaaagactccggaagcggaaggcttgatcccggccacggtgacaatcttctctagttggtgggcgcaggttagagttgaatgcaactcatcagcctcccagccagtagattggcaagtatatttctcctagaccacaggtcccttcatcacctcctccaaggtggccaaggtgttagatcctttgctcgaggattttgctccggtagtggggaaaaacatgtcttgagagtagtaagattctaaaaagagaagcccagcagttagccctcaaaccaaaccctagcataaaaagagggaatgggggtcccctaaccgctggaaagaggccccctccggatgtctgccagaaatgaaaaatccaaggattctcctaggcaaacatcaggtgcaaatatcccaaaggcagcgaaagcaggaaggactcgagtatgaaaaccatttcatactcttaacaatctaaaagcaaaaaaggttgtttggccaaatgaaaaagtagagcacagaggaaaagatacgtagtacgacggtcttctccaagatcatctcatcgtagaaatcaaatgcaactaaaaatttcaaaactctgccctaacatgcaaatgaacaccaaaagaaaaatgtacccagaaaacttacataaaggtcgagaactgggaagtggttatgatcgacggtagaatgcaggctggcagcgacgaagaaacaacaacaagaaatctatggtttctgaaattttctcagaggttcttgggtcgaaatggcgagattgcgaagtaacccaatgttgagaaaatgctggattttatagaccaaaaggggtgcaaggcagctgtgatcagacactaccgtacggtgagaatcgtaatcgattcgcattctacgaatccaacgtgtgagattaataggtgtgagggcggttgaaaacgtttgagtacctttctaacactcggattaaatgcgccggtttttcaatggacgggaagcgaatcgttgtttgcaaaaggaaataaatattaatgatggccatcataaatgcagtcaacgcgcctaaagcccgtgtcgttatactaacatactaaccggaggcatcaagcaagcctcacttaccctttgctaatgaggcttggggggtaaatgttgcccttgatttttcccaaaatacgtggacgcggataaaggtgacacgtggatctggaagaacaatcattcatgaaaatcagctaagtcttagacaaaaaaggaacacctcaggaaagattcctctcggaggagggcataagacacatttttactcttcgggaggctagagccttgctaaggcagtttcgggaggtatagagattacttgaacaatcactttgcatttaatgccacatgggggaagatgtattgaaacctccataaaggacatgactgatggcgtaagccccctttcacagcgattacactataatcgatgagtctagtgacggctgcattatgagaaatcacatcagttaagaggggagtaaaagataataatccacctaactcctaaaatacttacgatatagggcgatgtatttcctatatttggaaaaaacgggaaatatgtgcccctatgaagctaacacagaaagacaagtgatccattcctagggatcctctcagaaaaaacactataaataccccacaaacagattgaaaaggggtcgaacaatttggtttaaggaatcaaagagagaaaataggagagaaatccaccaagaacattctctgtaataaatactctcattaataccaaagactcgtggactaagcttcattaa

SEQ ID NO: 330856 - DNA, 1434 bp, Cannabis indica
aaatgagttttatttagggcccaaaacccaacaacacccaagtcgcttcttcaaccttgctgttcctccatagcactatagctagcgaaatattcttgttccgcaacactttttctttcttgtccagaatttgttggttgttcatcatatgacaagtccatttgaagctcgatatcttcatagcttaaaacatgagtcgtatcaaatacatacttttgaagcatcgagatgtgaaacacgttatgaaccctagataaagtagcgggtagggctagtatatacgctacatgacctaccctttcaagaatctcaaatggacaaataaatctagggcttaactttcctttctttctgaacctctgaattcccttcattggggatactcgaaggaaaacaaaatccccaacctggaactcaatatctctaggctttggatcagcgtagctcttttgtctactttgtgcggcaaacatacgagcttgaatcttctcaatggccttacttattctttggactgcctcaggtccaagatatctacgttcattggcttcatcccaatgaatgggcgaccgacactttcttccataaatcatcgcatacggtgccatgccaatagtactttgataactattattatacgagaatttgattaaaggaagatacttgttccaagaaccctcaaaatctaatacacacactcgaagcatatcctcaagtatctgaatagtcctctcagattgaccatcattttggccttcactatgattcttaactctttaagtcataaagaatatgaggcacatattcgagttttgaaagaaaaacacaaattgggattcaagacttaccttggtcagcctagaaggtcttgcgtgagacctggctggccctaaggcttaagcatcggagttggccaactttagggttttaccctataaagcttgcctattcatgcctgggtttggtgaccctggccagttcttggctgagtcatgggaccttggtcaaccctttcaaggcttggcaaccttggctagcatgtgccttggttctaagtgggtggccagttttttgttctcttatgacttcggcaagagtttggctctgtaggcatatacaaccatagcctcatacgtgttttccttagaaactctgtatgaggcttaatggtgagcgtattgtagttgaatgttcaatttaaagctcagcatggtttagttcctttaaggaactctgccttagtcgtagcccgatacgtggcccctataagagctttgtccaggtcttttctagctatacagttctaggagggtgttggccttatgcatgcaaaccaatctcatatccggcctcaaggctttcatgttcttactttggcctataggccttctatttttgaacactactattatttagccttgaagccatctatga

SEQ ID NO: 330857 - DNA, 1195 bp, Cannabis indica
agaccaaagcaagtgtttctaacgtgctttcctttgaatcacacgcttcatggggaaatttcctaaatgaaaccaccccaagtcaaggacactcaaccatggagttccttcatggtgggctatcaaaacaagatgcttcttgctaacataggtagtcccacaactacataatctcaaaattactacacaatcgccaccttcaattcacctaggattccagacattactcataaattatcccacctttgctaatgctagatcacttctcagtggtccattaactactcgtgtcttatattccacttaggaatactaacaaatttaactcatattgtaatttttctaatctgtctaccctgtcagatgaactacaactaaataacatacaaacagagtcaatttagatattttgatgtcccccattgagagtaaaatgtttaatagcaatataaataaaaatagcaattgtaatatggtccataaattctaacatgagtcagtcaaaggaccgatatccgggaccccttgaatcataattagcacttgggcaggacctgtacacttttcttctataacatcaatctttcttaactgtgggcaggttcttttcaaatgaccctctaccccacaataacaagattttgctctacattagccccaaatggcgcaattttgcatcttgaacactccggataaggtcgtcatttcttattctcaccttgactgctattctggtcaccttggaatctttttgttctatcccatgattggtggttcatttagtttcgccttttgatctgatcgtgaattggttccacgagtttcaccacatccagtggtacaataagaagtgtcagtggtacaagaatagacacaagacgagcttgttgttctctcaaatcttgggtctattttcccttgttgtctaatcttattctgtatagtagaatttatatgtttccagtattacggcaataaagcattctcttccttactgccctagcccaaataacttgctaatcaggctattcaattgcccttactgcataacttatacacatttagtccacatcttctaactatttagaactcagacggatatcaatatcaatatgcatataccatacacatattctttcataattatcactatactactttttcaaacataatttatagtagtctaggtaatcta

SEQ ID NO: 330858 - DNA, 797 bp, Cannabis indica
aggccaatcttgccaatcgatcagactgagttgtgtattcgataacactcatattctccttctaggttagctgagtaaattcaattcttttagcacttctgatcgcttcattgtaatacttcgcattgaacaactcctggaacttttcctagattatagtggtaacatcacaagttagggacaccatgtcccaccaaactagagcatcttcttgaaactggaatgtggcacaggccactctgtcactgccggtgatgccaatgaaattcaggattctaataataaccattagccactgctcgactttcataacatcgggacctcccagaaacactggaggtgcctacttgcggaatctttgattcagtggttccatttggttcactgcaacaactagtcctacctgcacagttggggcgggagctacctgaatttctggagtagggatcgctggagaaccctgttgtctcaaacatctaatgtcttcattttgctcattaattctggcttgcatttctgcaaacctatttttccattcctaggcagcctgcggcgggtcgacatcacctcgaccgcgtgccttgcctgtagggcctctgcctcagtcacgaacatttgggggtatctgaactgttgggaatgttttactaggatctagatttactaacaagtatgttgattaacatcctaaatatgaattctctaaaataatgaaaataaacacataaaggtttaagaaaaccttacattggttgcagcgcaatataatgactccttccgttcaagatctctagccc

SEQ ID NO: 330859 - DNA, 889 bp, Cannabis indica
aaaaaaatattaatgggtttgttgttcataaaaaaaaattgtaatttaatatttaatgaaggttaattatgtaatttaaatagagaaagcctagaaatattctcactttgtagtcatagaagattagaggacaaaattaataaaaatccaacctacgttacatatccatttccaaaaataaataaataaataaaaataaacttacctgacatattgatattataactgaactcaaggaaagataattcaaattaatcctactgagcaaaaaaaaaaaatgatcctactgagattatttacaggacaccagtttttttatttattattattcataagccatattgtatttgattattgctggtcgatttttctcttagaagagaaaaaaaaaatagagtttcattcaattgtaaaattaaaagtgaaaaaatacaattaataaaaaattcttatataggcaactgatataaaatactaaaataaaataaaagattaaaataatcttaaataattatttaacaccttccctcaaacttacgatgctgctgcaagaagcattgcaagtttgtctaaaagaaaacgaaaatgagaaatcgcatgtgacttagtaaaaaagtcagcaagctgcagcgaggaacaaagggcaaagtaatggtgtccaatttcagatagtgacgagtaaaatggcaatcaatctcaatatgcttggtgcgttcatgaaaaactaattgtgaacaatctaaatagcactttgattgttacaattacataggagtaggacaatctaaataacacccatatctataagtaaccatctttaaccaaacaatctctttagtagtagacgtcatggcacgatactcaaacttccgtagaagattgagaaaca

SEQ ID NO: 330860 - DNA, 1043 bp, Cannabis indica
attaaatatatgtaagtatagaaaatcaaatttcccttaatatattgaaatcgaatcagatcagattcgatctgtaaaaaaattaggcgggtcagaacaaatctaattaaagattcaataggtatccaaatattttttgacatgcctatgggttagctcaggttctacagaattttccattaacataatctaacataaataagattcatggttgttgtaagtccaacattaaattatacatacataaacaaacagaaatttacctaagcatacatcaaattaaacaaacaaagaaattattctcatatcaaattactccattagttctgcatcaaccatctcctcgtcgtcgatgccaccttcaacttcaccttctaaaagccattgttcaagctcgtcctcttcgtcatagtcatgcatgttcaaaccatcagagctatcccattgttcgaaaccgagctcctcaccacggcaagctacatgtaggaatggtctattccgagccaaggcatctaccatatctctatttacgatccctgtcacccccagccatctcaatcttggaaagtaaggcctcttcaaccaacggaatgaaagctgtgtgatgccgccacagttatatacatctaatagccgtaagctattgccatgccacctctggtcgtcgacttgcattgaggccaacgccatgactgaagtgtcaccaatgagaggacactgtcgcaatctcagttcaacaattggaatacgactttttgccagtaacaggattccattatcagagagatggggaagattggataggtccaactctcgcaactcggttattggacagccctcaaaaagagctgaaatgaatttatctgtaagctttttgcaccctctaacagataatgacacaagggactgtataacacttggtctcaagaatgataatcccatatcactaatatcagagccatccaacagtaaagattttagttttgtcagattccttatggctctaagggcttcatcaccaaggtttctgcagcatctcaagt

SEQ ID NO: 330861 - DNA, 806 bp, Cannabis indica
ccacaatttcgtaaataattacaatatatttccaatttaactgttcatgaaaattgacaatgcatgcatacgtcccatcttcaaaaaaaaaaaaaaaaaaaaaagatttgctttcgatcagtgcatccatggaatctctataatatatgtatctagctactgaattaatttaatttatgtaataattaataaattaaaatatttgaaattaaatatgatcagttcaaaactgggaaatatataggcctgtttctattttaaacatgaactaactgtagcatctctaccttttagcagtatttggctggaaagtgtttctgtattttaaacataaagaataatactgataaggagctctatcatttgacatagtatcttgtttgttgttagtacactttagtataaactcccacatatcctaattaatttaacataaaaaatataaaatcttaaattattttacacatatcttaattgtaaataaatacataaattaagaccgatcagtaaaatattattagactaaataactaagagtgttgtgcactataggtgttgcatatatagtaatgcttttatattatcattttttggtaatttataactacaataaaaaaaaatgtaaaattttcgtcctcaatgatttattaaaagaccctcttatattttgaaagagtataaatatttttttctcatgatattgatttctacatgtgcattacacaaacattatagtctgagcacaagaccgtcttaaacattttagaggccatgttctaaacttaaattttaggcccctaataaaa

SEQ ID NO: 330862 - DNA, 520 bp, Cannabis indica
aatgtcctcaatggactttatgttgagtacatcaccattgtagctttcatagaggcacaaaacaacctcacactagtaaccttgcaagagctcaaagaactcttctgagttttgaaaaccaactcgaaaggatcgatggaaatgaaactacaactatgacttagaatccctcaagttctgcaccaccatctacagatcttgctcacaaatataatccaaaaaacaacaatagcaatgcaagcaagagaccaagttaccgctctataattcaagctacaaaggcagaggttttactccaagcacaacaaaaggaaataatggttgtggaggaagaggcagaggtggtagaagaaattcaaactccaacatgctaagtttgtcttaggtatagacactcatggacatattgatgagtgtacatttgtatactcattcctagtcatttattagatgaattcgtatttatttcttaaaattttgtataaatttgatgtgttttctctaagtgtgtaggtttgtg

SEQ ID NO: 330863 - DNA, 1017 bp, Cannabis indica
attcattgaaatagtttgtgtttcttctaatttgtattgtctttattcagtaaaatttcaccaaacataaccccacttataaataataatattgcttaactgttatttgaattttggcattgatctgcacaaatgaagcgtataagaatgacttcttactgagtgtttttattagttgtcattctacaatgtaaagatgtcaacttattttggttttatgaaactccatacacctttatagttcttttttctttttttgataatggacacctttatattcttaagattgaacaaaaagttaacttttatagtgtgcttgggggttgagattgtttatttagtgtgctttgcataaaattggggtatgttaatgttattttataaactaggtaaggctcttaatatttaggactgcttgtaattccaagtcccacaccacatgttctttctcaatatgtactatataaatacattaaccaagtgaatatgtatgatcagttgatcaaaactacttttctacaaagtaactatatcagtactcaatcatttagacatatattatatatttagtacacccctttaataaatgtcatatatgtatcagttataaggaggaattataacacctggtggacctcaactatggacaagaaaaactcagagtttgatatcgcttgtgaatgtaattgggcttagtgttcatggttataggactattaatggacgtgaaaaaggctggtgagacgtgtcttgttgtaataccatgaaattaagaaatggattagcaaaatcctaattagataattataaataattgaggaattatattattatatagttcaatatatgtgaattaatatgaattttaatatgttaagaccccgttggtgagccagaggcattttagtaattatgacccgagaagggtaaaatgatgaaatgaatttaattacgtgcttaatagaactatattatcatatagtatgcctgcgttgtcttttcaggtgtgttctgaca

SEQ ID NO: 330864 - DNA, 1131 bp, Cannabis indica
ttattctcgcacaattaatattccaaaaaaattaaatgctattttactctggatattacaatagtgggggatgacactgagatccaaaacctccgtgatgcccttggactcatgcaaggccataataacgccttgcatcatgatcaggaggatcttcttgctgctataaaccttgcattcgatgagcagcgacatcagttcattgagtggagggatagggagatggaagcattgaaggctcaacaagcagccattgatgaccacgcaaggtaggctaccgtactgatacggagagcctatcaagttgctaatcagccattggatttcgtggtgaaaaacataatatttcagttcggactcccgcacaaaatagtctcaaacaatggcacatagtttgacagtcaattgttcatagatttctgcacgaaccatggaatcataaaaagtttcttcgctgtggcacaccttaatcaaatggtcatgtcgaaatagtcaataaaacacttaaagaaactttgaaaaaataacttgaagaagctaaggggaactagccggaggaacttccaaaagtcttatggtcgtatcgctcaactaaaaaaacaacaattggacagactccattcgcaatggcatatggatatgaagctatgttgcccatagaactagaacctccgtctcatagaagattgacttgattgacttatgatcaagaagctaatcatgctctcctagaagaatcacttgacgaaattgaagaaaaatgagcctcaacaaacctaaatttagtacacaataattatactttttatacaattccttcactgtgattcacattattaggttttagttttctttgttaccgttttattgccttttaatctcatttaatatcgatttcaccttgatgatgtagtttagggttgagcataaaatcccaccaaaccatgattcaaaacggtcggttttgagataagttttggattggtcggtcggttttcaagttgcaccaataaagactgttgaccgaggtttttggcaaccaataaaattatagaagattaaagagctgtaagaaattaagagaaggatttttacgtggttggggcgttaatgagccttagtccaggagtc

SEQ ID NO: 330865 - DNA, 1344 bp, Cannabis indica
aaacccaatctatatgaaaactctctataatactacgataagtttaattacaaagatatcattaagcataataactaataaaatcatacaaacaacctaaatactttcgtcctaaatcaatttgcatccataacaatcaaaaaatattcaaatctcacattccagaattttgattcgaattcatagataacaattatagatgatcagtaaataaatgtaaaattaaaacagattgtatggaattgaataaagagaagaagaagaaattgaacattcacattaatccataaaataaattcaagtggttcacataataatccttaaaagaaaattagctactaaaagtcattctaagaaaatagaaatcctattaaaaaaaacataaaagatagagatgaaaagatagaacaagtcttccagtagtgccttctgctcctagccttcatctatgcttagaatttgctaaattttttaacggtattagatttaagctctcatcccttttaaataaaaaattaggaaggtttctcaaaatccttcaatgcccaaaattagtctccaagttcgaatgatataggaaacctagctccaactcgttttataaaaaaaaattagaagttttccgttttcaaagagcttcggctctctcgttttttgatttcctactatgatgactaacagtattttgaccataactctattgataaagatcagaattagatgattcaagatgtttaaaaacattaaaagagagatttagaactttcattcagaaagtttttcttagaagtaaatggatcatagttaaaaattagattgatgcttaagactttatttttaatcacaaacggagggtgttgagcatctaaaatttagaatttttcacccattgtatcttataactccaaaattcacgctaaattcataaaattcatattattagcattttttctcttattttaacccacatgatataattaatcattaaaacctgaaaacaaattaaaaaaaaaaaaaaagcgtaaacctgaacaaaaataaataaaaattactaaaacacatactaaagtggactctaaaaatacattaaaaataaatctaacactagctatattaattaggctaattagtaatttttcttcccaaactattgagattgttaaatttaaggacttttgtctagtttcattcaattttactatttcagtaattgtttatgtactaaaccatgctccctagactttgatatctacaaaatcatgcccctcaaactttaatatgtactaaatcatgcacccttaactttcatccatgttaaaaaaattttactaaaattagacaaaa

SEQ ID NO: 330866 - DNA, 1266 bp, Cannabis indica
gaaagaattttttctccatggcttataatgaggaaaaagacaacagctgtcctgaagagactaatcgtcgtcttggaaaagagccaatgggctcacggaagccacccacttcaagaactacgcgttcaacacgttcaagaagtaaccaatatgataatgatcaaaacccagaaattgtgaggaaatcaatgctgacactgagtatgtgcctaaaagtgaggatgcctatgatcccactaggtacgtaccattggttgaattggaaaatcaccaactttgacaacgtctaaccgaggcaaactaatgaaaccctgagttggagagagacgcagtcgcagccagggcgactcaagaaaacgctgcagaaaaccaacctgatcctggggtgagaaggccgcgaggaagacctcgaggttcaaaaacccgaaggcaggagatggctcaggaaaacccccacaacacttaggaggagcaacctggggaaactggggatgttccagaaggtgaacaaccaaagaatcaggcacttcatcaagaagtgcctcagagaccctgaggattcacaacccaagggaatcaaaataatgacttatcgaagtcttctcgtagaaatgagaatgcgaggaacctaggactaggggccaggagatccctcatgctaacgagaaagatccaaggactcaacctaggacaagtggattaccactgagacaccgtcaacgtccttcttgcactaatagggaggaggcgtatacacaacccagcaaagggcatgtatcaaacctttcctaaaagagaaggcatgtgcgtgacggggcaagttctagctcgtgactttcaagatctcgagatcatagtcaatctacacgaggaggggatagacatcgacgtggtaatgatcgagaaagtatgagtcatacaaggagtagtcaatctgagagttactcagatacgaggtccatgagcaaccatgaacgaagacaaccagatcttcgtgaacagttgaattggagacaacttgatttgtgcgggtgcttaaatcagaatgctcctaatttacgccaacaactcaataccaattgaaaccaagaggatccaatccaattgtgaatcagtgagctagaaacaaattcaagaaattccaagatgggaaactgcctgattacgactcagatgaagagctcgaacctttccatccaatcatatggactctgaatttcaccaaggatttagaaaccctctcatcttgccatacgatcggactat

SEQ ID NO: 330867 - DNA, 631 bp, Cannabis indica
acaactaatatattgtttaagacgatgtagccattcttatgaatggtaccagcttgttagatatttaaataaatgataaggatatgaaggagtaaataagtgtattctcttaatttgttttagtaatagtgtagtataatacaatatgatttcaaagttgttaaaagaaagtgatcaaagacagattttatcctaagagcttgatatgcaggcttaaagcttatatcattgtattaatttccattttatacaaatacaaaagttcatataatatatctacaataaatacaagaataaaaaactatatataactcatataaaaataaatgcacaataatacaaaaaaaaaaatccctttaaaaattataaattttttcctatttggttcgggttcgcggtctcgattccacattcaaacaaacaaaccttatcaatgacactatacaaaatgcaaaagcggcatctttgagtttgaactacacacaaaaacaaaaaaagaaattttcacgaggcacctaaatttagaaattatttataaaaataactttatttttgtgagtaaaagagatttttacatatcatacccttttttctatcttaatatcaactataccttactcaatctaataag

SEQ ID NO: 330868 - DNA, 930 bp, Cannabis indica
aatcatagtgtggaagattgtgaagaatcaaacactacaaggagatctaagtttagatcttgttattactctacgatagaaaggaacaagggttagagatctaaacggaaggagccataacattctgctaccaccaatgtaagtttttctaaactttatatgtctttattttcattattttaggaattcatatttagggtgttagattatggaatataatcaaacatacttcatagtaaatttagatcttagaaaaatatattccaacaaactgaccttgtctctctcttccattatttccagtaagccccttgttcatcctctgaagatgaaacaaggtgacagccgacattcttcaaaacttcctgatgcttcacctcagaatcaacttgttctttctctagaaggacattcttctctttgagctcctcaacataagattcagccttcgcaactgcagccttggccatttcaaattctttctcagcctttatagcaatatccttggcctcttcaacctctttgttggcctacttttgaaattcgtccaaagctttcttaggttctttaagtttggttgagaaatcaacctcaaagttcttttgtttgtccaaggctgccttgatatcccaaattttgtccacctgatgaggcatgtccacgcaagccaaacacagagtacaggtggagtgaagccttgctagtagcaaaacagggtctccatgcaaggtataacaaaactgtcaagaaataattgaatggagtgaagtgagccctcaagcagcttgtaaagcccgctaagtttaatttgggaattagcagttaatcatgattaattatgaaaaattattcatagctatttaaataatttattatactgttatttatggaattcagaaatgcatggttatgtcattcagtagttttcat

SEQ ID NO: 330869 - DNA, 1096 bp, Cannabis indica
taaaataatttccaacatcaactccctgtcctcaagcctaattgacatagacttaacccatcttttggagataactaattcccaccaggtaacaggtttccaaaccctgtttcataactgtcacacgacctatccaacctatcagttaccctggccaccatataagaatgagtggctctgatcaaacaagagtaaaaagagttgttgattgaaagttgacatgtcactactgaaggactagcttcagcattagcctgagtaagggaaaacacccttgttggagcgagctttgcctctgtcttatgctcttctttctttaattacgggcaatctcttttgtaatgtctagttatagcacactagaaacatgcttggcccttacacttaccctgatgatgcttcttacaactaggcactctgggtaagtgtatcagctctctgaaccaccctgtcaattgccacagccttggttccctcaaaacctcttgtttttaattcgagccacttgatgcaaatgaaactttcctcttttgataagtggttgagtcactaccacccctaccaaaaccagaggtaggaggagtagtggccccaccatcactctgtgtcccctgggactcttgaattcattctactatgccctcagctcgcagttccttctctaccatagtaggataagtatgcatgtcatcagctgtaatcattaaatcatgtttgattttggggttcaatcccgctaaatacttttccctcttactagaaattggttggcacacttctcaaggctaattaggccaatctatcaaactagatcgtgtactctaggactgaacattttggctaggtttaacctgaactcgaccaacccgcctagacctgacccggccaacctatttgtttgggaaaactcgttgcctataggcaggtcaggtccaacccggtcaactcttttgggcaggtttaggtttgatttttgctaacccttgggtttgggttggacccgtaccagcctgcgaacccaaccatttttttcctgttttaatttaatatataacataaaataaataatgtattttttatataagattttagtaaa

SEQ ID NO: 330870 - DNA, 648 bp, Cannabis indica
ttttttttatattttgaataaaaattaatgagtacatatgttatctttagagcttataacactgaaaagagtattatgcactaacaatacattttaatatttctcatataatatatatagcaagaaaagagaaacaattatcaatgaataaagagaaagtagtacagttgagggttgagaatgaaatggaaagtagttgagaggaaattaaaaggtgatgattatcaaaattgtatgttgaattttccaatcaatatttaatgtaaagggtttttcaaagttgataatgaggtgggctagctttcttatttttgactaattaaactccttttccttaccaaaactttaactagaataacaataatataaaataaagacagctactatttaattttctttataatcatatataatgaaggtatagagaactctataaattatgcctgtaaacctttttgaagttgcataagtttttgaactattttaaataatggagataacttaaccaccttgtaatagctgtgttaaatttatattattgacttttgataataaagattagtgaattgctaaaatgtattattaggtatactcttttttttttggtgtcatatcgctattagtgagtctcatataacgtaaaaaaaa

SEQ ID NO: 330871 - DNA, 917 bp, Cannabis indica
tttttgtaaaacttaacccaaattccagtatttttgtaacttacccaataaaaatccccttgattattcagaactggcacaaaaggtggggcgggctaggcccttgcccaaggccccactcctagcccaaaaaattctttaaaagaaaaaagccaaatttgtttttctaaaaataccatttttaaaatttttattattacttaaaaaaattcagttattttctttacaaaaagcctaatctatatggattatatatatttgtttataactctaactatttttaaaatcaccatatattttttttaatttaatatatatttttatgcccaattaaaatgtttgggtccacgttgttgattattataattattattttattttttaataatgtttattattaaaaaaaaaaggataagaagaaaataatatcactacaaaaagaattttttgcttcgatttttaagtgatatataaaaaatttgtttcgattggtatatcttacgctatagccgtagacacaaatagtgatagtttttgcatcaattatgaaccgacgctaattgattatttgcttcggttatgaaccaaaacaatattttttttttactttaattcataattgaagcaaaaaaactagtacaccaacgctaatttttataaccgaagaaaaaaaattaaaaaaaatggtaattataaccagatcgatgccataagaattttttcaatttttcacaatttttttagtttcacataaataaattttatatctcaaatttacaataatctcaaataaatttttagacacgagagagcaccaccgcgcaccacgacatcaccactaccctaccaccacaactttaaaaaaaaggcaatatcatattaaaaatagagagagagagagagaggagagagagaga

SEQ ID NO: 330872 - DNA, 510 bp, Cannabis indica
agagagagagagagatgtatgtttggtgtttaaggataaaattggattagaaaaatagtgtgagtatattttgctcgatgcaaaatatgctagcatatttttagtggataaattaattttaagcatataatatcaaatttctctttttaatttacttataacttaaaaaaaaattctttcaataaataaaaataaactaagtcaaaacaatttaaaaggcatattttggtagtagtaatagttggatgaaaaaaaaaatcttaaatagcttaatatttatgtttaaaacaataaattaaaataaaactaaacatggtgattcaaaacaaagtcatgttctttggctccttttcattaggagtgagattcttgtgggataaaatagtagatgtttactaggggtgttcatccgatccaatccgcacttttttagtcaaacaacatccaatccgcactaagtgcagattttatattttggatccaatccgatccacataagagtttaaatcc

SEQ ID NO: 330873 - DNA, 561 bp, Cannabis indica
gatgtagcctcaaaacatgaaacaaacgcatcctccacaggagaagtagcggttaagtttgtttgttactctaccatgacacaactctaccaacaaacataaatatgtaaccagatattgatttacgtgaattagtataaccaacaaatatgaatctgagcattcaactacttctagattgttggttcatttgaacataagttttaatccttagtaccttgaaggtacctcataaccttctttgcagatttccagtggtctatccccaagttactttaaaatcttcctaacactctgatagaataagcaatgccgggtcttgtgcacacatgagcatacattaggcttccgacaacagaagcataagaaatgttcttcatttcttctctttcaaaatcattctttggacagtggctcaaattcagtttatcacccttcacaatgggagcaacgctagttgaataatctttcatctaaaatctttctaagactttgttgatgtaggcttcttgagataaacctaatatacctcggtatatatctctatgaatcttaatgcct

SEQ ID NO: 330874 - DNA, 715 bp, Cannabis indica
ttatccaaagtgtaagtaaactttatcgctgattatcacattggtgtaaatccagtgcactgatgaatcatgagacataagctttgaaacatataatcacaattaccttctactgtgttgacatcactgtaattgtgaataactatatgttttggatttaatagaaattgtatattaaactataaacatgctaacttaaatgaattctagtcttctattgataacaaataagattatattgaaataagttttattcagggcataaaatcctaacagtaagctcttagccctatttgcagtgatagatgtgtcgtcaccgtacaatgcaataataagcaaaccaacccaagatgacctaaaggcggtgacatcaattaagtcctcacctttaatttttcaaaaaatatatttgtagttttcatatatataaatataagggatataaatggtaaaactacctgaactttattttttttaacacttaaccacataaattaaaattttgactagaatacctactgaattgccattccgtttctctttacacttctatccaaaaatctcagttaagtaccatgatggacatgccatagtgtacttgacgtgcacgtggcaaatttttagtggtccacgtaatattaagcattaaaatattataaatgtaatttaaaattataaaataaataaattataaaaatatacattttattttctt

SEQ ID NO: 330875 - DNA, 1123 bp, Cannabis indica
tttaaaaaaaaaaaaaacatataatattttcgtcacataaaaaaaaatcatttaattaaattaactacatactaaagcaagtatttttgtttggcctatgttacatttgcctttaccagtagcttcacaacttatgtctcaaaaagtttaggtacctcttggtttgttctgatttgattccagtatgacatcggttgggagtgtagtcggtgcttcgtcgatgtgtagatggaccaatgcaagaaattctcctatttctctttgacaagctatctcgtgagacttttgaattgatgatgacaaccctttagcggttgtggtatgataaactcagtattatttgtcaacaagcagtcaaggttggatgttgttccaaatttagcccttaaccatctatcaaaatttaagaagtatggtcggtgaagtcttcatttgggattgggccttgcaaacccagttgcaaactgacctactcgatggattccacctcctcttggatcctttactttagcgacagatgctttagtgattttgggaaggggttttgtcagattgggaggagtgatacgggatgcagagggtgtggttcagttggcgtggtcatcaagtgtattaggtgatttttctactaatgtggcggagctgcttgccattcggctaggcttgactcttgcacatcaatttaatttcagtatctctattattaatagtgattctactgtggcaattggttagattaataagcttcacattaattttagttttcagtctatttattttttattagatgttgttggtggtgattcttatagtgccattctgcgttcggcgaatggtgttgtccatacactaacaacctctgttactagtttaggagagtgtgtttggacagatgcttatccacaatctttgaatttttctacaacatcagatttatctctatgaattatatctttctttcaaaaaaaaaacttactagaaaaatagttaatgaattgttttattatatagatgatgaactacattaatatattcatttagggtctgtttggtaagttgtataagagtcgtattgtattatataataaataacactatttttagataaaacattgtattgtat

SEQ ID NO: 330876 - DNA, 977 bp, Cannabis indica
agagtcgtagtcttatggcgtcaccagtttcatcttcacagtagcacatacttccagaaatatggctagatggatattggaatcttcaatagccaatccaccgaattgattttgttgcattatattgatcaaagtaggcttcaactcaaaattattagcagtgatgactagattagtaataccagtcaaattttcattcaccacaaagcaatagtcacaaacatcccatggttgtgcatcaaatgcaacaggtactggttggttattattaaggccattgttgttattattataaaggttgccatggtgaaatttaactttttctttgctttcaactactttacagttctttcaatctgaggattcagcggtgtgagtattgtagcacttcaatttcttcgcataaactgaatcacaaagcaacaaataaaataagaaacaaatattatcaataatttaagaatttttaattccctataacagcgccaaaaacttaatacataatttttactgcaagcgtacagtgttgttatagtaaaattttaattctaaaaaagttgtcaaacccatagggattgattattaaattttattaattattatactttttgattttaggctttaatttgggaatttaaagcaaataattattaagaatgaaaataaaatgaattaaaaataaatagaaaaacaatgatttcaatcgaaaagtacagacctacaacattaatttccctattttgaactatgaatctcagtttatcgattattccaatttattctataatttgtagtttcaagaatcctaatgtaatctattaacctctctcgagtgatggtaaatttaactttaattaactaacaagatatctttattcaatgttaatcaattaagcactaataaagcaatatgattctctttaaatgaaactcatggaattagtggaatccctcaatctcacacttttcctatgtca

SEQ ID NO: 330877 - DNA, 501 bp, Cannabis indica
gtgtaagactgtggaaaatcaacgaacaagaaggagaatcagcatcaaaggaaggagagaaagagattttatttcattgttttagaaatcatattaggattttaatgaaacatacttgttagtaaatctagatcctggtaaaatatatccaacaaaaagaatacattgaaatagagttttatttagggcacaaagctcaacaatatggtccccaaacatgacaatgaataagatcaaaaagttaatcaaaaaatttgttattactttgaaaggggagtttcctttgtttagcaataggacaaacataacatggtttatgcttatgcaaataaaaaatgttacagtttaaaagtatctttgagaaaaatcaagcacttgtgagacaaatttcaaagacgagagtgccaggtctcagctgagatagagaaaacttgagtggaatttggtgtagtatgaaggatgcaaagatcgttgacagtattactgttgggttttatgccc

SEQ ID NO: 330878 - DNA, 559 bp, Cannabis indica
attcaacaaatatatatttttttttattcttcacatttttttccctacattttctctcttttttttctccaccaaaatttaatttctaatatatagctaagagaattaatcctaagattatcaaccatgagatttttttgcttgtaaaaaagcaaaatattagtcatatgacaatccaaatccaatatgtttactacatggattgaatatgtgtattgtgtacataaaagaaaaaaaaaaagattagaggggtgttcgtatagatttttaaactttgagtactttgattgtgattagcttgagatgacctatattataggggagactttcaatcaaactctaaattagaatatttgacaatcaatgcaaaaagaagttttgggtaactaaattaaaatcaaattgttacctaaaataatatttaccatacttacaatatttaaccaaataaacaaaaatattatcttacctttaaataacatctattaggacaaatttaatgctaattaaaagttaaatttaagtattaaatcaacactaaaaaaataataatttatca

SEQ ID NO: 330879 - DNA, 513 bp, Cannabis indica
gggcataaaacccaacagacttcactgtgtagattccagtagtggtgaaattccatattagtcggtcaggggttgtgaagaaacttaaagaatagtaaggatgcgatccacatcaattggtttgaaatagtcgtttaagagcatgaaattccattcccttttatcagtaataaggtgcctcaatgtaagtgatggaggtcttgtacatgtcagatgacgaaattcactaaggtctgggatccatggatctttaacaatgttatttcgatagccattcccaactttgaatcggagacctttgagtagcagttctcatcctcaacaaatgctctgccatgtaaatgagggagagtggccaatacttgcttccaaaaagtgttatttggagaagtacttaatctttaataatcgacttagtagtcagtcaagcgctttaaagattctccaagattttttggccaataaagcttggttataatgcacaaaagaacggactgttgggttttgtgccct

SEQ ID NO: 330880 - DNA, 808 bp, Cannabis indica
ctcctcctttgtcaactgcagaatggtagatcttggcgaaataacttcagtttcctcctccattgtttggttcatcttcctcgcatccggctcctcctcattggtgtttggatcggagacagataaggtatctacccctaaattctcagccaccgattttgtcttgagcactacatatgacaaagttgggcctttcttcctgttttcgatctttcgtttcccttgcctcttagctccggtcgccctattgctcggagatcctagcttgcgtggccagtcgtgacccgccatgacaggcctaaaccgaagaaatcgtccttcaaaacagggcaaaatcctagtagagcaaacagtagcacgcgtactaattgtgtgttccaatgtgagattttttgtttatatgtgttatttgattttcatataaaataggaaaatgtgttagaaaataagaaaaataggaaggaaaaattataagatgacacatgtgggactttttgtttgtatgtgttgtttggttttcaaacaaaatagaaaaatgtgttaaataatatgaaaaataggaagaaaaaattgtaaaatgacacctaggttatttttgtgttttcctttatatatataacatctatatatatatataaatgttacaaaataaaaaaaaaagaaaaagaacttgtctttatcgtttgtgtttgtttttttaatacttatttttgtacttgttattgacacattaaggtgttcttttttttgtaggaaaggcgtttatattataattaaaactgagtttagacctcacgatcattacata

SEQ ID NO: 330881 - DNA, 636 bp, Cannabis indica
aattaaaaagtataataattagtaaaatttaataatcaatccccgtggattcgataactttttaatattaaaactttgctacaataatattgtacgcttgcagtaaaaatagtgtatcatcgttacattttcaccctcaacaatcatgtataaccttttcgcgataattgtggggacaataaatggtggtttaagcagtgagggtaaagaagtgatctgatcgccaacaacgtataaccttttcgtgttggttgtagagacaatagatggtggtctgagcattgagtgagcgagaagtttgggattgagcttaaatttacagtgtagtctctgtacaagagctcaagttgcctacatttatataagagatcaaatttcatcgtagttcagttggagggtagaatcaatattccactacatgattcaaatatgttatcctaccgttgtgggttgtacacacactttcccaatgacaaggatcccgatcaagaaaaatgtgaatagttatgtctttgttgagaatcatggggttctaactcaaaaccaattggcaatgagtggagtagcccatgttcttatatatggctcaatacttttacatttaatccatgtgggacaatgttctccaatatcccc

SEQ ID NO: 330882 - DNA, 1637 bp, Cannabis indica
agagaacggtcctaccgaggcgtggcggccggtgtggattgagatggagtttggacgttcaaccccgatggatttctcatgggtgccccaaagtgtgataatgcaggagctaaagcgaggctttgattatatcttggggtagcgatgaattgtatttcgctcgtttgaggagtggcaggagatggggctcccggaagctgtgctccaagtacatatcccgatactccggtcaggtattatcctctacaagccactatttgggcttcttccaagttaatgtatttttggaccctcttctgaatgtcctggaggttagctgctcctcttgctacattgtctccggaaattgacttgtaatttatttcgacagtccactgatcctggctccaaatttttgaatcattatcattcctcaaaagaatcgcccaacgttagtggaaagcataaacactttacatcattgatgaccctcatgagactggcaatgccttttttttgcgtagtattgccaattcatccaagattcctttgttcaaggtgcctccggagactggcaatgcatgttttttcttttcaagatggtttcttaagtcaccatgcttctcgttgattttctgtcttaaatcagccgggggatacctccgacttttcctccccctttccctgggttcttggtgcacggatacgctctttcggtcctctggatcctgtggtccaagactcgctcgagggagcttgcccctctacggacctttcccttttgggaaattagagcggactttctgcggatcctatgcttttgtttaataaatttaaaacattttgtaataatttcatttcagttttttcatagggttcagaattggaaatacaagacttgaacagagaaaaggaaatagaagtaagtttctattctatttcataaatatcattttttttttgttataaaaatcagtataaaaaatgttcggatacattactaacattagcaataacagaatcaaaacagtttcaaaattgttgtcttacactaataataatttcaaaatcacaggaaaaagaagacattccattcctagtcttttgcaatggacaatttgatgatcgaatgaattatgaaaattatgaagctagtggacaatacatttcaatcaattgtaagtatgaagaattacaacggaagctgaaagaggtcctggaatgcaaccaagaaaacaatgttctgcaactgaaataccaagtgaaagaaggataccaaccgttgaggataaaggatgatcaaagcctgcatttctacatacagctaaaactgaaggaacccgactttacaacatatccactgtgtgtgaatgtcatcaagaatccaccaacaaccatcaatacatcgttcttggaaaatagtaacgcattagttgaacagaaaaatgcattagaaatgatggaatacaatgaaacaacaacagaagactcaacaacttaacaacatacaattgaagatacaatactggaagatgggagagaaaattttgacttcatggactatgcaaaacttgtggcagagaaaatagttgagcaactagaaacaaaaaaaacagggagccagaaatcaaagattatgacgaactactaatcacaga

SEQ ID NO: 330883 - DNA, 2311 bp, Cannabis indica
atagatgagttggaggataagttcagaatgtatcaagtcggggagcaaggaaaataatcttggatatgactcagatgaagaactcgagccatatcatccagatatcatgaacactcctttgccctagggatttaaaaacacccacgtctcgtcatatgatggcaccaccgatccggtctcgcatttgattaacttcaacactatgatgcgagctagcaatgttacaaataatttatgttgtattttgtttcccacctcactagttggagcagcaagcagctggttcaataaatttactcatcattccatcacttcttgggaacagctgtctaaggacttctaaaagcaattccaggccgcaagggataggcgacccaaagcgtcctcactcaccaacataaggcaacagcctggcgagatgcttaaggtgtatttaagctgttttagcacggctgctgcaagagtaagaaatttggatgatagcacccagcttactgcccttcaggcagggatcactactaatctctccactgctagaggggaactgcgggacgacctacagggccatctagtgaagaacatcatcgggttcaacgagagggctcatgtgttttttttaaaggaaaaagctcgaaaacagatgaacttgttaaaagctggctcaggaaccgaaccctgcactgttttgacaagtattgtctcgactaaaggtgataacccaggggcctctggctcaaagaggaaggacgattcttagggattgtctaatgataaaaagaaacaaaagaagcacgagaagcacaaggttgcctttcagtaaacttgagcccatgaggcacgcgaggcataaaagagatccaaacagatactgtaagttccacaaagacatcgggcatacaaaaaaacgagtgctattagttcaaagatgagatagagagtctcatcgcgcgaggccacttcaaacaatatgtgaagaggcagggtaatggacgtaaccagcccaatctgcccaacaacctaagcaaccaggtattacaacctcttcctgtagaaggagtggatatcctggttatctcagctgggccacatattgtagaagagagcaacaatgcccagaagaggtacgtgaaggaagtaaagaatgagtagtctgtatttgctccagaaccttccaaaaaagtaagaactcaaagacctccaattatatttttggaagaagatgagaagaacgtgaggtaccctaacgttgaacagttggtgattaccatcgagcgctcgccaacaacaaaaggataaaaaaggtgctggtggacaatggaagttcggtgaacatcctttatagggaaacgttgaagaagatggggatcaaaaaagctaaattaagaccttgtatgataaatctttgcggatttaccgacgacagtatcaccagtcaatgtataatcgagctcgcattgaccttaggtgaaacacctttgtccaccacaatcatgcaagaatttttggttatcgacctgccatcggcttataatatactgttgggtgttaggttatatttagcctatgtctcgggtctaatagtaaaacattttctcagttattggtgtcttttggagcggttttacgcttgattttccttgttttaggttcccggggcattagagttcaaattcagtcagttgacgaaaagacgggacaaactggtgaaaaatcggccaaagttgctcaatgggagtcagtagtcgcgaccaacttgaagcctagtcgcgacccttttatctggtcgctggtcgcgacttgggagatttggcagaaactcagtttttcgagttttgcctatggtcgcgaccagcctttaactgggtcgcgaccaacctttaactgggtcgcgaccaggtatggaaaacgagatttttgacctaattcaaatttttttttccaattagaggtacacctttcattcttatatgaggaacaccattcagaaggccaaggtaaccaaaaaataggcctgaaaagtgaatgaaagaggagaggaagcaatcttgaagacccggagtgatatcaccatctagtttctttcttttacccttatttatcttttatgtctagttttgtttcagaattaatcatggatgtttatattatttttatgagctaaattttccatttagagaggatgatgaatgttgtttaaagttttgcctagttaatgaataattgtcattcctcaatcttgatttgtgaaattatctatatttgtgtttaattccatgtgtaagcttgatcaccttttacatgttttatgatc

SEQ ID NO: 330884 - DNA, 629 bp, Cannabis indica
aataataataataaaaaaatgaaccttaaaaagtttttttgaactataaattttatttaattagataaattcaacctcaacaatattagtaacatcaaaagggagattacattccgaaaaaatacgatcaacatataaacaaaatgctctagctataagatgagcaacctaattagtagaccgtttgacaaaacgtaaagaaacatctctaaaagaagataaaagatgtttacgatcttcaacgataccaccaaaagtagatgacaaaatattcgaatttctaatagcttgtactaataccagacaataagattcgataatactaacacccacaaaattgcacttcaaccatgataacacttccttgagagtcatgacttcaacaatctatggaagaacttgcccaattcgcaatcccgtaatcccaaccacgacctgacccttgtgatcccgaacaccccacaaaaccatgccttccctcctcgtcaaacaatgcaacatcaatattcacctcgagttgtccatattctgatttagatcatagttgagccccatccaaaagatatcaagcatcaaatgaatgaaacaaacttctttcttgagcttttctccactgatcaagagtgata

SEQ ID NO: 330885 - DNA, 921 bp, Cannabis indica
ttaagtttaatttccgcgctaattttattagtaatcccattttaagggattagggtttcttaagtatcttgagtagcgggcctaatagttagggctttacagcataactctaatgactctaaatattacgcttagtaatctttggtggtcaacaataacatatatattaatcatcaagtcattatattgaattatctataagaaaaaataatataatatacacatatattacatatagttgttcttatatgaaaaataaataaaaaattattataaaaattcataactttgtaacatatagtgtagtgcagtttgaactgccattattagtttcaaaatagcaatctgcaccgcaaatgatttcaaattatttttttatgtggtgtggtgcggtgtaggcagtttgtgtggtgtaggcgatttgatgaacacctctactataggaacacacttatcagttgacttggaaactgttgactgtggatttcgcctaccgatgcggagtctgactaggatcgttgcttatgactgcctcatgaggaacgataataaatgtaaaaaacactcggatttatagaagttagaccctttttatttatgtaatggcatacttcccttttagttgtattcattcttgagataataccaagcatattataggctaagaccttgtaatttctagctaggctcttttcagcattacaaaatgtttgccaggtgagaagtatgacttattactatagtgcttttgagcgtacttgcatcgtaagttcaaagtatggatcttgccctttatatagtagtaggacttacaagctgtacgtagagatatcccttgaaaatagggaagctgcaacgtatatgtgaaatacaaagtaaataaataattaatccctatggaatagggttgttatttgttga

SEQ ID NO: 330886 - DNA, 659 bp, Cannabis indica
gacacagtgcatgtggtgcctcctttgtcttgcttaggacaaggaatgtgctttttgtcttgctaacttttgtcttaataatttgtcttgacaacttttatctttttttttctatttaattaatttgaaaataaattatttattacgaaaataaataattactatttcaataattcaaaatagatcttttttgaattttcatgtacaacttttatctcagtccttgacagtatttcaaggtgtcgatcctgggaccatgcactataattctatgctccactaaattagatttatttatcgaatatcatcaatcaaataatcacgtttattaattctacgattatgctactataaatatggaattgaactcttagtaattatagaactatatttactacgttttactgcagtgtatattgatataattaattccagtgattagccctccttgtatcgtttcgtaattaatttttgttaaattaatattttacccttgaaattacttctttatcctttagtgttgttaattcactagtgaaagtataatttagatcaaatctaaatttgtgcacaacttttcagttccaaaactaacacataaagggaaccaacattcaattcgttaggaaaattgaaattccataattatagatcatgct

SEQ ID NO: 330887 - DNA, 744 bp, Cannabis indica
aacaacaaagctgctaacagcgagcttgtacacttgctggaaaccatggttttagctttggtcatttcaaacagaagaccgaagaaaacaatatgatggagatattttgtatttgagtaaacaatgatgttgaaacactttatatctatctttataaagggttgtgtgtatatttacagggttgtatctaatggtttgttggatactatatatgatatatttatgtcattttctctgaaacattacaatactataaagtttttattattacatatgatatgtgccctgttgaaaattagaacacgttaggagttttatttactttaaaaacttattattattataatactaagactgcaaaagctcaacagtcaggcctatgacttggtcgatcactaagaaatattgcacatttgggaatggtttattttctttaaaatcgaaacctaacaccaatgagtttcacactgaatattaaattatagttacattttttatatgagcttatattaatttttatcattttattaaaatttgaaatgattaaatagttatgtgttaacctatattattattgatcaatagttaattagtttactaagttaaagcataaatgtgaatttttctaattaactgaagtgtatttgatgagcagatccaatgcaactagagttatgtaactaaatctttttcctaattttttaaatacttattgtttcatcacaattgtatacattttgataa

SEQ ID NO: 330888 - DNA, 566 bp, Cannabis indica
aataaaataaaatcattttattacacaattatgctactacatatatagatccctattagtattacaacatatattcctttcttctggctgggatattattatttttgcttcttttgtatgtattttagatttgattagccaaacatatatataaagatgttacttgatatattaatatataagaaaccctaattaaatgtggaattatatatgattcattttttgagttgcctatatggaaattagggttttggggtttctattatttgcccattttattatataaaaaatggttaaatctttatttattggcaaattatatatatttaaacctatctatatataagattatacatctcaagaaaataaaaactataagattatttatatgtaaatattatatggagagtcagagagagagagaaatatagatgcacctcaaaaacagaagaagaaacaaccgtagattatgtattaaatattataatatatagcataaacatcatatatatcgtctatattaatatgaaacaaatagataataatggatacataataaataatgg

SEQ ID NO: 330889 - DNA, 1911 bp, Cannabis indica
aggacaaagcacgctggaaatacttgtgttggtctgtagggtcagtcgttagtccatgaagcagtcagagtgacgtactcgtgtataagagccattcattatgtgggtgtaagggcccaatggaagcttgaagtggggatgctacagaactagttacaaccttcttatgaatggtaggattcagggtaagttcaaaggtgagaaagatctccgacaaggggatcatatgtcccctctcatctttgtgttgatcatagagtacctgaccagactcatgcccagttcacagggaaaaaggggttcgagtttcaccccttatgcaaacatcttaagcttactaacctgtgttttgcagatgatcttatcatattttgcaagaagaatctcaaatcgattagtcacttaaatgatacatttttgagcttttgacaggcaacaaatctctttgcgaataaatcaaagtcccgtaattactttggtggagtaaaagatggaactaaagctcagatgctggacttagtcaaaaatagacgagggctcattccctctcaaatactaggggttaagctctgaccaacaaaatggaagactaaagattgtggagtgatcctgtacaagataaataagaatctaaactgttgggctagtaggaactgctcatttgctggacgcgtccaattgattcactcggttctcctcggagttagaaacttttggatgagtatctttactcttccaaataaaataacaacaaccattgataggagctgtaaggaatttttatgggggactacagggaaccagagcaagctccatcttacttcttgggagaaggtttgtctgctcaaaaagtttggggtagttggttttcgagatggtaaaaagtggaataaagcattgatggacaagttcctttggggcattgctagcaagcaagaaaatctttgggtgaagtggataaattcaatttatctaaaggagcaatgtttatggagcctacccatcaaacaagacatgagttggtacttcaaaaaactcttgaaacttcgaacgagtattaacgagacatccttgtttcaagctgaaaagggaggtaaattttatgctatacatttatgtaactcgcttattgaagctcatgatgcgaagtatagtggagttaattggaataaacttattattccaaaacatagattcatcttatggcaggtttacaatcatcaactccttactcgtgatcttttatgcaaattcatgagcctctcctcggatctttgcccagtgtgcaattctgatatggaaacgcataatcacctcttcattaattgtgtttactccgagaaagccttttgctgaaattggcagatggatgggatatgtgaagtgactgaaagatatctttaacgtccgtcaatggtgcttacggggtcctcttgacttccaaaatcgtataataaatacagtttttgttgctgccatttatatggaaaagcagaaatagatgtatatttgatttggcttatgtctctcctagtaaattgagcttagaagttaggaaggtagctcaagctagaattttgagtataattttcgtctaatattgtcagtaaatactctattttaaaattattaaaagaatattttttttaataatttattaaaagaaattttgaacgtaactaattagtataaagttttacttagggtgcgtttgaaaattcacaatgtaattagatttgtgtgtaattggaggtaatcacacaatttgtcatgtttgtctgaccatgtaattacactataactgtgtaattggaagtaaatgaggagttccaattacactctccaattcttttggtccccatgagaattgaatgtaattacactgtgtaattactaaaaactttccatatt

SEQ ID NO: 330890 - DNA, 532 bp, Cannabis indica
acaatatatatagtaggacctttagtgtcatgatcgatagaatatagtataagtaaagtttatatataataaaagaaataaaaaggataggggttttaagagagggatcaccctttccaagggaaaagtagtaaaatccaaaatagggttacctgtaaatcccaggcagctttggctctatctatggaactatttgttaaatacgccttgcctgccgtcttctcttcgacctgtactgctctctctctctctctccctcttgttttggctaccttcattcatagctttcatctttctacactagctaccactcttttgttatatatatattgtatttaactattttttctttcctttttcttttttctaaatctaccactactatagtattagtataccttagttccaaacccaagaactagctatatactaattaagtaaaattattaattaagctctcatcagagagagagagagatcatgtatggtaatttttcttagctagtcagctcctcattttctggataagaag

SEQ ID NO: 330891 - DNA, 1640 bp, Cannabis indica
aaaaaaaaaaaacaacacaaatgaaaagaatgggttgatcataattgaagggctaattggcatttgatatatatatatgtactaggaaaaaattacgtgcaagacatgtatatttaattttatgttaggtctttttactttatttaaaataatacaataaataattgaaaaagatatttttaattattgtttaaaattatttttacatatattcaattaatgaaaataacgatgctgcaaattaaaagttaatactgaatgcaatatattagtgattttgatttaatgaatttgtacaatactaaagaaatcttgataatctaactggaaattacttttaatttaatccaaaaataaaacaaaagtaatgttcaaataataaaataaacgcaacttaaaattgtagtaaaataaaaaaataatttctaaattattgataattgtagataacataaaaattgtagaaaaaaaaataaaagtactcttaattgtcgagttttaatcttcttttgtttcgacaaagatgagagtgtaatgttgatttaacaacacaatatatttggggaatataatgattctttaaaggttcacccccaaagagtagctttgaacatcttaagcaattgattaatgtgttccaaaattgctcaatttgtgattaacattatgatcatcattattagtagtgttattagttttgtctaatctcacaaactcaatatcatcttcgtcatcagaaactgtgttcttatgagttggattcaaggtctcaaagcatataattccttcaaaacagtcctctaatccaagcctcttcagtgctttagctgcatggaccttgtctgcgtttgtgaatatctaaaataaaaaagaaaaaaaaactcatgagaagacattttaacaaaaaaaaaaaaagagagaaaacaacaattttgtttgtttacaatttaaagaatatttacttgcaattttgcgataaggcatggtaagcaaaaggtaccttaaaatggggtcaagtttaaagttgtcataggtgtcatagggtagtcttctatgaacaaaactgttatatatgacaaaataattgttaaactagggtaaatatgtaatcattgaacaaagatgaaagaaagaagaagaaaatgaattgaataaaataattttgttacgtgtgatattcatcatagtcagagtcatagccaatcgcctacaaagggtaaaaccaaagaattttttaatccatgttccccaaaaaaaataaataattgaaaattaaacaattataaattatgattaaacctaaaggataaatttgaaggcgtaaccttaaaccagccattgtggtgccatagttcttgtaaagaaggttacccaattgaccaattttgctccagtctatgacaagcttctcaaccatatagtcttcacgaaaaattcaatcagatgaccactatattttttttctgtaaatactaaaatgaaagcatctttaactttaaaattgaatatttaaataattaattaccttcaatattttgcactcattggcaagacctacattcaatctctatcaataaatgccaaaacagagagagagagagagagagagagagagagagagaggaggagagagagagaga

SEQ ID NO: 330892 - DNA, 758 bp, Cannabis indica
gtaaaataattccaacacttcacacccacgatttctttatgttcgaccaagaaatcctcaattttcatcaagccaactccatgtataccaccgcagttgccggagagaaatcctcaaaaaaggggccaaagaagctggcaaccttggaggaggtcatgaagggcccaattatatacaagaaatttgcatgtcattccaacggttgggaggctgacaaacttcattcaacgttgacttgcgcccaccaactggagaagaatttcgctgttgtggggatcaagccctccaactataatggcttcggggcatggagtcaaactcatctgatgtctggagccatgctccccctacaggattatttcattgacttccttgtttttgtcgggctttcaccctatcaattgattccacaagcttatcaccttttgttaggcttatttattttttacgtaaccaggagctgggctctacctagtcctgcagaaactttatatttttatgaactaatttcagttcccaagaagggggacaagtttaaagacagtttttacaaactttaggcccatccagccaatgagacctcgataccctttaattttcaaaagaatgtaaaggagtatcgccacagatttttctactcttctgggttcaaggctttcgagcgtccggatctactgaaggactgggtcaggattccccccatgcatcgtactaaagaaggaagatttgaacgtggtgataactctacgaaaatagag

SEQ ID NO: 330893 - DNA, 907 bp, Cannabis indica
gatttttgttagattgtgggatcattgggcataaggccttggattgcccgttgaaagattttgctggggataatcccaagttcgacagtgggaggttcggttcatggatgtgtgctccgagttcgccaccacgtgatcggttttgggtacagagaaatcgtgagagttctcctttggataggccgattatgaccatgggtgaagcctcaaggattgttgctgcggttgggaggaaccgggttcgctattcaggccctacgtttgaagagttagctcctacctctgttctaaaggcacgtgagcgtgaggaggagttagtctccaatgggtctgctgcccagaagttgcccttggcacctgagggtaaaatgccgatgatggtggatgaattagggaagcagaatttgatacctgtagtggagaaggatatggagttgtcgacggttgcttcagctttgggtggatcgactgtagtggagagtgtgctacctgcgggtgtgcatgggatgcatgagccgaaatgggtgagtgggtcaaaaggggtgagggatattgctttatcacatgtgagtaaggatgtggctgctgagggagtgttatttgaccatagtaaacaaaaattgacaaaagaacaaaaaggtaagggggtcatagctcactcatcgcaagaagagatttctttagccacgcgcttcaacaaacgttcgaccctcttattaaagcgcacaaagctaaaacttggaagaggctaaattcatcttcaggccgtggctctaaaggggtatgtaaatcgtcttcttttcccattagtcctaaattatcacatgttatggtagctaatgctaaaatcaaaattgagtcctaaaatggtggcgtgggaagcggaaaatggaagtggagggagata

SEQ ID NO: 330894 - DNA, 994 bp, Cannabis indica
tctctctctctctctatagctgtgttgcagccaacactttcactctcgatctccctcactttcccttgccttgcctagtccaagaacgtggcaccgatcatgtgaaacccaaccccgagaatcagccaccggagacaactcgtgaaatcataagtcattcgcccgatctctctctctccatctttttctctcgctaagacttgttcttaaatacttttttttgcacatcatgtgagaatgacgatggtgacaattacttgaggtcggtgtttgttgaggcttggcttataatgaagatttatagaagcttattaatttcttttggatttttttttacaaatgatatttttcttaagactttagtattgtttttgttggtatagtgtgggtacgagattgttcgcattattgtattattgttgtttgttagtgtggatctgaaatatatttcagatctatataatttttcttaatgtgtcggtttaaagccgtcagcaatagtggtttattatggtcaacggtttagaatcgaaaaaagaattgtcagctgttctaaatcgtcggctttagtgttagttattgccaatagttttaaatagtcgaaacataagcatacccggctattttccattgatattattccaccaaattctacatcggtcgaataggcattagtcatagagactggcgataataatataacagattatttttaatagccaggaaatcccatttttttagtagtgcctctactcaggttcgggtataactcggtaccctgataaaataataaaagaaatactttaacttttatacttatatgctgaaattaaaagaaaaaaaatcctaaaactccaaccctctttctttcaagccactaaggctagcttagtggtgagggagggatgggaaaaagggagaggtcatgggttcgaacccaggacctttaagctattaagctaatatatgattgtaaaaaccattacgctacact

SEQ ID NO: 330895 - DNA, 597 bp, Cannabis indica
agatcaaggtaagttctagctcttgttcttctttaaggttgtagcttggatttagtttgagtttggtgtgattgattctttaagggtttgaattgtttagaagttattttgggagtttgacttaggttttttgttgttgtatttgttggattttgactgctgtggtgtgagttgagtgagcttgagttttgaagttcaaatcttgctcaataatacttttgattccagagctttgatgttatgtggattggatgaattatacttatattggtgtaaatatgtattttgaaaggtctggtaagttttagggtagaattgaagtagtaaagtcgagttatgggtatgattatcaactatgaacattatgaaaaattaaatgcgcaacaaaatgggagatcaatggttaaatgatagtttgacagtatatttcaaaaatgatgtattcaatgttattgacaacgcgcttatcattcatcattttcaaaacatgaaaactcgtcaaggacaacttttaagatatgagtttaaaaattgatatattttgttaagattttaagatattgagtgtgttatatattttaaacatcgttttagatt

SEQ ID NO: 330896 - DNA, 932 bp, Cannabis indica
aaaaaaaaatcactttcaaaaaatttttaaacatatttttttatcaatattttggactcgaaccccaacctagacccgacccggaccttggacccgacacgaacccgattcgaacctaaatcctaaaccacaaactcagaccacggaccccggactcagaccatggacctgaaccgaacctcggacttgacttgaagcccagaccctggaccatgaactcggactcggtcccggcctcagacccaaatctagaccaagacctcggccccgacctaaatctagacctcaaactccagtcttggcctcgaccccaaccttagacctaaatcctaaacccaaattgggacccggaccccggccccatatccaacttaaataaaaacaacaaataaaaataaaatttacaaaatacatttttatttttgtttttaaaattaaaaaataaaattaattatagaacaaatttgtttttcaaaaataaaattttaaaattaatattattgcgtcagctccccttatatagggtggcttttataaagcaaggaacggaagcaaaattgatagagcttcttcctgaaaagttgctggtacatgcacatggtggccgaccatattcaattattttttttagcatatacatatataatatacccctcaaaaaaaatatagatttcatgaaaatattaaaaattcactcttttttaaaaaagtcaatcttattaatttattgcaaaacgataaggaaatcagatcccacatgcagacatctccaatccatataaataatatatgtagactaattttgtaataacttccacgttattgttgttccttcacatattatatctacacaattttttttgtattaattattatcgttttcgagtagactttttgtatatgtaatttaaatagaagtttctatacgattt

SEQ ID NO: 330897 - DNA, 951 bp, Cannabis indica
ctaatcacacaaataaataaacaagcaactcagccaaagaacccgcccgaccccgatacaaataatgccaaacccgaagcttagtccacagaggaagcaaagacgagcaaaacactaacgcatgctccggagtctccgattcctccccacacctacgacaaactggttgaacaagaaccttgcgtctaattagctgggaattagtaggaagagcctgatgatacattcgccaaaggaagatcttgactttctgagggaccttcaaattccacattcaattccaccaaagagattgggtacaagaagaggagcctaacctttcacccacaacatcaagagccaccgcatacccactcttcacagtataagaaccatttgaactataatgccagcaccaacgatccgcacaatcactactccccagtggaataccaaggatggcatctacatccatctgtaagaaattttgagaaaaagcatggagatttcaaatcccacccccaccaatcaactcatgaaccatcacactgcccgcaggagctaccgtaataggacgaaatgtcctcggccgaggaatccaaggatcacgaaacgcatcaatagtctgaccatccccaaccactttccgcatccccatcctcaacaattctaacctcatatcaaacttgaccacaaatgagaggaaccctggcgatccttagcctccaaaattgacgattcagggaaatacttatgctttaaaattgactattattattcatgtgtttaaacaaaaatgcagacgatacacttcctagcttatacacttttaataaagatcaagaaatatgtcaggtgattaaaatgaagtatgccattgtaaaatggattgttatgtgaaaaaaaaaatgtgctaacaactataaatttataaggttaattagtaattttttttccaaactttgacatgta

SEQ ID NO: 330898 - DNA, 555 bp, Cannabis indica
ggtaggcttcaatcgtataccatttgcagctgccaattgaaaagtgtaatttatattttaaagtttaacatattgggattgaaaagttactttatatgaatttaatttatatataatatatattttttaaaaaaaacttaactttagtttaacagaataaatattatttttgaataaaaaattaaaaaaaaaaagttcacccaagagtgttgtttaaaaatctaaattcaaatttgaatttttaaaatacttattcctaatttttgttaaataaatgcttttttaacctagattagtgcaactgttatgatgtttaaatttaaattaatatctttatttaattttaaatcttttatttttttttttttgatgaaaactaatatacgtgtatatatagtatatatacgtgttaaataaatgttttttttaaaaaaagatatggtgaaaggaaaggcaaaaagagaggagaggaagagactggtcttcaaatatatcattgtcaatgtcgattctcataaaaagaaaaggcacgctttgtttttctttcacttaacg

SEQ ID NO: 330899 - DNA, 744 bp, Cannabis indica
gtatattgtgttagattgtattgtattatattatcttagtattattaattacaatattatatttggtattgacttatatcaataaattgtgtaaaattataatatattttttataaactcgaccccaacacctaactctgggtcgggtccagggtcttagtccagttcggtccaagcccgtgtccaatctgggtcgtaagagattggggttgaccctagatcctttgtagatattataatacgaatcatttgttacatatgtattaaataatacaactttacattttattaaaaattttaatttttcaaaaaaaacaaaaataataactttcttaattgaaataacatttcttatattaaaaaaaaaactatgtaattgtttttatgtgtttttagtcttctacaatgcacccctaaaaagaatacaatgatacactttttatctgttttgacatctaaaaaaaattaatctaatttctttttcatattcatgtatgttatagttatttaagatgtaaaattttaaaaaagtcaaaataatttacaatatgcaaagcattgttcaaacagtcttatttcacatgcgtataaaataaaaaaaaaaaaaattacgcgtacaacaaattgtttgaatcttactttcacttttctaaactttttaaaattttgttaaaatatttaaaataactacaacgtatataattataaaaaaaaatttcatgatatcttaaataactacaatat

SEQ ID NO: 330900 - DNA, 904 bp, Cannabis indica
tttgttttttaattttttaatcacaaaatgaaagtaaaatttttatttttaaaaaatttatttttgaaaaacaaaaatgcgttctttaaccacttttgtttttcaattttaaaaacagaaaacaaaagtgtgttgtataaagtttatttttatttttattttttgattttatttaagtcgggtctaggtctggggtcggatttgggttcaagtcaaaagtcaggtttagcgccagggccgtagggaggggatttgggtccgggtctagtcgtaatccaaaatattgattaagaaaaaaaactgtttaaaaaaatattgaaagtgatttttttttgtttttaaaattttgatttttaattataaaattgaaaagtaaaaatagttttatagaacatgtttttaaaaattattttcacttttctacttttaaaaacagaaaactgattaaaaaagtgttaccaaacgccaccttaattatagtaatatttatctcaaaaaagatttaagtcatagcatagtgtggtagatggctagcttagtcatactgaaaacctacgtaaactacttatctaaattagtactactataggatgtacatgattcgggtgggaatgctttttcacttattaattttcatattatatatgctcctttttatacttctgttcattcatgtcctattgagtatattgattcattgacataatttatattttagataaaaaaaaatatatgtataattaaacatagtcacaaagtatatataaatgactaaaagaaaaatactagaagtagtaagttttaataaattatatatattgatattagtgtaattgtcattttttattacaataaatgtcacttttaccagcacagtttgttactacgctggtaaaaataactt

SEQ ID NO: 330901 - DNA, 746 bp, Cannabis indica
tagaattataagtatagtttagtattaattaatccaattccctgtggttcgacctcacttgcgtgagctactacttgactgcgtatacttgcgtagtattcataattttcgtaacaaaaatcagccgcgtggcagtacaaaagtaataaaatgcatgccaaatacagtataccatgtaaaaaccctacttcttacattttatatctaagtgaaaacttcctaaattagattattgagtccaatctttcgaatgttgcatttaccactcttacagtggttcgaatccaagatttttttccccattcatccatataagagaataaatttcaaagaaagaaaaactaagttaatatgctaacttatgaaacttcctcttcaaaatagttggatatacataaaagttatactatgatagattattagaaagtgtaagataaaaatgagagattgcaaactttgttcaatgtagaaaagatggtgtttctacaacaaaaaatatatatattttatggaaaaaggtaaacatgtgattatattaaaaaaagatgagttagtgcatatatttatgtaaatgtatagtgtcattatggagtagttattttatttgctccttcgtgaaaaggggccaagatgcaaaatggccctaaatctaacaattaaattaataaatgtcattttttttaaaaaaattaacaaaatgtccttttagttaaaaatttgatgataaaattacaattataaccttg

SEQ ID NO: 330902 - DNA, 795 bp, Cannabis indica
gataactcataccttgtcacaatttttgtttgggagtcaaaaagtggcactattaacatgaaaaaaaaaaaccaaaaaagtctaactttggtcaaaattctcaccaataatattttggtgatccaattgagaacacagtggcctaaaaaagaaacaccaaatgaatgggttggaatttataattttttcttgatttatttcttgggatccaacacacattttgaagtacacttggacaaaaaccctttttggtaaacgaagaaagctaatacaaatggttcataccaaataccaattccaatttgttcaacaataaaagcttaattaagtactagtaagtatagtatcccatctaaatatccattaatgaaactaagctaaagtctaatacacatatatctgaataaagattactatagagagaccaattagacagtatacacctaatataatactataaaatatattgtgcctaatataacacaaaacagtcgtagattaggagacctcaaagaactaccaaataaagattaatcaagctattgaaagtcaaatcaatacccttatacaaataggtaatttcatctttgaaccactaaatagcttggtaggagtaaatttatgaacaataataaaaatgcaaaaagtgttatctattcttatagaagtactctcacaaaatttaattatgtatttattaagccaaaactattctctcaaatctaagctatataatattagtagagtaatttattttttcctaaaatctcattctacccctcccatttgaacaac

SEQ ID NO: 330903 - DNA, 868 bp, Cannabis indica
tatatattatatatatatatcttcttgcacttgcatgagaacaagccttttaagatgaaagtgactgagccgatgactcctcatggcggccggattgagaagcttatgatggaggaatcatcaccttctgttggttatggtgataaggattagcaaatatactaatgataatccataatgatgagttggaactgattggaccagttagcaagacattaaactcaagtttgacttgaactttgttcaaaattctctgtttatagctggtacaaattaaaaaaaaaatcaattgaaaataatgataatatttttaatcaattaattaataagatttgaggccggccagaaaaacaacatgattttgtttgtattatgtatataaaacagagttggtagacatgattagtcaacctttttatgattatctcttattaaacttgtttgttaactaagtcaataaagttagataatatggagctctcaaccgtgatgtcagaagaagttagcacttattcattgctataaatattagataaaaatgaacttcctttcatctcacaccacaccattataaacagaagaaaagaaaaatttaatacccttttgagttctattcctattaaccttcctttctcatacctttttttttagtgaaaatggccgaaggagttttagttgacgttgctggaagtcttgttgagatgctgctttctgcagcattcgaagagattggattgctttatggtgtgaaaggtgagtttcgaaaacttgttgacacgactgaagtagtcaaaggtgtacttgttgatgcagaagagaagatggctgttgataatcaagtcaaagcttggctcaaacagcttggaga

SEQ ID NO: 330904 - DNA, 625 bp, Cannabis indica
attttttaggtttttttttttaaccatctaaaaataacctaaaatgaattattgtacgggaatggctcctctgttgagtctagtctctctgtagactttgtgggggttcctttgtgaccgagtttttgtttttcctctcttggtgttccttatctctttttcctctcttggttttcgatgcggttgggtttttctcaggaagttctcgtctctgtggggtatctccccgtttgtctgtgagtgtctataaccatggttattatgaaggaagttgggactgaggaggcgactattcaggttgtctctactgacggcgatgcgggaagactactcgaacgtgatagcaacatggaagttgagatgatggagctattcgaagacctttctcttgaggatattgtgtcgaataaagcttgtgtagggaaagttgtgggatgcaaaaatatggatgcctctgttgtaaagaagatcttcctgggcatttggaaccttgagaaaggatggaagatgaaaaagtttgaggagggtgtattgggtttcttttttgactcggatgatgactgtacaatggtgatgaatagaagaccttggctggtgaacggagagttgggttttatgccctaaa

SEQ ID NO: 330905 - DNA, 973 bp, Cannabis indica
gttttgcatgcatgcatggcaggtttgcaaaaagtctttcagatgaaaagaaactgagaagaatcaattatgcgaaagctatggcagcagctacttctacaacatcagctacagtagttacagtcacagaaacaactaccgttactgctaccttgtctacaaccacaacttaaaataattcttcgatcgcaagtttatgaataatattaattcaagccaacgaataatgtttgttaatttttctatgtacgatatatataattggtagttgatgattgttattatatatatgtactatcccagttataattagatagctcaaatagtactgaactagttgctcatatatatatttgaagtattgctattggccaaatctgcagctagcactttttataaggaattaaatatcttaacatttgttagcaatattttctaaaaattattttttcatttacatgggactcaatatttaatattacaccattatacactgaggagggtgctaggcattgtcttacttaccattttgataattaacagtctaattattattgttatataattataaaacatatagttttaaaaagaataatacactatatatcttcaagttgatatgtgttaaatcataattaattaactgatgtaatatgtattttttgtattcaatttttggcttttctctcttttgctatatgtattggacacgtacgtataccttctcttttactatttaactactgtaccagtccgaatattcaagaaatacaacattattttacccattccttctgatatggtaccagaaccataacagctgccaatgtcatcatctacagtgagtgtaggaaatttaagatagaaatttactatcttgtccctacaccaacaaaacaaacagatcagtaattaaggtcaatttcgacctttcactgttcaaagacttttcaaagtctgaacactcaaaacg

SEQ ID NO: 330906 - DNA, 1657 bp, Cannabis indica
aaatatcaattaaaactcaatttattttatcatttaaaataaataaaagtgtatttttaaccactaatcacacaacaattacaatttgttgtgactaaatatatttttagtcataatacttgactaaaactaaattagtaaaaatttgtatttaaagactatgttttagtcacaaataacattttgttgtgactaaaagtcacatttagtcacaaaaatattatgttgtgactaaaaagtttgtcactaaaggtaacaattttttgtagtgttatatagtgacaaatttttaattacaatacaaattttttataattaaatgtgacttttaattacaataaaaattacttgtacttaaaacatagtattttgatacaaattgtcactaatttattttagctacaataaatattgtgactaaaaagacatttagtcacaaaaaattgtgatttttatgactaatatatttagtcataaattttttagtcacaacataaaaataataatttataattaatcatatatttttttttagttacaaattttattgtgaataaaagtaaaaaattttgtagtaaattgtatagtaatactactgcattaattgttattgttcacacatgcatatatatatatgagagtatagatattttttttttgaataaatcatacaattttattaataacaatcaactaaaataaaagcctgcaatccaatcgagacatctccctcgcttgaaacacgactaagattaaaattttaaaaccagacaaataatcagctgcctaattcccaaatcgtttgacaaaaaaattaaaaataaaattaaatgaaaacgattgcagcatcacagtttaccttgataatatctatattcagtttcatctaccactcaaaagatagacacaatagtagaaatattattgctgcaggttcattcaacctcgtagcttgagcactcaactattgtgcaatgtatataaccacacaacaaccccagtcacaaagaccttgttattccactattttccaaccactaacatcgatttgatggtgagctatcgaataacaaaaaagaaccaacactaataaaaaaaaataaaaaaagaaccatgtcacacagacaagactaaaacactcatcaaaattatgttccaaaaagataaataaaacaatcaaaaccatgtcatagagacaagactaatcacagtagtaaaaatcgaatcacaatagcgaaatacaaccctgaccaagccgcacgctcagggaaagccaacaggcctggctggagaagaaaaacaacctcctgtagctaaatttaggaacaagaaaccctaaggtagcgtttggttacaaaatgaaaatgaaataggaatgaggatggtaataggaatagaatggaatttgaatttaattcttttgtttggtaaagactatgaaatcaataactgaacaagaattgtaatgtttggtatagtatggaatgaaatagaatttttattgttttgactaaaatgtcctttactattttaaaataatttttgttttataaaattattattatagtataaaagaaaatataatatatatttatgtatcactctcaaattatatttttttagatctaatgatcaaataataaaattatatataaat

SEQ ID NO: 330907 - DNA, 693 bp, Cannabis indica
atttttttaattacaattttacgtgtcctataaaataatatgaaaacaatataaaaataataaaaatacaacataaaaataataataaaataacaaaatacaacaagattacaactcaaaaaaataaaatgaatcatctatgtttttgtaataaaaacttataaaccgcaaaaatatttgaaattttatacgactgtatttttataatttttttttttaacttttttagatatatatgaaaatatccttatattttttttgacgtagtgattagaattactcatgaatttacgatgcagatattcgcaaaccgcgcagtaacctcatcgaaccagaatagctcattgtctaatcgaagagcatgattgtcaaaccattaactgcaaaaaataagcgagcaacatgagacaaactgctctcgaaaatttagacaatagagctataacgttctcaaacagcacaccaaaatagctagagcttcaacttgtaacatcgaaaactacacaccaactcattgacaaatcagaatgctccacaaactatctataaaacaaataacgatgatattaagaactaaaagaaaatctcaatagtaaactctcaaataaattataattaaaaacttatcagcaaagtctgtaacagtaggcccaccataaaatcgacctacaaaataacaatgaaactctatta

SEQ ID NO: 330908 - DNA, 860 bp, Cannabis indica
gaagttgaaactaataatggaatgaaattaaagaaatgaatcacaactatatcttatctaaactccctttagaaaatccatatcatatatatatatatatatatatgtatatatataaatgtaaatatactgattttctctgttttgtgttgagtagctcactgaaatccactttcagactcattcgaaactcattccgagactcctttatttttggcatgttcatacattctatttatttgtatttttttttctattttatgtggagtataagagaagataatcatcaatttggtgattcaaagctcaaaaattttatacttttggtgttgggattataaatattttgtaattggatttctctatagtcaaaaatctatgttcttgttgtttgttatgctaaatgaatatgataattatatagcaacatttaatcactatataaattgtatatatgataagattttcacaatttagtgatgtaatgatcataacttttttgagttttgttttgagattgtagaaatttagtgtcaccagctagctatatgtatgcatataattgaactatttatagtcaaaaaccaatatttggtttttagttatgcctaatgaataattaagaaaatagatatggcagaatttcattacttttatttgagtagcaagactattattgttgtagaaattagagcaccaaacatttaatcaaaatactgaattcttaaatgattgtacttttacatgaattgatctctttcatgttagggagtattttacttttttgttctcaaacattaactaataatattttcttcaattgtattatttaaaataaaataaaaaacacttagcataaa

SEQ ID NO: 330909 - DNA, 1698 bp, Cannabis indica
aaaactcatgatgatttttgaaataacttcaaatgtcaattttctcttgaaattctttgtctccacataactgcatgggaccctttctccacctaacctccaactgtctcccttattattttataagagattattctaaaagcaaaaacatattcactatagattgtgctatgtttgacaaataaataaataaataaacaacatcaattttacatatatttataattcaatggtgtaaatagatatatttacatcaagtttttttaatattatcgtctaatacaatattacaaaacttaatacgaatttaatgtttaattaatattttcattaaaaatataaaaaataataattttattattctattatgtaaaataataataaaaaaatttcatccaaataaatattgtatcaaatttgacacaatatatgctatgtgcgttcattaaaaacaaattattatgtaataaagctaaatcacattttgacacactattagagcttattttttattgagctatagtttggttttctattgtttatttgcatatccatttaaagataatctaaaataggagtagtatcttatacatggcgtgcattaagactatctccaatgaaaaatttaaaatatgtgctaaatttaacacaaaaaataaatttatgctatatttggtccactatctagagcatctccaatagaaatgcaaatgtagaatatagctcattttgtattattattattattattttatattgtcttaataaattattaagtcaacaataaatgacatattaaattttgtattaagatttataattatgcattaaagcataatagtaaaagttgatataaaaatatcacaaaactactatttgtgtcaaatataactcaatttatacatcttccattaaaaacggtattataattgtgtttcaattcacaagatgtaaaataagaaaaaaaaaattgagttgattatattgatgagaattcaatattttattgagaataataaaaattattatttaaataatagtaatatggtaaataaaaattgtaaagtatagtaaaagtcagtaaatcataataattagtggcatatagtaaataaaaaattaatatttattgtggaaaatttgataatattatatcttgtactaaatttgatacaattttttagcatatgctaaagttaatacactttttataacatcatttaaaataataaattttttttagtgtgctaaaatattataggagaatttttaattatataagtaattttaaaattattaacaaatatgaccttagatatttaaacgatgaaatggactgtaattataccgcatatgaacaattatatacacttccctctcactgtactcagcgtcatcttatctttggcttttatttttttttttattttaggacaacaaatagataatgaaatggatactagggtagcgtttggttggaggtaataaaatagaatggaaaggaaagaaaacaatcttcattctattctttctttagttgcttattaaagtattagaatgatattctaatagaatgatctttccaccattttggtagaatgactattccattttgaaatggaaggaaaaattattctaatgtatgattagaaattttattaatttttttatgcattttaaattttgttccattccatt

SEQ ID NO: 330910 - DNA, 780 bp, Cannabis indica
agagtactaggaagagtactactccgaaaaactacgatcagaccaataacaagagccacgagccaaaacaatgggcaaccttgttagcagatcgcttaacatgagaaatagttacattaaataaagaagacaataaaacttttgcagtcttttacaacaattccaaacattgaaggtatatcaatttgacacttgtagatttacgggaaagaggtatatttttagttattttaatttttttaataatattaaatatgtataattatatggaccaatatgaatgtaacacttgtagatttgtttacgtatgggataatccatgctggcacaaaactactcttgtagacgacagtagaggttggcgggttttaccattaaattttgaaatttaagtataaataaaatgataattgagagaatttaatagcaaaaaaactcataaaataataatgttatgattaattattaaaaataaaaaaaaaattaccttaaaaaattgacactttgttattataatatagagtgcaaaatatagtataaattaaggagtattgctttcggacacgtgcataacaattctctagaagtgccattctataattagttaacgatattttttaaaaattattatattaaattatatgtttattttttcatttttaagggtaaatactattttggacatgtgttttgcaaaaattacagattagactttgtattttgttaaatgacaaaatggaccctgtattttctaaaatggtaaaaataagaccctgagct

SEQ ID NO: 330911 - DNA, 1186 bp, Cannabis indica
gggtatatatggcgtcggttcgtataaaccctttagcgtcgccctgatcagcgtcggtagcgaatttcgcgaaaaccgacgcctaaagggcttaaaaaccgcctctaaagggtgtttttgtagtagtgcctatatagtaagtctcatatatatagattttttttaaaaaaatatatgtttatatatataaattgttcatattaaaataatgtatggtgttgttatttggtaattaacagtacaaataaaaatagattgtaacagttttaaaaaacaactattatgttagtcaaatgctacaacattggttcagatataattagttgaaatactgtagcattctatttaattggttttaagtgcgtcacctttgcctaaataaaggctttagtcattgttgtaatgtaagaaataattcatactaaattgagagagcgtaagatagagtgggagagagatacatgccaatacctaatattggagtacgtgctcgacacactcatgccactcatgcaccattacatggagatggtccacatggtaaacaaaatttatctccaaggcctccttagagacatgggcgtggaaagagaagaaagaaaacaactttctaattcaaagagaaagagagaacgtctcatgggtagttgtgccacatatgacctcataaagaatcaaggaggacccaatctacataattttcctccttttcatgaatcccaaggaaatatagaataccttcatggaaaaaacaatatacatccacctttgagtaacaacctccgtagaggtgacatgggagtttgtgtcaacaatgatgcaaatcatgcatttggtaatcaaaactgcgccacacatggtagccatgacccatctccgtgaccacctcatgttccaagtaataaaggggtcgacgtcgaggaaaaaagagagaaccctcactgagaaaggcaacaacctacccaagaggcgagttacccttcaaggttacaagataccacgacatgttcccaactgggggacaaggaaatcatcaacaaaccttcatcgaagtagcgacaacaccgattcgctaaattgctctataagtatttatgacgacattcaaccttggtcccatcaagcacagcctcaataccatggggaaggatcaagtgaaaatatatacagggggcatctccaaaga

SEQ ID NO: 330912 - DNA, 636 bp, Cannabis indica
ttgtatcgaaagtctacttgataagttaggtggcatgtacccattggtgattacgccggtacaagatggagagtcttgtttggtgccttgcgtcgaaagtcttcttaacaatgaaagtcaggcggcgtattctgtttggtgatagtgatggtgcaagatgaaagatcgtttgagaagaggctatgtgatcctatgtttgaggggaggattgttgggtgtgcaactaaagtcccacgttgactaggaatggaaaggatcatgagtatataaggatggacatatctccattagtatgagaccttttagataggtgtccaagaacaaaactgtgaggacttaagcccaaaacggataatatcatacctagagtggagatggatagtgtctggcttccttgacactacctattttctttattaagattgttgctaacaagaatggtttgggataacaaatatccatctcgttggtgttgtggatatctataaatatctacctaaaattatcaacacttataagtgatgatataaattattttaataaacaacaaaataaagaattaaatttaaatattttaagcaaaatgattaataaatttgtcatgggaagttaatcgaagctagttcctctttgcat

SEQ ID NO: 330913 - DNA, 644 bp, Cannabis indica
taaaattcatactagttaagtttctaatttaatattttccccttttgaagtgaaatttaaccatatattttacactagtctagatgattaatttaacaaacagatctgacttgttttgtttttacacattttgtgtcttgcaactttccattaagagtctggctgcttttttatgtttaatattttccacttttttttatgtttttagttagaaacatggctgcttttttttgaatgtttatatgttaagagtctggtttccattaagagaagtggtgaagttgattaaaaatagttttcattaggctaatcattcttttgttttgttgcccctgatcatctataaagtagatgtgattaaaatttccaagctatctataggctgtgtagcaccttttggtttgtaaaggctgcttcaagcatataataacacttaacttgattacattcaggccttaagtgtaggatttttctaccccataacaactgaactggcctgcatttcagtagagaatggtttgtgcatatatgatgctcaatacctcttccattatatgtttgtagacacacttaaccctgtccattttgtcttttcttgttaggaaacaacaattcttaaccgggtttggttaaaggttgaattt

SEQ ID NO: 330914 - DNA, 1293 bp, Cannabis indica
agcggtgcacattaacaatcagttgtaaaaatcagtgtaccggaaacatgaccaaaaataggggtagtgtatatcaaaacgaccacctcgacgagtagatcacacccataccgactgtttgtcaaaacagtacacgatgtcgttgaaaagttgctgaaaagggtcagagctacaaaaatgtcaccgaaaaaagtagtgaactgggtgaaatagcttagtgtaggttgttctcctcgatgagctaagtctagtggtgaagacggctcgacaaacggacaccggaggtgaccgaaaaattcgttcaaagtttgaaccaccaaactttgacttgcgatcccaagctaatgacggcgaaaggagcggcgccacttgggggtgaggccgctggaacttggagttttgtttggttcggcgtgtagggttgggcggtggccgaagatgggtcgccagagagtggtggttatggtggtttatgggtttcctttttgtattttgaagagagagaaaaagagagaaagagagagacgttggggaatgggagggaaaagtctggttgttatatatatatatatatatattattttattatgtacatatatattattatatttacttattattttattatatatatatatatatatattttgtttctacttttgtactcggtcaaccgagtccttacactctttcatggccaacaatgttggacatgataagtaactcatctccattttgttttaaacatgatatacaaggacatgaaatgcgtatttttcgtgtttaacaatattctacataaaaaaaaattaatgtccagcattgttggacgtgataatgggaccaacacaaaaatactagtttcacatctagcaaagttggacgggaaggttttcttttttttttcctaaaaaaatgattaataataaataatttgaagacccagcatcgagttataaccccaattccgtccagaccccaccttgaaaaatcctaaccacgacaagaaacccaaattcaaaataaatccagtaacaaacttaataagaaaagagacaatgcacaccctaatcaatatacaaaaaaaaatctttataacaaaaaatcaattaaaaaaattagcgagatgaaaaatataatcactaaataccctaatcaatatacaaatatatatataactcataaacctgccgctgccaaatcagatctgagctccaccatcgttgatctcctccgcacctctatcatcattcttgtcctccatcgctgcaaaaaaaaaaacgaaaaaaaggg

SEQ ID NO: 330915 - DNA, 835 bp, Cannabis indica
gcacaaaacccaacacttccattgttggagcaataggcttccaaaatttgttgagcgagattttctcttctctgctcctgctcagcacgttgagcttcaacttttctcgagtgttacttgaatatgatttgaaactactcacactgcttgttaagagattcttgtaatttttgttgcaagttatcaactaattgactaagttgttcaacctgagggtcgacttcctcaggatcttctagctccacgtaaggttcatcagcaggaacctaactactggcatcaataccaatagttgttggtggtctcgatggtcgagttgtggaaatagttctgaggccttcacctgacatctgggatgtaggtttcatcccaacactagtcccagtagtagttggcatgcccccagtaggcagaccaatgtgggtgcttctttcaacactcgttgatcacgtggcaaccatcttgttcaagatcttgagttgtggctctcaattaaagcaccaaaatattaacgtagaaagctggccaacactctcttgctcgaaaatatgagtcaaaaataaatgagagacacaaaatttaaactagtttactccttgtgtcacaacagtaatggacctacgtctacttcgagtttttttttctcacaagaattataagagaattgactaaggcaagagctcaaatttctagagagagatgctctgacctttaaaggacttttctaaatgcctccaatgagcttgtgaagctctccttttatagggagggatttccattaaaataataataaaatatgaaaaaaatcattctggactgatcttgaccattgatg

SEQ ID NO: 330916 - DNA, 1422 bp, Cannabis indica
caacggccatatgagatgagttttaaaataagtactatatacatatataaaataccactaaataaaattcaacggatgttcaatcaagttgtataacatgagggaacttcctttgagatggagggctactgtctcggaacggggactagggtcgcgaagggcttcctcttggagtatggtttgatggttcttatttcggatggattgggtaatggggtatggagatctcgttgtagtcgagaatgtcatccatgatattttctaatttttctcttgaagtgttcgcatgttgcagggcatgggtggaatggtagaggtgctccgccagtttgaatgactcctgcttcgcctctatggctttaacatgtgcctgcctaatgaatttttcgtgttcttgcaaaacaccatccagcctagcacaatttacacatcaagaaattgaagctgaacggagtttaggactccttgaaggtgtacctatagctcttgttgaagaaaaaggatgaggtggggactttttaagacttgattcgaaagggttgaatttttgggtaaggttccatgtttagtaggtaatactaatacggggtttcaataaatgtcttgttttaaaatccaaacctttacttatatagtgattgggtgggttgatgtacacataatgatgttcatgtacacgtaatgattcttttttcctaatttaactattttatagttaaacaatgtgtacaatagaaataaatcccattagtaatatctgaaaatatgacatatatatttacaacaactcgaagtacggtattttactaaaatattaatttgtatattaaaaataaaagcatttaaatttatgatgtgaaggaggagatcatgtaaaaaattaattgataagtcataaccctgcaataatattcgagtaccttattgaaagtagtacaggggtaaattgggaaaagaaaaatttatgataggacatcaccttctttgataaacttacacttaatgtcaattcaacccatctaataattacaatgacaagtaaaggggtaaaatgggaaaagtagaaattatgataggacaacaacttatttaataagtcacccaattaaataaaaattttgaaaatattcgttatggtgagaagattaaccttcttacggtacataaaaaatgtattttttaccatttacaacttcttaaataaaccttcacatagattgttaaataaatgcttcaacatagtttggttaatcctttttcataatggaatcattttaatttccaaattttataagaatcaagtcatgttgactgaggttttcgacaaccaataaaataataataatttagagagcagtaagaaattaagaaggagattttttacgtggttgggcgttaatgagccttagtccacgagtcggt

SEQ ID NO: 330917 - DNA, 744 bp, Cannabis indica
atctatttactcaaaataggaagaagacgatgaagatgacgatgatggtgacaattgataatgaagaccaacttgtaaactctatcgtagcttacagctacccataacgcgctttgggtcggtttgtgattctaaaatttgaatttacaaagaaaaagttaaagagaaattgggtttcgagcaaactcaactttattattatacaaaattcttcactctcagtgggtttgggtgtggattatgtacggacttttagagagagagagggaggaaaatgggagagtgattggctcatgcgactgatattatagtgagacagattagagtaacccaaaaaacaatttatttttttaatttttttttaggttggtgcttttttgggagaggttttaccggaaaactggtggaacaagtcacttgatgactttctttgagagaatggagagttggtcgttagttagactcaaatgggaaatcttaaattaaaactttgacagaatatatatagaaaaatcaaaatcaatgggaatgcgtatacaatatgcaatatatacacatattttatatctatgtttataaattttatggtgtatatcttctttcttttcatcgagatatattgtataatctatttgtcttttaatcggaatttttaaagggtttacttttacggaatatattgcgtggtacattagatgagtcttagggtacattaaatgaatgtcagaatacgtttctactttt

SEQ ID NO: 330918 - DNA, 1020 bp, Cannabis indica
gataactaatcagattgtaaagagttttatttagggcataaaacccaacacaattgtcccctaaaaagtaattttttgaactaaaagggactttttaattaacagagagtacgatcgtattttcccttttaaaagaaaatgcaagcttattttggctgttcagtacttcaagaaaaacatcatttcagtatttattaatttgactcatcttttcccaatagttttcatacattcgatcagtcatcattacgatcgaacgatttccatcgtttagatataaggtcagcattttccccatattttaccattaccgcttcacaaagcttcgaaggaattcaaattccagcctttatttctctctgaaattgcatgccctctttatctctcacatacttctttcgagtttttaccagttttatctcctaatcttagcattgtcaagaaccaaaccctcaatattagaagttcttagcggggaattcttcgagacttctttctctcagtaaaccagtaagtgtatttccaccatttactcttttgactattcttttcttatagtttcccatatatttttgtatcgtcaattacttgtgtgggattgtcttttatatgggattttagcaacttaagggtaaaaatttaggttacatgactcacatgtcttgagtttttatgtttcgtgtttttagattttcgagacattttttcttgtaatcaagacaatgccccattctgatcaagattatgaacacccagaccttgtagagtttgataatccccaattacaagcattggtcagacccatagaccacaatccatacttcagataaatgatgaaaatattaagaaacactcccttagagctagtcaagaagaaacatcaacttgctataagagacatatataagaaattattgagggtagacatcgtaatctatgagaagcggcatggactgaattacccagtttagtaaaaatctccttagcaagaccattatttttacctcaagtcactgttgc

SEQ ID NO: 330919 - DNA, 1109 bp, Cannabis indica
ctcaattgcagtgtctcatgagttgagtacatactgtaatacttaaattaattcatccaaataagatctaatagctcactctattcttgaatgttgagactggcttgaaagatcaaggtgtggattcttcattggaagttcttagattggatgatcgttaattgtactaaaagaaacaaggataccatggtaggcttcaagaggtatgatctttctttaatagtctagatttaatctatatatattatgttgaactccttgagtttatgattcttattagataaaaactatttttttttcaaatttcgcttccactttgatatggaccataaaaaccaatattaacacctacagtctctattttatgtgagattctttgactactaattttttatttactataacatttaaagatacctctttggttaatttcctttttagataaaaaattgtatgatgatttttttgtttggattttttaaagttctcatttcatttatttaataagacttataaattaaatttaataaagcaataaattttttcttttaaaaaattatttaccttttatttagtatcttaaaaaatagaaaaaaaaaaaaacataatttattttagttttttttgcgacaattttttttattaatttaattgttactaaataaaatataatcttacgtgaagcgtggtttattttctattttaatcataatataattaactatattttttctttcttttttcttgtttttttggctgagaaacaagtgtgttttattataattattattactattttgttttgctgaattgtgagttgttgttaaaaggtggccacatgactcatcctttacttccatgttctttttttctcgttttcaatttttttatttattttttacatccaaaacaaattaacaaacaaagaggagctcccaagctcaaattaccctcccccaaaatatatatctataatctataactactataaaagtgggaataattttgggctttcactaagtaaattacataattaaccttcacctgatattaaattacaaccacatacactattatttaggtcaatcttaatatttctctccaattaa

SEQ ID NO: 330920 - DNA, 1582 bp, Cannabis indica
gttctgacaattgactaccaatctgttatctgaattcaacattctaaataatagggcttatctaatattagctgcatttcttgttttttctcgtctttcttcatattagttctattgttattattattgctatcggtgtttcagggaatatggctgtgcgagcaccgtgactaccctaccgcgcgcaaagtggtggtaaccctgaatggaatatgagaatctgtgacttgtttgttttcttataaaactagtatttgttcaatgttaatgtgccattattgctctaccctcttatattaccaccaaaaagtgagaactcttatttataagcatgagaattacaaagagtgtagctgaaaaagctccactgctttaatttaacagactttattacatttattaccgcaacaaaatttaactgaaacaaaaactgcaactaatcagctaaccgagttaattatattttacacattagcatctatgtgcaagtgggtgatccagtgctaaagcatctgtaatggtatgtagctaaaaggttaaaatagaaaattatttttattgttgttgattattgtaataatatattataatttaaatttgtcaaatataaattaattttataaaataaaaaaaaataatagtaattttaattaaagtactattaaaaaaatttaagtaaaaaagtaaggaagcgttttacatttacatttagtagaattctatctattttttatttatagcgagttattttttgtaatggtttggaggttttttttttaagtttcatactctttattttagttaaataataaagaaacttaacaagagaatttagctgaaaagcttgactcgaaaaagagcacaattcatttatttatattcagaaattacaaggcaaaaatagaaagttagttaagaaaactaactggattaactaactaatcttaagaaactaaaacaagtaaaatgttagttaatatcccccctcaaacgaaaaggggtagcaaccattttagtttgccttttagatacaaaaatcgatctgtggagagaggttttgtaagagaatcaacaacttgatcaactgttgggacatatttggcagataactccttggccctaatttgatcccaaagtgtagatcgatttctatgtgctttgatcgagcatagaagattggattagctgtaagtgctgatgctcctgggttgtcaacccagataactggtgtgtgaactggtgtgatgtgtagttcagataacaaattaactagccatctgatttctgcaacagtgttggctagacttcgaaattcactctcagtgctggacctagcaacaacattttgctttttagcagaccaagaaaccagattacctccaagaaaaatcacataacccccagtagatctctgatcatctatacagctggcccaatctgcatcagagtatgtacaaatatccattgaagctgctggtatgagaagtaagccatgcgaaatagtgcttttcagatatcgaaataggcgtttgcaggctttccaatgtgtgatagttggggcatgaataaactgactaagttt

SEQ ID NO: 330921 - DNA, 808 bp, Cannabis indica
ctttaaaattaaaaaaaaaaaaaaaaaaaaaaacttaatttaccattaccaacaatactaaaagagtggagtttatttagttcgaattaattttggaaaaaaatgatggaaagaaacaacaaaactcagagaaggatactccttcctaagctgcaaagagtgcaccttagggcatggtcccatgtccattttctgaaacaaaagcgaccaaaaacaaggatatttagtgcagaaacaagaaagaaaagcaaatatttctgagaatcagtcaaagcttcaccctaatctaagcattcaaaatcacaagagctgccattcacaaatgaataattaataataaaactcaccgttaattggaaaagctcgtgaggacaaaggccgaccaagtagagacggcaaacatcgcgatcgtaatacttgcgactgacctctcgaacgtcgccgtttcggtttgcccccatcaactggtcgagctgcttcctcagggcgtccatggcttctttctctcactctctccctgagttggaagagttttcccgattagggcttggcttggctcgcaatttttcggagaattaatcaataaaatatgaagcttcgaatcgataaagcactaatcacacgattttttccccttctgtttctgatatatatttgttttgaaacgcccttaagacgtttattattatagtcccttatctttccaaaacatgtcacataagtcctcaagttttcatttttcatgggtatgtttattatgaaaaaaaaaaaaaaaaggaaaacgaagatgtgctaaaagtataacaaa

SEQ ID NO: 330922 - DNA, 949 bp, Cannabis indica
ttattttcgctatcttttttttccagaaatttcctgctgcgatgactgatagtattttagccacatctctctcaatattactcggaattggatgattcaagatgttctggaaagctaagaacgaggtctaaaactttcatgttgagctcaaagtctaattctgccattaagttcgtccgaatctgcaattaatttccgccttatacaatcgagcttgctgacttctactattttccaccaaaatatgctaaaatctcttcaaaagactctaaatggatgaatagtctctaaaataacctaacaagttaaaatcacactattcaataatttaaagaatcaatttaagaatattaataaataaattaatcatatttataagataaatatggattcattaagtagctccatcagagggtggtaaagttcctgtaaagcttttgttaaacctgtaaaagcattcaagagccatatgtcaaactttgtgacatagtggacatcgtggcttgttttttgctgtaggaaaccttccaccatgttgagtactatggtttcctcttccatagttgtaggaaggagatccacctcaagacatatagctcgagttagttcctctattatcgtagtaattagaagaactggaagatgggtagggtgaagagtgaaagtaacctttactaatttcttgtgctctgaaattgcgattgtaatgagcaatgaaagtttcatatgacagttgagtctccataccaggattagtatcagtaacaacaagattggcacttagatctacctctttgtcaatcttttttattcttgattcagaggcaagaatgagtgcttcaatttcagctacaaagtatatttcaattcgagtatttgatgatatgatgaatgtatcatattcacttggcaatcctgttaggtccttttttggcaatttagttgtcaa

SEQ ID NO: 330923 - DNA, 771 bp, Cannabis indica
tgtcatggtgccaccagcgatgcatacaaccggaccttatcgtatcagattgcaaagtgcttgtggattacatctgtagtgaagcatcgcaccacctactgctaaacagattcgccaaagaaattacaaacttcctttcttgtattcctaatgctaaacttatgcacatatccagggagcaaaaatgaaatggctcacactcttgccaagtttgcattaggcctagttcaggaagtttattggaaagatcatacatttatttgtaacttgtgatttgtaacctgtgatttgtacctccaatttcctattttgaatgaagtccaggtttcttcaaaaaaaaaaaaaataaaatccaagagagagagataaaatttgaccgtaccaaagtagaattgaattatgtaacccaaatctagggaagctcacctcaccctcctcaactcaaactcgagggttcccttttcttcctatatttgtttgttttgacatgatctcctctactaactttacctcaattcttttctttttatttattaaacaaatgcaagatcttctcctcagatttgggtcccacttcacactccaactcatcctcttattttttttcccaccactagttatccactaattattataattctttaaatctctatataaatcatgaaaatatatccttactttatatatataatataataacaaatttataaatttatgtactttatattaaatatagggtaaatactattttggaccctgtgttttacaaaa

SEQ ID NO: 330924 - DNA, 877 bp, Cannabis indica
cttgtttttaaaaacttcaaaaactattttttgttctcatttctaaaattaattttttgaaaacaaaaaacaaaaaacaataccaaacatgctcataaagtcttagggatgtagatccgtcatttggttagattataatgtatttttactaactcaatataaatggtaggttgtaaatatttaattgtaacctgtttaataataataataaaaaaaaagatttaacctacccaataattttgttggtttggtcagattaacctgttcaaattaatctttattttttatttttttgttatagtttaaattaatgttaaaaacttaaacataagacaaatataaattgaatagcattaaagtattaaacaacattcttcaaaattaaaaaaatatatattcatgtgtaaattttaaaatttaattttaattcaaatgagtaattgatgtagccgaatcacccactctttataattgtgtaaagaatttgcttttgttggattttttccataactttagttgctgagtcagttttcaaattttttttttgtatgatatctaaagagagttgagctcttcccattttttacttatattataggtttagggtaaatctttaaagagtaaccctcaacatgttgggatttcagagctacgaaatggatagaaacttttggttacataaaaaaaaaaataaagttgttataatgaaaaaggcgcaaagagccttcactgcccaaaaaatgcctacacgagttgcaacattcattgggcaatgttgcggcccactacacttagagcatctccaaagagacaccaaatttggtgttacactatcaccaaatttagtgtcaaaaattatttctactccaaccacaac

SEQ ID NO: 330925 - DNA, 736 bp, Cannabis indica
gtactttcacggattgtaatccataatgtacgacagaccgtcagatgagagagttatttgatctgacggctgagattgatctaggggtaattaaggttaaaaagtagaaacgtatacctgagacccatctaatgtactacggaatacattccgtgaaaatacatcccgagacaaaatcatatcccatataggctatctgtacaaataggctatctgatactaaataattcatgtggagtaatttgacacacgtgacaacatgtctgtacaaataggctatctgatactaaataattcattcttatttaagaaaaaaaaagataatatatatatatatttatttatatatattcatgtcagactatactgctttcacattgacgatggaagaggaaaagaggggggggtcactcttacaagaactcttatcttcattggccattgcttttgaaaaataataataataataataataataataataatacatgcatataaagctttataattttatcaaaatccctaacacccatgcacatgcacatgcatgcatatcaattatatatacatcaaatacatataaatatatattgatttgttattagatatcatcaatcatatcacatttgtgatttttcactttaaaaagaaaggtatggaaggaatgctcttaaaataaaattttgcagagagtaatttgtcgtataaatatttaagttaatttttgattgtaaat

SEQ ID NO: 330926 - DNA, 805 bp, Cannabis indica
ttttttttttattaagtttcatattgcagtatactgtgttaagttttcactagttattcctctggtgttttttagttgttctactgttattttgagttgttctgttttgtgttctattggtgttttaaaaaaacataaaaagattgaagtgtgacagtatttttgtaaaaactaactcaaattccagtatattttgaagttttccttctataccgagtatgatcagacatgaaatgatattagtttaggtatgataccgtatgaaaatataagtttaagcacgacatagatgacataaataatttattttaaaatgcaacatattaaaaattttatatttgataatggtaataataataatttaagtatttactaataaatatttaaattttaatagttttagtgagttctttacatgattttatgtgaaaaaatgttaaaaaataattaaaactataaaaaacaaatacacataacttagtaattatcttataaattgtaaaaatagaatataaaaaaatagagtacgaatttgagtctctataagaatgggtcaacatgaatctaagcataaaattaggggtgggcatccgatccaatccaacatttttttcctcatccgatccgatccaattacaccacaaaatccaatccaatccaatccaattactaattggattggatcggttttttaattggatatccaattacacacttaaattttaatattattttaaaaaataaggaaaatacgtaaaaaattaagtatgactttttatttaagtttaatacttcataaatatac

SEQ ID NO: 330927 - DNA, 880 bp, Cannabis indica
attaactgctgtttcacccgtagagtgatcaaagagataaaaagatggtgtggcctttttgactggccttccgacattagagagtggttatcgaggttttccaacagcctgtaagagaaagtgctcaatacagtagttttggtgactttgtacactgtttggactgatagaaattgttgtatctttgagatgaaatgtaagatagctagaactatgagtaaagagataaaatcttgtagtaaaaatcaggttcgtatgcgcttgtaatgggggaaaaggaaagcttgatagcttttatttttaatgtaatttcaggttggctttgagggttgggggtttcggccagctgctttgtattgctcttgttctgtgtattgttcttgtctgtttgaataaagaatcttcttcttcttctttttcttgttacaaaaaaaaaaaaggatcgactgagcatcagggctttggttttgttcatttgtaagtttactgactgtgattatttttccactatcatgttattaatgtttatttagattttttttcttgggttgaatgtttaggcatgaatgaatgtgaattggtgttttatttgagacatgttgagtagctgaagtttggaagataatgggattttatgggaataggatgtttgatcactaataatagtgttgttaattgaaatgagcagagtatatgtttttttggaaatattttctctgagtaacaaattgaagagaagagaactgctaatattatttttttttatttgtaactttacactgcgtagtaattcacttgaaatttggtataactagaacttcactcacattgtaatgactctattttttgagattcttgaagctctttataaagttattat

SEQ ID NO: 330928 - DNA, 792 bp, Cannabis indica
ttttgaatttttgaggtcttagaaaaaagaattcaaggatttttatgagtttgagaatcattgaagcaagatgaagatgaaaggaagaaaattttcaacaagaaaagacaccgatcaaaaaaaatattttctaccttgaggctgaagaacacttgaacgattgatgaagatgaaaccccaagaagctttttaaaggctcgggcatggaagactaggatgggaagagttaaatttttgattaaaaactctcttatttatagatgagttcaatctcgtaattatagagcaattgagagtcttttaaatttaatgttttaaagaaagaggtaaatgatcaaaaaaaagataaaaatttatcctttcccttctcattgaagcatgaatttcaaaattcctatagaaatatgaatatgaatttgaatttaaaaagcaacatccattcctaatgctacattaaaggaaaattagagatttaaaagaaaaagataaatgataagcaaaagatcaaaattattttttcttcttatttctctcttagatttttgaatgacatatgagaataggattaggatttaaatcctattagtcctaatgccataaaaaatataaaaaaaattcaagttttttaaagaaaatataaaagataagtgaaaaaaagttataagtttttcctctttttctttgttactcaatttttgaaaatccccaagtacaaagaaagagagttcaaagtcctaattctattgggaatgcttgaagaatagaaaaaaatttctaagattgtcaaaattg

SEQ ID NO: 330929 - DNA, 1141 bp, Cannabis indica
tttttgttcacttatgcttgcaaaatttccatcgtatgtcaacttgaatcttatccatctccactcatttaacttgcatccatttcttgagttctattaatctatcttaaactagatcttttgtaagctctcatctatattaagagcattaggctagaccaaaaaccaaagttctaagtgctaggggccaagtcccgagttctaagttttaacttcggaaaccttagaaaactggtattctctctctcccaaacgccacctgcactatacaagacatcaagtctatttctcatctccctcatttgagatatgccttacattattctcactattataattttcatagagtcacattagaaattacaaagtaaaagcctgtaacttgtgtggtattgtaatgccctattccataaggacaccacaagtgtgattttataaactacattaatactaaaatattaattaattattaaaaattgtgagaatattaaaaacttgaataaaataaaagactagaaacggacattataacaacagtaaaaaggtgttccggggattgctgttataaaaagatttatagacaatagcaattcaaaacacaattcaaaatgcaccagatacagccagtccaaaacaactcctaacaactcggcacacaggccggtggggccaatatgtacattgctggagaaggtagtcaccgaatggcagctctaacttctccttacccttacctggaccacatagtacctgtgagtcacaaggactgaggaagaaaaacaatactaataatcatataattattattcgaatattatcatttagacacaatctaaatcaaaccgttacacattattcataagatggattcaaaatcactacagggaactgccatgaataagcatcagtaacagatatctgataatacaaaatcattatacaattaataggaatcatattcatttaaaaatataaattatatatatgttacttcataaagtaaccatcttcattacatcacattgcctaagcatgaaagttgatgctttgatctgataaacttgtattgcgttgcctaattaggcaagcccatgtcatagcctagcaccatatatcacataactgaatcacctaatcaggt

SEQ ID NO: 330930 - DNA, 476 bp, Cannabis indica
gcctgtcaaacattactacatgcttttcctcacctactcttctttgattgattgttgttttgtaaatatataagagtgtactagtaaatgacacatgccacccattgtactatgcagaaagcttaattaaatgctatttctgtgtcttctaagtactagttctagttctagatttatttctaactattgggtttcttattggctcatatgactgtttatgaatgtatttccaaataattattaataataataataaaaataaaaatattagccgtataaattctatgtttttagtttaatacttatatattatatatttttgtatggattactattatttgttaatgttacgtttttttgttgcagtcattattacaaattgcaagctaagtgttgatttaattaagtaatgttagagattttataagaaaatcaagatttattacaactctattgtaaaataatacaaagactaa

SEQ ID NO: 330931 - DNA, 634 bp, Cannabis indica
ttaactttgttgtatatttttatattacttttagtacacaaatatttatacttggataaagaaaaggaagtatttgtcctgaaggccttatcttttaattgtttttcaattgatgagagctgacattgagattgtttctgaacaataatgtctgcataaacaaagaatagataatttccacaattctttttgtattgagctccataaggatagattcctaattgctttgcacttatagttcattcattagattctaagttcagcatgtaattgttccaaagaaaattacaaaatcacaatacccatgcaatcattgacccaaagaaaattacaaaatcatatattccagctgaaaatgttccagttcgaattgaagtcccagaaggacaattagctaataattctaaagcacgcttaaaacgtagtggactagtcgattctaaagataaaaattttcgaaaaagaaaagagcaaataatcaataagaccctaataaagaggctaaaaatttcgaggacgatgttgatataaacaaatttcttgaggagatttaggtacctgaaaatattagaataatgagatctcaataaattatgtcaatacaagaaaggaatggaaccgactcgaagtaatt

SEQ ID NO: 330932 - DNA, 741 bp, Cannabis indica
aaagatttaaaaataaaattagagttttaattaatcaatttatttttatttttgatttattttgtttttaatttttaatcctttttaaattatttttataatattttaataattaatattacgtggaccactaaaaatttaccgcgtgtaaagtgcaaaacaaatttagggttcagtagtttttaccgtcgaaatttggatttttatggctaagtgttaaaaaaaagtaaagttcaggtgattttgtcatgaatatccctacttaaaattaataacctagcaatgaagttatatattagtaatggtccccaaaaaataagagtcattctattctcatcttctccatcaagttagaaaataagaaaactcgaagtcttatatttttttagaagattattatctaaaatcactacaataattatctctacaagatagatattaagatcattactatctatcaattaaggtacgcttttacaattaaattaagtttttctctttgaatcaaccaaaatattctttagatttatgtttatatacttataataattaatatgtaatataattgaattttgatattacatattttatgactaatagaatgttaacataaaatttttggctaattagcaattttttcttccgaatttttatatataccaaatcatgctctctgaatttttttggccgttaaaatttctccctgaactattgagattgttaaatttaaggacttttgtc

SEQ ID NO: 330933 - DNA, 667 bp, Cannabis indica
atgaaaaaatattttgtcaactaacttgccaaaaaaggactttacaatatccattggatcggatgacaaaattcaatatccaataaataattggattggatcggttgggtccaaattcattagatgtaatccaataaatacccctacccaacgccaagttgacatgtgggttgttactaagtctattgggttcaaagagcctctaattggagaggcattaacttgtgagttggctttgaggattgtctcccaatggtccactcttttgttttggttgataatgattgtaaagtagtaatcaatgctattaatgagatgattcttatatgggagatccacagctatgtctctaatagtaagaaatattctaatttttttagggttgtaacttttgtaagactctacatgagtttaattttgttgctcacaatactactcaatgggtgttggttaagaacattattgggtttattaaggtttcctcaatcccgagtgatatcatttgtaatgatcgtataactatttgtatttattaacttataaatatatatatactagcaaaaagctacgtgcgaggcacaaatactaaattttatgctaagttttttctatgttatttgaaagtgatacaattaaaaattaagaaaaatattattagttattaggt

SEQ ID NO: 330934 - DNA, 1091 bp, Cannabis indica
gaaaactacaaaaaaaaaaaattgatgcaattctcttgtttgcgaaatcatatcttcatgaatatcaatatgctcgaaccactactcaaaggcctgagacacatccatctacaacaaccatggatgcaagtgcgccttcttattctacttcaaagcccaaatggctagctccaccatcgggaagattaaaactaaacagagatgatgctattgataagtctaaaagttttattggtgttggtgcaatcttaagagactcatcgggtgctattgttgcaggtttatttaaacaaattcagggtcattttaaatctgaagacatggaggcaataatcttggctttaagtctgtaatggctcatatctctcaatatgacagtagatttcattgaaatagattcactcatggtagttcaaggactacaatcttcttacttatttactttttcttttcatgctgttctgaatgatattaactttctaggcctcgtttggagcctgaataagggccttctattgtattaaattataatactacaatgtttaggtgggaccttgtattgtaataaatattacatccctaatttttaatacaacctattttgtattattagatacagaataaaagtcatgtataaggttgtattgtattattagcccaaactctctctctcaccactaccatcgtctcactggttcattcatcttctccggctgatttggctggaatttcagtcatcttctccgatttggttcaagtgcttcaaatctatccctctttgtattcatctggtacgtattctctctatattatacataattgttttttttttttattattattgatttagatctgattttatctacttccccatcactctcccctctcatctcatcataaacctatctctttttttgtcactctctcctccaaaaaaacccatttcttcataattaccattgttatgccacttctcttaccgttgcatcccatctcggcttgtgcaggtcctgcagctctgtccctaatcaggtcagagcctaagccaactttctcagaaaaagaaccaacggtgccgcctttcaacgttc

SEQ ID NO: 330935 - DNA, 977 bp, Cannabis indica
gtgagatttttactatttcgatgaaattaattgttagtgcttgaaaattagtttttctcttaacgtgtccaatagaaaagtgatgcacaatggtcttggcttcgtccctatgaaatttcgtaattttttgagatgtgtagggatatattttaagagaacactagagtataagagtaaggaaaaaactatgccatatgcttttaacatcatatactataccaatacacaccatactgaaatcgtactagtgttagtagtatacaaattatatgatacaacatgcatgtaatataacaaacatacacatacacgtatacaccttttatactaatcttacctcgtttctagattcaagtgtgctggttaacctaaatggaaagttcactcgctgaatggaggccctatgccacatttacgtcaaaagggtaaataacttgataaaacttttttgaagacttaaactcaaaaatagaagtttccttatcgataaatagcctggcaataccctaaatattgagaaaacacataaaatgagatttagaaaaaatttcctaaaaaatggcagactgtttctgtaacaacggtaaactgtttttctgggctactgctagcaaaacagtagaacatttatgggaaaatactttgtcgctttctgctacaaaaaaactaaaaatgccatttcaacctcaaatcgaccccaatctttccacaactctctagaacacctaattaaggtctaataaaacaattcaagcaataaacacaagtataactttgaattctaaaatttacaattatatggtcaaatttgagctcttaaactcaaacttactcaacacagcaattagccactaaaataacctaaagtaagatctaaacaacccaaaatcatcccagaaatcaacccaagaatagctagggtttaaacagaatcatctctagaaaatcacatgttcaaactgttggaaatattttac

SEQ ID NO: 330936 - DNA, 1279 bp, Cannabis indica
aatcacgtaatacgcctatgttagttagggtgttacaaaagatatccttgttctgccaccaaaccaaaaaataagatctggaagaccaaggaaaagaaaattcatagctgattgggatgcaaaaaaacagaacaggtgcaacaaatgtaatcaatacggtcacaaccgaaagatatgcaacaatcaagcaataaaatagatacaacagaattatttgaattgtttaagtctctatgagaatttacacaggatgaaatgttatatttgatagattgctattaattggcaaattttaaatagtttgctactagttgcataatagtttcaggacagttttgatacctattacagatttattagaaaaataatttatatataattttttttaaaaatcagatatgattttttataagttgtataataaggagaagaaaagagttgcataacagtaagaaatatattgagataagatgtcacaaataaaataacaagtatgttaaatactaaaaatagtttgtatacagttgcataatagtttatctatagttggacgactataaaaaaaaacataattaaatgtaaaatcataacactgttgctattaaaaccttaaaaaatgaacatattaaaaaggttaatgtcaaatatcctaaacttttataaccagttccagaatataaaatgcatagagtacctacaaacataaaataactaaaaattgtctgaaatgaaaatcaaccaagaacaataaagattccctaaaaatgatcgtactttttcaatttagaagacttgctttgcttctcatcctcgctatcaatactttcatcatttttcttttgaccgtacgagaagaagagggcagcaagtcgagtgcgataaaattcaatgtcaaaatcacccggaacatctttcccattgatgaagaactcagcaaatgcagccacaaatgctccgcaatcactataacccagaaaggaaaacaaaatagttaaatagttattatacaacataaaataagcttaaaaacaacaactcactttttctgctgagatggtagatcaataatctccacaactgttaaaggagctttagggtcaggacctaaatcaggaacatgggacctattcttccaaaatccaagcagataaaaaaataaatgaaattaagacaacaaaatgaaacagaaattaagattaaacaaatgaaaataaaaaatccataaaaagaactaataaattaaactaaaaaaatagaagccttaaaaaaccaaacaaaa

SEQ ID NO: 330937 - DNA, 499 bp, Cannabis indica
atggattaaggtacgcttccgctatttaagttcttctctttgaataaacaaaggtattctttagatctatggttatacacttataattatatgtaatatgtttatctatggaattgaaacttgttgttgcatattttatgagtgatatagaaactaacaagtagtatcaagagccacctttgattgattttttgagaatttaaagttatgttcaagaaatttagggatttttaaaaatcttaattaattctaaggttttgatcttccatttatgattttgagttatcatatttttttcccaattaagtgaattatatatttgggattattgttcttactttacatcctcaaaggtatatgtgagagagatatttatattagtgtatatttgtaattattgtatcttcgtggataaaactactaaatttgttggccataaggttcgaattaatggcagatgttgttggaaattattttaccaggatcttagatgtactca

SEQ ID NO: 330938 - DNA, 578 bp, Cannabis indica
ggaggcatgatttggtacatgtccaagttcaagaggaaaaattcctaattacccaatattttcaaaaataattttataataaaaaactatgaaactattcaactggaacaaactttttttatacaataaaagccttagaaaaatataaatttgagctctaaacacccaactttttaaatcactgtcaattctgctttcaaaaaaaaaaaaaaaaaatcactcccaattcccaaaatctctcaccgttactggtagtacattattcattttttttaaaaccttttatattcaattcaattgaataataaatttaattttttttccttacttcaattttaaatttttgcatcctatatgtatttatatatttttatccaattttaatttttttcaccaaaaatcaaaagagagaaaagaaaatagttcaaaatcctatatagcttttccaagcaaaaaaaaaaatgaaacactcaaaaactaatttgtggtaaagctaaggtacatataatgtcaaaaatatttttttttaaaaaaaaaatttacttaaactttgagaattaaatttttgaacttcatct

SEQ ID NO: 330939 - DNA, 626 bp, Cannabis indica
tagtcccctagttaatcataaagagaaaccttcacataactttttttctctttttagttttttaataaggaattataatttcattgaaaagaaaaaggataaggcataccttaagaaaaatggtaagggcaagattaagaaaaatggtaaggggtaccttaaaagtatcaagtactatagaacatgatatattgttattagtgtgttttataatatcaagttatcttgtgggaggaatttagacaacaccaaatagtagacaaataataaatatttaaaagaaaaacaatgaacactcaatttagaacaatgagtattcgaaagggattgtccagataatagaatgtgattgtcaatagatccgtaatccgtaagaagaaataccaggtaagctgtgcaatcctacatcgcctggggatggtcaagtgagatgattttgagacagtatagatatgggactacaccgttgaagagggcttaaatgtattgattggtactacctatatcaataaggtgcatattatttttcggtagcccatcacgaaagaactcaagtgttaagcgtgcttgacttgggataatttcaagatgggtgaccacctagaaagttttcccaggaagtgtgc

SEQ ID NO: 330940 - DNA, 519 bp, Cannabis indica
atattagcataattaatagtatgcattgtatatttattaatttattttaatttcatacatctttattatttaacaagttaaaaataaaaaataaatacttttataaatgaaaacaaaagtgataatcttatctaaaaaaaaattccattcataaatacttttataaatattattttttggaattttcaagctcttgaattttctctctatataactaaactattaatcgtatatcaattacacaagtttgaccgaaattccatgttatatatattattcaaatcgaaatttcgggtgtggctttttcgtttttctggttgatatgtgctttttcttagagttagaaatttatattaggagatgggcagctgtagtgacttctctctaatgggggtggagattcttcgatttgaaggaaaaatgtggtggggacggaaataatactattcttactgactccgatataaatatatatagtttttattttaatttttaatgtatatataatataataaatat

SEQ ID NO: 330941 - DNA, 775 bp, Cannabis indica
taagaaaaaattatgtctattcacaataattaattatcattattaggaggattattgaaaagttcattactgtgttctataatttattatttattaagaaatttgaaattatactaatgtatagatagagtaattttaaattttttttattaaaaaacacttgttactataaaaataagtaaattaatagggtagtgtaaaaaaaaattagagtgttccccataaatataatacattattttattatctaatcatataacactgtatctcatttgttgtctcaccatatctcacatgtagttatcattgtattccattcattgttatcatcctatctcaccgtattagttaagaatatatcttgtcctaagacatagtatcaatcagtgagatatttaaattagttttatataaataaaggctttaacactcatctagaattgaatatatatttatatacatattaagtatacagataattattaattgtagtttatatttattagttaatatatattttttttaataaattagttaatatatgcttaagaaaatagattaatacttaccgtttgaaagtaaaatttgaaactaaaaaattttgtgaaaactttaaacttaattaaagtataaattattaaaatataataaaaaaataaaaataaataaatagaataatagtttgtagaaattttcaataatttttagataataattaagtatttctggttttcttttattaaattattatttaaatttaataaaaaaattaaaa

SEQ ID NO: 330942 - DNA, 978 bp, Cannabis indica
ttatataggtggttagaatggcggttagtaatttggtaatttaaagtttttggaattttttcttaaaaaagtgtaaatcatcacatattaaggagtacatacgtcaagcacgcatgccgagtacatacgccaagcacgcatgccaatcaaggttcatttttcaagacaagacattaaattcccaaatattgaaaaattaatcatattttcactcctttcattgcatcaaattggatcaagacatggcacgaagaacgaacatgtgtgacgtggcattatctggatgacatggagaatattttatgatctagacgggcaatgcattccatgatgtgtcgttcaagcttatttatcattcataaacaacttgtttgaagaataagatggaatattcgaacaaggtatatattacactgttcgaccagcatcgattttgcagccaacttaaggtaaatgtggttggatatcttctgaaatactctccataaatgtttaagcatttaaatctcaattatatccctaattttgtggaatagattgacatcgacaaaaaacaaaagaaaacattcctagttttttttttttttaattttgatctgttttagaaaagtgaacaaaatttcccatttatctgttatttgttttgagaaacatatataatttatgtaattcttccatataaatagtggaactatttcattattcagggattgagaatcgatgattcaagagagctcttacggggtaaatttgtaagttttcgagagaaatcaagaacttccttcttctattatcactatcacgtgattgaatttttataaatctctgtgttcttattgcttaattacatatcattattattaattattatctatcattctaatcactttaattgactcaacgtcgtgcaatgcacgtatatttagttatatgtttaatttaaaaaaattaattaaaaatacaaagaaaaaaggcctt

SEQ ID NO: 330943 - DNA, 1607 bp, Cannabis indica
tgacttatatgtgaaagagattgcccgtcttcatggggtaccaaagtctattgtttcaaatagagaccctaaatttacctcaaaattttggatgagtttgcagaaggccatgggcactaacttgaaatttagcacggcctttcatcctcaaacagatgggcaatctgagcgaactattcaaatacttgaagacctattacgagcatgtttcatggattttggtgggtcgtggagcaagtatttgcctctgattgaattctcctacaacaatagttatcaaagtcctataggaatggctccttatcagctgctctatggtaggaaatgtcgttcccttattcattgggacgaaacaggagaacggaaatatctaggccctgaattggtccagaaaacaaatgaggcaatagacaagattaaagctcgaatggtagcttctcaaagtaggcagaaaagttatgcggatcctaaacgccgatatgttacattccaacctggaggcaatgttttcttgcgagtgtccccaatgaaaggaatcagacgttttggaaagaaaggcaagttaagtcctagatttattggaccttttgtaatacttgaaaaggttgggcaagttgcttatcggttgcccttacctccatcgttgttagctgtgcataatgtattccatgtttccatgttgagaaaatacgtatctgatccaatgcatattttgagttatgaggcattggaattacaaccggacctatcttatgacgagcaaccagtgcaaattctggataggaaagaaaaggtccttcgaagtaaaaccatagaattggttaaggtgctctggaggaatagtaaagtggaggaagccacttgggaattggagtctgatatgaggactcaacatccagagttgttcaggttagatttctgggacgaaatcctgttaacagggggataattgtaaagaccgcctaagattaatattttgggttattaaataattagggtttatgcatgagatttaatttatatttataaaatgcatattgtggaagtatatttaagttcacatatgtttattatgctattttatgtaaattattcaacttctgtgtttgtgtctggaagctgtggaaagcgacgttgggcctttagagagtcatgttttgggtgttaaagcatcttataatttttggagcatcatcgttagatttgatagtgttggatttagtcggtttatttcttgaccaaaatgcccctataaacttttattttattttatttttaaatctttgatttttattttaaaaaaaaaaagagtaagtgattagactcttttgtcctttattgttttcagccattaattggagtattttagttaaaaagtaggtatttactcatttatttgaaaagagaatagaaaaccctagaattaacattctctcaagccttctctctatttcggctgaggcttttgggtgcatgaagctgatttttctctttgatttccaagcaactctcatccattcaaagcattcttcaagctaggttagcttctcttgattttccttctttgaaattatgaaaaaaatggtgaaaagtgagtaaaatgcatg

SEQ ID NO: 330944 - DNA, 1251 bp, Cannabis indica
aaaacacatgatagatacaaccccaaacaactcctggaaacttgacacgcaggctggtcaggttaatatgtacattgctggaagagaccgtcatctcactgctgctctaactttctcttgccctaacttgcaccatagagcacctgtgagtcacataaactcagcaagaaaagtaatagaccggggtacattaaataactaattatacatttcattatcataaactgattataccataacattcaagccatattcatagaaataaatatgctcatacaattgcattgcctaattaggcaagcttgtgtcataatgtaatatcatatataatttcattgcacaacttaatcaggtgggaccaattacaccataacatttaacaataggtaatataaccaaccatatgcatagaaacagatatgctcatatatttgtattgcctaatcaggcaagcccgtgtcataatgcaatatcatatataatatcattgtaccaccgaatcaggtgatcccgattacaccataacattcaacaataagcaacatagccatccatatatacatagaaatatatatgctcatatattttcattgcctaataaggcaagcccgtgtcataatgcaatatcatatatagtatcattgcaccacctaagtaggtgagcccgtgccataacttggcacaaatatattacatcgtctaatcatatgagcccatacgtacgcctagtatttatcatatgtcactgacgcctgtacctacgcttgatacatcgccaggaaaaacccaacaatggtttcaatctatgccataaccaggaaatttcttatggctgactctagtacctacacctaggatttccctcgtttccacaaaggatttcctgttccctagtttttggtcgccttctgctatcatttttgtgcgaaggctttggttgatcatttggttgttcgttctcagggggacacttagtttcccttggttgttcgtcttgggcggtctaaggattctcctgagccgtctcctgccttctagctcgtgagccacgaggtctgcctcgtggtcttctcacctcagggtcaggttgatttcgcgtgttattctcatgtggcgccctggccgcaacagcctcccattccaactcagcgtttcgtctgtttacctcctctaggcggcgcctgagacgataattttccaactcaacgattggcacgtatcttgtaggatcataagcgccatcattatcat

SEQ ID NO: 330945 - DNA, 1845 bp, Cannabis indica
atgggattaggaaatgagaatataagcaatgaatatgattaacttgtttaattctctaatattttaagcaacgagaacaaaatttgtgagtcccacaccaatttgagattgaagagagtgacaaactcaagaatttccattcctattttttcgtaaattatgaattgtcaatttgaccttcatttaattatttttttataggagtcctatatacaattaaaattttaatcaaaggtgttttgtaatttcaaataaaatattatcattccaatatagtgtaaacacatcaatgagaatactttttattctgatattgatttcgggaaatcaagcaaataactttctcttattctgattcatcaatcagattgatagttgttatccacatatctggagaagtgagacgtgacccctcaaggcggcccactaaagcactcgacccatcaactaatccatgcaaatgaacaagacaactcatctctcgaatggacgcagattcggacagtatgtccgagaatgccaagctcccgaaagtatagttcaactctaattaaattccaaggataatgtaatgttgggaacccaacatggatacccccaagggtcattcaggagttgtagctgaaaggattatccataatggtctaaccttcttgatatcgcctacgtggtacgcctctaacataatccctaaggaatctagtgacttgtacctatgtcagattcaagaatggctaaaggatggttacctgtttgtgcattgcacccataatctgacattccctttctccacaacgatacacaccagttgtcatcgtcaataataccatgtactgtaaaccatattactctttaaaattgggccccacctaaccaacccaatagcttaggaaagcacaaattcaatgtattttaccccattaacaggctttaaaaaaaaaaaaaaactaatttgatgagtccatatttgtctccataatatgatcaatttatgtattaatattcttaaattaattctttaaattattaattagtttgattataatttgttaggctattttaaaaactaaatatacatttagagtcatttgaatggatgttaacatattttgttggaaaatagtggaagccggcaagctcggttttataaggtagaacataattaaaaaaatttgatgaccttggaagcagaactggacttggagtacaatataaaagttgtagatctcattctcaactttccaaaacatcttaaatcgtccaattctaagttttattgaagaagttatgacaaaaatactaatcatgtgacaaatttttttcggcaggaatttgtcgccgcagcgaggctgctcgtggctacggcaaggaggtgatttctgggaaaaatttacatatttattagttttgttagtgacatatttttaagggttataaataggacttctagtgtacgaattttagcacttttgagctacaaaattgaaagagaaactcagagagagagagagagagagagagaataagaggaagacggagattacggcttcgaatgttctacatcataattctttttcttctccttaaaatcttactatttaatatgattttgattataatgtatagttctgagtagtttctttttagttaaggagtatttcaaaactcgagacatgagtttttagtttcattgatgaatgttaatttctagtttccattatatcaaattgattttattcttctatattcaatgtcatgattgatgttttaatcttatttagatgatcactaaattaaattttgatttaatctattgtaatcttaggattactattcacctaatag

SEQ ID NO: 330946 - DNA, 1188 bp, Cannabis indica
ctgtttctgatcattacaagtcattaatttttatttatgttgttgtattttagttgttgatgtatttcattatagccgatttaactattttaatttatgttttattacatagtgactgcgctgcttttgttgttgcatttgctgatttctttatacacggaacatatgttccactggattttgatattgaagttatcgcacaaggattgttgagcttttgttacatatggtaaaagaaaaaatgatgaaaatattgatagtgagaatgagaagtctaagacttgattattttaatgctagatcttaagacttggttattgatgttatggttctgttgttgtttattttttctttttgtgtatgaagtggatatcagattgttatctttgtttgagacaatgtattatttttggattataatgcatatgtttttgtgcatgtttctcgtttatgctaatatataaaatgtttgattcagctgtggcataacttttattcaacatgtctaattattatatctatgaaagtaataggagaaatcacttgaatcttttgaatcaatgtgttatgtgtaacattggctatacaactattattcaacggtttgcgaactcttgaatagcgaatatgctagtcaacataataagaaaagttttttaaaattctaactaatgtttcaaatatggtgttgctaatattttacggttttgatgatatattggatctgtcattcaaatacaaaacaactattatgaaattttttaaaaaccaataatatattaaatgtatcaacaatgtatcaaagtaacatttcgacatctaaaagctcacaaaaaaattaaataatttaaattaatgttttctcaatatctaattgtttggttatggcatatcttctggttgtgacctttttggccacatttactgtgccaattctatttttttatttcccatgcacctaaaaatcttattttccttggtatttcaattgcatttgtgtgttttcttggttggattctagcaactgtgtcagcttgtgtattaattcatcatatttacaatcaattgagatgaatttctcactaatttcataattttcttaattgattccttcatcaaactgtctcttgcaaaatatgaggaatgaaattgcgtctttttcctcagagtataaaggtttgagtatta

SEQ ID NO: 330947 - DNA, 738 bp, Cannabis indica
ataaaaatacgtgtttctcaatgtatggacgcgatagtatcgctacaatacaaatgcaaatccatttttttttcattaccactctctctatctgtagagtttcagagtatttcagagtatgaaactttaaagaacagagtaacaaaacgagagagagagagagagagagagagaacagagtgtatcaaaatgagtaaacccagaacttgagttctcttgttattactgactgtatttatatacaagtgtaagaaaacaacagaaataaaaacaagaattaacagactaagaaaactgttacaaagttagttagaacaactaactaactaactcaactatactaacatcccccctcaaactaaatggtgttgataccatttttagtttggattttaagtatagaaatctctctgttgacaaagccttggtcagaacatcagctgcttgatccaaggaaggaacataacgaactgaaatgagtttgtctaaaatttggtcccgaacaaaatgaagatcgatctctatgtgtttagagcgtgcgtgaaaaacagggttggctgccaaggcagtggcactctgattatccaccctgataacaggaatctgaactatagccacctgaagttcatgtaacagagatctaatccatttgagctcagctgcagcattagccaatgctctaaactcactttcagtactcgatcttgctacaacctgttgtttcttagccgaccaact

SEQ ID NO: 330948 - DNA, 1154 bp, Cannabis indica
ctctctctctctctctcaaactcaacatctgtaaactgaacacagaaagatgaaaatccttacaattataaatatggcttattggtatgatagttgatgataaatttgccctttttaaaaatagatattaccaatattgcctttgttggctggtcagattattcttcctttttcttctatattattaatgtcaccattttgttgactaattcaaccaagtcaactcccataaactttattctctacctcttcttctctccttctatttcttagtaactacacctcgtcttcacattacgtttgatgatgagtttgggtgattcaaccacaacctctatctacacttaatattatttttttttgttctgtgaagagtatatatctattttgaatggatttgaatggtgtggtgtggtaaatcttcagcttcgacatgcacatctctagattgatttaaatgttaatactaggtatgtttattgatttcaaaatccctaattcttttacctctctttctctttatctgtatataaaaatgtaaattccctaatttttttcttcaaatttttaattttttttcaaatccctaatttctttacctcattttctctcaatctgtatataaaaatgtgagatgcctaatttatttctattttgtcaatttttttttcataaataaaatttacagccagttaccattttgatgaaattcatcttcctttacacatatttttatttcaattttttatttttcattttgttggactaatgcatgtttggtaatttttctcttaaaagaaaaagctaaaaaacatagagatgatttctgggtttttttttttaaaaaaagaaaacaaaaaaatatactacaatttgttaatttatctataattagcttactcatcaaatacgtgttacaatggtaaattttttatttttcataatttctgaatatctgttagtacagttttcaaagtatttgaagataaatttttgattttatctcatattttgttacgtgttgaactaattgatatattagtgttgagtcattatatatatatgtgttatatgatttgtcagattgagagttatcttctctttaaaggttagtataagtatactattctaacatgatcaaacttatcaaataa

SEQ ID NO: 330949 - DNA, 1099 bp, Cannabis indica
ctctgctacagaaaggaatcaagggctagagatatgaatggaaggagtcatatattccgctgcaccactgtaaggttttctaaactttatatgtgtttattttcattgttttagaattcatattaggatgttaatcaaacatacttgttagtaaatttggttcttgtaaaataatttccaacatcgtgctcccaagatgtaagtatgggctagtcctattggtaagcggacaacaaataagtcaaagaactcgaatagtataattaggctagaacctaatcatcttagaattgagatcattgatctaagatcaactaagtgatattgacttagaaaagatattacggtaagattatgatatcttttctactgtcaatatcggttcagtccgatgtatagccagtacatccgatacaggcttactttgctaatgccttagtgttatctgtgtttccaaaaaaggacacataaattctaaatagaagctcaaaacccgtaagtggttctaaataacataaattggccaagcccaattgttatctggccttctaggagaacaactacatgcctcgccagatgagcctttgtcaagtcttattagcatatggaagagtgtcaattccatgtacccgaaagagcttcctagcgtgtattcaaaagtcattcttagtttcccatttattactttccacagaataagaaattatttttcttaaatctcagaaagagaataaaatcatggtaaaaaaggaaattgaataattaaagattaagtagttaatatgacattaattatccacattcaaaggatacaatatgaaaactagcaccgcgatcaaatctctacatcaacatacacgtgttgcctcatgggctgggcttcatctaataagcccaaatctatgtattaactgtaaactccccattagagggaaagggtaactaagtacgacatttattactctataaatacacatataatccttcatgcaaagtgttaaaaattcttgattgacttgctcaaaaatagaataaagtgctcatacttattgtaatcccttaggcttttctagcctatctgataataatactgactcgt

SEQ ID NO: 330950 - DNA, 848 bp, Cannabis indica
tatttttatatatatataataatatatttggttatcaaaatttatatttatatacttttatacaaaatgaattgagaattatttatttatttttattgaagtacttaagccctagctaagttattgccgttaaatatataacacgtgtttggggttggataaaaggatatataaatttattatagttctcgaacaacttaatagttttaaaatacatgtcatttagaaacaaaaaaaatagttttaaaatatgtaacaaattataaagaataatcaataattttatcccgaaacattaatatttttgatttttgcacccttatgattttttctttaaatatctttaaattacagaaatgattacaaatgtactttttatttttattttacaacttgctcttagaccactaatttatagttataataagacgtgtatcaaatccaataattaacgaagctaataattcgactctcatgttaaaaggttcaaatccaacatgtacatcttgaaagatattggttgggtgaaatattaccactacttaagcgacctgcaataagttaaagtctctataacaacctcaaataaaagaatgaaaattcttctttaatagagtgacacaataaaaagaatgtcatcttgtatgatactttcagttggtgagaagaaaaaatcatatgtttaaacttaaacctagttcccgtggaaacgcaagatttatcaaagacttactcctggtgatcaccttagaaggtctataatctggactaacgtatcttgtgaggagcctagtaatcaccttggaagatttataaattgtgttgagaatcatggggttccatctcaa

SEQ ID NO: 330951 - DNA, 790 bp, Cannabis indica
acttagtgaacaatatttgtctcctattgacaaaaatagggtgaaacttagaaataagaaaaataatattggccttttattaaaataacatgtagtaattgtaagaataataataataataataataataataataataataataataataataataatatgtagtactttttaaatggaaaatttgtggtgttagacgatattgtagaagtttcacactttctcttatatagatacttttagtaggctgttctagattagaaactatatatagatttaatgctcattaatatattacgatttttaatgtgtgctacttaatattgtagcatgtatttatttttttatttaaaagttttaaaaataaatattattttgagttacacatttgaatgaatgaaaaattttattatataatcttaaaaataaacttatcattaaattttagacttttaactaatttatatcaaataatgcttattttaacttatttttctttttttacccctctcatattaataaggctaattaggatttttactccctgaactttgacatgtaccaaatcatgccccctgaacttttaaggtcattgaaaatgccccttgaactattgagattgttggatttaagaacttttttctaattttagtaaaaaactctaacatggatgaaagttcaggaggcataatttaatacatgtcaaagttcgaagggcatgatatggtagatatcaaagtctggggaacatggtttagtacataaaaaatcattgaaatagtaaaattga

SEQ ID NO: 330952 - DNA, 730 bp, Cannabis indica
taaaaaaaaaataaggagtaaaaaaaagtatagtaaaatgttttaaaaaaaaaaaataaaataataatagcaattgatttaggtttttttgttttttgttgttttaaaattaaaaatgaattttaaaaattgagatgcaagtgactaataacaagttgttagccctttaaaaagttaagttcaatcaaaaaaattgaaagaatattaaaaaaaaaaaattgaatcttttttttttgtcttatgtagtagttcaacttgcacactataaagatcgatactgcatatggagcaccatgcactattaaaaaaatattatctcagtgggttaggtctcgcgagattgacctatctcaacgataaaatctatcgtgaatctaaatgaccgtcgagattggtatgataagagtaaaaaatactaatagggtgtcaagtaccgagctaggtatcatatgatcataattaaattttatatattatataggataattaatatactctactatttatgcttaagaaaaccttaattctattatgttatcatgtagatcgattcaattaagtttgtacatacaaatatatatatatatatatctattctatataaagtgtgtctatataactgaaattcttagtttatgagaaattcatgggtgactttattatttttatttaataaaataataaaatattatttatatatatcataaaataataataaaacaaatcctat

SEQ ID NO: 330953 - DNA, 709 bp, Cannabis indica
ctttttataaacgtttatttagacatttttttttcattggcaaacttttatttagactttacatacatatgactaatcatgttttaaaaccttctatcaaagaaagaaaagaaaagtataataacctgatttctattagtttgaccatgtatattccatagatgtattacgtattttacttgaaggttgaaaccacttattaataatttgatgacattttatttattttattgatttgacttttgcttttttacttagatattggcttcacgtcttattcaacttgtatttcaataataaaatgagagcgaaagaaaaatgacgactttgcttagccaattcaatttgaacaatttctttctttaaaaaattaatccttgtaaaattttgtagctttattaattttgcttataagctccaatatagataatggccatcaaccacaaattaacgaataataatattattaattaattaattataaggcaaattgattaaaaaaaaaaacagagagagagacatttaattaggtttggattaagggaattaagtggtacgtacactagcggctaatgttaaattaagatgataatgaatggaattctgaattgtccaagcacaaatattaataatacaaacaaactaaatgatgtaattatctcaagccgattttatttatttttattttttttttttgttcttttcttct

SEQ ID NO: 330954 - DNA, 550 bp, Cannabis indica
aagaataagcatattatgaatatatattattttctatttcttgcatgattataagtagaataatgaaagtaaataattaattttacatctaaaatttttaaataccttgaatattataatcttgaaaagtaaatttattaataaaatatgattaaattttgaaattattaaattaaatataaaatataaaggaaaaaaaaattatttctaaaagattgaactcgtgaagttttaattgttttaagaggattattataatttgaacatgttatagttttttataaatataattattattcaaaataaatttaattaatttttctatgtaaatttgaaattaaaaagtatctataattaaaattaatttttattagacataaaattaacagtaaacaaattatggtttggagttttgttagtcaaatctagaattaataatattaaaaattaattataaataaataaatatattaattatggtgcagttttcaagagttaatttgagccattagattaaatctaagactataaattattattcctattgata

SEQ ID NO: 330955 - DNA, 515 bp, Cannabis indica
caaatttcagatttctatcatgtataataaccaagtacttttgatctgcaatgtcttccacatgttgaagctgtaataatagaaaaaaaaatacaatcttacatatacaagaaattaaattgaatggcattgtcacagaaatttaatgtcaaacgactgatgcaaaatttacaacctttatttgcaaataaaacaaaatattagtgggtattagaatcttaatgttggccattttatgaagattatggtcaataaatcttaatattgacgagaattagaataatggtttttggattttaacataggaaaggaattacttatatagatgcacgaattgttaacaagtagactctgtcattttttctgcactctgagttccacttgaccttttaatactctaatcatttgttatataggttaatacctcattggctggtgctcatatgcgccttcataatttaagagaagaaagagaccaatttgatgaagccagtaatgaaatccttgtacacttg

SEQ ID NO: 330956 - DNA, 616 bp, Cannabis indica
aagaaaaaggtgcagagcaccaagaactaaggaaacagagtttcttgaagaagagtaataatgcatcaaaagctacaccctcttcattaagtgcctttatttatatcccaaaagtaaagcaacagtacaacgaaaataactgtctaaaacagtaataaccaactaaccacagaaaagtcctaactgaaagtaataactaactttctatactaacacatcgagctacaatccaaacaccatggatcattactaatattgtgtttgtgcaacaaggattttgtttgaagtttttgcagcattactagccatagcgtgaagcgatgtttgggaagaatagctcttccccaaacctctctgtgccatttcaccactgagctttctggtttaatcaacttgtagcccctattgatgctatatgctatatgctatatgctatatggtttaatcaattttggctttaaatttctcttttacaatagtgatttgcttccagtactaatttgtcggatctaagagctatatactcccatcaagtcatattatcaatattttcagtaataggtaaatgtgtagtaattattaaaaaagtgtcttatatttatatggaagaggtttc

SEQ ID NO: 330957 - DNA, 886 bp, Cannabis indica
ttttgtattttttttattattattatttaattaataaaaatatttcaaaatatattatttaaatgatgttgaagaaatatagagaagttgatgtatgatacaatgtaaaatgtgtaaagtaaaatagaaaaattaaatagagttttaatgaggtattttaaagaatagagtaaagaagctgttgggagtgctcttacaacataataagagcatttttaatggagaagtaaattagtgatgaaaacttaaaatatagctcacttactaaaaaaaaatgtactcgtatggtatgtcaaaaggtgatgcaaatttatataacaaatgttgtgcaaatttcgacacggtatttgccataatgcaaaatttgcatcaccataagtaatttattttcttgtttacttcatttatattattttattattatatttagtgatagcattaaatgataaaattaaggttatttttttatatagtttattaaaaatattaataaaattttaaattttgcattaaattttgtaattgtgtattgaaacacaatattaaaaattgatacaaattcattataatgttattttttgtgtcaaatataatataacataactattacatctcccatttaaaatagtctaaatttataaactaattaaataattcaaaactagattgtccacatcatagtaggtgcctatccttatgagtgtttattggaccacatctaatgtttttaggcctatctagatccgatccaattatatattggatgttagattttaccatccgatccaatcgatccaacatccattgaatgttagattttaccatccgatccaatcgatccaacatccatggaatgttagattggatcggttctatccgttggatg

SEQ ID NO: 330958 - DNA, 549 bp, Cannabis indica
attaattatagaatataaatgtataagaacttaaatttaaatagattaaataatgtacacttatagcatataattacaattaaacgtacattaatttataactgaaaattaatgcacatattgatattaaataaaagtaattaaaaaattaaataatgacaaaatattaataaaacaaagaataattaagaaaacatatataaattgtcatcttaattgtttgatactttcttttatatattaacagaggatttatctttctctactggtttaataatagtgtgaaccaagcaccttgaaaattatttttattgctgctcaaatcaattacaattcccttctcaaacaaaaacttttcttttcctttgtttctttgacagaattttttctctatctcaatttaaattttgtgtaatttaagtactatacttccaaaaaaaaaaatatataaaaattattcattgcagaactggaatgatattctttaaatatctttataaatatctctcaaccacaaattaatatttatacatatacacacaaatacta

SEQ ID NO: 330959 - DNA, 947 bp, Cannabis indica
ttaatcacatatttattccattattattcatatctaaaaagtcacaaacttgttcccaaacttttaacctctctctctctccattttttagagaagagggagaaccaaagactaccatgcctgttcttacagacacttcaacaatggcagagcacgtcaaattgagaagacccagaagacaatttggccaacttatttcagaaacagatccacacccacatgaaatcccatccattattcaatccactcgctgcaaatccactatttcttctctccttctctctactttctcgaccaataacaacaacaccaataacccaaatgaaaccatacccttgaaccttcacaacaagaagaaaaataacttcacttcttcgaacttcagaggactaggatgcacagcagggtcctcacagcaagtctctgtacctgcagtgattcgtagctcggcggattggcaagggaagaaggtgaagaagaaaaagcagaagaggaatggtagtaatggtaatagtaacaacaataataatggcagcaaagagagtggaaaggacagaagtgcccttcaccagggtctcgtggatgggtccaattctgtattcaattcggctagttgtgtggattttcaagatgtttggtgtggtcctggaattgggttctcggccgatgcctcggttgactgtgttgtggccaggagaaatgtttctggaagaggtaagattgatggagataagatgaccagcggccatagagatagagaggtaaagcttatatatgatttctcttacatttatgtttatattttgtgtctcatgcctttgtaaggcttcagacttcatgtgcttttgttttgaaattttgttagctcgttgttgagtttgtttatcagtgcctgatctgaatatactgtttaccaattactctcaaaccttgatcggggtatttct

SEQ ID NO: 330960 - DNA, 885 bp, Cannabis indica
catttagttagttagcttgagtatagcttccattgttataccttgtatattgttagtaaaatgttgtttggtggcaattaaaattttgcttacttaaaaaaaattaataaaatattataattaatttgtagtgggaataatattgtactaaaggaccgtatatatgagctcgctatatagaccaatccagcaatatttatacatatataagatgaattatacatattactgttcatgctcatgacttacgtactacacataatcttgatgaagaaattataattaattaactagtgtttggggtaataattaattttccatgtagctaggattaaggagaagaggacgggaaagtgcttttaggtgcagggttttgttttctgggagctgtacaattctgctatggagagtacgaactcttatcaatagtaatataggccagcaataaagggcaataaaagagagtaatatatatatatatatagtacgtacgtaacaatgacgatacagcatcaattctttgtcagactatccatgtgcaattttatttatatgaagaaaaagctttcttatgacaaattaatgctaagggctagttattattgtaatttaattaatgttagatctcattatttttttttttcatttaataaataatataataattgtatatataatgttgatacgttataagatagatctaataattatattctttatatctattctatattctatataaattgtgtttatgtaaggaaattgttaatttaacaatatttttaaagttttttactattaattttaacagaatatcatattaattaacataatattttttattaattttataatattattatatatatttaaataaaaattaat

SEQ ID NO: 330961 - DNA, 871 bp, Cannabis indica
gagatcgaaggatgtgatcttggtcatccatccatctcaagaattcgtgtctctactgaaggagtacatcgtcagcaacgcgtggttcttcaagggatttcatctctactgagcaaatatatcgcagtcagcagtgcatggttcttcaagagatttgcatctctgctgagcgaatttatcgcagttaacagcatctgattcttcaatttggcctgcatggcctacaatttccctgagtctggccaactcaagatcttctcccatgcccatgtgaggcttgccaattcctagtctcgtctctcctgcattgtactgagggtgaaacccggttgttgttcttgggggtgccccccaaggattcttccttcagttagaggcgccaatggtgggtctactcttggaggcatgggcctaccacttggatccattgggatgcctgtctcagtctggccgctatatagtcctaccaggtaatcctggttgcccataggcctacaggggaggtctgtccacccaaggtgtgcaaaacctaacaggacaaggcctgtaggatctggcaggatgaggcctgcagggtttggcaggagaaggcctgcagggtcgtgcaggacaagggctgaaggacctggtaggtcaagggctgcaggagctggtaggtcaagggtggcaagagctggtaggccaaggactacaggacttggtaggtcactatagttcttcctagtggaggctagactcgtggcgcctattgtggtgacaagattcaccacatttgtagtattcatcgggattctaattgtgactagaacctgagtatttgccacgtgttacacaaatagaatgaaaaggcaataaacatagagatttgtta

SEQ ID NO: 330962 - DNA, 749 bp, Cannabis indica
ttttcttttttatttaatatctaaaatggggcgggtgtaggccacgtctcaaaagaaaaaaaaaagaaccaaggtagttcggccccgacttgatagaaaaagtagcggggcggggcaaagacccaaataacgacccagaaaatagccccattttgttgccgttacttataaagctatatatacacgtggatctataaattcatttaattttgagaataatgtacacacttaaattgtacatttattacatgatgtgtattcgataaccatatatttttaagtaagattacatcatttaaagttgtatgattacaattaaatacacatcatcatatataaaaagtgtgtgtaatttgaaattgtttcatcattttcctaataaataacttccctagtttactttaatttagctataagtatcatttgtaatatttttattttttaaaattttaatatatttaatttttaattttttaatcacaaaaataagagtagaatttttgttttttaaaaataaaaatatgcacaatcacttttgtttttaatttaaaaatagaaaataaaaatgtgtattttgaaaagtttattttatttttatttattttttattttatttaaatcgggtctctaggtccaagtttagatctggatccgggttggggtcgggttcagcacaaccccagggttaggattgggtttgggacctttgggtataagttcgggtctgatcgaagtccaaaatattaatt

SEQ ID NO: 330963 - DNA, 941 bp, Cannabis indica
gtgttttataaaccctaacataagggcgatacttcgagatcacgagggtcattggctctaagagaccaattgaaggtattttttggaagtcaccggatcttcatgactttaaattaaatattaatgtattggtaaatatggaatctaaagttttagatgttggggcaatacttcgtgatcacgagggtcatgttatggcaactttatccaagccagtcaaaggcaaagttagatcagatgaaatagaggcgaaaactttatttcacaacactaattgggcgatgcaacttcagcctccactcacccacattgaaatagatgcattataagtttccactattttatcttttatatctttaaatctgtctagttttaatgatttaatttcagatatttattttcttttattattttttgctagagttattatttctcatgtcagtagaaatgttaactaaactgtttatgatttagcaaaatatgctccaatgtttgatgaaaatattttttgaacgggtaaatactttttgaacgggtaaaattcctagtctatttttttttttttgttattgtaaacggtttttgattataataacattaatttcttttaaaaatatatatattaataaaataattataaaataatttttttgaaaaggaaaaaaagtagggtaaatactattggggagttctatttgcaccccttaaacttataaatacaccccattattataaaaaaatgtaaacttaaataatttttaaaaattactcttaatattttattaaaattttttcttcacatgattttatgttaatttcaatacttattttgatttcattttcataattttttctaactcatgtgtatttttttttattttttctaaaaaaaattcacataattttttattttaattttttgtcataatatttaaaataca

SEQ ID NO: 330964 - DNA, 854 bp, Cannabis indica
atatgagcctcttcatcatgaaaactaataatgaaaattacatgtgcaattaaacctaccttatacacctattccttccacattcatttgaaaaaactatcaaatacatcaattggtggattagctcttaacacatagcaaactagtgttgaattccaatacttgatttcatcaaaaatgtcatccatattaattttaactcctaacgtcatcccggagcccaaaacgttataattctcaaaattttcacttaaattatgaatcaaattaccaaatctaagcattaggagtaacgaagccttaccaaccattgattgttgctcacaccacttagtagtttcaagaaacgaacagaaatcatgttgaatctcctgttctctttacaattgatgcattgtcaatttttgtgagagataaataccttcccttatcgagttcaagtcatccatctccacctctgatccatcttcttagaaatcaacaggctcaacaccaattagttatgtaagagctttcatcttcttcacagcatctaaagatgttgaccttcttttcatctttacttttaccttcccatttcctctcatgctatttacttttgcagaactattcctagatccctgaacaaccttatgagggcagccacaactcttcatggccacaactagaagctaaagttcactgccctaacaaagcaaaacagagaaaattaattatattaaactatatttagattgttaatatatattatataaatttttatatcatgtaaatagtttaatttatcaaaagataattacaatatcataatttttctttcacacatataatatcgaataatatacctacttatg

SEQ ID NO: 330965 - DNA, 730 bp, Cannabis indica
gaattgaataattaggaaagattataggagttagctggccagctttgcaggagtcagaataaggttatggcctttggatcacatcaaaggcttttaatatatataatataattcatataattataaggtcacatcacaactctcttcttctataggacgcggccattaggaaacgcttccggactcatatatatataaatttcgtgaattatattatttattaaattaattgaatgcttctactccatcactgaataatgttaacatacattatttatatatgttatttttgaaaaattcaaaattttgcggctaacatatgtacgctcactcttaattattatgggaattgtttcttttttttttttcgtatgctcatctatgcaaattattatctgcatgtttttctttggtgtttaaatttatttattatatttatatacatatataacgatatactagtaaaaaaattacgtgcgaggcacgtatactaaattttatgctagtttttttctacgttattaaaaagtgatacaattaaaaattaaaaaaaaaatatatattattagttattaggttcaacatcattaccctgtgttcatttttaaagaaaaaaaatatttatgaaataataatttgttgcaacgcgtgtacaagcaaaattcagaaaaatatagcatttattagtagagtattgacaatttcaacagtaaattaattgattgtatac

SEQ ID NO: 330966 - DNA, 481 bp, Cannabis indica
cggactttttagccacaacataggaatgataatttataattagtcacaatttttttacttttagtcacaaattttgttgtgactaaaagtaaattttttttgtagcgatgagatcgcagccacaagatcttcacaaatagtctagacaattaattcacgcaataatgatcatcagcatcaatatatataacctagcttcaaggtggttaaacatggctggtgtacttatttattagtagctaacttaattaattaattaattaaggctttggatattttagtaaaatttaatatattaattaattatataaaattccattcttaatttaatttaattatactaataataatataactttttgagttcagtaattttaaatttttaagtaatgctgaattgatcgtttcttaatgctgaattgggttctaatccaagctttatttggagaagtatttgggccgctcaagagcttgtaagggc

SEQ ID NO: 330967 - DNA, 489 bp, Cannabis indica
ataaaatgcgatttttgatctttattaattaatgaatttaattatattgaaatgtgttttatttagggcacaaaacccaacaaatacttgagacaaattatttagtagcagttgaggccattcacagtcaattattaatgaactttatttttgaattagttgttaatgattgtaaatatttaactaattatttgactgaagtctctttctttcatagattaaaataaaaatcttataaatataaagaagaaaaatcccataattttttttgaaagaaatatgtcataagaaacttagaaaagaaaagaaaaaaaaattgctatatttttatgttttaaaaaatattgtgtgtagagtaattactaatttccactttaaatttaggaataattacataaggcactattttttgtaaaaaaattatatttttacgtttaaagatttttttttttactatttttacggtttttcatagaaacaacataaaaa

SEQ ID NO: 330968 - DNA, 634 bp, Cannabis indica
aactattttttttactaaatttttcatttttaaatgaaaaaaaactaaataacttgaaacaatcttggactgacacactaattgtctggacaaaattaattttttgtcaaaataaaacttaataataatttgatcttgagatgttatgacaaaattggttatattttctgtatctattcgtattaaaaattgtcttgaagttggttatattaaaaaataaaattgttgaaaattgagctcagggtactatttgtacaattttaaaaaatacagagtttattttgccatttaacaaaataaagagtctaattaataatttttacaaagtacagggtctaaaatggtatttaataggaatttttcgtattaagaagtacttaatttatgttttgtaaaaaagcttgcacaatttttttagtataagtaaaataaaaatatccttagtgataataataactaatatttattttataagattatagcatcagatgaactgccaatttgtaggtaatacaaataaaaatatcaccataagataattaaacaatggctaattagtaatttttctccccgaactttgacatgtactaaatcgtgccctctgaacttttttggccgttaaaaattcccctcg

SEQ ID NO: 330969 - DNA, 1034 bp, Cannabis indica
gaaaagaaaattaaaaaagagaaggaagagagtgggatttgattgatgagggatggggaaagcacgcgtgtatgtgcatgaaatgatgactaagtggtatttgtgtaataaaacaaacattgtaagtaaaaaagttgatataggcgtgtaggagtatttttgtaataaattgtgcaaaatggatttttcatgtaaaaatttctaaaatttaatatttactaattaataaatatatttatttaataaataattattttattgttatatataattaacattaaatatatataataaaaaatatttttattttaattttttaaaataatatataagattcttgtactcaatcatacagtgtaatttaattaacatgaatatgattacatattaccctacacagccaaacacaatttacacatttccctacaatcatattatccttcataatatttcctataatcaaattattttgaacacctcataccaaacgcccctttacattttttattgtaattgagagttaaatttaagtatttacatcgaaaatcactctaataatattactattctttgaaatatatggtggccagccagcccgcttgaggtggctagtttgtcattttgttttcccgcctaagtactcggaccccttgttggttaaagtaatgagtagatggcttggccttcttgtgagtgagttgtactgatgttggccacgaagacatgccacatcaaagggcaaaaatcgggataacacctacactatttaatcaattaaaatgcaaaaagatgctcacataactgaaagtaaaagtgatgctcttactcaaatagttccctatatattaataaatttttttataatataataaatctaacaatagaaaaagtgtcacattatttatcaacttttaattttatcacattaatttgtccttattatttttttttatatgagtgatttgattaatatattaacaaataaattttttaaaaataaaataaaaataaattcatatatatatatataaata

SEQ ID NO: 330970 - DNA, 732 bp, Cannabis indica
tgcacgagaggaatcacaattgaattgatgaatctcgaacgatgtggttttgtcaacctaggcacctacctagggcatcagcctttatgtgctggtgccaaacttttcatctaggcctatatggcgtcgtttgcttccaaaaagcacttttatcttcatcgtgggaaaaatataagggtaatgcacaaaagaattctctggaaagatgtcccagagtgcccttggttgaatatgtcaacctgggcattcaagatggcctagggggttgcactaggcgcccaagtggaggaaacatctctaaaatttacctcattgatgttcaatcttcttttgggtgaaaagtactccacaaatttcaatttttgtcaaattttcacgggcgtcaccttgtgaaacaaaattggcacccaagttgaaatgtcaacctaggcgctcatagttgggaacaggctcctttgggatgtcattaatgaaatatcacgtactggcaatgttccttgatggatttgaggaattgaggtctaaacatgtccccaaaaacctaaaccctagtcgcagtgtgccgagatcgattgaatgtcaacctgggcgcccattagggcttcatagtgccaaggtaccatttcttgtagacttgtctccaagatttactaacatgtatgttgattataattctataatctaacatcctaaatgtgatctttctaaaataatgaaataaacacataagag

SEQ ID NO: 330971 - DNA, 1115 bp, Cannabis indica
aatcttaattagagttttattaggaaataaattattaggttacttttaagttacaagttatttattatttatttttatttaatttctaaattaatcacaaccatttaatagtaatctaatggtttaaaaaaaatgtaaccatgatagtttcaataaaaatgtaaccattataaaaacctcttccatataataatattatgaaaataacaaagagttgagagataagttttgagataaaatctaattaaattctttgggaaggaattcatattattctcccacaaatagaataataatattgtaattaaacttgtagatgggtgaagatatatatgatcgagtagatgtttgtgaggcacaagttatatattatattttttataaagaaattattatcttaaaaaactaaaaaattataatatatagtgtgagttttcgtggtataattgaatattattatataatttatatatagaagtagttgtagacatgagtttctttagtttttgggtctcgaagaaatcactagtccaagtcgttttcatgtatattaattcacggaaaaaaccatgttcatatacagaatttcatgagtataataaactattaactatgagtaattattattggtggtctctttcattttggtcaatcttaatattgaatatatatttatttatgtaaacaaagaaaaacaatcgtgttgatgtatatatatatatatatatatagtctgtttggtcaattggtcatgcgcacacacaacatgtacacatgcattattaatatattgtttattattattatggtaagtttatatatatatatatatttgttacaactttcgaaattttattgaaatttccaacatatgtaattataaaattaatatgggaaggtacatatatgatataaccacattgactatacattatatatatatatatatttatatatagtgaatcataagttgagagagagagaggatggggtttatagttattaataatggtgatgatcgaaatgcttttgtcattttattttttaatataatataaataaaaaaggaataataatgaatgaaaaagaagagttaggaagattgtgatgataga

SEQ ID NO: 330972 - DNA, 564 bp, Cannabis indica
acagaaatctttaaatctaacaatctcgaaaaaaaaaaattaataaccggaacataatttagcacataccaaaatttttagaaggtaaaaattctaattaactgggagagatgacactggaggaaatatagaactagtaagccacagtgactagtgagctagagatacacattacacaacacaagttcgtacttataaataaatctacaaacatatcagtattctgccattgacattcacccatttttcgtatacaggaaaactctgctaacaatacattataccttagtgaaaaccattatataaactatcacattatagcctagtgaaaccattctataagctaacacataataccttagtgaaaacttttatgaaacaaagtcaaaattagacattcgctgaagcataccaagcagtttcatgacctaaacaactccaagcgaactgtaaaggacttatcaaaagtgttaaaacccactcaaaaatttagttctttcggcaagcagcaaagcaaacaagacaataccggtgtatcagtggcaacagagagcaaaggagcac

SEQ ID NO: 330973 - DNA, 930 bp, Cannabis indica
agtagaacattattataactttcccaaaaatttgttaattgtttatccatataaatatacaaattattcaaccatttcttctaccacatttcaaagaatatatgaatatagttttcgcataatattcaagatgtatgaaaaatctaatttttaatatgtcatttgtaataaattcataatttctaatataaagattgtaagtagtaacaatacatatatataataacatgacttatatatagaagatgaacactcttaaaaattaaataaattcaatttctatcattcactagagggaattatgaacaagaaatacatgtttatatgtttaaataatatcagtcatgttcattgttattcttatactataatgtttcaataaaattttctgaatattctttttgagtattcgaaacccatcgtagaattgcatcaataataatcattttcaatgattctttaattgtattcatataaatacaatatttttgacaaatataaaatatttatattaggaaatatttacctaaatctataatgatattagattgatttttattatcatcaaagaatataagaacatatatatgaatatgtattcatctcttttattatatttaagtcaattatacgatgaatagtatgtttacataatcttcaagatatatgcaagattttatcaatgttacataatttttaggatctatgtataatttacgtatacatatattatttaccaagatttttagaaactaaataatttagaactaaaaaaaaaaattcaaaaataaatgagatgaagatttttacgtggtttagatattaattaaccttatttcacgagtcagtctattagcctctaaaggcgtgttttgcaggaaatcctaaccctatgttcttagtttttcttgaagaagagaaaagcttaga

SEQ ID NO: 330974 - DNA, 807 bp, Cannabis indica
aaaaaagtaacaataaaaaaaggttgataaaaatattgagtaattaatactaattaatacctttgaagttcctaaatcatcactaagccttgttaatgagagatgcccagtatatcagcttagagtgaaaatggttgaaattgtaatccagtgaggtttcgggtatggagccatctaagagtaaaatacaagcatgaactatagctgcatgaccaccaactgaagtagatgaattttccaagtattcattcaaacttggtgtataatcattataaaaccaccttgcttctacaagatatgatttgcagagatttaaccactgccacaaaaagggttaattaattaaataaagggatatatagaaagtagtaaggaaataaagtttattttataagcatgattactaggctattagcttagctaattctaataaacgttttgttggagataataatatgaaatgaaataatatttattttattttttattggttatattttaaagtattaaaattttattttaatgaaattattattaatgactatttcatttcaaaataaaaagaaagattaatctaagatgaaaaaaaattaataatatttttattaatatttttttatgcattttaaatttgattctattcgtattactatttccattataattccttactatattcaatttttaggctaattagtaattttttcctctgaactttgacatgtattaaattgtgcccctgaacttttttggtcgttaaaaattccctccaaactattgagattgttaaatttaaggacttttgtc

SEQ ID NO: 330975 - DNA, 646 bp, Cannabis indica
tggattctacacccagcaatcttttgcttatgtagtagatcgcgtactggaccttttcttcctctcacacaagtgctgcataattagcatgatcagacacgacaaagtacaagtacaaatcttctccttccacaggctttgataaaatagaagcttgagtcaaatgtgttgacctcaaaaagtgatcaaccaactgcggggtcgtatggatctgatgcttgccacatgtttgaacaaataagaatgaaaagaaataaagaatagattttgtatagaggtttgggcccctttgtgatagcgggtaatgacctactcctctttgagttgtattaataccgagggttaagacaatccagatcactataggtgggattttctacagcacccttaggaatacaaggtatcaatcaataatgaaaaaactcaagttttgagatgatgttagggtatgtatgtgagagaggaagtctaatgccttaaaaattagccacgctacgacaaccagtaatgtaacctaatctcactaaaccgagattactacaaaagtaagagcgggaaaatttaaactttaattgcagtggaatgaaaatataacttgcaataatttaaattttccaaacaaaccaaaaagacaacatgtttcggg

SEQ ID NO: 330976 - DNA, 751 bp, Cannabis indica
acaaaataacaatggtcaaagctatgataatgtaatgtctaatgagtcaaacatctatttgtaacatttatcatcaatttattatttgtacagattcatatctctccattctctctttatcccatcactatctccatcacccatagcaaaaaaatataataagtttgacagtaacaaattaaataataataaaatataaccacattctttgagtcgaatcctacaaataacagacaacaacaaacaattataaccaagaaattaaaatactgatttaaactagaaagcataattttagtctcactgaaattgacattttactttagcaagtagaagtcttcctgactataacaccaagctagaagcctttcttgactataacaccaatttagctagattgacacaaagtatttcacaataagtcctccaaaagttctagccaacttatgccttaaatctaaataaaatatacacttttcaactaatgttattaatggtagatcctatggcaggttttacacattatatatgagaagcacatttaagtaaaatgatacattattatggctgaagctgcaagtaacaaagctaatgcagaaaagtatcaatacaaaggaaccaaggaaactttaaatcaatatttggtagttggtatagaacatatcttattacagaatcacattacttcaaaatggtaattatgataatacaatagggaaatttacatggtatattaacttttgttattttt

SEQ ID NO: 330977 - DNA, 2352 bp, Cannabis indica
acaaactggtacttagtatattagcgagaaaccatatgttgctgaatgcaaatagcgaggcatcaaggacagtacacataggaagatgaaagcgacatatatcaattgcgaaagcccttagtgtaaaaactaagtgtaacagtcggatagactcaagaccaagtaagcgaggtgcccgtcttgctatgggaaaacttcctataacttcatccagtaaacgtcacagaggcttacaaccctagcgagtaagaagataacattaaaatgagctttgaagaaacctttgtaaataagaaccgcgatcgacacaagacatgcattgtcgacctcggaaggaaaaatggccttagcttgctattgagatcattggaacctagcttctgtcgagacatcttcagatacaataattaaagatgtgtttaaaacacgatcattttgacctagtaaaagcaagaaaatcacaactatatgattttcaaatcataactgcatttacactacgtgatatgtaattaaatcccatgattttagggatgatttttgtaaacatattacagtcaactttgtaattaactgcccactatgtaattataaatagtggcaagaaagattaaaagggggacgaaaaaaactcatacaggaggagccctgaaaaacaatcagaaaactgaataagattgactcgtggactatgcagaattttaactgcaaaaccacataaaaagccttgtgtgttcatacttttattttcttggcttttattttttccgtgtgaaatcactaccgtgaggctcaaatttggttaacgaacatctgcgttaacatttgtcttgttgggcagtctaactatgagcttgcgatcgccagtataagccccaagataatagaagcctcccatagcattcttccttgcgggaaccattttgacagagtaaaagcatgctatttctaaaggagtggggcactcccagcctaggatatggtatagaaccttgagggtcgcaaggatcctgtatgagatagggttcaactggaatggggcaaccccgaggtagttgtagcattccttaaagtaatccctaagaggaaggaccgctccagcctggatatgttcgaggctctaagctccaacacccgacgagttactcgtgttgggtccactacactcctcgcgtattactctttatgggggaaaacagctgaattacccaggtgccacagaccttataatgcaccatttccactgcttaatgccgcaagacttcaggatgccaccaacgtaggccccaatagacctaaccttagactcgataagttctgcctcgaaagtaacattgggatcctgtggggtcttttatttgtggggcttaggagacatgattttaaactcaaggtcacctggttcaaaagcaacactgacgttgggtaaaaacattggtcttgcgagtggaatagaagttaatattgtgggttcaggccaggccgcgtctcacaagaaacgacgcttgccataagaaatttattgtaggaattgcctataacgattgactgcctcttcttggttcgacttaatcagatggtctctaatcctgacatcatttacttccaatttggactgaggtttgaaatttatgggtttatatggggaggttagatgtttgggatattctaaagaataaacttctgaaccagattgggacatttctacaaaagaaaaacaatcccaatttctggatgaaatttatcaaactagagacttaaggaatatgataaacctaacctatgtctaaactttaaaaatcacccagaaaatatgaactctaattgttaaaccgaatgaattaataaaatgtaagacattcataactcgaataaaaaaagaggggaggatgacgtgctagaaaattctgtgaatggagacgtggcggccggcgaaatgattttttcaaacaccgggagtcggagagcaagtccaagtaaattcacaggaagaatgtcaaagataaggatggcatgcacggattcaggaagctcgagtggaagtttcagaaagcttaatttttttgaagaagatgaaaatggtagaaagttggattcttaccgttttatactctaaatttaacaactatcagatcataatatagaagatctaatggatgaaaatagaagaaaagtggaaaagacagtccattaatgctattgatgtgcattggaaccataaaaccgtcaaaatcaaaggcatgcataatttcaaaagggattatgataaaaataccctctgtaatcatttaaaaaacaattttcatttaaaagaactttttaaggggcaattgttatatccaaaattcggct

SEQ ID NO: 330978 - DNA, 856 bp, Cannabis indica
acacacacatatatttatattcatatacacaaatagcaaagccctaatcacaaccatatctaccatatcaagtaagcaaaacacacacacacacacacacacacacacacacacacacacacacatatgtattcataattgatatacagagtcatttcatcaaaatacctaaaactaattacaaatcgcaaaaccctaaccaccaaacaagtacacacacatacacacacatatatatatattcatactcatatacaatcccatttcatccaaattaacagtgaaaaaaatcagacctgtgccggttccggtaggatcgccgccctgaacaagaaagcccttaataacgcgatgaaagattgtgttgtcgtagtaaccttcgaggcagagctggacgaagttccgtacagccttgggagcttccttgggccatagttcgatgtcgagaggtccgtacgtggttgtgatgaccacctttcccctcgtcggaggctctaagacgtaaatcgccgacattgtagatcgccgatttcgagcgccaaaaatccgattttgtgagctcagtttggggaagaagataaaagttacgattaatatctaatatgcccccgaattttagctttaatcttattttggccacaaatattttaaatattgcatattaaacccccgccttattatgtttccattggtctaattattgtgacatcatttcttttttaagaaaaaaattggatgacaatatttttaaaaatataaaaagaataaataaattaatataacaaaagagattttatataaaaaaagattgacaagaaattaatttctgttataaatattaataattatgtggatg

SEQ ID NO: 330979 - DNA, 1494 bp, Cannabis indica
ggtgatctaactctacttaatgagatcgaatgatgtactcctggttatccatccatcccgagaatttgcatctctactaagcaaaaaatagtgcaatcaacagtgcatggttctttagtaaggcctgcatggcctacaacttcttttggtctggctaacttgagatcttctccgaagtgcagatggggatcgccaatcgtaggctcaccaattctcgggcctgtctctccagcgtaaaattagagatgagatctagttgttgttcgaggggactgtcgcccctgggtccttccattagtagaaggcgctaatggtgggtcttctcttggaggtaggggcctgctacttagatccaccacgatgcttatatcagtttggccagctgtagtggcaaaatttctgccgcctgttgtggtctaaagattcatcacatttgcactgttcatggggattccaattgtgagtggaacctgagtatctggatctatagtctgtggatcttgagggagacccaaagaggtagacgccttgacaagggtttttctcgtgttaaccatggcatttgattagatacgatatccacgctcttaatgaaagcaccaaactattaacctcaaaaggtgatcaactaaaattgggattgtaaagatctgattcttaccacgtgttgcacaaacaagaatgaaaaagtaataaacttacaaatttgttatagaggtgcgaccccctgtgatagtgggtaatgtcctactccctttttagttgtattaataccgagggtaatactatctagattattagtaatgggatctgatataggacccttaaggatacaaagtatgaatcgagattggcaaatctttcgagtgtagagaatgcttgtatgggcgtttgagagaggaagtatagaagagaagacttattcagacttaggtttagagccttgaggtaagttttaggcatagactaagcttaggttttctaagttagagttaaagcgtttatataggaggcctaaaccctagattacaactataaaccctagatatttgtatatttaattagttaattacaaaacaaaaatatcattgaatctagatattattcagctattctgttggacttttagggccaaattcgtagcccaagtgttgttgtccacgtaggagtgcataaagaatcttacagaaccctccttcgtcgaccaagcacctgcagggagcagactggccggccatggcattgcattgaggttgggcggccatagggtcagctaggggtggttggccagcttctgggaggaagttagtcttgtgtttgatgcccatttgagtgtgaagcctctatttgctcaggtattgacttggtgttcttaccgataagtcgtattgccacatggccctaattttgtccacctaagcactgtcacgtaaggagaacgaaaattggaataattgttaggctaaaattagtctaagtttcgggtcgtatttt

SEQ ID NO: 330980 - DNA, 986 bp, Cannabis indica
tttttgtacttctccgggagctcactccctgaactacacttgttcgtctatatacgactcagctaattcttgggtgaggtgtccttttggtctatgtgtcatacgcagctgtggccacatattttggaaaaaacccgaggtaacatttacccacaagtcttatttaataacaggtaaatgagacttatatgcggcctgtggtccttaataaatatagtggcacgtgcccctggcgcgtgggtcacatttatgatggtcatcattgatttttatttccttttacaaccaacgattcgcttcccatccattgatagatctttgcattaatgctggtgtcatagaggtactcaaacgattcaaccgtcctttctcctcttcacacatgttcatcccatccgttggatcacgaaattcgaatcgctacgaattctcattgtacaatggtgtttgatcccaactgccttgcactccttctggcctataaaagccagtacctttacttcgttgggttactttcaccactttgcgattttcaacccagccaacacattcgaaaaattttagaaacctccgacttcctacttttgttcctccgccgttgtcagaccaaactttatcaccggaccctgccaacttcgcgcttatcacctttctgtaagtctcttgttcatagtttctctgctttttctgcatgttggggcaaaataagaatggtgacattctcatttggttgcgcttgatttctgtgatacggtggttatggcggaggccttggtgatgcctccccaaaaaaggaggggcggggcgtcagatggccactgtcgtatgttgttttatttgcacgcttactgtctttttttctttgaggctagcaaatgatcttgtttgtttgccatcgagtgtttgaagcgacttccactcttttcttcttcttttttccctttatttttgttttttggatgtttgtgttagaaattattttacca

SEQ ID NO: 330981 - DNA, 831 bp, Cannabis indica
aatatttattatttattattaatactagtcaatgaaatagctcaaactcacatgctaatattattatttttatttttttatgcaaatattataattatattttatttatatattaattattgagtggcatggggagcagtatgattggctaaataagaaatgaacaaactttaagaaatcatgcaaaccatacaaaacccttcctttttgccttatctgacacttatatacaattggctccattttcttgaattgacaaacttgcccccttcatttttttttagtttgcctcctaaattaatgagatatgtattatttttttaacaaactatttaagtattacaaattagtttttttttattaaataaataaaataatagcatgactacttaatcaatttttatatcagcattgtatgacttaacattaaaaaaaataaaattatatattttaaaaaatcattcaactaaaaattaattaataattaaaaaaattacgtaaaactaaactaaaaaattaaataattttttttaatattaattacacacgttatactaatgtgataacttgctaagtactcatgtcatcatttaatttaccatatgtgacaaaatttgacaaaaatgaccaatttataatagggaaatttcactttttgccccctaataaaacctccaatattaaaatttagaccatccactaatttgtacaagttaattccattgattatatgaacttcccattttacctttttttttaaaaaataaaaaaaaaaattgttaaaaactaaaaaaacttaccctctctcttcctctctctcttccctctcgt

SEQ ID NO: 330982 - DNA, 1013 bp, Cannabis indica
aatttttgcgataataatccctaagttatatttttggaactctgtaggtacctaattattaatttatgtcattatcacgtgtatttctattggtatatttaaatatttttaaaaaaataaaaatttgatgacttgctccaattagaaattgacacgtgacaatttacttaatacttaagagttagatacctacaaaagtttcagaattataacttaagcattattatcgcaaaaaattaaacttaggtatttatttgcaactagtaattaaacttaggtattatgccgtaaattactcaaaaaaaaaataaaaataaaaaaataagagagaattttatttaggaaaaatttaaccttagcacatataatatcactttattatattaatctcttaataattactttctttcaattcaacttatatttatatgttcttattatttatgtaccgatttctatgatgttatttttttataacttaattgtgttataaatcataataaatgtagattcatcaaataaatcatttaaaataataataattttacaagttttataatttaatatatcattattttattcttcttttacatgagtcatttttgtataggagggttgtttgtacattatcactttatggatttcataaattaaaggaaaagaactttaatatgagaatatttgttctttttctagtgagaatcatctttgtgtcaataaatatatcttaaacagtacgttatgtgattgtatatatatactaaaaggtaataataatatatttcatgaaaatatggtttattattattatttattttatttttaacgtatttatttttatattattttactaatgtatttttaattttatattcacattagatttaataaaataaaacgcataattatattttaatattacattctttcgttagattaaaaaatatatactttttagtatactagcaaaaaactacgtgcgagacacgtatactaaatttatgctagttttt

SEQ ID NO: 330983 - DNA, 794 bp, Cannabis indica
aaaaactcttgattagaagcaatgaaggagtacgaattttggagagcaaaatcaatattgaaggctttctcaccaggttttcagcattcttttcttctctattttcttcttctattccaaattaatatgtgtgaaattactacgatgaacatgagtagctaacagttcattagggtctagatgaatattgtttgactttgattttagggtctagatggatgtacacaagatcaaaatacgttgattaaaagatctctgtactcttatttccttcaccaagtttttaacctagtagattttctaacaaagtttttaataagtcaattattttggacatccaatgagaagtattataaaatattattaatagatattcaaatcaatcatatcaaccatcaccataaatgtttgattgtatttctttttatttcaatgatttttagttttttattctttgagttatatttttgtaaaattaaggattcatcccattaaataaactagttaaaaattatcattcacttctttttctctttttatcatcttcttctttattttatattattcttgttgcccctgattttatccaaaatacgtggaccaaccggatgatgacacgtagattgaaagggtttaacgtttaaataattcagctaagtctctttaaccacaaggatcagccttggacgtgcctcccggaggaggcatgtcaatctcacatactcccggagagcaaagctacaacaaagcatctccgggaggtatcagactctatctgagcagtcttctcgcat

SEQ ID NO: 330984 - DNA, 755 bp, Cannabis indica
ggctctttctcttgttccaactcctcaaattcaggaagggggtcaaagttctcaacctctatctaccaataacactctgtctctgaccaaaaggagacaaacccctttcataatgaggccctacaccacacaacccagagtactccttggcacacatattgttcaaggtctatcatcgatccaccatcattttgatgagttggttcataaaaaaataacctcaccctaaaggaggtgtgttagatgtctacgttggatggggattgatctcactggaggtctccaagatatcatttgagtaagttgggaacaaaatgttgaatgtttttcataactttattgtttttgacattttagttttgactgtgtgttcttgttctttttagtgttgctcgaattattcactctcagcacacatatcatgtaacgccctaaataattaggcatgctacccaagatacttacgaaaacctaatcccctaattgggattactaataagattagcgcggaaattaaactttaattataaatggaattaaaataaaacttgtaataatttaaactttacaatctaaaagttacagaagttgagatcccaaaaacatttacaaaatattattacaagtcccttttctttcaaccggcctaagcggcgaaacagagtctaaaaaaaaatacaacactggtagaccccaacccgcttggtctgatatggctcggacatgtacattcttcgcccagctcctgcactcat

SEQ ID NO: 330985 - DNA, 1668 bp, Cannabis indica
attagacaaaaataccctcagtaatcatttaaaaatcacttttcactgaaaaggactttttaaggggcaattgttatacttgaaattcggctggcacttcagaagatgatacatgtcaaccttggggaatacgaattaacgaataaaatggtaattatgttaaaagatactaaatggaataactcattaaatgcatagttaatagagcatatctataactcactaactgtatagtcttaggcgagtcaaagatatacaaattatgtatttgcgtactgacgagaaaccatttcacgtcagaagacacaatcataaggatgacatcgataatgcatagcgaggcgtcaaccttgctacgtataaaaaggtgttgacgagatgtgttgacaattagaacacttagcattatattaactaagtataacaactggaagaacctaagtgacggataacgaggcatccatcttgcaataggaaggcatactcatggtaccttcacgaatcagctctagacacctttcaaggagatccactgctccgtcaagtcaactctcttagaaagaagttgacattcaaatgatgttggttgtggaagttcaccttgtcaccaagaactgcaattgtcagatggagtgttaagtcttcacacgtagaaataacgggatttacattatcaacctcgaaaagacatgggaaaagcttcagctcactactaggattattgttgctattcaagttcccagggagatgccccaacgagatacacttagcagcgtatctaaatctacgtcaacattgacccattaaaagcagataaatcacagttgtatgattttcaaataataaccacatttatttacgtggtgtgtaattaaggcccacgatttctgggaaatattattgtgggattcgtatctaattgtaattaattgccaccctatgtcattataaataagagcaaaatgtacataaaaacggacataattaaaatccttgagagaaaagaatcctattttgtatcagaataatctgaataagattaactcgtggactatgcagaattttaactgcaaaacaacgtaaaaagctttgtgttatattttcttcttttactttctattatttctgtgcaaaacttatcacgaacataggcttattatcgttaacgaaaatctgcgttaacatatatatattcatatttatatatgttctagacttaatagaatttatacattaagatataatcataaaataaatcatgtgaaccatgcaacgtaaaatgaaatttttgatcttttattaattagtaaatttgattatattgaaatggattttatttagggcagataactcaacagggtctccatcatcgatgcatacttcttcactttctccattggttctatgacacattccacgccaatttatggatcaagctcatcttccgggatcaccccttttatttgttgggaggatgttctggctttaaagttattttcttcctcaaccataagcatagttatggttaaaacactataacaacttcacacacttctttgatcttctctaatagctcctatgcttccggtattgttaggaaattttaagcacagatgacggatggatgtcaccactccaaaatccattaaaaatggtcttcccaggata

SEQ ID NO: 330986 - DNA, 698 bp, Cannabis indica
ttttgtaaggttgaaagccagaccttcttgggagaaagaattcgaacaaccagcactaagtcaagtcgctcgttcaatgcagaggcaccatcatcagcaatggctaccaccaatctttcatcatcagttaaagaaacagtagatttcatacgatcaataaaaggatccatgatgtagaaatcgaaagtgaaagaaacaaatcaaacccagaagaaaaaaaaaacggcaaagtaactggtgaaagaaacaggagggaaagaaaaaacccaaaaaatttaaaaaataactaccaaaacgaaaccaactgccacagaccacaaagtgggcagacctccatcaaatttgttaataatctagatttggaaattgttaaaaaaaaattctacgttttgaagttggacgaaataataaccccaatcatttatcaaataaagaacttgcatcttcacaagtcacaagtgagtctagtttaaaaaaaatgtgtcacaagtgagtgagttatgccatgctccattatatttctttccttaatagatccttcatggtttgatgtacaggtaaacgaattttaacatttcagttattaattatgtttcttttttgcctatatatatatactagtaaaaagttacgtgcgagacacgtatactaattttatgttagatattttttacttttttaaaagatataattaataa

SEQ ID NO: 330987 - DNA, 660 bp, Cannabis indica
aaagtaagggttggattgagggcctcttaacaccagaagcagatgctaggccttttccatgtacatcagaatcaggttgttcccgatggaggttggggtccatgttagcattgtcagcagtggcatgagacaaagcagctgctgagctaacatgactagcaacctctggggaagaaagaccaatagacagagcaggaccagggacagattggctagaagccacaatgacagagtcaatagaataagaagtgaaagctgaaggtcttaaagagatatcaaaggtggaactgttataaggatgtgcaacatttgagaggttgggatttaagggtgtaggcatcatgacaaccgcattagatggttgaggagcatagggtccagtaaagttatcattgagactcaagaaagaaggaaacttaatggcttgaccagtaaaattttggggaggtaagttgaggtttacaggttgatagttcatcatagttatggtagggggatgagggtattggaaaggttgagacttgtcagtgattttttccttaccacgaaggagaatggtataagggcacagaggttcagagtaaagttcatcacacttttgaagaaaagcaacacagtatctcttagtgtgatcaagctttccacagaaaaaatagaaat

SEQ ID NO: 330988 - DNA, 1600 bp, Cannabis indica
accaatttcagattttacatacatttcattaatgattttagtagattcacatggctatatcaattgaaacaaaaatctgatgcactaaatgcttttattgatttcaaagcctttgttgaaaaccaatttgatgcaaaaattaaaagcataaaatgtgactggggtggggagtatcaagcatttgagacacttgttagaacaaatggcattcattttcagcactcatgtcctcacacttcagctcaaaatggaagagctgaaaggaagcacaggcacatagttgagatgggattgacactccttgctcaatctagtatgccacttaaattttgggtagatgcttttcaaaatttagtttacttgattaatagattgccaacacctgttttacacaacaaaactcctttcgagactttacattgcagaaaaccaaattataaacaaatcaaaacatttggttcagcatgttatccttgcattcggccataccaaaatcacaagtttcaattccattcattgaggtgtgtgaatctaggatacaatgattcatatagaggttacaaatgtttgagtacaacagggagagtttatatctctcgaaatgttgtatttaatgaaaatatatttccattccaatctggctttctgaatactcaagctcctgaaaaacaacttgttattcacaacgagtcatggtctcagcttcctaattttcacttcaaacacttcacctctgtgtcacaaaataccaattcctctgtaccatctcgagctcatcatgatttaactcctacagcagcaacttcttcaaatcaggtaaatcatacaaactcatctcagctaaactttgactgacttgatcatggaactattacaccagaaatcgttcctgctggttccagtgcagatgaattttgcatacagcagatgcctctaaatgaaaattccacaagtgttgatcctaaacctgcagaacaaaatacagaagcctcgacagatgcaactcacagtgttcacattggtcctacacatcacatgatcacgaggtcaaaagccgggatattcaaaccaaaaacttacccgagtcaggccaagtgggaaccaattgctgaagaaccaagaattgtacctaaggctttgcagcatagagggtggaatggagccatgaatgatgaaattgtagctcttaaaagaaataaaacttggattatagttccaaggtcagaagctggtaatctgattgggtgtaaatgggtgcacaaaatcaaaagaaatgcagatggatcttttcaaaggtacaaatcaagacttgtggccaaggggtttcatcaaagagcagggttggattatggagagacatttagtccagttgtcaaagcaagtactgtaagaattgtgctaagcattgctatgtcaaaaggctgggatgttagacaactggacataaacaatgcatttttgaatggtcatctggaagaagatgtctacatgtgccaaccagaaggttttgaagatccaacaaaacctgaccatgtgtgtaagttactcaagtccttgtatggactcaaacaagccctgagggcatggtttgacaaattga

SEQ ID NO: 330989 - DNA, 1189 bp, Cannabis indica
aaaaaactaaataacaactattaaaaaactaacataccttagcaatagaatcggcgacaacagtggaaaactgtgtctacattgaagccatctgagcagcaaaggaaaagactgtgcagacacaaactctttcaactcaacaaaaccagaagaaatcttttgttgggaagtatgcagcaaataaatcttcacctccaaaccatcaaaacttttaagaaaaatcatcaagctttacaaaaatgtcactctcaagcaaattcaattcaaaacaactccgtccccaagaaaattcatcgtacctcccactgtctacaacatctaaaataaacctaggtacatttttatacttagtaccactaagcaaaaaccattctacaaaatacaaaactaccaagttaacagcatcctcataaaaatcaccccacctctttgtggtaaaacattgcctaacagattctttagtaatagaggatgaagtggaatgaatataatttttagatattaattaggttaatgtttataagcatggacatgtggcactgagtggggtaaatgatgggatagaatggagagattctagctgagaagtcactacgtggatgtcgatgagacataggctcataataataaaacaactaagactaactaaaaccatttcaagttacataggagagcttctctcattatctaacaaatttgatcgagtgatatggaagtcatagattgattttagttctgtatagatttttatcatattattaaattattttttaaatactaacaatggttaatgttgagttaacataagtgtggccctagctagaattggaaactataaatagcacccaacactccctcttcttgataatttcaagatttctaaaactttatctctctcgcccaacaactaagaccacagctcaccttctttaagcccacacaacttcaacttaaacacactcatatataccccgtaaacatcctacagatcgaatagtatcaccactaccaaaccataccaccaccataatcattatatatatatccctcattattttggcatcaccaccaccatcatttcatattgaagtctttattgctgaactgggtataatttaaaactaaggtatatcattctatattttgtgtgtagattcaaggttaagttttcatgtatataccattatga

SEQ ID NO: 330990 - DNA, 1065 bp, Cannabis indica
aaaaaaattaatagaatatatatcatttcttttaacagcatagaatatatatcattgaagtaggaaaatgaatattgttggcacttggagttggggttttctaaatagaaaagtgtagatgatttttattaaaaacaaaatagtgaataattgaagtgcaaatttaataaaaacaatttcaaaagagaaaagagtgcaaaaaatatcattattcatgatcatcttccataattaaaacaaaatcaatctgttgagcatatatattatccacagtggcaacaacaactaatctgttgagcttaccatctcaccattagcaaagttcgttatattgatccattagtgcttaatttcatttttttcatacttcaatcaaataaagtttcgcaatagtaaaatatttatgtgaaaacaaagaagaaagtcaaatttaagtaaaccctcccctaaagaaaatgggtctttttgtgaatattatataactttttggtagtgttttttcaaatttctttttattccgaaaactaagtaattattctaaatatgaatcttaataaattagaatcaaaaaaataaatcaatgaatacagaatttacaagctttctctgtattggaaacacatttcaactgagtagtacttgggtccccaagaaccgagtaaagtaacctcgactataaaatcaatcagaatatattttccaattttgatttacaaattaacaatattgttgacctcaaaaagtggccaacccatagcgaaatcgtattaatttgatgtttgccacgtgttgtacaacatgaacaataaagtaaacaagacaagaatttttatagaggttcgacctccttagttagcaggtaatgacctactctccttttagttgtattaatacctagaggtaatactattcagatcactataagaagaatatgatatagctctctataaggttacacagtatggatcaagtaagcaagtctctaatgagagagaggtacatacagccttagaggcgtgtgagacagatgaagagagagccacttgggcgtgtacaagagagaga

SEQ ID NO: 330991 - DNA, 927 bp, Cannabis indica
actaaagcggtcattacaatatctgtccagatatacacaccctcgtcccttgacaacaaaatgccttcaataaatacacacaaccccagcttgtatcgtctgcaacatcgaacgcctcaaaagctagccaaagggttttaaaaggtcactctttttgcattgttaagatagtcccacaatatttgatcagaattgcatcgtgtattcaattcttttgttgaggggtcgccactcatctttaggcctgtgattaaaccgaactcagacagtgagaatttggcttcgaaaatacccacgtaaaaccacacttcatcatttttgaccctactaactttctttttcctcaataatagctgatgtacaatcaccccaaaaaaattcaaatcacttgcattccgaaaaactctaaagggagtttccttgaccttctcaatcaacttaaaggcttcgaatttagcctttatcgaagcaaagtacctgttccctctataagtgatatgccctggaaaatgctcagacaatgaaagaatgatttctagagccatctgcatttacaaacacaaaatgattattaattggaatataaatcgcacatagtcacaaaacaacatgtaaaaatcacataaaatcgcaaaacaacaagcatgaatcgcacaaagattgcaaaaacgtcgcttaaaattgttcaagcactgtctagagtaaatatttaaataaaattgcacaaaattacaaaccaacaggaacacaaaaatactttagattggcatgacttatcgcacgaaattgcacaaatgtcgcccaaaaattacaaaccaacaggaacacaaaaacactttaaattgttattatttatcgcataaaattgcacaaaatcacacaaaaattgcacaacaatattgttatcccaaattttgcactctgacg

SEQ ID NO: 330992 - DNA, 872 bp, Cannabis indica
cagccacctggttttgtagatccagaacaccttgattatgtttgcaaactcaccaaagccttgtatggcttaaagcaagcccctcaggcttgatttgaaaagctgtcaaatgtcctacttcagcatggttttcatttttctaaagcagaccagtcactgtttctcaaaatttctcgcacaagctgcatctacattctggtgtatgtcgatgacatcttggttatgggcagtgatgatcatctagtaaaccagctgattgcagaactcagcagcacttttgccttgaaggatttaggtgaggttgactacttcctaggcattcaagtaacaagaacctctgaaggtattctacagtacattaaaaagattctatgcaaagcaggtatactaaatgtcaatactcaaaatacaccaaagaacagtggattgaagctatccaactatggcagtgaacctgtccaagatattactttatacaggtccatagttggagccctgcaatatgcaacagttactcgacctgatcttgctttctgtgtgaacaaggtatgtcagttcatgcaccggccactgctctctcattggactgcaataaagagaattctaagatatgttgcaggtactctagactatggtctcatgctcaaaccagtgtctgacttctccttagatgttttctgtgatgctgactgggcatgtgaccttgatgataggaggtcgactactggatactgcatatatcttgggggaaatctagtcacttggaaatctcaaaaacagttaccattagccggtcctctactgaagcagagttcagaagcttggcttgtaacgcccagatttcctgagacgtcacactagctagtccgttt

SEQ ID NO: 330993 - DNA, 1355 bp, Cannabis indica
gtgggacacgatattgcatccacaaacatcttacgatataggatgcaatcgttagataaaatatcttacgatattgcatgattgtcattcttttcttttacttttctcaagattttagctaacaatatttttattaaaaaataataaatacatcaatgctactgtataaccttcatgtaaatttctaagatgacatccatctctttctaatggtatagcatttcaatattttaccacgtaatatgtctactcaaacaaatatcatctaaatatttaccattagagatactctaaggtgcataataataatgagatattaataatgatttttaataaaaatattaattaaatattcaattttatatcaaattttgtaattataataaattagagtatacaatagtaaaaatattgatgtaaatatatcataaaattatttttttatgtaatatagtacaatttttgggagataaaagtggtacctgtatgtattcagttatgttatgtatgaatgacttaaattagtatttactatgtgttttgtaatcaaatctttgtctattttattagttactgattcacatgtaatttaagagttgtacatattgacacaggtacgtagtttaattattaagaatgtaatgatgatagaatgatgaacgtggtcctgaaatatttaaatagttctttcttagttaaattaaaataataatatataataacaaatcttatactctttattaggagtgggaactgtgtatataataattatttgctttgtcggcctagctatatatcattgaatatgaaattaatactctctaattttaagtatagccgcataatgggttagacataataataatgttgaatttgccttaaatggtttggatcattctttgggtcgacacacggctaacatatatattataaaaagtagaaattagataaataaataatgttaagagattatgactttttttttttaatatatatatatatatatttatattttttgtagagaaagatagaaattctatttgtaaataataataaattttgctagaaaagttgtcgaaaaagtcaccggtactggaaaagtcaccggaaaagttagtgtcactggaaagtcaccaaaaaagtcatcgtaaccggaaaagtcaccatcactggaaaaagtcgcaagaagtagatgtctcaaatataaataaaaatagaaccggttctataatataataaattaaaataaataacacaaaataactcaaaccggttataattgaaatataatcggttttgtaacataatgaataaaaactgtaaagtccttttttggcaagttaggtgacaaaata

SEQ ID NO: 330994 - DNA, 1458 bp, Cannabis indica
tctcctctctctctctctctctctctctctctctctctctctctctctctctctactaattttaggtatatacaaggattgtttatggtttccacgtgtggttaaataactttgttttgtaatatactaaataaagatcgaaagaacaacttattagagaccaaacgtggacgtttaaatggaatatatcgacatgaaacactttcttttttcttttcttatcttttgcatggagctaataatgttgttggacatctcatattgatcaatattaataaaccatttttgtacctaatgttgggtttaattcatgtatacatatatagatatcaacatactaattaatatgatctaattagatttagtaagtaatacattaagtttgactaggcaaacactgcatgtccgccacttctttctcttgtctttagtggatacgtgtgcttagttctcatttgagaacccactaaaagttggaaaaagtaataagtgggaatatactaattgagaaatactaaacagactactatagtgcttgatatgaaaggttgtaatattgttattggtacaacttaatatcgggtctgactaaaattaaaaaatcaacataacccttgcttctcacttaaataaaaccaagattcaagggtaaaatagccgaatcccacaacctcatttaaactcgatattctaaaatcaaatttttgattgacctactagaacaaaagttttaagttaacttgtgtgactttaatgattatttatcgcagtttccatcgttaccgaacaaaaattataaaaataaatttcacatatattatatttgatacacttagagtttaataaaatctctgaaattaagaaattataactcaaatgctcattttctaaaaatgaagctcacaacatacatatactaatcaaatcatacattaaaagtaattaatgttaattgttctactaatccatattctattcatgtggtcattacaaatataattattgaaataagtactccaccatttaaacacgttcagccaagctctaaggaaactagggttgtaaaaaaaaattcgttaactgcctaaactgaataatccgcccaaaccaaacccaaaaaatcgataaaaattaaaaaccgaaataacccgaaaaaactacaaaccgctcaatctgttaattgggcgggttgaaaataggtccaacccacccaattaaactgaatgactcgaccaacccgattttagatttaatttctcttttactttttagtttttattatatataacataaataattaaatatgtaataatataaagctatatacttaattgttagtttcaaagtcatatatattgtgttgtgctttggtggaatgtgatatttttaatttatctttttaatttatattgattttgactttgaaaccaaaaaaaaaagtttggccggtttgggcgg

SEQ ID NO: 330995 - DNA, 1448 bp, Cannabis indica
tacccaaaaatttgacccgatgatattgacaccacttttgacatgtggcgagaaggaaacaatcctagagatttctattatttttgtccacaatgaagatacaaatacttttggaaaacaaacgaaaccatcttgagcccaaataaaagttgggcgcccaaggtgacaactctcctgatgcgattaaagttgcatatgaaagatctttttcaagacgagtctaagtgtgtttcaaactgttgcaacaatttttgacacccactgtgtctctttttcacacctttgtcagagcttcactctcttcacacttttctctctataaaattgtgacgtgaagtttagactttattaattttattctgagttctctttttaaggaaatttagattttgtgatagtaaaagctctatgttgacgtagactccattactattgtgtcacggggaataaactactataactgtggtgtttttcttttttacctttttgttcatacattcgttggtcattataattgttttttttttttatgggttacaaaatgattaagagaataactatagtaaaagattattatccataaaaatattaatttgatggttaatttaaacaatgttaaagctagatgtaaaataatactaacttttccatataggggcaaaacaatgccatgtcaaaaatgacggagcaaactaacactagtgataaaagtgagggggtaaatccactaattattctaattcttataataaaaaaaatatccacttattatttgtataaaataatatatattttaattttaaaattaatttaggatgatacatatattttatagttttaattatttaagttaaaatacaatagtaataatcgcataattaaacatgaaaaattagcaattaattaatattatattaaattataaaataatatgtgcatttagaaataaaaatctattattaaaaaatagaaaaataatttaatattattactcaatgagattttattgaattatgtgtgtcgtgtgtaaatgatacgtatttattatgtttatgatattgacaatagtgatcgttggattgataaattgtcaaagtggtataatttagtatgggaaatttgaattaatatgcttaaattaccttataatttttcccctaaatgcaaaattattaaaattggtcatatatgaccactttaccaattttcttaaactacccctctcgtttgaaaccctctctcttcctctctcttggtctctctcagccgaacaaacccaggaactcgcaccccatttcagccaccacggttagcacacagcccaactcgcaacccactccgacgaacttgcaacccactctaacgaactcgcaacccactccaacgaactcgcaaccctgacccactccgaaaatgtcaaaggtatgtgttttttttttttttgtttt

SEQ ID NO: 330996 - DNA, 571 bp, Cannabis indica
ttgacatatcataatttctcaacaagccataataacaagtactattcatataattcaaacacattaatggacaaggagtgagatcaactatttttcttattggccttttgtagctcactccttatgttttccatgtgcaaaaaataatattttaaatgtttagtggcgagttagacaacatgagatatcatgtaattatgtgtggtcttttgaaatttattttgatttattaaacatatgttgtctttgtagtttcttttgcattactttaaatatagacgtttgttttaaactaggcacacaaactttgcaaactattttctaataaaagcaataacatttatggcatttttactttaataaatattacaaatggtatatcaaagttttaacttagccggaactgtggtcgacgaggacactgaaccttgtaataaggaggtgattgcggcagtcaaagacccatgatccacaagaaggaaaaccaggtaattaataagttgtgcaattcttatgacatcgcttagaaaattaaatgtaattacactgtgtaattactaaaacttttcat

SEQ ID NO: 330997 - DNA, 739 bp, Cannabis indica
gaagatgtgccgtttgtgaggaagaggaagtcgcctacgtacttgaaggactatattgacgaaaagaagaagatgcgacttctttcaaataacgtagatccgaaaagaccagcagacagtagattgctacgtacgttagagatgttgattggagacattcccaataccagacctaagaatgttcacactagcgtcgctgatgtgaagttcttcacaaaattgttgctaatgggggattggttggacgatgatgtaagtatttaattattgttttatactattttgatattttatttgtctttgatgttattatcgacatgtcgcgacattgtcgcgacactgtcgctaacacataacaaatcatgtttattaatatttgtctctgttgttattatcgacatgtcacgacattctcgcgacactgtcagtaacacaaagcaagtgttgtttattaatatttttgcgacaagttggcgacattatgcgactttgttcgtgacattatgcgacttaatttgcgactttaattaatttttctttgattttcatacagcacatagatgctatatcatacttgataaggaggagacactttcatttttgtagaatcgtaccctaagccaggtatgattttggacacaacacttctacaattcctcagtggcatttgggggtgtcacaagggtggcaaaaagtacctttgaatggccagaagaagtgatccagtactatttgggta

SEQ ID NO: 330998 - DNA, 695 bp, Cannabis indica
caactttgtaagtaaaaatgtagacataggcgtgtatgagtaattgtgtaataaattatgtaaaatggatttttcatgtaaaaatttcaatatattatatatgaacaaccagcattttgtttaaaacaaaactcatctatgattttactataattagaatgagcatatccatttgtatatatgtacaagtaattatagtagggtctagagaacttatttatatataaataacccaattattattatttataatataggtatacttggtattttatttgttttttcaaattaattaataattttacaatactaaaaataaaattttaaatagttaattacatataaaaaaacaaatatgcatgttattaaatgttgaactttgtttacaacatagtatatcattctaaatcttccaaaaataggcattgcgatattaggcaccatagtgctccttaccacagttacaccaattagcaattttttataataaatattaatgtaaaataagtaaaactccaatattaaattgtatcagtagcaatataatatctcataagtatactgatactagcactacaaaattttttacttttagccacaacaaaatttgtgactaaaagtaaaaaagttgtgactagaaggtccgtgactaaaagtattagttacaaaaattacaatttgttgtgactaaatgt

SEQ ID NO: 330999 - DNA, 1061 bp, Cannabis indica
agcacactggaaacactcgtgttggtttgtagggtgagtcgtcattctatgaagcatccaaagtgacgtactcgtgcataagagccatcattccataggtgtaaaggcccaatggaggcttaaaatgaggaaattacaatttaagatcttaattatgctaatattgttaggaattgtaatatccttctttgaatgattctagatcttccttcaatctaaatggcatgccctttggtagaggtcatactagctggaacccttatgtttttctccctcaaggtggatctttctccaataattccacttcttcaattggtcaaggtattatatcaagttcttctccaccatcaacatcaaatccttctagatctcgacctgtttgtcagttgtgctccaaaccaggtcatcttgctactcgatgttactaatgatttatggaatttcttggtgttggtgttggtgttgccaacataacatagccacaacagatattgtgcttgatgcttcttggtacccttattctggtgttattagtcattgcactgttgatgagtctactttcactcataaagaaccatattttggtcatgaataacttcacatgggtgatggtgcaggtctatctatccacaatattggtaagaaagtctttcacattcctttttcttccgaatcccttactcttaacaatatggtatatgttcctcaaattaccaaaaatttgattagtgtctctgaatttttctttgataataatgcctatattgagttctatcctaaccactatttcgttaaggatcgagactccaaggctattataatagaagatcatcgtaatcgtggtcttaatgtcattcaaccaactcagttgcagtcccccacaactactggttcacaatctcaatacaagtctttcaaccctatttttgtttgttctcttaataatgtttaaactgcttcttgtaatcatattcaaccttctccctttaattttgccatattgggatggcaaggtgggtttattttgcggttcaagatggggctctgacccgacagggcaa

SEQ ID NO: 331000 - DNA, 897 bp, Cannabis indica
cgactcttcagcattttaacgaaataataggacgaaacttaacagaaagactaaactttagtaattataaaagtttaggggattcttcacaaaccgtatatttttgaaaatagaattaatattgtcgaagttcgggagacaaaattactaattattctaaaacaactgtgtaagccttttctttccccaaaattgggtaatattctacccttatctttgtttcctattgtcttagggctcgtttgatacgccgtataagggtcatattgcattaaataataaataacactatgtttggataaagcaatgtattgtattaattattacgactaaaatttttaatacaatgtatgttgtattatttaatacataacaaagggtctgtattagattgtattataatatttacaaagaattcgaggtcaacaccaatctctaatccagacctaggacccagacccggatccggaccccagccacgacccggaccccaaacctggaccccgaccctggacccggaccccagactcgggaccgggaacccgggacccagacccggacccagactcgcatccgaaccaggacccagactcggacccggacccggaccctgacccgaccccgaccccgacccggaccccgacacgaacctcggacctagaccttgacccgaattccgatcccgaccccaacccgtaccccgacccagacctagacccgaatccggactcgaacccagacccagacctggacctggatcccgactcggaccccgacccaggatccagactcgagatcgggaccgggactcagattaaataatactaatagaatacaatactatatattaatacaagtcaatatcaaacatagtattgaattaaataatactaatac

SEQ ID NO: 331001 - DNA, 543 bp, Cannabis indica
tgcacaacctcaacaccatatgcaatagcaactatatttgcaagtctagttctgaaaaatcataataaaaaagctactaaattaaacctaaaccaacacaaaacataaatgtcataaacataaatactcttatcatgccaaaagtgataccctaattgcctaaatttacaaaaataaaaactttcgacaatactgattttggtccctaaaatatatggcttgttaagaattccccctaaacttttacatttataaaaatttagtgtaatgcccgtatttgaaaactcttactatatattatttatataatcttatagatcgggattccgagtataaaacacagttgaaattacagttgctaatataaagtctcataatattttttttcttacaaaatacagggcagctacaaaaggtgactcaaaatgttataagactgaaaccctccagcttgcactgccgcgatatatacaatccttgccaagctccaactcactactcctctagcttagcttttcccttacctacacaaaggtagcaaac

SEQ ID NO: 331002 - DNA, 861 bp, Cannabis indica
aattttaaaacaaaaaattgattgaaaaagtgttactaaatgcacccaaagaaattcctaagaaatttttgtttcacactagttttgtatcctgtaccactttttgaaaaaacatatttttgactcccaaatattatttaaaaattctcttttccttttgtaatttttgtaaactaccttgtttaaattatcaattttagctttcaagtttacaagctcttttttaaataaggaacaattttttgtattgggtttcaatcaagaatttttcttttacttttaaaaaatttactttttcaagcaataaacttattttctttatttgagttgagtttttagcaagcaatttttttaaaattaacaaaaaaatcattaaaagattttgatatttcatcataagatatatcaagcatatcatcatcactttcactttcaaaatcaattatttggttagaaatacatacgttgtcatcaactgccatgtagcacgtgtgagctaccttttgttgtccatctttgaaactttcttcctcgctttcactccaagtagctatcagtgctcttcttttatttctctttctcaaaggacaatctatttttacatgttcgggctttttgcattcatagcaaataatttgatcatcttttcttgagctctctcttgagttaccccctttgtcaaatttatttgcattcttcttaaacttcaaaaacttcttaaagttctttgagagtaagggctatatcatccatttcactatcactaccttcactatcttcactatcatcatgtgaagtggatttaaatgaaattgtgttcttcttctttttatcaacttcctcttcttcttgagcactcat

SEQ ID NO: 331003 - DNA, 879 bp, Cannabis indica
aataaaatattttagtttttaagtatagaaaatcaaatttttcaaagaaaattgaatgattcagttactattttcttctttttcaaaattactttgctaataattatatatattttttcgaaagctattaatagttatacattaatggcataaatattataattaaaattaatatttgtaatatattatttactaaaattatttagaaatatttcaaaaaaaattatttaaaaattaaataataattatttaacttgttactttataaaaaaaacataatcagaatatttaaattaattaaattatctttttgaattaattatgcgggagttattttgtaaaattatattttaaagaaaaaaattattattatatatttaatattaaaaaataataaaattattacctttatcgatattcttaaaataattagtggaggaagtattcttttatctcttatttaaacaaattttcactttcttaatttttataaagtaatcaaatgcagaagaataactattgggtgattctacaatgcaccaccttaaaagagatgtactgatgcactcatgacttgtttcgatgtccagaagaattttttggtctaatttttttttcatatccatgtacattatagctatataagataacctacaaaattttgtaaaattcagaataatttacaatatagaaaataatgttcaaacagtctattttacacgcatataaaataaaatagttactcgtgcaacacaccgtttgaacatatttttcggcgggttaaactttctaaattttttaaaattttacaggatatcttaaataactataacgtacatgactatgagaaaaaatttaactaaaaaattatatttttta

SEQ ID NO: 331004 - DNA, 1345 bp, Cannabis indica
gctccgatacataggaattaacctactgtaattccatgttcaagatcacacttaaacaaataaaagttacaatcaaaacaaacaaaatcaagaactaaaaatcagcaaacacatattaaaccagaaagataaatatagataaatctagatagcttccagacacaacaacagataagaattatactagtcatgatcttaagttcaatgtgaacttggtcatactccagtttgaaaacactgtcaccaatatttattgataatgagaattagagatatctatctcaggagctagaaagaaataatcacagtaagtcatccatggtgtaatccttcaacactcattaactcactaacccgagtcaacataatcgacattgttgcttaatacaatttcccaatcccagctctctctctcagatatctctctcaatttctcgctctaatttctctctctactgtgttgtgtctctcttgtaaaatgaaatgagtagtccactttatataaaccaaaggacccaaagatacttgttgttatatttaacagttaagttagttaataagcatctaactaactgttcgattcttggttgggggtttaagaaataataccacattgagcaagaaggaaaaaagattgcaaaacttgcattgaaatttacattaaatgagacttctatacaagtgtatagctatatgttatattaacttgtaaatggaaatttacaaaaataacatcctgatcaacgtgttgaattgaaagaataatcaagatttttgtagaaccaaaataatgaattgaaagagacaaatggaattttatcttggaattaaccaataaattgatcaaaaatcacaaaacattcgtatgtatgttaagatttaaattgtaggagctagattcagtagtcaataatttaagaagaataaaagaaatgataaattttacagaggttcaagaagaagaaattctttataaattaaacaaataccacattttcttgataaaaagttaaatcaacacaaacctaactatgaagtagagtagagtagaggagaggagagaagtgtctcactatgaagagtactattagagtgagtaatgtaaacttagtaagccaacttccgttacaatttccctcgccttctaatttcatgtcccaaatatgattgctaagttaacaccaaaggtaagaaagtgttatttatgaaatttatttgcattgttattaggtaactatggtgaacaatattttataaattatgtgggactccataattgtgcagtccgttgctaattattgggtttgttagaaaaacgtgattaattaaaactttactcaattaa

SEQ ID NO: 331005 - DNA, 700 bp, Cannabis indica
tatatatatatgtcgtgtgtgagcagcttcgtacgttggtcttaaagattatgtgcctccatatttggacccgagcctcagtatggaagagttaatgaccggagtgagcttcgcctcagctggaagtggttatgacccaattacacctcaagttggagtaataatactaatattcttattcttttctggctattacaaacctacaaaagatatattttttcatacaaattatttatttatacattcaaggaattaaaacatatcttgttttatacattttggactgtttaggaattatatacatacatatagatgtgtgttcgtacaaattaaaaattttgatagataaattaacattaattaggatcacaatagtaaaacttatttaaaattaataatgaatgatgaaaacttattataaagttcctacaaaattagttagttaatgatcgactagccagatatatatagattttgtctaaaagttctatgtatcaaacttaaatacgcgtttaaaagataaaaataaaattaatgatttacatatatatagttgctaaactcaacaactatataattccatttattcgagttataaccggtaaaataaaacatccttggattatgaaaaaatatttatcaaaataattagatttcaatagtatatctatttttttgaacaatttcaatactacatttt

SEQ ID NO: 331006 - DNA, 516 bp, Cannabis indica
tagacttgattacagactcaagataataaaaataaataaacatagaggaagagacgaacacccttctcctacacacaacaaagacactcttttctcccaaaatacgaataaaattcaaagagatgaaagagatacaaaatttagctgctataatatgtatttataattaatatacaccttataaacagctcatacacggcctaaataagaccacagttcataataaactttcctaaaaaagatattcaatcagctcggcctggaatttttacttctgtacctacatgatcgtgagcaataagtgcgactttccttttataaaaaaaaagtcttaattcgacttcttcactcaagatttgatcaaatcatttaagaaatgaatattagatcagaataaaatgagaaacacgactcgaaagataaacaataagaaattgatttttctaggggtgttcattggatcacatccaatgtttttaggcctatccagatccaatccaattatatattggatgt

SEQ ID NO: 331007 - DNA, 774 bp, Cannabis indica
taattaatcaaactaaattaaattaagatatcataattattattaattaatatggaggatgtgttggatcaaaggagaatgattggaaataagtacgaactgggtgagaaacttggcgaagggacatacggtgttacatacttatgtcgagacttagtgacccacgaaaccctagcttgcaaggccatctccaaagctcatatggacacaaaggtaattaatattataattaaaaatatatactaatcaactagcaataataataataataataataataaaatgttattgtacatatatgtaggaggaaattgagaatatatataatgaggtgactatcatgatgaagttgccagatcacccaaacattgtgaagttaaaggcattttgtgaggacagaaacaacttttacctaattatggagctttgtaaaggaggcgagttggtggatctaattaaggctaaaaactacttgagtgaggcagaggcagctcctgtggctaagatgatagtcaaggcaatcatgacatgtcataccaatgggatcatgcatagagatttgaagcctgaaaacttgttgttccttaacaacaaacaagactcgcctctcaaactcattgattttggattttctgccttttttaagcctaatcaaaggttttcaaatatagtggggactctgtattatgcagccccagagattttgagcaaatggaagtgtcatgggccagaagtggatatttggagtgctggagttatcatttacattatgtt

SEQ ID NO: 331008 - DNA, 860 bp, Cannabis indica
aaggaaaaaggttgatgagcagttgtaatgcctatttcagtggtgctaaattatatttgatcatattatattttgtctaacaaagtgggtcagttgtgattttcatgaaccccacctttgtctgccactgctgtatgttatttaaatatatgtaaagtgtaaacacacccttcacctatatataaatatattaatatatatattatgatataatatatttttataatatggtaatgttttacaagaggcattaaaaataattttatgtagttaattttttaatatttgttattattttattttatttatattttttaatattatttttttacataattagttgtaaaaaatactattattcttctcgttatttctttattttttcttcttcctctctaaaagttctcaaattaggacccaaaaatatatcaaaactaaggattttgatatttgcttttaataaaagaaaaatagaagttgagacttagaaattgtacatctatctcctctcaatgacgaaactaacgacgaaaccaatgacgaaaccaacaaataatgcaaaaggaagtttctgtacatctatctcctctcagatcatatccactaaaaaaaattgtattgttctttgcctttgacattggagaattttcgagtctcaaccaatattactttgtgtgataatttgtgtgataattttggattgttgaggaacacttttaagaacttttgaaaaagatggcagaaaaaaaatattacttttgacaaatacttatatatataaatatatactagtaaaaagttacgtgcgaggcacgtatactaattttatgttaagtattttttactttatttaaaagata

SEQ ID NO: 331009 - DNA, 793 bp, Cannabis indica
ttcctttaacaagctttgagatttcatgataaaacgccaaacaaaacttggattatgacccactgtcaccgagaagaaagaaccgcgaggataataataagcttgaaaattttgactaataagagaattactatggactaacaacctactagccttgtttcccaagcacagtgtcaactcatattttgagcaataaataatgggtctggttacatgccacgtgtacaccgaagggaaataaatgaacttggcaaaatcaatagtcgaagtatagatgatggttccctcgcactttggagctcatgcatgttcttcttggaataaactaattttcatagaaataaattcgaggacacccagcatatgatgccaagatcattaaggcatgttagaatatgtcaggtttcgacgatgttaacactgcgagacttaatttgcttaagatggctcttgttcatctccaaaattaccacaaccctttcccgaatcaccaccatagttcgttgccgaaccaccaatgtttccttacaacaagaaaaaaaaagttagatatgaaatatgtagagtcgagaccaccaaagagaaatagaaagctaaagagagagaacatgcgagatctagaccaccgaagccaaaaaacgggagggagtgtttgagatcgagaaagagaaagagagatgtgagtgagaaaagcaattgggcgttgttaggttgtggctgctgctgggcttggttcaacgctgtcggggtgtggccggttgttgggcttggtcatcgagagagagagagagag

SEQ ID NO: 331010 - DNA, 707 bp, Cannabis indica
ccgtttttggaaggactcaatgcatggcaagagtataatggacgccccccaacgctgaatcatattcatagtataaaatatatatatatatatatatatatataaatgccagaaaatcagcatctaagactttagtctaataataataataataataataataataataagctttatttcttattaaaaactctgccagagcagcaaaaaaatatcacaatcttaactcaaccccacctctctatcgtattatgatatgtgacacatcaagtttaatgacctatttttcacattaaaagaaaataaatgatgaacctcccaactgggtatgggctacttaagtcaaatattatttacaaagaaatttaaaaccgaaattttgcaatggcagtacgaactaaatattattacattactactgttttaagggtttcccataaaaattcaaaagaagaataagaaaacgaaaaaaaggctatgtataatgggtaagttatgaaaagacaatatgaaaagagcagcttaattaactgcatttagcaatgatatgtaataattagttaggggaacatggaatagaaagatcattattatgatttaacacaagagaagagaattagttaccacactcaattaattacttttttatttcaactcttttaaacaattacaaaaaaaaattcgaaaaaataaaattaaaataaaat

SEQ ID NO: 331011 - DNA, 1410 bp, Cannabis indica
tatgaaaaaattggtattatacacattatgttctttgttattgttactggttgtgaacaggaagaaggctctcgaggatgctggtttttggtggtgaaaagctctccaaggtcaactttattttttgactttttatttatttacattaagtatttgaaaatcttggatctgtttatttgttcttttaaagttcgtttggtacgttgtattagatcgtattgtattgtattgtattaaattggattatatatcatatttttatataatattaagttaaactttaatttatattaaaatattatatatttatgtgtccatacaaattaatactacatagagttttatataaaaatattacatgaaatacaattcaatataatacaatacaatacaatatggtataatacgacgtaccaaacgaatccttagagatttatatagctttgtaccattctatagatatgaatggctacggttggtgctttagttaacatttattttgttaaatgtcatttgaggttttgttttttgtgtaatggtaattagtttctgtttatgttgaaactcatatggtttctttcactttgggtattaaattagcacatgcttagctcttgtattgtaaatttaaatgaggaagaatcagtttgttgaagcttttaaacttttgtttggttggactcttaatttatgtttattactcaacccaattcactcaaaatgtctgtgtaagtttgtgaataagagtatcattcctttggtaaatgtgagagaaaatttatcttttacatttgctttaatttcaattgtcgaaaatttgttagctcttttttcagaaagatgcataaggttgttgtagaacaaaagttatgttggactttggttttatctttgtggaagttgtgttttgatatgcttcagttctatatcaaacattttttttttgagagtaatgaataaattcattaaaaatataacaacttcatacaacttagttatgaaaactatacatgttcatcaaataaatactattcttgtgaggaaaatcaaaataatactatacacccaacaaaaaataaggatattcatatctaaccaaacaagttaattattcatctgaagagcatgcacaattaatctataagcaacacagattaaggacactcttagaaatctgaataacaaacttgtaaaaacttctaaaaatgatcttaaaatcatttgagcgggaactctgatagtaaaagtaatcatagttgtaaaatctttgtaacaaactgcaatccaaactcgctaccatttctctgaagcttgaagggacaataatgtttaactgcacataaaacaatatattagtgggatgaaaattaaaataatgagtaattagatattattgcaaatttatatttt

SEQ ID NO: 331012 - DNA, 740 bp, Cannabis indica
gagagagagagagagttgggaaaaaatagtagtatctgttgtattgattactatcaatgaatgaatacaagttactttcttagatgtgtatagtatagtatatatagcttacccaaaaataggaaagccaactaacagtaactaacttgttgtgatcgaagatcacctttgcaatcgagattgaacactaggaatcaaaagcaaagattaacacaactaacagcagcaatgttgtagcattgttgcagcaatactggtacaaaaccagtcaagaactaatgcacaaaaagtaatgaacagattgaataatcttgagttgttttattaatcttggagagaattacaattagagagtatgtacaaggcttaaccctttaaaaaaaattgagttagcaagctatatatataaactgaattaagagggacaaaaaatgcaaaactgtcaaaaataacagttaacagaattaactgtcaaaactgaacaaccaactaactccaactaactcctagttgcacgtgtgaaattggtttacatgtgacagatcattaacaaaaaatcctccttgatctgactcatgataaccaagaggatcgacaaaaattgaaccccatgaagcttgaacaaaataatctcagcctgcaatgtgaagcaaatcgaggcagtgtttgaatttggcatgaggcactgccttggtgaacatgtctgtaggattgtgattagtgtgaattttctgaacttg

SEQ ID NO: 331013 - DNA, 1314 bp, Cannabis indica
tagagggtcgagtgtgtgttttttggacaaactttgtactggtttattgagattgaataaagattttcaatgcccgtgtggctaagaaactgtgactaaatcggagttgcaaagcctttggtggaaccatatcctgtcaggtctatttgcaccaccatctttttctggaaaaccaatttaaattttcctcatttggggtcgacgctacgttccacagccggagtatttgacgatgcttgctgccatcgtcggagcttcaagcttgctttatcgccagatctgagcttcaacaactcggagtttgacgacgattactgccatcttcagagttcgaagcttgcttctatggcctaaccttgatgctaacgggtggagtttaaatgccgatttggtggtcagattatcaccatctgtagtgaaagagagagctacagattatcacctcggtgctaacaggtctgtttatgttggcccattcctttggtcttattggttcctcgtcctcggctggaaaaagaatggaggagctgtgttaatgctgccggcgtctacgggcgacggagaaaatggatcgaagggagtttcgtcctacctgtctcgacgtccgagccaacttgtgaaaatgactgctcatgcggctgatggtctcgggaagtcccaccgtgctgtgtggtttcttaagagtcgtccgtacggagtagagaagtcaattgccatttctggctttggaggagagaaagttgatctgggtgtgagaaaggaacctgagtctttacctgttttgccttcaaacagccaagtctttggtgttaacgctggttatttcagttttttgaccgttagagaaaaaaacatggaaagtgggccttgtgttaatgggccgtgtggtaagttaagtggacaggccggttcttgcgaggtgtttggtcatgggcctagtattaaagttagtagtaatggtaatgctgataatgggcctcattttatttctagtaagactcaagtgggtgggcctgttttggaggagacttatgctgagtctaactttaaccaaggattggtggggccgtgtatcttgggtaatggctctaattctaatgggccgacttctctagccaaagacaaagttgggcttgtggatgctaatttgtctactaatatccacggagcccaggagcaattaaatgaagaaaaagctttggctcaatttttaaatgctcaagagagcttattgcatgacctcaagcactttgggaaacttgatttgtatgagtttcaaagcataggaggtgacatcggggtcccggcttcctc

SEQ ID NO: 331014 - DNA, 1047 bp, Cannabis indica
actttaagctaattgtattattacaggtttttgattttttcgttaccagcttacctgtcaaacgagctcatacttacatatagaaaatcgatagttcaattgagtgggagtgttaatcatggatgcagacacctagagcttctatgattatttagaagtgaaacgatagtttcctttgaacttagttaaacaagattaattggtggagtattcatttcagtagttatattagtttactaaaatatcatttacaattagctaagtgtttaaaggatgaaatacattgaagggtaagtaggtaattttgtccctactcaatgtagaccacctacagaaggtccttgcttattttgattataacaatggataatttatagcatatctatattggagatatagagcgttctatataattaagaatgtaattttgagtatataatagagtcatgaggaattattaagttaaaaaatttacgagggtaaatttcagattaacttattggaagcttgattatataggctcattgccccaacgatgcatgggataatatcaccttgtaaaactcaattaattgatttggttaatcaattaaaattcataaacttactatgtcacatttaatttacactaagtctgtgttaaattgagaataaaagataaattaggttttatttgttaatatgacactttgtgaatctaattaatgaatatttttaaactatattttgtttgataattattcataattattaaattaaaattagtgtttaaaaagtttaaattgaattaataaatagattagtaaaagacaaatttattttaaatcaagatgtgatataaaataaatgaaaaaaattccaatttggccctacaattgtagtgggcagccaagcattagacttttgattaaatttctttttcattcaatcatttatttaatttaataaaaaaatttaagggtaaatattattttggaccctgtgttttgcaaaagttacaaattggatcctgtgttttgttaaatgacaaaatggaccctctatttt

SEQ ID NO: 331015 - DNA, 1552 bp, Cannabis indica
agcgtcaacattttggtgctttcattaagagccacaattcgagttccccaactatagtttaactttctctaccaggaactttgtttcgaaggcaattcataagttcaagcaagcaatcaatcatgaacatggaaagcaatactaccactcctggtagccacgccactactcagcaagcagcatgcattgagattccccataaggaagtggattacgaccgagcatccgaaaagactcagactcaaaaacataaatctatgggatctccgcttgatatggggaagttgcttgttagggaaacgatctacgagtgagcttccaaaaggactcaaactcgatattgtaggcctataggtccaccacatgcagctgataggaccaaccgcaattctgttcgaagcaattcaaacaatgtggagaactaatctcctccatggcattctcttcacaagtctcatgactctagaacaccccgtgaccctgcaaaaggaaagggaagagtatgagattcggagggtgaatgtcaatgaactactccccacacagaaacactttcgatatgaatgaggttcttggtgtaggtactttgcccaaggtcctgacgcccaacagtacgaatacttcccatgggtgcatggaggaagactatttgaaagagaatagttggtatagtactacgaacagttgctcatgaagcaaacactcaagagccgattctatcatcatacgggataaatccccatagttgtcagcaaggccacacgaccagacaacaaccacaaggcctaagtcgatcaatgcctttgatcgatttggaagacaaaagatcctgcataacgacatcggcaagaagtggccaacttatagacacatcaccacagtgtgtagggctgaatttaacacccttgctgctctggttaagggtatcagtactccaaatccaatagagtgaagattagaccaagaacgatgttctcctttctcagatgaaattaaggctttagagatcccctcaaagttcagaaatctagtgtggcatccatacacttgcaaagaagaccctctctctctcacatccataacttcaaagtacaaactaacctgcaaggcattcgagacaattctcattgttgagtctttccaaccacgctatcagaagcaacacaacaataatatctcaagctttccccaggatctatttattcttgggagatgctcaataaagcattctatgaccaactctctccatcaaggcatagaccaatcaagcccaacaatttggtctgcatcaagcaacaagaatacgaaccgctaaaggattacttacaaccattcttagaggcaccacgcagacgaagacactcagtgaagatgccaaggtcatggcaatgacaactagacttatagtaatgaatccatctagaaagacttgaagctcaaatcagtgtacaccattcaagagcttctagatagagctaacagtttcatcaagctcaaagaaatcatcaagaaggtcaaaggagttgctcaaccagaagcaaccaattacatt

SEQ ID NO: 331016 - DNA, 1109 bp, Cannabis indica
tttatagtggatgttactttacctttcaagggaacccaagcactactcggttggaatgcgtttccaatgcagatgaagcttgtaaattctgtgttctttgatttactcttcgtttaattcacagaaataatcaatttaggtaatttgtactaaatcagtagtaattaggactttcaaacacgattggcaaagtgttgttcttgaagccgatagtctactgtgggttcaagcgataaagagtaacactcctatgttgtctcaatttagattgctagtgattgatgtgcgtgatttattattgtctttgaattacattgatatttgttatgttaaacgatctgcaaacaaaacagctcactgtcttgtcaggagttcttgtttctcttcaagtcgtgcacttcagtatgaagattgttctgctgaagtgtgttcaattgctatcattaataaaagttgctattttattaacaaaaaaaaaaaaaaaaaaaagttaaaagacatcgttgctaaaaagattaacttcttgattacttttacgccaacaccaaatatgatataatgtatacataaatgacacacaaatttaaaacattcatgtcacaaagaattttaaccaattatctttaactatgaatgcttccacttatataatttattacataaataatcaagtttgtgtgatcatcctatttatttacattacttttggtggaggaaaactatgagagaaaactttggaagcgtaaaatggccatcaatcaactctttcaaatgcttcttcattttaaacgaccctttaaatctttagctatatgtagagatagaataaagcaattttgaaaaaattattttattactttctctttgattcttttaacaaaataatcatttatttcttttttttattagcttatttattattattttaattaataaaaaaattaaatattatatttaaataatgtggaaagaaaatagaaaagttgatgtatgtcataaaggttttgatcatgtattttgaaagatatagtagaaaaatttattagagtaatttaataagtagcacggagcttttgaggatcaagttgagatatattaatttcagtaaa

SEQ ID NO: 331017 - DNA, 587 bp, Cannabis indica
tataaaagaaaaggaaacaaaataaaatagtgaccttttccttacacgtgtttatctaagttgacagaagttttaaaacagaatgaaacggaattactgttttgtaaacactgggtagtttacctgctacatataaacaatgagtacatgtcgcttacaaacccaaaacataggtagttatgccacaatttactgtaattataaaggtgtatcaatataaatgtgttaagtgtacacgagtatacacataagttatataagcaatcatgttagcaattaactgtagcaaattaataacattttaaatttgctaacagtttaataatttaacaaattttactactaaaatttaaattgcgaattaagtgcaagtgaaataataatttagagatttaccaccaaaaacactaaaggtgcgtttggaaagccacaatgtaattggattacaatttggcatgtttgtctgatcatgtaattacactgtaactgtgtcattggaagtaattgaggggttccaattacactctccaattctcatggccccccatgagaattgaatgtaattacactgtgtaattactaaaaac

SEQ ID NO: 331018 - DNA, 750 bp, Cannabis indica
attacacagtgtaattacattcaattctcatggggggccatgagaatcggagagtataattggaacccctcaactacttccaattacacaattatagtgtaattacatggtcagacaaacttgccaaattgtgtaattacttccaattacacacaaattcaattatattatggctttccaaacggacccttataaaaattcttaaccattattaggcattgctagtaattaatcaatgcttgattaaaagacaacgatatgtacttataccttaaagttagactaactaaccaatccaaactcttcttattgtaagataaaatttgaaagtactaattgggtgtgctgtcaattttataattagaaacaaaaaaaaaaaatgcaaattaatcaagttttggagccccacttgtgttctaataagtttacaagttaataaaaatggatctcctatatatataaatatatatatatgggtatatatatatatatattacaatcaatcattttgcatataaagatattgtccctaaaatcaatatcactttctttgtaatgtccaaaaattatttgattctttttaaccaataattcagggcaactagactatatacattacattatataacaaatataaaaataaaaaataaacaaataaataaagagaaatgaaccatttttttaaaaaaataaaataaataaagagaaatgaatctactctttaaggtggtgcgtaactataggtggtgt

SEQ ID NO: 331019 - DNA, 1058 bp, Cannabis indica
gtataacaatgcataacaactttagaacaacataaaaacaacttaattttatataatattttaaagttgaaataagatgttgcaaacaactttaattgatttatatgttatggttaagttgttttctagttgtttttgtgttgttgtttagttgttttgcgctgagaaaagaagccctacacgtaaaatccactttgtccgaattcgccacgtggcaaccactgctgcgttctgacgctacagtttgtgagcgtcaggcaactctgaaggctttgtccctcactcgcgtgtgagtctcactcgcccacatagccacatgtgtgtcacacttctccttgcgcatctgggggagtttttctaccgtatttttgtaaataagaaactttgaaaatagtaaatttgaaattaataaagaatacaaatgtttatttttgcttgtaacagtataaatgtttatttaaagtaatattaactcaaaatagaaaaaatctcttctttttatttaacgttacttaatttagtaagagagtgtacttactaaaaataaatattttttttaaaaaaaaaaattaaacttaaaattatctatttttgtcattttacaaaaggataagaatgtattcaaaattttgggggtgcacttaataattataggggtgtaaatataattttttttttttttaatggtggtaaactaaaaaactatgtacactatttaagaatggaatatatcaaatgtttaaattaatttggttgaaacttatggggtttttttgttttgagaaaatagcttcagaaaatactactaaggagaaaaactctaagggaccgatgaataaaagattcattgatgattgtcatcagccaaaataatattttgaatataagaataataatcactaatcaggccaccaaactgtactagaaatagcttgtaaagcatatttaacaagagcatgtgttgcttcattagcagttctgaagcaataagtaaacagtacaataataaaattagagcataaatttctaagggaaatttgattttctatacttagaaa

SEQ ID NO: 331020 - DNA, 926 bp, Cannabis indica
cccttcagatctgatgatgaagatgacactgaaatcccttcagtttgaactcaacaattttcagatcattccgccattgatgaacactctcaagctccaagatctaacctgtaatcacaacaacaagaaacaagatacgactatctctctaaacacaaccgaaataactgtctgaacgatttaatggataaccactttattaacagaaactgactatatatatattcacaaaataagtccagctggcactaactaacacttaaatgagactctcgtaaacaaacgttagtgcagatataacagactaaaaatccagatacgactagacattgaacagaacaaacactgtcacaaaataataacactaacagaaggagtcgcgtataagtggttcaagcagttggaaccagcgacgatcatgtctcggaagcaacttcagacgaattcctccagtaacatcataatgcatgtgataacattaagcatatcacaagtatcaccaacgtgaagcaagggagagaagaaagtctgcgaagctacatccagcgcttccacacagaggttaccaaagtagggaaaatgtctaaggatgagctcacgtttgccatagctgcaggagtacatcctggaggcgagttgtggagaaatatgctgaaaagagagttggatggcttagacgacttctacgaaagagcggagaaatacatccgtaggaggaaggaaacagagtcccgaaaggaggcactagtgaatgttcatcagggagctcatcaaatccctacatggtttgttaggcaatactccccatgctgacacattcaagtgagacctcctatctactatccatgaaaattaaacaaccgagatactcctcaaagtgaagttctacttgttgggttttatgccctaaataaaacttcatttca

SEQ ID NO: 331021 - DNA, 614 bp, Cannabis indica
tacgtttattaaaaagcaaattttatattcacgtttttccaatagcctcgttgattagcaacgagctgcacagtacgttgaaaatcacgctaacacgcctatgctagttagggtgttacacattgcttttatggaataactcattaattacgtaagtatcatagtatatttgtaacccgctgactgtaaggtcttaggcgaggaatcaatgtacaaactggcacttagtatattagcgagaaaccgtatgtcgctaaagaaagcgacccgtatcaatcgttgaggtgcttagcatacaatcaacaaactaagtgtaataattggattggctcaagaacaaggaagtgaggtgactgtctcgttttaggaagacttcatacaacttcatcccgttagcgtcagcggggcttacaatcctggcgagccagacgatagcattcaattgagcctcgaagaattctttgaagataagaactgcgatcaatactagacatacactgtcgacattggaaagaagaatgaccctagcttgctattgggattactataaacaagtttctgtcgaaacatctttagatacaacagctaaagatgtgttaaatacacgaatattt

SEQ ID NO: 331022 - DNA, 759 bp, Cannabis indica
taaaaatcacgtaattcgcctaatatagttagggtgttacaatttttatatcacgtgttcaggtagattgatctataaccccccttataaaagagtttgaatgtcttatatattcatctatagtgaagatagttttgagaaattttgtgtgatgcagtgataatagaaagttgaaaattgtctgatttagtgaagtaggatctgtgaaatttgtgtgctgcagtgatgtaaggatgagaacttgtgtattgttttattgattgtagttgaaattaacaaatggttaaggttaataaaataaggacaatgttgtccaatattttatagatatattttgtctgcattagttttaatataattgagaatatgatattaaatgtaggttatatgtctaaatgaattctagttttggggatgttgaatttgttacgtaagaagaagtagagtctaaagatacaataaatgtaacttagagtggagggacaacaaataagagaacgagaaaatctcttgcatgggattactttattttacaaacgattgataatgtattgaaagcagtatgcaatcactgcgggaggcacatgacaacaggaaaaaataaggagactaatcatttaaatcttcatgtagatcgatgtccagtgttaaaagaacaatgtgcaaatgccattggaagttctatagtcacctacaatcttgatcaagaactaggaagaaaaaagttagctcatatgatcattctgttggaaattattt

SEQ ID NO: 331023 - DNA, 1134 bp, Cannabis indica
ggcatggaatacttgtcccgaattctgaaaaaagtaggagataagagtgattttgctttccatgatagatgtgatgccttgaaactcaatcacttgagctttgctgatgatgttctacttttctgtcgaggtgattataaaagaatcattctcttactacaaggtttgaagcttttttcagcctcatccgggttgcaacctaacaaggcaaaatctgcaatttattgcagcaatatgcctgaatctgatatcactagagttttggaggcttcggggttctcgaaacaacagacaccattcagataccttggcatacccatatgtagcaagagaatttcgaaacaagaatgcacagtgttgacagaaaagatgacagcaagaattcgatcttggagcaccagaaatatttcatttgcgggaagggctgtgctcattaattcagttctaaccacaatacattcttattggtgccaaatcctcaaactaccaaaaaaggtaattcgtgagcttgaatctatttgtagagcctttctttggaaaggccaatatatgatgcagggagcaggactagtggcatggaaaaatgtatgccaatcaaagattgcagggggctcgggtattaagagaactgctgaatggaattcatcagtacttttcaagtatgtatgggctttggcaaacaaggaggataacctttgagttaaatggatgcatgcagagtatactaaagaagagaattggtgggagtatcaagcaccaagtcaaggaagttggtattggaagcaaatagttgcagccaaaaatcaaatcaaatgtcttacagatgtacaatagtttgctcggggaaaatacaaaattttagatggctataacttgatttgtcctatacagaatcgagttgcatggagtaatgaggtttgggggagatttaacacaccaaagcatagttttatcctttggttggctgtacaaaatcgtctcaaaactaaggaaaggctgcagcggttcagtctccttgatgatccgacttgcggcctatgcatgttacaaactgagacacatgagcaccttttcttcagctgatccttttactgaatattgtcttcagcaggtgaaaaggtggctgtcatgggg

SEQ ID NO: 331024 - DNA, 772 bp, Cannabis indica
agagtttgattcagtggtttcaggaataatatcaagaagtgacaccttgtctaatgaagaagttcaggctcttcttctgtctcatgaaagtaggatcgaacaccatctggctatgaatgatatcactgtcaaaatgcaggcaaacatggctcttggccaaggcagatccacaggtgttcgatcattttccaacaacaatcatccaacagcaccaataggctgaggtagaggtttctctaaatttcctcatcaaaaagttatttgtcaaatctgtatgaagattagccacactgcagccatgtgccattatcactttgataaaaactggacaaccccaaaaccaggtaacaatcgtgcctttcttactgagattgactgtgactgtgatcctcaagcctatacaaccactatgattcaagactttggagaaaacagctcctggtacttcgactcaggagccactacacatgtcacctttgattcaggcaatcttgatgagtccaaacccttctctggccctgagacactttccataggtgatggtaagaaattgttcatttctcacactggctctgtttctattacttcttatcataaagcttgtcctttacatatgaaatctgtcttaactatgcattcgattaccaagaatcttgttagtgtttctaagctaactcaagataatgacattttccttgaatttcataaaaattgttgctttgtcaaggacaagacaacagggtcagtggtgctcaaagggaaagctagggat

SEQ ID NO: 331025 - DNA, 604 bp, Cannabis indica
ggtttagggttaggaagaaggtacgatccagttcgattgggttggaggcagaagagaaagagggttaatgagataggtttagggtaactagggttattattattattattattattgttcttgttgttgttttatttatttagtaaaaaaatatggaaaataatgaatttaagaaaaatattttttttaccactttatattatttttttaattttgaaattatttttatatttttcaaataataatattaggtgtactaattggaatgtgccacgtgtacaagagtgtacacataagtagtccacgttggtacttaactgtggtaaatagatgccaccttaaatttactaacggtttagaagttcagaaggttttaccaccgaaatttgagtttgaggattaaatgcaagttaaataatagtttgaagggtttatccgccaaaaactcaataaataaacccaatatacttctttaaataaataaagaaaccaagataaaactttgtatataatctaaaacacaataataatagggataattatataaaacactaattttgtcaaattttaaagttttttttttatatatttttacggtattcta

SEQ ID NO: 331026 - DNA, 536 bp, Cannabis indica
tcaggtatattatatatataccttatataatttatatatacgtactattatagcttgctagggtctgtgctagctgtgaatcgtatgattctaataagaatgtcacgataatattatttcatacacatagataattatcttatttaagaaaagaaaaaaaaattaattgccaaattttgaatgttaaaaaacaataaggtagctcccacgtcatcatatctgtgccatttgtttagattgggatacagctttgatgtttggagttggcagagttaggagacaaacacagagataggggtggatttggtagtatagtactgtgtacttgggtgagacacagagagagagagcgatagtaagattatacgagccttgtattgtatttatatatatagggagatgattttgttccgttattatatttgtacggaatgtatgtcgtgatgtacggcagccgttagataaatgagttatttgatttgaaagatgagattgatctaggggtaattagggttaaaaatagtaacgtaccctga

SEQ ID NO: 331027 - DNA, 991 bp, Cannabis indica
tacacagtctcagaatcatcccacttgaccttccccaagcgatgtgggattgcacagtctcagaatcatcccactgtcacaacaagagaaataattatgggtagtaacttcttgattctatttgcaaaaagtttagaaataaccttatagaagttacacaaactgatgggtcgaaagtcatcaaaactagaggcattatcttttttcgaaatgaggataatgaagttttgattcaaaataccaacaaattctcttgtttggaaaaattggatgatagtcccataaacgtcgttcccaacgatatcccaatgagctttattaaagtgtcaaggcattccatccagccccgaagcttttagagaacccaaagaccaaacaacttccttgatctcgctcgggctaggaatatgcaccagctctgagttatcagagagagcaactttagaggtgataccttcaaaaactgcctgattctcaacagggaaactcgaggagagcacatccaaaaacctactacgaaaatactgactatataagcacgacctgtaacccaatcgacaccattgtctgagactgcccccacaaaattacgtttccaaccactattttgagatttttgtttccaaatctcttgttttttctttgcaatctcatccaattcaagaagaatatcggcctcagtcttcatattatcttggaaaagaatgcacccttggatttccaccaaaagtttatcaagcaaggccacacatttgttatttgttatttttttaatttactttatggtggggattatgaaacaccatcttgtttgcctctaccataccaagtatatttaatttttttttgtttgttttgcttaattatgaaaaatcctaataacaaataaattcaatttacatatttataaattcagaacaaaacaagtttacaaaaaaaaaaacttatatacttttgggtgattctaaaatgcatccccttaaaaggaatg

SEQ ID NO: 331028 - DNA, 842 bp, Cannabis indica
gataacaaatcagatcagattgaaatgagttttatttagagcataaaatcccaacagaccactgtgtcacaagctaggcttcacttaatcgacccaaagtcaatataatattatatttacccccattagtgggctttgttaacacaagcaaatcttagtgggtctagatttacctataaacccgactttagcctataattagaacatgatctcttcgtgcaaagggtttaaaactcaattaaaaaattgaaggctaaattttagggttctaaatctttgacaagaacattcttgtatgaaaatactctatagcttttcaagctcaataatactgacttgtgcattaaggctttttaatgccccagccacataaaaatcctcttcttatttatttcttgaacatttttcttaaattaatttattattaaatcagtttttgaaaatctttgtaagcaaatgtaattgctagggtaataattacactgtaatagtaattatattgtattttaaaatacaatacaatgtgtgtttggatatcatgataattacatgtgaatttctattgttatgtttaataagatagttggtaattacacaataaattaatattgtgcaatatttaatataataactattatcattttgtaacaaatatttaaaataaaatttatctacttaataatattaaaataaataaaaatctcttcataaaataaacttaaactgcataacaattttataacaaatatttaaaataatttttaactattaagattatttaattactcttacgttgagccactccatttggtgtatgattttcctttcttaaaagtttaatt

SEQ ID NO: 331029 - DNA, 802 bp, Cannabis indica
taataataacgcacacaaattaattaaaaaaaattatactaaaatttttttcttaaaataatcaaaataaataagaggtttatcagtgtaggggtgcattaatttgtgatttaactagacatacttatataaaaatcaaaatgatgttcctcactagaaacttttaattatatttttaaatgcgtgaagcaatgcaatggcttatataccagatatgtatagaaaattttacaatgcattcttttaaaagaagtgtattcacatactcttatttatattggtatttaaaaaaaaaaaatagttcaactttttctataattatatacattgtagttatttaagatattctaaaaaattttaaaaaatttaacacgtcgaaaaataaggttcaaatagtttgttgcataagtgatttttttattttatacgcgtaataaactttttgaacactattttctctattataaagtatttcaaatttctctacaaaatgtcttaaataataataacgtacataattataaaaataattatactattttttatttttaaatgccaaaataaataaatgatttatgaatgtagggattatatagaatcaccctataaacttactaagatatatgtaaagaacccaatagtggtacccatgctgccacgggtgccaagtagtaatagcactatatatgtgtacgatatcatctcagtctcgaaaagctctccatatctcaaatttattgctacctattacaaaacaagccttcaaaaccatttctttctttctttctttctttctcttata

SEQ ID NO: 331030 - DNA, 1223 bp, Cannabis indica
atttgttgagtttgtccaattgtatacatacaaatttattacaaatatatgcatttttaataattatatattacatatttggttatcttcatgttataccaattgacaatagaagacttaaaaattgttctatatttgacataaaaactaattttgtgatatatttatatcagtttttaatattgtgctgtaatgcacaattcatacaaaatttaatattttttttattattaaaagtcaaaaaagatgactctatcattaattttattattataatatttttttttgagataaaatgctattatattaaattaactggaaagttaaaatacaataggcattaacggtagaggcatttcctctagccatgaacaattagtttccaccgaagagcaaactgtgccaacaaatcggcatcagtattagcagatctaaagacatgtgagatctgtgctccaaggaacttggatactaaaaggaaaatattattcgaaagacaatgaaaatcgaaaacatgttgttgtaatgaatgcaatcctttaactaccaaaagcgaatccgtctcgattaggtgaacaggtagtttaagatcatgtaaccattgcaagctgtgcattaaagccaatgcttccatgattttctgttttgaagcagcctttgaagggaatagatgtagcagccacaatatcccccaaactgttctgaacgactaccccaaagccagaaacttgtttccttatgtcaattgctgcatccgtatttagcttcaaacgactagaaggaggatacatccatgatgcttcttcagcagcacatgtattggctgaactcctgcacgcaacactctatttttaatcttttctagcacaatggaactcttccaggtacgagtaagaaaaatagaggagggcatcagctgctttggtcttgtaccatgcctctctttatttcgttcactccaaatgcaccaaagaattgttgcaaattgctccagctgctgagttgaaaaaatgattgagcaatgcataaacatttccatcaaattggtgtggtgataaacataaacaagattataactaggtgctcatacacacaattgcaattctatctcgcgtcccatgtgtactgagtctggaatatttgtataaaaaggctagcatatatctattgatatcttagtgtaacactatgtacacttcaccaatatcctgatatgctaatct

SEQ ID NO: 331031 - DNA, 1349 bp, Cannabis indica
atcccttccacctgagtgaaaactttggcaactaatcttgccttaaaccttactggctcatcctctgtcacaccttctttaatctttagaatccatttgcatgaagcttttcaatgactcccttcttgtgcaattccctcatccattgttcactcatatgcccaagcctttaatgccatagctgcatatcactttctaagccttttattgtatctgcctcggccacaggtacagtttcaccctcgaatacatacagcccatgtgctctctttcctttcaccacaagcattgaaccttttaagatccttaggctcccattcaaggactcatagccataaccttcatcttccaaggttccaagtgatatcagattcctcctcaattctggaatgtgcctcacattatgcaaaatcttcacttcaccattgaattgccttatagccaccttacaaattccaacaaccctgcaagaaacatcattatccattagtactctaccaccgttattggtttcttgatatttaaagaaagattctaagttgggacacatatgataagtgcatcttgaatcaaggatccactctttactgttattatttctgtaatagaaaataattccccatctgaactccacccattgctctcagccacggctgcaaagtcttttctttgatttccatgatcattagattttgagtactggttatggtttttgttgcatctcttgccatcgtagttggatcggaaaccagattgcgtcttcgattgactgcagaatattttaatgtggccaatctttctacattgataacattgtcgattatcttagatctttgacttcgatcttgatggtgactggctgttccttgatgatcctctctttggacttcttcctcttgcaagataggcttcgtcttttctagtctccttctcgagttgtaattcaaagtcctttgattttaatgccgcatgaacaccctccaatgagatcacatcccttctatacttgattgctgctttaacttcttgatatgccattagtaatgatctgagcaatatgattgcttgactttcttcctctaccttgtgattaatgttagctaaaccaacaattattttattaaatttatcaatattatcatctaaggaaagagaagaattcattctaaaccatataatctttcaagaagattaatcttgctcgagattgatggtgccatgtacagctgctctagtttattccacaatccttttgcggtcttttcttggattagctttcttctaactccattggacaggtacatgatgatggtgtagtaagctatctcctccatctctgcaatttcctc

SEQ ID NO: 331032 - DNA, 1139 bp, Cannabis indica
aaaaaaaaaaattaaccaaggcaagtttaacaaaacacaaaaagagaaataaataaagagaaaacaaattggtataactgatgagataaaaggaaaccaatttgaaattgaaaaaagaaaactaaaataaataaccaacctttttagaaaagaacaacccccccccccccttatttagcacacgaaaaatacaataaaaagtaaacaaataagcaattaaatcaagatctctcaaaaaaaaaaataattaagatcttaaaaatcaattatgatcaataattaaacaaaatataaagaataagaaataaaattgttaggaaggactctcacaatttttctcactatcactaattcatcaagtttttctccctagatacaaaatttggtagcaatattagataatttttcataaaattcaaacaaagattcgttatcagatattctaagatcatcaaacctaatttgaagcattataaatttagatcgattaacattagttgttccttcaaattgggtttgaggaatttgtcaagcatctttagcagattcacaagaagatataagtttaatacatccttcacctattccattaaatatagcatgtaaaactttactattgtaagtagatagcttatcatcttcagtagaccattcaaattcaggttttaacttagaattacctttagaatctaccaaaacaggatgggaccatcttgaaagaattattctccatgctttctcatcttgagacttgataaatgctctcattctaacattccaataaggatagttagaatcattggggagtgtggaggaacaataacttccttctgtaaagggaaacattgtaaaaatacaagaaaacgttaaaggaccacactcagagtttagtgtctcgttctgataccaattgaaaatttgtgcttttgcaaatgccactaaatttttgtaattaaaaaacagcagtaacgatgtatagcaacaaattggaatcctgtcacaacagaacacagattcgcataatcaaaacggaatcaaaaataaatagttcaaaaattaaaaacttgacacaagagaattatacgtggtatcagtgttctttcaaacactcttagtccacggggccacgcccagagaat

SEQ ID NO: 331033 - DNA, 752 bp, Cannabis indica
catataaaatcaagttcaatatttaagttgagtccctacctctcccaagtcgttaaactttatccaaaaagacgatcctaagctctcaagtcccgagctccaattgtttagtccaatcttaaatatcactctcacatataccatcaaatggctaaataattatcatcattgtattctacattcaaaatcgagtccaacgacatataatatgactatatttaaagtttagagttttgaaacatcacctaaacagtgcacattaactatcactggcggaagaaatcggtgtaccgaaaatgttaccaaaaatagaggtagtatatatcaaaacgaccaccctcgacgagtagatcacactcatgctaaccatttatcgaaatgatacacgatatcgctaaaaaagagcagagctacaaaaacgccaccgaaaaaagtagtgggctgagtaaaatagcttagtgtagattgttctcgacaagctaagtctagtggtgacgatgactcatcaaacggacaccagaggtggttgaaaaatcctgtcaaaatttgaacctacagattttaacttgggatctggggctaacggtggcgaaaggggcagcgccgcttgggagttgaggtcgtcggcgcctgggaatttgaatggtccggggcgtggggacgggcggtggccaaagagtggtcaccgtagttacattggcaattgtgtttgtgagttttcttttgtggtttgaagagagagagagagagag

SEQ ID NO: 331034 - DNA, 572 bp, Cannabis indica
agttcgggtctagagggcggggttcgatgttcaggttcgagggttgggggttcaatgttcgggttcaagggctagggtcgagttcgaatccagaaggcgggtctggggtctaagccaaagtccgaggggtcaaggtttagggtttgagccagagttggggtgaggcccgagtccaaggtctgaggttaggttcaattaagggttcagtgtctgagctagggtcaaggatcgggcccaagcctagggtctggggtccaagtctatgtttgggtctaggggcccgcggtcgggtcatgattcgggattggagtttaaactgaggtccatgtccaaaataatgataaaaaaaaaagtatttgcggcgtaaatacctaagtttaactctcagttgtaaataaacatctaagtttaattttttacggtaataatacctaagttatatttctggaacttctgtaaaatatctggtcgttaagtgtcaagtcattatccatgtgtcatttttctaattggaatatttgaattaatttttaaaataaaaaaattaagtgactttgaccaatcaggaattg

SEQ ID NO: 331035 - DNA, 713 bp, Cannabis indica
ttttttatttatttttaaaactaaaaatatttagatcaaaattttattaatttaagatatttaggagtttttatttattttttttaaagagaaatctaacttgcaataaattatggtatatttatagaaattgattaattattatcatttattattttaaattataaggttgaaaataaacatattagatatattttaattaatttttatatttaattgaaatattatattctaattaccttatatgacatttagataatattactatttataattaatctagatattttataaaaagtaataagcataatgtttatatttgaattatttaaggtattttattttaaattataaaattaaaaaaatgttaatagaaatatcttttactttatatgatagcattttatcattttattttgttgaatcattataatattaatgaaataacctaagaatataatactcaatcatttttttaatttgttacatgagtgtcttataaatttcttttagtaaacctattatttaatttatttaaatggttatgattaatgtaacgtccccgcttcaagcctccattgggcccttatacccacggaatgaatggctcttatacacgagttcgtcactctagctgcttcatggactgacgactggccctacagaccaacacgagtgttttcagcgtgctttgtcctcactcacacgcatcc

SEQ ID NO: 331036 - DNA, 1003 bp, Cannabis indica
ataaatttttttaaattaaaattacgatttagaccaataaaatattaacatgtgtcattttttagagcaacaaacggagcagttacattgtgtttctacaaattaacgaaaatcttaagcttgtgtctattaccataatttttcaagattgagaacttatctgcatcaaagtaaattttttagaaacttatgctgcaatttaatatcaacatgtgatatttttagaacaactaacagatttgttaaaatgaggactaacatacttacaaaaattttgagtttgagagactattattgccattttttgatgttggataattatttgcatcaacataaactttttgaaaacttttactgcaattttctaaaaatattaattagatattaaattttatgtcaagttttgcaattatacattagagacaatgctaaaaattgctacaaacaaatatattttttgtgtaaaatacataacacaatttttatatttttattggccggagatagtctaaagtacattaacacaacaaaacgacattagtgtatatgggttggcttagaggatgggcaacatcctgtaaggaccgtcggacaccatctatttctcttggaatgatattgtccgctttgggccaagccctcacggatttgtttttgggcaccttcccaaaaggcctcattccaatggagatagtgttcatccttatatacccaagatccttcccatttctagccaatgtgggactttggatgtacacccaacaatcctcccctcaaactaaggaccactttgcctccccttagacgattatagatctaaacttgaatccctcgattccaacactcaagatccccttgagtaagctagatgaatcccttcaccagcaagattcgaaatcccttcgaatacaagaatccctcgattcaaccactcaagatccccttgagtaagctagatgaatcccttcaccagcaagattcgaaatcccttcgaaccagatct

SEQ ID NO: 331037 - DNA, 629 bp, Cannabis indica
ttttttttaaaaaaatcaattaaatgattttcgagagattttaaatttctaaatatctttttatatttttttttgtttaaaaatatttgaaaaaaataattaaataggtttggagagattttattaatatatgataaaataattagtaaaaaatttaaaaagtaactaacaaaatttaatattttattagcaattaaaaatatatttttttatttaagaaagagtaaaaatagagatgtcgaaaaaaaaagcagatctatagaaaattcagcatttaatttgtgacctaaaaaagaaagagaaagaatattgtcaaaaaatatagggtgattaaaagactaaaccaaaaccaaaatagagataaaatcaaaatagagataaaaaagattagaaattgaaaaattctcttcaagaataaagacctcgaaaaaaaattgacaaatttgtgaaaaaaaaacacatcatataatttgtgttctaaaaaaaaagggaaataagagatattgtcaaatgatctaaggtaatataagagtaaaccaaaaccaaaatagagattaaaaatattagaaattgaaaaaaattctcactaagaataaagatctggaaaaaaattgacaaatctataaaaa

SEQ ID NO: 331038 - DNA, 1491 bp, Cannabis indica
taaaatgaaaaaaaaaaaagttaaaaaatagtatatggagtgatttctaatttattggtaattattaatgatattttattttttagactaattgtatcttaaaatattattttgtattgaagcacaattataaatgttgtgctaaatataatattatttatttttgtgtcaaatttaatataatatttatatcttacagattagagatgattgagtattttgagtggacgataataatccaagttaacatgatgcctaatttctcatacaaaacattattaataaaactctattatgaagtgtaattgccattaatacaaaaataacatttcacgttagtcaatgtcttaattaaattcgttgacattgtaggtttatggtatgttggacaactaagtgcaattggcttctacattaaattatattttcattttgcatttttattaattcattctgtattttaacttatgagtttacgtgtaggaatagtttggccgtattttttgggggtatttagtatatgtgttcatgagtttatattattataaaactagagttaagctatttttttgtggttttttttcttcactggatgaatacgaatccgtgttatgcaaatggataatatggaatttgcaaatttgaattattagtattattatttttgtttaaatatttctactttcatagtgtatcatcgacgcaaatgagtctactgcgttagtgtgtcattaacgcaaaagctcttcaatgttagttagaaaatgatgcgaaatgagtaagggtaaaacttagggtaattttaaaaaatatactttttatgttttatttatagttttacggtttaaagtttttatttaaaaaataacgtttgtaaaatttaaaattataaaatacactttatgtagcaaaaagcaaaaaaaaaacgagaaatcaacctcacgataactataaattaaactataaaacaatctaaaacaactaaaaaaaagtctaatgacaactataattcaactatgataaaacaattaaaaaagtattttattatttttactaaaaatatatttttgtaaataaaaaaaaaataaagcgtaaaaataaaaaacaaatcataaacgtatttttgtaattttggtttataaattttctaaacatttattcatttgcaatgatggtgaaatattaatgaatggctaaactatgtcaccatgaccccaaccaagttatacagaagtcctcaaaataaaatatcacaatttatatataagattagtcccaatgcaaacaaagtaactaaattactaagaacttgatgcttatactaaagaatataattattatttacacaatagtacgtttttattctttttttttaactaaaaaatactgttcatgatctcacggtattatatataaaaacattgaactatttcttaaatattaatataaaatctacatcatgtatttttaatttaaaataatttaaattta

SEQ ID NO: 331039 - DNA, 724 bp, Cannabis indica
agaaccacacgaatggtaaccggttttactacaggactaaatgtctcagtaaaatcgaacccagcttgttgatggaaccccttagccactaatcgagccttgtttctatttactgtgccatcaacatttaatttttccttatatatccatttgcaaccaatgggagtcctcccaggaggtaagggaacatatgtccaagttccatttatttttagtgccaccatctcttctgacattgcattacactacttttcttctttaagagcagccttgacatttgtgggctcttgagaaaccaaaagagctttaggcttgtgaatcccagacttggctctagtttgcatgctatgggtgttggttataggaccaattacattaggcagtacattttgatcactggttgggacagtggtactggtgtggtgtggaacacaaggggtgttgttgactgggagttggcatttgtggtaacaggttcagtaactcgtgaaggagtaccttgctgagatgaaatctcagtagtaggacatggaatgctaccgcccaaaccagatattggcattgcttgtgcaccagtaaaaggtgatccagtagatggagaagcatgtgaaaaaagtgtttcaacaaagtagttgagaggagcaataggtatagcactggaagagtaaatctcagagatggtagggttgttatttgtagagaatgtagcataaggaaacttgga

SEQ ID NO: 331040 - DNA, 564 bp, Cannabis indica
caacatatgattattgaaggtttaacaagatctggattgaaagaagcaagatcaatgggaagagaaattgcagtgagttggcttagaacaaattatgtaactttcaagaagacaaaaacaatgcatgaaaaatacaatgtggagaaatgtggattttttggaggtggtggtgaatatgtacctcaggtactcttaacttaattttatctttaattagattatgatttaatcaaattagtaatgaattatttaatttgttgttatattgaccttttttattttttatgaatccagactggttttgggtggtcaaatggagtagtgttggcattgttggaagagtttggttggcctgaagatctaagcattgattgcccaattgcttagttaggattattattatattattattatttacacattgcctaatttatcaaaataatattgtaacaaataatatttttttaatagtatatggtgtaacaaataatagaaaggaataattacataaggcaccattttttgtaaaatatttatatttttacttttaaagaatattttttt

SEQ ID NO: 331041 - DNA, 1534 bp, Cannabis indica
acttaattatgaataattaggatttattatattatggattaattaagtagtaataagtaggattatgatcctgccaacttaatttagcataaattataaattttggtataagtggataaatatgcgtcatttattcattacagatatttaattaaaatatgtatatataatgtaagttatttgtgaaataaaaatatttttaacttcgacgatcctggagacctaattgaaggtcaaagatgtcacaatagttttagttagtaatatttatgagattattgagataagtcgattttacgaatatcgaagtattttagagtactcagagttgaccaaataccttaaaattaaagatttcttaatagttaaaatatgataagtaataataaaaaatttattaatattattaatattaataaaattttaaaaaaacttatcaattaagttatatacatatatatattaagtttattacataaagaaaagaacaaaacgaaactctttcctttgtgcgacaaaaacttctccccacttaatttttcttttcaatttttaatctgaagcctagtttttcaaagctctgatagtagcaggataatatatcatcgaagagagaaagcttaaggtaaggattggtttcgttttaagttgaaaacgattagttttatatagtgactttgtgatttaaaataattatggagattctaactttatagaattgttcttgggtagctatgggactagcttcgatgttaacttgttaaatttgaggtgattctaagttagaaattgagtttggaattttttaaagcttaagttcgagctttaatggcgtttttcgtttaggggctcatttttaatttcggttatgttgggactgtagtatatatggtatatatgtgtcctgtgaagtttggaataatttagataggttttgatagtgttttggagagtgtaaaatttgagatttttgtgctagaaaatggtcagccgtttttggaaattcttgagagatcagaaattgtatttttgtcataacttttcactcaggtttccattttggacgttctatatacaattattattgttctgtaatgaaaagattgcatgattatgcaatgtgatatatggataccaagagaggtattcgagttgttcatttgagacaaccgtaataagtcatgacaataaactgaaattgttgttaggtttcttcctgtcggcgatgcttgattaggcacaggcagcagtgacatgtgagtgtcaggctatggtacgggctcgtcagattaggcgatgtgatatgttggtgctaggttttggcacaagctcacctgattaggtgatgcatttatgcaatatatgggtgccatgttttggcacgggctcacctgattaggcgatgtgtgttgagttttgtgccctaaataaaacatatttcaatataatcaaatttattaattaataaaagatcagaaatcgttttatgttgcatggttcacatgatttatttcatgattatgtttaatgtata

SEQ ID NO: 331042 - DNA, 627 bp, Cannabis indica
aaagaccttaacgctagcctagaaacctatgtcacgaagcctctaaattgttctaagtcaaaaccctagtctctctttctcgctctctttactagtcgcgcccaagggctctccctctcttctcttcatccctttcacacgcctctctattcggctaattttgtaccaaaggctgaggacagagcaagagaggctgatcccgaacagacggctccaagcaagaagaagaagaaaaggaaggctcctccatgtagccaagtacctgttgagcggtccattaagatcaggaatgaccttgaaagggttgctcgaccgtccgccctagtggctggaaagggaaaagccattttggtggagtaggaacaagaggattctttggaagatgatgctcctactttacttgttcgagaaaatgctcctgcccacgtgcagggttctttaacttgtattcaaatttcatttgcatttacatagatcacactcattttaaccttcttatttccttcatgtgcatctatgtctcaaaaggtgctgctgtttggttttatgccctaaataaaactcatttcatataatcagatttgcttattaataaagagcagaaataacattttatgttgcatggtt

SEQ ID NO: 331043 - DNA, 1096 bp, Cannabis indica
tcgttcaaataattatactattttaattattaattaaaataaaaaactaaattattaaataaaactaacactacgttgcttggcacgtaacaatcacctagtataatttaaaagtaagaatattaattgacttaatatcaaaatattaaacaacattcatctttaaaaaataaaaatagaaatattaatgtactaattttaaatattgaattttaatattaatcaacaataataactataaaatataatatcaaataaagctttataagttgaaattcaaatataaaataatttatccatttaacatatatttttcttaaaaaaatataattggtttgttcagtttattcaagtcgtattgggtgattggatccaatatattaattgggtggtttggttttttgttgaagttatttggattgtatttttttatctgttgtttcaatttaattttggcagtttatttagatttggcctattgtacttatatttcgagtaataaattaatgagtttagtcttatcacagagacaaaattattgtacaagctaacattttgctcgctgatcaataaaagattcgaaattaaatatatagatcttggaatatatatagtagtaaataacattatcataacgattagagaatactaatattttttaacttttttaaaaaaatttaccatttaggttgctttgatggtttctaaactttttatgctggttgctctgctggtttctgcgcgggttgctatgtgaattttggttgcgatttagtttgttttgttggttgctatgtgaatttctatatggatttctattaaaaaaaaaaaaaaaaaaaaaaaaaatctattttgaactataaaaatgaaaaacccctaacagttaatgcagtcagaaaaatgccaatatattattcaaaaccagctcggacaaagaagaacgttccttcacttcgaattacgtatattcagaaagataaacagagaaaagtccccccgctcaattcactttattgatgagaagaagaaaacacatgattctcctaagcccaagatgatgaatgttaatttggctatagtcttcaacagagacaag

SEQ ID NO: 331044 - DNA, 1521 bp, Cannabis indica
gctgaataaagataaatggttgagatctcatttttagtgattatattaattcactaaaatattcattttagttgagcttaattctatttttttggtgttgttttttgagttatttgagctagtttaagcatgaatcattgtttgtggttgagtttggacaaagtttgagtgacctttagagctcaaactttgctcttgaatggtggatttgattttaggagttcatatcaatttttgatgcttgagttatgtttattgtggatgtttaggggttttggaaggtttgaaacaatttggggtagaattgttttgttggtgaggttttagggtttcgtgcaaggaacccgttaaccggtttaggcagcgtgtaaaattagtttattatttcctccagcagaaccctaataaccgattttctattttgggaatctagtttaccggttttagtagctttggaaccctagtttttcatgtcttagctatacttagggttttgccacattatcaattgatgaagaaacttctagttttgattttttgtccccaaaaagttgtttggtgtgtcacttatcagttttacaaatgtgtcacttagggatctgtaaatcgtcgagcagcaattctattcaggttgatcggcacacctgaacttaaaatcgaggtaagattagtataatgatatgtatatgtgattacatgtttagcatacatgtttatgaatgtctgttagataatatattgaaatagcgatatcagtatacataaagttatattgaataccgacgaatgtatgtttagcataagtactaattgatgctatcacatcagtacgactagagtactgagtataggctgatattatggtcaatagtactattctacgaatgttctaaactcagtatgcgtaggacgtagggttatggttgggtgtatgagcgcctaattatgacccagtttcaattttaggttatgattatgctttttgtaggaaatcaagctagcaattagttgtaaatttacatttaatgtattttccatttactctagtataactaggtgttcacattgtgtattatatataccctttgtatacactaaaagaaatcatgagaaaataaaaatgatttctctcatttttctacatggtatcagagcatgtaaaagcttctcaaagaattttttcattccttcccttcttaaaattagggttcttaaaattagggtttggaggatctatcttagaaaactaattaaaaggagttttctattctcacctccgacctaagaagcttctcccacctccgatcagcaaaacccaaaaatttggcgatcatccgagcggcgcgtggaccccacacgccacctccatccgcggcgactatctccacgcgtcggcgcatgggcgcgcgtggaagcctccaacgacattttttccaccgtcgcctctctcaggtttctccatctctagctcttctccgactccaacgacgtttttcatgcgttgtctctctttgtttctat

SEQ ID NO: 331045 - DNA, 4176 bp, Cannabis indica
tcctcgatcccgatcaaagttctgagatcaatttctagtcctagttctggtgcccaattcccaggtctgtgtcccccatctatgttcatgtcctaggtcccgttccgggtccaagttcgtgttcgggttcgaaccgaatttaggtcgtggttttggttagggtccgagttcgcatcccaatcctagtcttggtctgggcttcgggtcccaggtctgagtctggttcttgagtcttgggttcgaccccggtgtccaggttcgggtcggagtgtcgtgttctgatttgggtctgggtttgggtttaggtatgattcctggtctgagtctgggtccaggtccagatcctggtctcggtctgggtttaggtccaggttcgagttcgggtcccaggtgcggttccaggtctgggtctaggtcagggtctcgttatagatctagcttccgagtttcgatcttggtctgggtctaggttttggtccgggtgtcagtcttggtctgggtacacgacgtgtcaaggcccgacttcaggtcacggtttgggtttggggctaggtctgagttcggttctaggtttgggtccacgtcctagtcacggtcctagtccttttagatggtcctggtcttacggttcttgttcaggctctattttcgggtcctaggtttgggtcaggggccgggtttgggtcctggtcggagtcccaaatctagttcgggaccgagattggggtgcggttctaggtcccagccccaattttgtgtcccgagtctggttccatgtttgggtcttagttcgggtccaggttcggcatcgagtgtaggtttgggttgggatctaggtacgggttccggttcgggtctaggtctgggttggagtttgggtcctagttcggttacggttccaagtctaggtccaggtctgattacggttccaggtccaagtccaagtcctggttctgaacctgttcccgagtcccagtctacttcctgtttcagttctaattttggctcacaaggtacgggttcgggtccaggttgcgatttagggctgggttgaggtctgcgtctagtttcgggtcccagtctaggttcaagttcgaggctaggtcctagatccaaacacccactacgggttcggtccaagcaccaggtctagatctggatcctgatctcgggtctcggtcgagttccatttcgtgtgtcgagtcacgagttggttcctagatttaagtccgggtttggggtcaggtcttgggtccctgtcctagttccgttgcccagtccgtatctcgattcttggtctaagtcccggtttaggtcccattctaggttcacgcatgggtcctagttgaggttcaggtttgagtctcgctctgggtttttatttgggtttgggttcgggtctgtgtcttagtccttgtcctggtcctagtcctagtccagttccagttccaattgcgtttcggagttcgagtttgggttcgagttcgggtcggggttcgagtcctagttcgagtttgtctttgggtcaaaatctcagtctaggtccgaatcaggctttgggtgtgggttggggtcctgggtctaggtcaaggttttggtccgagtcctaggttttgatctcaatctgagtctaaggttagttctgggtctaagtcctgggttctgatcctggtctaggttcgatttttggtcctggttcaggtctatgtttgggtctgattctgggtctgtatctgagtttcggtctgggttcgggttttgtcctggtatgtgttcgtgtccaggctcctgtcctagttgaggtctgggataggtttcatgtctgggtctgggttggacttcagattcccgagtccaggttaggtcctggtttaggttcaattgtagaatttacatcatggtctgggttccggggcctaggtccctggtctaggtgccccatccaagtctggttcctaggtcctagtctagttccaatttcgggttcaggtcttgagtcttgatttagtcctggtcgcggtccgtgttcaggtccaggtctcgatccttatctttgtctgggtttaggttcgggtccttttcagggtctagatccttgtctgggttgcgagtgtcaggatccggtgagggtttaggaccaggtcaggtccaggtcccggtccaagtcctagtccacgttcaagtcttaggtctcaggtcccagtcctaatcaaggtctcggtccaggtttttctctgagtttgagttatggttttggtttggttatcgtcttaggtctgggtcctaggcacaatttccagtttttattctgggtccgagtttggttccaggtccgggtctgtgtccaagttggtgtcagggtctgagtcttagttcgagtccgggtacgggtttttcgaatctcggtcttggtccaggtgtgagtcaaggtccaggttcgggtcttggttctagatcccatgttcgtgtctaggtctgcgtctgcgtctgtctgggcctaggtcccgtgtttcaatcccggtctaggtctgcgtcggtatttgggtccgggtatgggttcgtgtccatgtctaggtccgaattccaatttaggtcaggggcttcgtctgggtctgggatcgagtcccgagttcgtgttcaggttctggttcgagtctcagtgctagtctgggtccaggactgggtctgaacccgagttctgggctaggttcggtctagttctgagtccgggtcaaggtccaggtcacggtcccggtcctgttccatggtcctgatcacgttctttttcaagtttcggttttgggtcccaggtttgggcctgggtctaggtccttttccagcttcgggtccttgtccgagtccctaatcaagacattgactatgggtcgtgtccaagccccggttctctaatcattggacaagatctgcatcccaatcacaggtcctagtcttgtttcaattcatgtcctaggtcagggtctaggtttgggtctaggtccaggaccgagactggggtccagttctgggtcccgagtcatgttcaatgttctggtctgaattcaggtctaggttcgtgtcctgagtcccagttcgggtttggatttatattttggacccaatcctagagtcgatctttgaccgagtctgggtcctggtccggttatagttttggctctatgttcatgtccttgtcatggtcttgttcttgggtcctgatctgccactagtttcgatcccagtttcaagtcacggggtacgggttttggttgagtttggatcagagtctgggttcgggttgtgatttgggtctgaggcaaggtttaggtccaagtttcggtctcaagtaggttttgaggctgggtctcggcccaggtcccggtcctgttcaaagatcttggtccctttctaattcatgtttcgatttttgttactgagtgtgggtctgggtcttcgtatgtgtccaagtcttagtttgagttcgagtttgggttcgagttctggtctatgtccttgatccagacactgagtactggtcgggtccaagcatcgagtcccagatcccatgttccgaggtgggtcctatgtccaggtttgggtctggggtcgagtccttgatcccgatccaagttctgagacaaatttctggtcctagttcgggggcccaattccaaggtctgggtcccccatctatgttcaggtcctaggtttcggtccgaatccaagttcgtgttcaggttcgagttcgggttcggtccgagtttaggtcaagatttgggttagggtccgagtatgggtcacacacccattctcggtctgggcttcgagtcctaagtctcagtctggttcttgggtcctgagtttcgccccgatgtccaggttcgggtccgagtaccgtgttccgattttggtctgggttccgtggcttaggtccaggtcccccatcatggtccgagtcctaggatccgatttgggtcctagtcccagtttcaattttgattcagtgtctgggttcgagtttgggtctgggtcagggttgaggtttgattcctggtccgagtctgggtctgagtctgggtccaggtccggatcccgatctgggtttgggtttatgtaacaccctaactaacaaaggcgtattacgtgatttttaaacatgatgtgcagctcgttgctaat

SEQ ID NO: 331046 - DNA, 1462 bp, Cannabis indica
tgattcaagattggtgagctaaaaatagtcaccatcttgagggggaatattggacgatattgtctcacatggattaaatgtaagagtattgagtcatatataagaacatgggctactccactcataactaattggttttgagatggaaccccatgattctcaacaatcacaagcaaaatatacattaacaaacacccaagagcaacaggctactcaaaaccagctaaacaaaagctaattcaccatgatcttcttcaataaaagagcattttgagcacttcttttttcttagttacattcagcaatctaagttggataacatttttaattttatcaactatacacctggtcagctgacattttccttcaaaaacacaagtgtttttgttcacctaaatgttgcatcagtatcaaccaagatggcctcaatctagcttgtcttcttcacatctaaccaatgcagccaacttgagaacttagttggccaagctgtgaaacctaaccaattaaagcatccgatagtaaccatttgagaaagagagcaatcacaaaacaaatgctcatgtgactcttggaccagctcacacacaagacaaaataatgaagagatactcaaattgatccgagctaataggtctcgggttaacaaatttgagttcactaactaccatagaataaatctatgcttaggaatgctgagcttgtgccatatattttgatagttcaagactttatcacaagctagtaagttgttataaagtctattggaattgaacttaccatgggtacctacaatcataatgtctccttttcgaaaacccttctcaagttgtaaagttttttccaatactagctcgagtcctactttaattgatcgtcccataaatctgtatctttcaagtagatcacattaacccatttaacccacaacacatcttgcttactagtgatagcccataagtatctagcaagattagccttattccaatcagatttattcctgaacccaatacctctaaaagctttaggaaggcacaccttatcccaactagctagatagaaattagatctatttcctgtggaaccccaaagaaagacccgacaaaagtgctcaacttcctttgagttgaatatttatagaagataaattaattaatttatttaattattaattgaattatttttaaattaataatggataaattttaaattttttactgctatttgagttcacattatcacttttattgtttattatttgttttaaaaagaaaaaagacaaccacgattgttgctcctggtaagcaacaataattcatctaaataataccaaaaaataagtgtacaaatgttcactcatcatttatttaaggctaattgggattttaccccctgaactttgacatgtaccaaagcatgctccctgaacttttaaggtcgttaaaaattgttgggttttatg

SEQ ID NO: 331047 - DNA, 530 bp, Cannabis indica
atggtaaaatttaacatctaatatataatttaatcgaatttaaataggtaaaaatattaaatgtggtctaatcaacacccctaaatattatatgcaagagtcaaaacttttaacaaacaggcactttagtaattctggcttgtctatcagcccacgccaaaccctgttgttgttgtgtttaaattacatcaagttagttgttaaagcatatttgtgcttcaaatctagtacccaaaaacgcgtattgaatggtgtatccagctcccaaaaatcccaattattacccaccatatcaataacacacaatatctagtttagtttatattcctcttttttttttttccctaacaaatactagatggttatcatattacttaccatttgtaatattattattggtataatttaatatcggatctcacttattttaatttaataaagatataaaaaattgctacgccatgtcatagaggtattagacgcattggtgcctaagagtgttcattcgaccacatttaatatttttaggc

SEQ ID NO: 331048 - DNA, 827 bp, Cannabis indica
tttatactacaaaaatatggttttgaacaaaagagaagcatgaagtcgtagccattttgaacaaaatgtaatatgttgtgaggctggttgacttgttggttgtagcttgtttgttttggttttgaataaaatttctcctttgtatgataaaaaacaaaatgtggttttttttaaaaaaaaaaatatatatgttctgagaaaaattccaaagcaaaaataggaggtaacgggctacccctttagactttagttatgtaattcgttgcttgaaactgtttatttatatttttaaaattttcctataattattttttttaaaaaaaaataccatatatctattctatataaagtgtgcctatataactgaattcttggtttatgagaaattcatgggtgactttttatttatatttaataaaataataaaatattatttatatataataaaataataaaataaaaataaaacaaatctcattaatatttgaactgatatttgatgctaattatttatctgtttttatttgtttaaaaatacttgagcttaccaaagtttatgagaaattcatgggtgactttttatttatatttaataaaataataaaatattatttatatataataaaataataaaataaaaataaaacaaatctcattaatatttgaactgatatttgatgctaatcatttatctgtttttattttttaaaaaatacttgagcttaccaaaatctataagaacaaaaccaatgaagaaaattttaacaaaaaaaatgaacgaagaaaaaaagtgtcataaacattattgaataatggcaattgccaac

SEQ ID NO: 331049 - DNA, 852 bp, Cannabis indica
tcttgtctatatatctgaggcatgcatatgtctcgttaatctcagatcatagtattattcttgtctcgctttgactataaagtttaacaagtttttaaatattatctatttaacctttatttaataataacaggtttattttatatgcattttattgatataaagttattatatcattcagaattgattcatattcgttctgttagacacatgtcaactcttgaagtgcagccgaatttcaggtataacattaattgtattagttttttttttcctaattcatattcttaaaataatatatttacaaacaaaaataaattatattttaaatattataacaaagaaattaaaataaaaaattatgtgaaattttattagaacaaaataaatatatatatgcatgatttaaaaaatcataaaaataaaattaaaataatgaagttaatacaaaaatgtgagaagttttttctttttaaaaaagaaaatattaaaagtgatttttaaaaattagtttaagtttaattttttatattgtggtgtaatcattattttgtggatgcaaatagaactactctacaaaaattgtttcgaatagagtaatattaggagaaaaaaagtaatttgaatgattaccttatttgttatgaagtttttaattttttaaatcctatttttatggtagtattctaactaccctaaaatgtgtaataatcacccagtagaactgaaatatttcctcatttatattaacctaagattagagtttttattaaataaaaagccaaataataattataacttaaaaaaaaaaatggactttttcattttcacacttgaaaacaattttttttt

SEQ ID NO: 331050 - DNA, 784 bp, Cannabis indica
aatttgcaaatcataaaaattgaaatatgtctaatattattcaacacatataaaatcaataaacaatacatcttccaagtcgttaaactttacttaaaaagacgatcataagctctcaagtcccgagctctaattgtttagtccaatcttcgatatcactctcacggtctcacctatacaattaaatggctaaataattatcatcattacattctacattcaaaattgagtctaacaacatataatatgactatattaaaattttggagtaccgaaacttcacctaagcggtgcacgttaattatcagtggcagtagaaattattttaccgaaaataggggtactgtatataaaaacaaccatctaaacgagtagatcatacccataccaaccatttgtcaaaacggtacatgatattgccagaaagttaccgaaaaggggcggagctacaaaaacgtcaccagaaatagtcgcgggcttagagaaatggcttactgtagattgttctcctcgacgagctaagtctagtggtgaagaagactcgtcaaacagacaccgaaggtggccaaaatctgttcaaagtttgaaccttcaaagtttgacttgcaatcctaagctaccggtggtgaaaggggcgatgctgcttggggttgaggttttcagtgcctggaatttgaatggtccagtgcgtggggtcagacagtggccaaagagtggtcatcgaagttacgctaacgattgggtttgtgggttttcttttgtggtttgaagagagagagagaga

SEQ ID NO: 331051 - DNA, 2825 bp, Cannabis indica
caatgttttaatgttcttctatttggtatgtacataaattcgggcatgttctttatatggtagctgtgaaatgaatgaaatttccaacatccaattattcaattttaggtttaatgaatttaatactcaaatttgtgtagtgtaaaattatatgagctataatagtgttgtaccttttgtttctattattctcaatatttgattgtttgcaggagcatgatcaactaaaataaattaaaccacgtctttggctgaggggtgagatggaggtctttttaggtatgcatctctttttctatcatttttattttcttttactatttttatatatacaataaaattaaaattaaatgattttttattttattttttgttgttgcttgacaaagccgttcataatatagtaattattcatgccccattcaaagcataattctccaatatgaagaaaaataaatgggttcattgcaagatgatatcatttggttaacaacgtgggatattgaccccaatatctttgtttgtggctactttcatctcctagatgaggttttaatgtgatagcataaaaatgttatctgcaccctaatttattattgcactttgatttattggaccttttttttggcaatggagttgatctcatttaaaaagagcaaaaatggcaattaactccaatttattaattgtgtcaaaagatctaattgaatttattacactcaaggacttatggagtctattttaaatattaaaataagtagatttcaaaatgttccaaaattaaataagactaatcaaatttgaaagaaacataacttaatttaacttaaatgttctccttaaaaaaaaaaaagaatcgagacagagggtataggatcgaattgtgtaatgcacacacgataacagatacagagtatctcagctgaatttcaattgtagaacataagaacaaacagctccaatacaaaattgagcatgaaacagcaaatgtactttgatgttacatggacactgccaatttatcatcaccaagcaaagacttcgttcaagttactagtactatcaatcatggaggctaagccatgcgtgatgttcagttcgagtgctacgttgaggaataacatttgagccaaaatccagtattggactgcttctgctaaaaatagtaagttcgaagtcaatttaatgtatgaaaaacaagaagaatcctgttgtcaactttctagtgaactacaagtggaatggaggcatccataaattgaatttgagaccacgttcttttgtggacaaagctatgaacaagttggtcttgtacttgtagcattacttcaatactggccaacctagtaagtactagtatgattatatgtacaaatacatatataacctgtgtttagtaagctatccttgctcgtatctttcactttgtacttgtaaacgtctttgattatgctaatggcaaccatgaatcattgattgttatggttgacatattcaactacaagatattgaagaagtgattgtagtgaagagataacggtgtttgaaacatgatcttcatcattcattgttattattatagacatgtgtttgttggtacttgttctttttgaataattttctcttttattttcctataaaaatgccaatgtttgtgtgtgtgttttctgttgagtacatggtactttccgaaaacaaaaaataacttatttttgtgatgggtatgtacaaaagaaatgaagaggcttataaccttttggaataagtaacatattgattacaattgtgaactcggtgaccatattaactagaaaagattctgccataaagaatgtattgaaggaactgtcccagtcaaatgacaaaagaaaaatcaaattaaactactattatacatgacatatgatgtgtaggatatgtttgaaatcaagacagaaataactagtaatcaatcacatcagaaattggtttcgatatttaatagatagatgagttctattgggacccattttcattcccactctcatttctcttccttctatgtgaaaacaattgcttagactttgattggagcctctttcacttctttgcttcatttcataatattattataatattatggtatgttcatgggatctttactattttgttgatagtgcttcaatttgcactgtgaattttatattttgagttaaatccattttgcaaggttagctttgagtacaaaaaatttcttgagtgtgttttatttaaagtaaaatatgagtattattagatttccttttacaaaaattttaaaaataccattttttaatataaaaatatattatataaaaattttgggttctgggtttgagtaggggtgttcataaaatagccgatccaatccaatccgcaaagtgcggatatctgcacttgtgcggattggattagattggaaaattcaaaatccgtacttgtgcggattggatgttgattgacatgtaaaagtaaccgatccaatccaatacacacatatttataacaaaattaaaaaattatatatactaataacattttaatgcaaagaaaatagtaatttaaaagtctaatacatataatacaattatattgcaaaacgtaatagataaaatatatattctattcttatatattttttctacatacaatttaacataaattaaatattttttaacaaaaaaaaatttttttcctccatttgaatttgaatttgaatttgttatttgttattttatttatttaattgtgttgttggtagacataaaataactataatttgttttaattttgtttgcttagttatg

SEQ ID NO: 331052 - DNA, 584 bp, Cannabis indica
tcaattggttttgagatagaactgatctattataattgctgggaggttagaaccaataggttggaagacttataggtgttggttattgttttcagtttttaaaattgcgatttaaaaacatgagaacaaaaatttatagctttcaaaatacatgtttgactaatggtttcttaaaacggtttttggatttttttttactgaaaaaaaagaaaatttcaatattccacacctcgatacgaaccaaccctacctggatcccaacaaggactcctgaagttagcctcggtcccgttacctgaacccaaaccttgatgcaaccttgacccaaacctagagcctggacccgcacccgaacccaactatggaacttggacccgaccacagccggactcaaactccgaaaccagattcagacttggagtctgacccggactcagacccagactcaaacctgagcccggaccccatgtttatatgtgagagaatatatatatatataaaataaaaattattttaaaatggaaaataatatttgatattttttatggctaattaagttttttacccctgaactttgacatgta

SEQ ID NO: 331053 - DNA, 1825 bp, Cannabis indica
ataataaatatttatcttttaataataaaaaaaatatttaatttgtttatttttataaaactgtttaattaattttacgaaattatttattttgagttttaataaacatattttcttatttaatgattaaaatgtatggtttcatataataagttttcaaaatgtataagtttttaaaataattttttttgcacattttttgtaattatgttatttttgttgtacatttatgaaaaaagccctttaataaataatatagaaaactagtaattaattacgagatacaacgtgtagtttggacacttctgccaaatagaatattcaaataagaaataataacgagttccataaaatttttaggttcctggatgcttggagctgagatccggagtgtatggaggtggttagaaaagcttggcttcttgtggttaatggagccaagagcttccagtgggtgtctcgattaacaaatacgaggaaaaaacttacaatttggatcaggaaccattttggtttctgtaaggaaataataattatgctagacaaattctttcttgaaattcagaatcgactgccgtctccgaagaacgctcaatcagaagctgatatcttccttgagcttgaagaggattcatctcggtaggatgccatttgtcatcagaagtctcgtgagacttggttacgcgatggggatatacatactaaattttaccatgcttctgggttcttctctcagcaaactctttgatctcatttcatctgcaatttcaatttaggataatgtggagttgttgcgaatcctgtctagagatgagataaagaaagtggtttggtccatgggtcaattgacagcccctcgtccgatggaatgccgggttgtttctaccgagcttattggaatattgttggtgatgatgttgttgacaccgttacatagttttttaggacaggggatttctcaaaggacctcaaacaaacgttcttggttcttatcccaaaaaggataggagctgccaagtgtgatgattaaggcctatgaccatcttaattgaagtttcatttctaaaactctccaagcatttgggtttggggaaaaaattcggcaactaatctccaaatgcatctcttcagtttccttttctattttgttaaatggaggcccgcttaaacacttcttccaacctgtggaattcgacaaagagattccctatccccttacttgtttattattggcagtaaagtgctatctagactgatccttcatgaggaagacaatagtggaatccatggatttcatgccactcttagatgcccacttatctcatgtacgtagacaataccttcttgtttagcaaagtggggattggtgaagtcgcaaggataaaacttgcttggatacttattgtgcgtggtctggccaataaatcaacatacccaaattagccatggtgatctccaacaatacgagagagaagataagggttgagattgacaattttcttgacttttaattgcttaattgtttgaataaatttcttgggaatcccattttcttttcaaaaaaaaaaggtgcgtgattttaattttgttcttgaaatgttagagctagacttgatggttggagaagcaaattactttcacaagagggtcgtactactttcttaagtctgtgatctcgagtatccccctgtatactatgtcaaattttatgcttcctaaaaccctttgtgatgagagggataaacgggttcatcgattttggtggctgggggtttcaaaaagaccacaattgctacctcgagcacctcaacgaatttccttgttg

SEQ ID NO: 331054 - DNA, 1271 bp, Cannabis indica
tactacatcagcaatctaaatcgagatttcttgcaccgaataacgagcgttagtgaactacactagcaaccgttagttaaagattttataactttaatatgatgctgacttttttatttatggctaagagatcttaattgtacaatacaagtcacaacttcatacatgaatgaaatttttttatatttatatatagattattcaaaattaattattaataatttaacagccaaacatgtatcaaaatattaatttttatttataaataaaaatgtctttacatgctttttagggcataaaccttaacaatctcactttctctaaaagtaaattaggcatctctcttagtctcatattagttatatgacccataaaaaatttcactggtagcgtctttatgaatggatctgccaggttatgttctgacgcaatcttcaagacagtcgcatcacctctttctactatatctcttagtagatggtacttcttctcattgtgcttgggtctcttgtggcttcttggttctatagagttggctatcgctctagtgttgtcacagtagagcaccagaggtttttctacttctagattagtgcagaattctttaattgaaccgcttccttagctgcttcgcaagctgctatataatcaacttccatggttgaatctgcaatactaatttgcttaatgctctccagacaacaactctaccaccaagagtgaatattaacccatatgtcgacttttgactatctttgtctgattggaaattaaaatcaatatatacattaggatttaactctcctctagaatacttgagaatgtgcttcaatatctagtgttccaaacctagattcaattggtaacaactaacaattcttatatcatagcatatgtcaggtcttgtatacaacattgcatacattaagcttccaactactaatgcataaggatactttctcatgtcctccatctcctgtagagtttttagatgttgatccttgcatagagaaattccatgtctcgatggtaactgtcatttcttagaattctccattgacaatctttctagcaccgtatctatataagttgcttgagaaagtgctaatgttttcctctttctatctctataaatttttatgctgagaacatagcttacttctcccaaatccttcatttgatgttgttcggctaaccacttcgttacgtttaataacctttctacactgtatttaataaataaaatatcatcaacataaagtactaggaat

SEQ ID NO: 331055 - DNA, 1243 bp, Cannabis indica
acttttggtttacctttcctttgtttgtgtcctcctacggtcttgagagtcgagttttctttcacacctttaaacatctttgtccctctatagaaaaattctatccattgctcccaaaatacatttatattatttgatttatcaaaaacgttgacactcttcaaatacttataaatttgagcatggagccttaaaagctctacagtagtagaatgatatggagtgccaccaaccaattttttggtaggaggtatgaactcttcataaggaattcctaaaataggtagccctccaataacctttaagtcatacagagatattcccatctcaccgctgctatgatgaaatgtgttagacagaggaccccaaagttcagaaaaagctcgccatagagatctttcatacttgaatggatatcttgataaataaaaagctccataagttccagcctgattcaaaatatctcgatttgtacgtaaaataaggtttgtccattcgataatatatgtcacaaatacaaatgtccatgaaagaaaaaaattattattggcctttttctctgctaaagcacgatgacaacttggataaaagtctacatataaaagaaaatacaaaattctcaagcaagacacttgtacataaatgacacgcactagcttgatgttgcatctgttgaacgagaaaaaaaaatataataataaaattattattagttcataaattatttcttttaaaaaaattgaaaaggaataattgattttaaaataataataaatatatatatatataatcagtcaaatagagagtaaaagtaggagactccttccactctctcaacgtctcactctcctatttttactcaccctttacgttacgtgggtggagaaataaaaattttattgaaaaaaaataggctctacaaataggagtagctgagaacaaaaaaaaaagtatcgacactttgaaaaaaactgggagagaagaaaatagagaagcaaaaaatactacgtataatttttccaaggaatcaacagactttaaaggtaagtatttatgaaatgctctcattcctctttctttcttggttgatttcgatgttcgttacctttcttattttctctctattcatatatggaatgccctcgttccataaatgaaaatggatgccctcatctaaggaatgtcctcattctaccaaaaaaatagatgccctcatccaaggaatgccctcattctaccaaaa

SEQ ID NO: 331056 - DNA, 519 bp, Cannabis indica
ttttaattattaattgaattttagtttaatatttttttaaaaaaaattataaattttaaattatacacaattatgataattgtctaaacaactacatccttttttttgtttgtcatgtttgataaaatttgataggaggactacttcacaaaactgtaaatagttcaggattatttttaacgaattagaagaattagggacaaaataatgcatagaacatagttttgttaattatggttacaagttttgtcatctggaagttgttttactccagaaagaagttacagaaagcttggtagtcaaccgaaaactttgccagtaaaactgtggccaattcggatgggtcttccgtgaaggttgtctttcgtaattgtaacgttttccagatagcttgttgtcaatccgaaaatgtactcccgaatagcattgtcagtcacagatgtttatctgaaaggtgtgatgaaatgattttttttcttattttattcaatgaaaaagggatacaatttataggacttt

SEQ ID NO: 331057 - DNA, 611 bp, Cannabis indica
tttttttttcaaataaatatatttaattttcataagtgttatactttttttagttggggcgtatatagcaatgaatggattcgtttcctcaccttatttattataagtaacatattatataatataagtatgtattaaatttatgtggaatttgtgtgcacatatccataacttatcttttaaaaatttaactctttgatatcgtattcatattccaatcgaaatttttccaatataattcagagtaatttacgtacttgttacatgtacaaaaatataataaaaagaaaactaagccaatagttatactttaaaataaatataaatataaataccatttatataaggttgaataatctaaaaattagctaagatcaatgttacaatgaaaagtaacaaaactgtctcaatgtttccaccggccattggcgagtgttgttcccacatggtcttgcagctccttactaacccaaccaataccatgtgctctaataaatacttgccataaaaaaacgaagtctccaatcatatttacatttatatatactctctcccaatttttttaaaatcatatattaatacacatggatagacacatcgatttgttaaaa

SEQ ID NO: 331058 - DNA, 571 bp, Cannabis indica
tggcttccttaggtgttgacaccaaagcccctacattcagccaaggttaatgaaattaaccttaatttcattttaggaaaaataaagaaaaattagaagaaaagccaaaagtgaagaacccttttctccccttctatctcttttcgaaccagctagggactaagggtttgatttttgaattttgtgttttcagccaggattggaggaggatttaatcaaggtaaacccgagacactctttagctatgtttttctcaaggttttaatttgtttcaactagtgattttagagaataggggctgttagggtttgattaggttttggtttagtttttatattcaatttgagttggttctaggttttggtaactggttttactgttttgtgttagatttgcacaagtttaaactttgaaactcaagtttaagtctttagtggcatgtttggtttcattgagtttttctgggtttttcttgttggaatgtgttgtgtatacactatttaggtaatctggaaagtttggaggcaattggacaagttttgaaaaaattggaagttttttggggaggact

SEQ ID NO: 331059 - DNA, 726 bp, Cannabis indica
taaaactcaaaaaaattaaagtaaagatatagtatcaattatttagagatatacttttattcacacatgcttcatcaataaatattatcaaagtaataaatttagagtttttataaaaaaaaatatgctacaattattataatatatgataaattatattaatattatcaacaaatttatcgattccatataatatcattaatcatagtccacataatcctaatttttacgctttgatgtccactattgatcctgcataacacaaacctataaagtgattttttttttaaaaaaaaaaacacaaatattgtagagagaggcatagaagggagagtgattcataaagaaaataataaaatttagggtaggttaatatcacttggtcattaaaaaaaattaaaatatacaacatcaatatcaaaatttaaataacatcttttgtcattaagaaaattagaatatttaaattattactgcttctttattagtagaaattaaaggcgcatagtttcacttacaatattgccggatagataacattagtagacttggtgcattgaatcagagagattgcctccaattgatgggcctggagaaaaaaaaaaataaatcattagtatatgaaaaactatataaacacaaatcaatacattataaacacaaataaattacattgtagacccactttactttatttgtttttatttttaccttcatttctatatt

SEQ ID NO: 331060 - DNA, 1671 bp, Cannabis indica
ttctattctatttcattatctccaaccaaacgccaccttagggaagccattcccattcaagactatttttcaatagagagtcttccactgtggtaataagaccaatgcctttgggctttgtgcaaatctctctaacgccctaatgcttgatgggcttgaacacatgtggatgatactggtgtcttctaggctctatccagttgtctgtccttttgggagtcattataaaaattgcacattcgcgaaacagagaagattggtcccaagtcttcattgacctaaaggtcgaataaatacttatgaaaataaatgttgtccctagttttgttaaaacaaggacatgtggtactccgactagctgacacgtctcccaataaagttgatatgacatgtgaaaaaccctttctaataaaactgaagagagaagacaagacgagtggatgtgccaacaatcaatgctttatttttgtctatgcatttaaatgaatagtaaaaaataaactttatgtttggctataaattaataggaccatggtatcacatgtaaaaggactctttagtttcttactcattgatattaagcctaaatcctactaaattctagagagaaaacttcatcttttttgtcaatacaaatgattcgtggactaagactcatcaacgtcccaattatgtaaacatcatggtctccatatctcttttttttagctctaaatcattatttattttcttggttgccaaaaaaccgtttcaatagttcgcaaaacaaattaattttgaaacttatttttagcactttaaattattaaaaaaaattataaaaaaaattagtgaaaggtccttaaatcattaaaatattatcatataaaaaatttaaattatatttttgaatgtgccaatcacaccctcccagaaatttatatatatacataaaacactttttaatgggtattacttattgatggttactaaataaatttaattatcactataataaatttatatttagtgacaattatttagtcacaatataatatttatgactaaatgtgacttttactcacaataaaaagttacttgtggataaaatatggtatttagatacaagttgtcactaatttaattttagtcataataaatattccgacaagaaacacatttagtcaaaacaaattgtaatttttgtgactaatacctttagtcacgaatattttagtcacaacataagaataatgatttataattagtcacaacttttttacttttacccacaaattttattttgactaaaagtaaaattttttgtagtaaataaaaaaattaattttaattaatattaaactattagattttgatccaatgacgaataataataaaaaaattatgtttaatttaactactcaattaaaaaaaacaatcaaaaaatatttctttttataatatattaaaaatataattatatattaaatatttaattcaaactttatttttcttatttttttttattcaaaaataattatattatttttcgtcgataaaataacacatatgaaaaggaaagagaagagtacaatctatataaatatatataaaggagtattatgagacgatgatgtggcggactaatatctctccaaagctatttttcttttttcttccttaattctctca

SEQ ID NO: 331061 - DNA, 605 bp, Cannabis indica
gtatgaaacttattataaaaaaatacagtaaaaaaataaaaaataccgcctgacagtatttttgtaaaaaaataacaaaagttagtataccatgtaaatttcgctagtataattctcaaatgtttattcttcaaaattgaagacactactacaaaataagaattttcggtcatcgttacttgtatgatattgttagctttgggtttaaatttttacgttttcctttttagacactttcttaaaaaatctcattttaatagagataatgtcggtctatatatactaaaattcttctaatttttagctaatgtgggactttcattggaaaggtggaggcacatttaagtctaaagtggccttcgctccagtccaaatgcatattgtcttttataatgtttagttattttggtagttatatatttgtttgttactacacgaccccttataattaaactaaaggaataattatataagacactattttttgtaaaatacttacatttttacgttcaaagaatgttttttttatatttttacggttttctaaaaaataacacgaaaataatataaaatcaacaagaaaacaacataaaagtaacatgaaa

SEQ ID NO: 331062 - DNA, 1018 bp, Cannabis indica
ctatttgtcatcttaaaagtgtacattattacatcaatatgataattaattaacgattattatattatttattaaattaaaatatgtgtaacccgatatatctttgttatttggctactcaccttcaattttgtttaaaagattatgtattcatgttcatacaagtgtagtaagcaaatcggaaactaaaatttaagtaatatttagtttggtaaagtgtaatagaataagaatgataatatgaattgattaagatatttgatttattgttggaataaatattgaaataaatgataaattgataaaattgttctctttattttttaaatttgtataaaagatattgaagttattttggctttactttacttaatcatttgtgatataatcctcattataatgtaatcatcagtacactgtaattctattacatccctttttaccatgatttcattacaattactattacaataaaccatgaagattacaattgtaatggtaatcatgatcataattgcaatattcttcttttactcaattttgtcaacttttcaatattttagtgtagctctccaattttgacacagataaccttcaagaagaattacaagttttatagccagacaagataaggcatcttgacaaaacagaaagaataacagtattcaagaacattgttgagaatccttctcatgaaggtccagaatccgagcctggtcgatattgcttctgcctacacaagaacaaggtgtactacgtgagcgagtcccttgtcaagcgcgccaccaacattgctcgtgccaatctggtgtctctcggtacctgcattggcaagtttacacacaggcaatttccacctcactgtccagtgtcttgagtattttggcctcaaatgccaagcacaaggtctggcttaaacccacctctgagatgtcatttctgtatggaaatcatgtcctgaaaggcgggttagggaggatcacagagaatattggacctggtgatggggttgttgtgg

SEQ ID NO: 331063 - DNA, 882 bp, Cannabis indica
aaagaaaatagaagaaaaagaaaaaaaaaaaaaaaaggaaaatagaaaaaggaaattgagaaagtagaattaaacaatgaccaagctccataacaagtagtgtataatacaacaaatttacttaattattcagaagaaaaataaaacaaattcacttaattgatttatttatattgatggcctgacaaataaacaaaactaaaaactctaagcaagtaaattataaagtaaatattcgactttaaaagcaaaaagtataataagatcaacaaaattcaactacgaaagaaaaaaagtatggtatgatcagcaatttcttttttcagagaaatgtatttttttcatatatataatggaaaggattataaagtccatatacaacttccaagaagatgaacataggcacagttacacagttccaaagttcaaccgaaatatcttaagaggcttaattaccaccaaaatgacaaactttgagtgaagaatatccattttacttataaaattgtcattagatttcagctcactcggtaatgaaaattagttttgagaaggaacatcattttataatctttctagacattagcgatgtgagactatctaacaaattatgaacatatttgcagttcatatggacaaaacattgtggcaagttatgcaatcaatggtgagatactatttagcctccttatttgctctgcgggtctggttctcttctcacatctcattggtaacatgcaggtatgtaaaatattatatatttaggtggcgtttggtaatacttttttaatcagttttctgtttttaaagtgaaaaagtgaaaatatttttgaaaaacatgttgtataaaactgtttttacttttcaattttataattagaa

SEQ ID NO: 331064 - DNA, 967 bp, Cannabis indica
aatataatttatcttaaacattataaactcttttatttatttatttttgtatagggtgatccacctgaagagcatgtggtcgatgcatggagagtggctcatacgaaataacagtctggtggttttgtcaacgaagtcgctgcaaaagattttttaagtacataaaatattgtattgttaaattttaaatattatattaattatatgttatagtaatgtttatttaaataggatgaactgcgcaagaaacaacttgaaagaaaatcccagagcgagacagctggtactgaatttgatagtagttatcaattcgacgtacttgaaaaagttttgggcgaaagatttgactatcaaagagacgtgggttataggatcaaaggcaaagaaaaaaaatcatacaatcaaagtcagtcaactgcgcctcctccacctcctaatgaaatgtttaagattgtggcatatatatttacaactatacgtgagacataagggagtcgtctgatccttgaataacgtgataatttatataacccatggtttgaaaactttattcaaatgtacggtcaaattacaatctcttggtggttcatcttctcagagttatgtcgctcctccacaacatcaacaccagtcttcttcgcagcagcaacaccaatctggtccgtagtagggaaatcagttcttatatggaaccccttcgcaatctcctccactgatcaactcaaattttgttgattttgagatatttaggagttctttgcatgagcaacagtttttttctatcccgatacttaaccaagctcagttaggagaacttatacttggtttatcgtctaattaaccatatttttttctccgccacagtcgtcaggacctccaaataataataatgtgaatcaatactttttcatctgagatcttaatgatgatttaatgaaaaaattagtttaagtttgttaataattca

SEQ ID NO: 331065 - DNA, 579 bp, Cannabis indica
ttattcgatcaaaataagaatctaatattgtcccggtaggcgagagtcaaggttattcttattttatgacttgcactattgtttcatattcataaatttatttctaagtagtcaccgttatagaaaggaaattttacaaagtacttatctttcgagatgttacggtgttaaatgttcgatgtaagaccatccataaggggatgaagtctagcatctcaaggtcccattaaaatattaaccatgtaagatcaacaacggagatcgcatgttcttaaaattaaagcaagaattgtattttcatttgatatttattttaatctattcatttaaatctatttatattaatattaatatatttatttaattaaaattaataatttagataaattcaaagacaaattttagtttaatatttataaattatatactcacatagatctgaaaaataaaaaaataaaaatatatttcatccatagttttaattgtcaataaatatcaagaaaaatgcttaacttgagtttgtccataattaattaaacttaattttcaactcaaatttaattttctataaatatatat

SEQ ID NO: 331066 - DNA, 1412 bp, Cannabis indica
ttttaaaaaaagggtaaaatgggaagttcatgtaattaatggactaaatttgtacaaattataaaggggtataaattttgatataggttgtattattagggtcaaaaattgaaatttccctattattattgttattattattattattattattattattattatttgtagcggtttcattatggtcattattttgtaaccgctacctactacctagctataagtagggttatttcttccattcaaaggggacaaagttgatttgaataataaaatacagagtacgagatctctttcaacagcgtactaggtaggccaagcttaaagcttctgctgaaccactatatttttttttttatgtttattctatactatttacatactcggatataattatatctatattctttgagtacttgctattctaagtgagtactcactatttttgtgttgtctaaatttctcagacaatattattaaagttaggggtgtgcagaaaatcatcacatccaattacaacggactgatccaatcccaaccgatctaatagaatcggatatccaatcataattggatcagatcggatataaatcttgaaaatctaatcggattggatcgattgttggatcgaacatcggatccaatggatttccgaccaaaccgatccaattatcatccaatggtcatccaattatatttatatatttttaaaatacatttataattttatatatttaatatattttatttaaaaatatatattaattgatttaatatacatttaatacgagattaaagaaaaaaaactttagatttaaaatattaattctcatcttcctaaacgctaataaaattatcaatacatattgaataaattttattttttaacatttttattatgagatcacgagaattaggttggactaaactaatgtgtattatatatgttggatcattaagttttaaattatatattgtttatatatgtatatattctttttaatgaaattaacttaaatggtatatcatacaattattggatcggatcggatgactcaattcgattggattggatcggatgacaaaattcaatatccaataaataattagattggatcgcttaggttcaaatccattgaattagatgtgatccaataaatacccctagaagttaggacttgatcaaagaaaaagaatatatatatagagaaagttaattttagttgataaattccttgtaaaagttattcctacccattttgttataaaagaattctcccactatttatatgagaaaaatcttggtatatcatagccaggagaatgtgttttttttttttatttaagcgtttatatattacaactatattttacgtgagactcgaacccaagacctccaacacacacaccca

SEQ ID NO: 331067 - DNA, 583 bp, Cannabis indica
tatactaataaaaaaataaaagtaatattaaaattgtacatatttatggtgagcaaattttacatcacattttggtataacattagagtaaattttttccaaagtaaactatatttattttagctgccaattatttgtatctccattaaaaatgttttaacgtgctatttctcatttctcgttattagtgtaatctataagggatctaataggtacatatttaggagggtacatgcccaccctcaaaaattaattatccactttccttcttataagtttcttacaaaactattttctcttacaaaattatcttatcttaaattaattatgctcgttataatttcaaaacctgctcatcttcaattgttattctaggtcctttacgggtgcatgaagtatccatactatatatttttatataataattatattataaaaaatcgttaaatagttacaaggtgttatctcataataatgcacctaataacaatactttaaaataaattggcattaattatgaaatataactcctatccttagaggaaaaaaaaaactcctgttagacttttatttgggcttacat

SEQ ID NO: 331068 - DNA, 1319 bp, Cannabis indica
aaaaaaaaatggcttaattaagaaattgatgtcatgtcaaacaaatgagtttgcttcaaaaggcactacactaccctaaactatgtttctttaattcataactataggtcatgaaagtgaaattttggaatataaattatcatatatagatatgtatatattttgaaaagaaaaaaacaaatattattggattaaactaactcatgcaaagaaactgaatttcacctttttcttttttaacaaaccacttctcccatgatcttatttaaaaaaaaaaatgattttttttaattccctccaccaattttaactataatttttctcatttataaacttttacttcgtaattaaataaaaatatttatatttaatatattaatatggaacctctacctatgttagtgtaactccttgtttgtaataattaaagattgaagcattttaatttggttgattgctctctttatcttccaagttttagtcataaaaaactcaattgtaaaatatgtatacactactccacttaaatatgtattgagaaaattttaaaatgtatttcttaaaagtaatttactgatacacccttatctattttggtattcgaaaaacttttttagaccaatttttttttatagtcgtgtatattacagttaatacattatgtaaaattttgaaaaatgttaaaaagtttagcacattgaaaataagattcaaactgtttgttacacacgtgtgaaataaactgtatgaacattgctttgtatactgtaaattatttcgaatttctcaaaatttcacaagatgtcttaaacaactataatgtacacaactatgaaaacaagtaaaaagaattcattgtaaaaacaccctatgtattattatagctcttttattcattatttacatcaaaaatcacaaatttcaactatttcttttttttttttgaaaataagcgtagttatatataagggaaattagacctctcggtcattacacaaaatgttctccggtaaagagtcgatcggaatagctccgtacatcttgttgttaaaagcccaataagccacattatgggccataaaattacacgacctactaatattagagaaattacaaccaatgaaaaaaggagaagacttagtgcaaaaagagacatagttctctagagcccaatgggacgccttcccattaagagcgttgatcactatcctcgagtcactctccactattataaacttctgttggagctctatcgcaacggacatcgccaagcagcaggccgcagcttctccacagagagcatcactaaaccccaacca

SEQ ID NO: 331069 - DNA, 611 bp, Cannabis indica
aaaaaataataccttatgtaattctcatataataattttagccataaacttttaagcatggttaaatttatattttagtcccagagtactttttttttttgcttacttttagtcacaattattttattgcaactaaaagtgagttcttattttgtagtatttctctgattttgggactttcctcttatgctcacccatccaatccatcgtttgttcccattctatcttttcaaatactttcctcatttaaatggtgacttcctatagttcccttacccaaaaagaccctaataactagaaatttaattccatggattaccatctttatatataaattcctagcttatggatcatgattatgatatatatataggaagagttaacgcatgcaatatatatatatagagagaggatgatgatgagactttataatgaaataccgtacacgtaacgtttatatatatatagagaggaagagtttacctgggacgcgaactcaggacctctaacactcacacaatcatctataaccacttgagctagcctcaagtggttacgtaaccttatatatatgtatatattgttagacaatttatatgtataaactgaaa

SEQ ID NO: 331070 - DNA, 724 bp, Cannabis indica
agagagagagagagtatgcttatatagaaaatgtgaatatatggttaataattatcatgcttattaatcaattttatcaattatatatctttatttcttcaaagtgattcaagggaaatgtaaagtagcggagcaattagaggggccaaactatattataaatttaggtaataaatattttgaaaagactttattaaatgagatatttttgacaaaactcgtttcatatttgtatttattacacatatgaccctaataaaaaaagtgacagaaaaagtactttattttacgactttattgtaaccgtaccttttagttacaactaagtccgttaagtaccaacttagaaacacctgataatattttattgggcaatttattaaataaaaaaaaactttaacatttttctctaatttatttattagggtcatatgcgtaacaactgcaaatacaaaacgtttttcttacatattacaaaagtcattaataagtgaatttatgctaaaatttttggcgacttctctttcaatatatactagcaaataatcatttaaaagtccatttcatcttgttgttgagttagccttcactatattcatagttaaaaaaagatcactttgtgacagctatatagaaatgataatttgtgctgagtaatttgtggtatttatattacacttagtagctactaagtcttaaccccatgataaaatttgaaataatt

SEQ ID NO: 331071 - DNA, 1220 bp, Cannabis indica
ttttagccacaaattttgttgtgactaaaagtaagatttttggtactagtagtataagaagaactagaccccacaaactctaagaatctacaattaaccaaagacttgacttgttcaatagatcaagtatttctgatgattcttgcattcctacattaccaaatgatccaaaaaaagaggttatataaataattaggtgacattctgagtcaaccttgacctaaaccaacaagtttctaatcttatccaccaaggtatcaacatgcactactacaaaaagggatttttacttcagttttaaagtgacacataaacaatttgtgtcggttagggtaaccgacacaataaccgtaaacgtaaatagtcatattttttacttcatcttagaactgatgcaaaaaaaaattcgcttcaattgtaaaccgaagcaaaaagaaacaattatgcaccgacactaattgattttttgcttcgtttatgaaccgaagcaaaagaaattttttataaaaatgaacaatatcgcaccaccacactactacaacccaacaacaacaataatgacaataacaatagctaattaccaccaacacatgttgttgcaataaagatttaccatgtcatctatatagtgacaacatgaggctaaaagttacatgatacatattgatgtgccctatcaattgacattatcaattgctaaatgataatcttatataagtaaagaaactaatgcaattgcagcccatatcacatatatatgtatgagagacttacctccaataaaaaatcaattaactactgtattaaaaggggtacacaaagaagctacaaagttcaaacatcaaaacaacataaaacaaaggaaactagcaactcaactaaggcacaacacaacaataactgagaaccaaacaaaactatataaatagaataattgaacatcgatttaaaactgaaagctaaaatagatattgacataaatagcttgtagatataacagagaatatcaaaagaatttaacattgtagtactcaaatatatctacaataaacctattataaatgtatataaaaactaaagatgattataacatatttataaatactaaaacttctggacgataaattactgaaccagagtgggacattgctgcaagcaaaaagcagtcccaatccctagagagaattttactgttcctccagagcaccttaaccagtgca

SEQ ID NO: 331072 - DNA, 1575 bp, Cannabis indica
catagctgttgcatgcatgactaaaaagtaattttgaattcttattttataatctaaattatactaaaaatatttacttgaaaaatttgtgaagagtaaaataatagaattgtaactcattcatacactgaaagtaatcgaaaatacatatatatggtgattagaattcttttactattattaatttttaacatttttatttttattttttttttattttgctttcttcattgttttttttacttgatttcaaatacaaaatgcattatgtatgttttggtttggttttttttaataccaattttaaatgttttacttttattttatttgttacttaaagatttaaaatataaattttaaagacaaataaagggtgtctttataaattataaatggctctattaatataggtaaaaaaaagtctaacaaatggaaaataaagctaataataaattttctctactaactaaaaaacaaaagaaagtaatggattcaaagatcaatatgtaaagtatttttttaagtgtcattacttccaagatataggtttcaaattagtgatgtttcttttcttaattaattgactaatattattatcttatcacctaagcacctctccactttgaaccattacatcataataaataataataataagccggcattaaaattttaatgaaccttaaagaaaatttaagttaaaaaaaaatgaaaacgcaatacaacagaataagaatagaataaaatttaaatagtgttgaaattaggattacaaaagtatattgtatgtatttaattttatactatgtgaagaataaatttctaaaacttcgtattttttataaattatagtggattttctaaaaaaattacatgagagttgttataactagaataaacactatcatataaaacacatatattataatcaatttaagtgtctaaaacaaaatcatgtcacacccgatacgagaaaaggactacatcttaccggtagaattgctcgaggatattaagaggcggattatgattaaaagtgagtcttaaaagatgctttatttagtcaaaactatctgatttgaatgtaattagcatagcttaattatgcattttctcttgatttgattgttaaaagccaaatgatgatgattatatatacatagttttatgtttaattattattaattagtttcttttttatttttcggctaggtgtattattgacatccataaagttagtttaatagaagtaaaaattggtataatcatattgtcaaactagagatagataaatgggatacgtggctttcacttgagtcaaaagtaatgagaaaaataaataagaagaagagaaatacaatataatacaactcctttctacttcttataataataataaaggtaaatagtggcataagttcctaaagtttctaagtttttaagttggcataatctcaatgtttatttttagtcggcataagtacccaatgtttattataaaactgtaattttttttctaatttcgtcagtacaaactctgttattttcttaaataggccacatataaggtccaga

SEQ ID NO: 331073 - DNA, 735 bp, Cannabis indica
taatgctggtgataaaaacactaagttttttcaccgctttgcatctaaacgaaaaaaggctaacactattcgttttcttaagactgaggatggggagattgtaaacagtttggagggcattagtaatattgtctcttcttactttgccaatctttttcattctcaaggttgcgattcagcctctgttgagcaaattctttctgctttagatccccctctgaataattttgagattgactatttaggggaaccttttcgggctgaagaagtgaagaaagttgttttccagctttctggggacaaagctcatggtttagatggtcttaatgctttattttatcaaaaaaattggtcaactattggctaagatcttgttaaagctgtgcttgactgtcttaataatgatcgagacttttcttacattaatcagactttgattactcttatccctaagaaacaacatgctcattctattcaggattttaggcctattagcctatgtaatactctttataaagttatttctagggtcttagctaatcgcttaaaaattatattgggcaaggttgtttccccagcccaaagtgcttttgtttctggaagagttatctttgataatattcttttggctcaagaggttgtttatgctattaatcctaggaagcatggtaaattagggtgggctgcacttaaacttgatatggcgaaggcttttgatagggttgaatggcattt

SEQ ID NO: 331074 - DNA, 615 bp, Cannabis indica
atatatgtatagcatatcaaatataataaaaatacctaaaaataaaaaaatatcatataaattgatcaaacttaaaagtattatatttaagtaaacagtttttaaaatcccatactaaatataattttcttttaaaatatatcacaaatcaatcgtaaaacgttatccataaaaataaaataaaaagtagtgaacactactactacttaataatagtaatgcatacataaaaattctatgagactcgtacttaatagtatttatatgatattttagggtttgtttgttacgccgtattacactgtaggcgtattgtattgtatagtattatattaaattgtattttatgcaatatttttatgtaaaaatatatgtgatattaacttttatggatacctaaatatataatattttagtataaattaaagtttaatatagtatttataaaaaatataatattataatccaatcaatataatacaataaaatatactacgatttaatatgacgttacaaacgagcccttagagaatgatccctctcatattttttctatgagcccttcaaaaaattaaaaagctctatgcaaaaaattaaattcttatctctctctct

SEQ ID NO: 331075 - DNA, 892 bp, Cannabis indica
aaaatacatataaataaaaataaaaacaaaaatataactaaatatacgtgcaatgcacgtaacaataacctaggcttctatgttttacctttttaaataataataataattgctaggcttctattttatttacttatttatttattttattatttttagctttcactttatttatttatatatactagaactagaatgatactatgccaaagacttttctcccattttttattagcctaagttgatgtccaaaattatggttatctaacaaaaattattagtttaatgattttctttttaatttttacgttaaagttaacggttaaaattaacaccttaatcaattaataaattattattttcttaaaaaaaattagttttaaatatttaaatttaaaaaatatcagaaacattagacatattttcttatataaatcttaatttaaattaaattagacattaatttaattaattagttatattttataaaaaatttgttagttatattatttaaaatatctaaacttatttgcttattttattgtttaataaaattatttagatatattttttttataaataaatttaaaactagattaaattttatatattaaaaaaatataattgaattgtattatatttaattttattattatttaaattaataattaggtaatagtaactctaagcaaatatgcattgcatgtcattaatacctagttatattaaatgtggctatatagtataaattgttgtttttttatttaaaaattttataattcaaaattaaatcattacatctctctttccttttgtcttatattaaatgtatctatatcacataaagtatttttttaacattataattcaaatttaaactcattgcacatat

SEQ ID NO: 331076 - DNA, 932 bp, Cannabis indica
ggagtgacgaacccaacatttttgatatgtggggacttaattgttataaaaatttttatatttactttaaataaaaattgtaaattttgtacggtacctttttactattttattgtataattattgggttaataccgttttggatcttatgttttgcaaaagttatcgactggactatcttttttgtcaaataaaaaattgactctatattttctaaaatattacaaataggagtctcagcttaaaatttttagacaatttttttaatataaccaacttgatgacaattcctagcacgaacaaatgtagaaaacacaactagttttgtaataacgctttagatcagattattaataagttttttttgacaaaaaatcaatttagggtactatttagtattattttgaaaaaatacaaggtctaatttgtatttaacaaagtagaatgtccaatcaataatttttacaaaatacaagatctaaaatagtatttactcataattatttatctaaaaagaagatatttaattttttaaaatgtaatttttttaatggggttgtagcccccacaccactattagtgtgtccaattatcagcaagtttagattagacatagctatatgtatgcatgtctttgcacatcgtttaggtttggttcaaatgaatgggagtaggaatgtaattattattcctaaaggaaagtcattcaagtgtttgatttctttattgtgattggaaaattcattccaatagaaattataatttatgtaaattaaagaattgcttttcttaaataaaatgagttagaatactcattccatacaaattaaaaattactttaccctatttgcccttctttcatatatgtatatatattgttgacatgatttttcgtcaatagattaagtgttgggtttttgtgccctaaataa

SEQ ID NO: 331077 - DNA, 1551 bp, Cannabis indica
gctatttccattcttttcttcttttctctaagtgcttgtggtaggggaaataagcttttggacaaaggtgtaagactttgttcaagttttgtgattcccctattatacacttgtggtgtatgtggtgttgagattgctctcacatctcttttatatatataatatatatatattgtgattcatgtgtaacattatttaatctatatttttgtcctttgtattatttgtcattgagttgtaatcatgttggtttgatatttctattggagcacaacaattttccaacagaaagattggcatccatagctgtggagacagcctttgaaccaaaaaaaactgtttcattaaggagttgtaaggtgaaaggtctctcagaaataaagattcctactttggatctagaaatttcgagaccaagaaagaatctcaagttgccaaggtctttttgctaaaatttcaaagttaagaaagactttaaaaattagttgcctaagaaatcacttgaaattttgagttgagaaaggctctgataccatattagtgaaacaaaattattgaactttattaatgaatacaatgtatatatatacatgtggaaagagatacttcagcaaacaactaataacaaaattagttatgaaactaactaattataactaacagagctaataactaataaccaaccaacaataactatatctaagacacaggtataaaaaatttggcacacgtgaaattttaacattatatttgatacactaaattatacttaagaatttctttcaaataattatttggatgtctcatagaataatacattatcaaatttattctaacaactggattcctctagtatcgttttctgttttgtcagctcttgtttgaattaatggatcaaacaaggtttctgtgttacgagatgcttcgggcaagggatgggatcatgtattaattcagtgtattttttaggtaaataaaacaggagctatgatgtgtcggataagattatttggaactttgagaattcgtattgataatctgtcaaaagtggttatttgcttgctcttcataattaggtcgtgcttcgtgattctctatttggtggtttgttggatggtggaaaaagatggtctcttaatcttctaccaaaggttagactttttgctttgcagtgacaactatttacttctcggttggaaattataattttgctttgtataatgttaaaatatatatacaatcaactatctcaaattctatttttattatcttaaaatatatatatacgggtagatacttgtcataactagaccacaatataataaaaaaacattataatttttttaaatactaaaaatataaataccttagtaagtactaggacaaaaatgacacattagttgctccctaattatgaatgaaaatatattatattatagtgtgtggtgtttttctagaatcaattactaatacatcatttgatattacactaaaataatattttattcacaacatataaataataatttataattagtcacaacttattta

SEQ ID NO: 331078 - DNA, 589 bp, Cannabis indica
actactgactgtcacaataattttctactaatgcacatataatcataaaataataactaacttactaataactgctaattatatactaattttatgtttaaatacacggttattacaattatccctccgttaaaaagattttgtcctaaaaattaacttgaacaactgcgggtattgaaccctcatgttagattctgttggtttttaggattcatatcaaagtcgttgcgggagtagagaagtatggataaagggatttttttgaaaaaataaattgttgaatttgatatgaaccttaaaccctgaatgtcagcacaatacaacataaattaaatctaactacttggaataaggattttatctcttgatgtctatcaaggaatccttgtatctttttgtataattgttcgatcatcaaatccaaagctttatggacttgatgaaaaatctacaccagatcttccacatcgataagatgaataaacttttttgttacagtgtgtactcaactcatgagtcactataacctgagattgagaaaaacaccaattctcatagaagagagagagagataagagagagagagaga

SEQ ID NO: 331079 - DNA, 1580 bp, Cannabis indica
atttaatttattatttgtcattggatcaaaacttaatgatttaatatgtttaaaattagtatttataaaatttctttagactattgatggtgtcatacgcatagctataaatgtgtgtgtgctaatccggctcatatttttggacttttttaaaatacaggtcgtacagtatcgagccatataaaaatataggttgtaatcgtgccgtgtcataaaaaaatatgagtcatatcgtgtcgtgcaacaattttatagggtaggcctagcatgacccgtaagtctaataattttgtagggtgctcagattcgtggcatgttcagatttgtgtcatattttattcgggtcagcccatttttcttaaatagaccaaccagctttttatacgggctcaaattcatgctccagatttttatatttttattacacttaatatgctaaatactaaaatatatgtgtattttataattttaattactattatattttttttcaataattatatgcaattatataaaatatacttgtaatttttataattttattattattattttaattgataaataaatatttatcattgttattattattaaactagaaaacaaaccgcgctttgtgtgtaattgtattttgttcaatgataattaagtcataaaattatataaaacttcaaattttgatatttttatataactattgagatcgttatactgtatttaaggttttttttgtccaattttagtaaaaagagtctaacataaatgaaagtttaaggggcatgatttagtacgtgtcaaagttcgaggggcatgatttggtagttatcaaagtttgggagcatgatttagtacatataaacaatcactgaaatagattaattgaatgaaattagataaaagtccttaaatctaacaatttcaatagttcagggataatttttaatcgccaaaaaagttcaagggacatgatttggtgcatgtaaaagttcaggggacaaaatcttaattagccttaataacatgagtaaatattttactaaattttaactttttactcttaataatataataaaaatgaattaatattgtaaaattattttaaatttaagaccgtcgcctatattatagggtacggtttaaaaccgtcgcctataccttcttataggcgacatttttaaaccgtcgtgaagtccacattaacgacgatttttaaccgtcgcttattttatccgttttgcgacggtcgtataggcgaggttatagagttcgacatgaatactttaaacgacggtttaaaaaggtcgagaaaaaccatttctgtaacagtgggtcatgctcgtgtcttttgactttgtaccaatttcgtatcttgtctgcctaacccatatttacaacactactatgcatgtgggtattgtgcatagatgctctaagagacttttgttagacttttatttgggcttacattaaattttattggtttttattaaaacttgggttgattggatagttctttgctgtattagcccatgtgttggtgatcaattgttaatgggcttagcatctgtgagtaaagtcta

SEQ ID NO: 331080 - DNA, 594 bp, Cannabis indica
ttttctgtcctttgtattaagttgtatttagtcttaatatcagtgtaagtggaggtttaatccaacaattatgttttggatatattattttttctttgttctgtatagtctccttagtaaaatacagcaaatgcaccaaatttaaacaaaagatgaaaaaaaaaacatcaaaactagcccttaatcattttactatttctattactcattgtaaaagattttataatgttgtgactcattcttttgctcatttggttttgtctcttgattattctcgagtttggtggctagtttaccgaaaaagaaaattttgatatatatatgggtaaatggcgccaaaattcccaaaatttttattttcgtttcacttaacccccaaaatcgaaatttgagtggtaaaacccccaatactcgtattctgttagcaatttaacacttccgtccaaatttaggagttaactgccaggttggacttgacacaatgtacacgtggcacaattttattggtccacgtaaaaaattatttaaaaaaattaaaaaattaaaataaaattaatttgaaatttaaaaataaaaaattataaataaaaaata

SEQ ID NO: 331081 - DNA, 855 bp, Cannabis indica
aattaaaattataaaaattcaaatataaaacaccctactataaaaataaaaatgattgtaccatatctagattgaacttaaattgttctttactttgcaaagctgtattagtttctaaaccatcattaagacaataattattctcaaaaggaatcacatattgaagtatgcagcatttaccattttagtatgcatagcttgtaggatttgggaagtttgagacatcatggcttcgatgcttgaaatttttatggaagaacgttaggtttagttttcccttttaaaataatttctctggaagaaagtttatataccatttaatttaagtgctaaagtatctttgtttctagtactacagagcaatttgaacgttggcctccgaagtattggtcacattggttatgcaaccatcgattaattgacatagaagttttggactgttgggaataaaggatagtattccaattccccttcaggatcaatatttgcgggaaaatacaatggggactccaaaatttctttctgatgtgaaagatcagtcaaagctgcaatcacagagcatattcagaatttttggatatcttccaatgtaaatagtactttatgaataataatcaaaggactaaatgcacgccaagaaattatctcgtggctaataaaaaccacggcaaaccttccactataacaataataatgggtacacaatattacactctcaagttttgacaaatacttgaggaatacactcaaatctctcacactcactagtgtggcaatctcaccatctctctacaaaatatttctcataattttgtaggaactctctattagaatatttctaattaaggaaataaa

SEQ ID NO: 331082 - DNA, 876 bp, Cannabis indica
aaaaaaatatggcccatatgttcatcatagcatagaaacaaatctggttacttcaagtgggcctactatcacaatatgtgaaacaggctaactttacacatcctatttttggaagaaattatagttgaagatttatacctcttttagtgaaccacaccatacttaatggttactaataaactatttagtaaactgtaacaccatcttgatgggagatataaaaattgtgaagtatttacaaaaaaaaaaaagtaattttataatatatttatttaagtttttatcattttgtaaaatttaatacaaaatttaatgtctaataaatgtttttattaaaaatataaaataataatatcataaattttactatataaaataataaaaaaataaacataaaaaatttataatttaatgcaatagctaaatttaataataaaatattaaaattagaaaaaaaaaaagtaaatataaaaataatagtatttactgtgatgtaaatttttaatcatgacatattgtaatttaaatttagattaacttttgctatttgtcaaattttgaattaatttctaacacacaattatagcaaaatttttacaaataaactatatttaataataaatcattaatggagaagctctaaaatataatggtattagttagtaaatggtgccatcattagcggcaacataagatgtgttggggttcgcctaggctatgggctttggtggctggcggatctgtgcgcaactactttacaaactaaatgtagagtggaaagataagattttaaagattcttatgataaatatggcacatttaagtttgactaatttatatggtattttttttgtttttaagtctttttatggtatt

SEQ ID NO: 331083 - DNA, 856 bp, Cannabis indica
gtacatacagtacattgtataaaattattatatggaaaatattttttttatatattttttttagttttaagtttattgtctttttaattaaaaaataattaaattaaatttaaaaaatttcatacactaattgacaataataacattaggtaataaataaaaaacaaattttggaaaaaaaccataaaatcagatattccttctaaattttttttttttaaaaaaaataacatgatatagtaacactcattatgggctgctattattatgatatagtgacactcaatgaggctatagtaacgctcaattagagattttaaaatattttattgacaccaccaaagtgtcactatatactatttttccagtcacccacattagtgacgcacagtgaagtgttactaaaatattttagagttactcaacaagtgtcactgaaactcatttttgtagtagtgccattatattatacatctaattttgaaattataagattttattatttttattattaatgtaaccatttatttaattttttaaaaaataaattattattttagttgacactaactcaaaaaggaagaaaaaaaaagagttaaaagaatgaagttgtaacaaataaatttcatgaaaaaaaacaaatagtgtaataatacaaaaaaataatcaagttgtcaaaactaagtaaaaaaataatttcgtaatacaaaaacaagctgaggagtttatattgtattgtatattgtaacgaggttaatgtcttgttatttttgtattgttttataggtgtcttttcgatgttttatagtttttttttaggttatttagttttttttttgttttattaaaatacaat

SEQ ID NO: 331084 - DNA, 873 bp, Cannabis indica
cttttatctctcacactatcagtaattacaagaatgaactcaaagcattagtgtctaagatgagctagtttaggctatttatacttaaatggtctgagtactaaaatccgtaactaatctaactaatacacaactaactaaactaacgcattagctaactaactggttttctaatcaaaacacataacaaagccatcccgcaaaagagttgccaccaatctctatcgctgaaatactcgccatctgtcaatgaagtcttattattatttttagttatgtaaataatataaaatgattataatttcttctgtttagtaaacaatacaattaaaatattatttttaattattttatattttacctattcaaatacgtgttaagattactagctttttatattattagacagtagttcaatttcatttggagaataatatttttaaagtagattattatttttttttttcaaatcataaactaaattattttaagaatttaattaaggaattattacatgaaaaatacaaattaatactttattcacaaaaatactttcataaggcgtgaacaacatttatacctttaatgtgcttttaattaccaaaatacctcttatactatcacttacacacaatcggacgaaggttgttgggtggttgaccgaaggttgcgtcagacgaatgtttcaattctaggaagcatggattgtgagttgctgttgaaactgtaatgtaacagttatatttgttgcgggccaactaacgtgcaccttaattacaactaaaaatataaaatataaatgtatatatgtaagaaactattagtcagtattttttttgtcactgatcgataattacttgtaccttaatagta

SEQ ID NO: 331085 - DNA, 747 bp, Cannabis indica
gagccattattctatgggtgtaagggccccaatgaaggcttgaagcggaacgttatagaaatagtagagagagagagagagagagagagagagagagagtatgtgtgtgtatgtgatttctgttctcgtttgtatgtgtgtgtactatattgtgttaggtgtatatgtttgctagggttagggtaaaggtaagagtgaaagtagtagcctaatatttaaagcccatactaatatattttttttatgttattgggccgacccgtgttaggtttattgggttgcaattttccaagaccattttcgacctataactcacaggttgtaatttttttcaaaccaaataaactccaacccataattatatgggttgatcaacccattttcggtttggattggctgggttagtcggcccaacgaattaaatgatcagccctaataatatccttatatattcttaagttatatatgagcaaaaataatgtctatctaaaaaagatttacatctagcaaaatatatatatataaaattttaattcacttacattcaagaaattgtaaaaatctaaaaaaaaaattgagaatccgcacaaagcaacaccaatcattcaaactactaacacgatttgaataggaaaattttattttacatgcttaaaaaagtacccctaacaaaatttacctcttattaatttttacaattaaatactattgttttcaatttctacccaaaataccctctctctctct

SEQ ID NO: 331086 - DNA, 1038 bp, Cannabis indica
ctggtttccactcatacttcagcatcactgtggtagttgacccgaattcattttcaaattccagaaagtctggaaatttctgatccatcatcacctcaaccataactcttgcatagctcaaccgctctctctccctagtaattgagtcaagcagaaccaacttcccaacctgacttacaatcttagacagtgttccatgaccccaatatttcaattccaactcctctaattgaatccatatgggcacacacttcacattttctttcttaaagttttcatgggggttccaaggcttcattatcacaggcctcctattgaagaaaatataccctccattcagaatctgatctctatattctatagagctaaatcggatgatgaacactccatatgctaatagtttcaccttatcaattttatctttccatattctactaacaaaaccttcaagaacatgtaatggaggattagcccccaatacataacaaacaatagacggtgtccagaaagagacttcctcttcaatatcctcaaatgtgattctaactctactgctgttatcaccagaattcctaaaagaattttcaagattcctcataacagagtcagatcgcaaagttgggggaattggagatttaccttgtgccacatcactgttacattgatcattggctcgtaggaagtgcacaaaatcattccgaacctcctcctgcttctgaatcctttccagagaagatttaggcgacaaaatcgggttagagcgatcatgaatcgcagtctcctccgccatcgcatcctcttcatccgtcagctccaacgcctcaatttcagcaacctcttcttccctaacaagtcgaacagctttagatccattcttcactcccttcttcctgtttgctttagtgatcgattgagctttcccctgagattttgacctcgttttagccatggcaccagcttctcagctgcaaggcaagaaccacgagagaaaacttctaccgttaacaaaatttaaaagttaacaaaaataccttattt

SEQ ID NO: 331087 - DNA, 820 bp, Cannabis indica
aacaaaaattaatataataaatttctcaagaaaaatttacataagaacacataatatagaaattaattactcatttatcatacaaaattaatataccccaaattttagtaataagtaatgtatgatatatatttataatttgttctatatctaattataatcatattgctttaattgaaatgtattttcttttttataaaattaattttatatgtatttccttcattatttattttacttttatttttaaaagagttattaaataaagaaagtataattttttttttttttattttattgaacgtgaacaatttactaatgatttatttagttactatttgttattgttatcttcttgttattattttttatttttagctttcaaaaaattatatgagttgtcacatataattaatactcttaagaaaaataaggtataaaaagaagtattcaatatgatttaataatataaatgctctgttatatttcattttgactacttattgatgttacattatataatttggtatttgttggtatttaaactaatttgttatattatacttaatactatcataaatataatctcctttgtccgttctgcaatagagaagaagaaacaatcctacacgtccttgttgaatgtccttttgccaattcttgttggaataggtcaggagttttgacagggagaggcctcaaagacaagcttcacagtctggaatcttgttgatgtgaattcttcttctagtgtggaagaggctttaatgatcaactgggctatatggaatgcccgtaatgacctgttatggaatcaaaa

SEQ ID NO: 331088 - DNA, 693 bp, Cannabis indica
gctggtaagttcattaagttgaataactgcacatacagactatttgcacagcaaaaatgagcactattacagtataaacatttgaggtgacaccagaatataacaaccgagtttatcaatctaaagtgctagtgcaagtgttcctcctcgaatcacaaaaaaaaaaaacgaacagcatcatcatttacaataggctccctggaagcaggacgttgcatccaaaagaaattttctagttgattgaagaaaaccctctgagagtgggacgttgccccagttgtggtattctttcagtggctaagcctcctcctaagtatgggacgctgtacttagcacaggtttagtccaatctatcttttttctttttcctcccttggagttttttctttgacaaggttttatgagttgaaatcatcaaatcaggttcttcaacaaccaatgatttcgcccttatacagaaaatctaacaggtttctccacactacttatcgacaatgattcatctcacttatgatcataaaatgaatttatgtttgagcaccaagcgcacaagcaacaacccactacacctcaacagtggtttatctcactcacagcaggtaacttcaacatacaaaacttcaatgttttcactccaatcactaagagatcaacattgggggggcaagagcagtcaagctcagacagtgtcaa

SEQ ID NO: 331089 - DNA, 758 bp, Cannabis indica
aaccccatcgtgaatggggcattcagaatttatgcaatcggtcatcaaatttcattggcctacaaccacagtaatcttgagcagaaagaacgtgatgaatagtcaatggagacttacaagttctagaagtgctggcgttaggagctccagtgttaggaaccgagaaagggaattttggtcgagaggacgcctgttctttccccgcttctactcggaggatcctcagcagcttgggcattgctgtaggcgaactcttgttccttcctgaataggtatttcttgtattcatcttccacggaggcgatgatgtcctctcgaagcaccttctcggtctcagggttgtggacattagggcaaaaaaccttggataagttaaaatcttctactgagtggccttcggaaatcaacttagccctcctgcagttagtagtcgtgaccaagtcccctacattcaacccatccttatcataattggcgaaaacttttgcatgttgaaggaggagttaggtaggggcaatacggtgcataggcggggccctaacccactcagtgaacaactctggacgctcgacgggtttgaagcaagaggagaagaagaatcggtggtggtactcctttacgttcttctagaagttgtaaggcaccggaccctcgttggcagaatgggcctagagcttgaagaatccatctttaagcttgtcccccttcttggggatagataaaagttcgtaaaaataaaaaatttcagccggactggg

SEQ ID NO: 331090 - DNA, 437 bp, Cannabis indica
  modified_base (44)..(44): a, c, t, g, unknown or other
caaccttctttagttataaagttaactactaccaataacattanactatacgttacaagtagtaatacaagaacttaaaaaatttaaataaagttaaagaaacaacaataaactaaataaataaaataagaaacaaacaattataacaaaactaaatacaacaaactaaataattaataaaactaaccaataaactacaaataaatataattattatatattattattttattattttgttttcttattttactactttaaacttgtttttttttttttttttttgattttttacggaattccacatagaaacctctattgcaactaacagagcaacctaaatcgtaaccaaaattcgtatagcaacccacatggaaaccacgggagaaatcacctgagattagtttgagattgatatcgaataatcgatccaatcc

SEQ ID NO: 331091 - DNA, 746 bp, Cannabis indica
atttactaaccaaatataataacaccaatattactataataaaacaaatcattcacataattattccttaagttacagaaatctaaattaaaataaagaactaaactttaaataaaattaatatttacgtgcctcggcacgtaacttctacctagttatatataatatatgtgtataaaagacaaaataatataatatgggggaagatgcaaaatgacataacaatagaggggttaaagtgcaataatattttacttaaagaaaactgcagtttctaggtaagtgacatgtgtttattttagttaagaactcaaacataagtcaataacaaaagtcaaaacccaaccacacgtcaagaatgaggactgttgaccaaaacctgaattaataaaactagtatacttgaaagtgaaacctttatagctttgtcgccttagaccaaagaaaagaaaagagaaaaaaactcagaaatgttaatgtgtaccttaatgtgccaagtattatgcattgttgttattattataattaagtactcatatatatattttttaaatttaataaaattatgtataaaattattaaccacatataatatgttactatcacgttatatataaatatttatatgactaaatattatgttaaattatgtattttataaaaataattggttagattttttattttgttaaatgataatatgaatatttattttttaaaatagtaaaaataagatctgaactcaa

SEQ ID NO: 331092 - DNA, 1736 bp, Cannabis indica
tctctctctctctctcaccttaccctcattatcagtttttatcgtttgctgtgacgtaatgtcacaattctttattgatgacgtgtcttaatctttaccgttacatctatttttttttattatttttttttttgaaaagaacctgtatccattatgaaaaacatcaagtacaagatacatgatacaattaagtttggacagaagggttcatccataaggttcctgctctaagcctaaagctgtcttagctaaacaatgggcagcatgatttgcccctcttaagatgtagctaagagaaacattagggaagtaagagagcaagctcttgatttcaatgacaaaagggttgatttcaatgacaaaagggttaagatgaagattatgagtttcatttttacaaatataattgactaacacattacaatctgaaacaatactatccggataaaaagagtgttcatggcaccaagctaaagccgaataaagtgcttgtgcttccattagcaaaggtgtagtgattccactcctaggcttggccaagtttaggagaactttacctgaattggtatggatggtcatgccaaagcccattttgaggagttgggaatcttgggcagcgtccacaaaaagccaatgatggaagggtggagatgatgtgcagctatcgttgggtcggaaatgatcatcatgagctggagaaggagtgggagtcttcttgttgcagaccgtatagtgctcaaaataggctgaggcttcacgaagaatctgatctggggaaagggatagaccctcatgaagccaaatattcctgcagttccagagcttccacagcaaacaaacaaagaaatgataatgtccagtaataaattcagtggcagcaagatataataagtccatacagttaagtgaagagtgtgcagaaataaaagtattaaaatcagttaatttccataccttctgggcagcgaggcatctgaagagagcgtgttctagggtctcatcgtgatagtgacatcggctgcaatggggggagtatagagtctttctgttgaacaggtttcggctagtagggaggatatcataacagacacgccaaaggaaatgtttaatttaggaggcaaagaagggtccaaagatttttccactaggcatctaaggacttgtgatccgagggggtaggttcattttgatgaagttggctatgggcaaggtggtaacctgaattgactgtgtacgaaccatgaggggtgagggaccaaaagtgtgtatccagagtggagatggtatgaaggggaataaccattatagcttgtgaaatgtctgtaggaaaaagggattggataagggcatgattccattgtttgttaggtgtgataaggtctgccactgtcatatcggcatttgaatgatacctcaaataatgcagtttaccataaccaggaatcgaagcatcattgatgttgttgagtgaatttcgcaacaccaaattatattgtattattaataacaagaagaattttatgtgtaaagacaagtgcgagtattcaacctagaatggcgagtactcgactgggaatgggaaacaatcaacgaaagctggaaaataacaataagacagagaattatagtggttcagtcagattatgatctgcttagtccactgtagcaagggattcgtaggtgccatttcacggtggatcccccgtttatatcaaaagcaggtgtccaatcggtta

SEQ ID NO: 331093 - DNA, 858 bp, Cannabis indica
ctcgggagagacctgacacatcccggagtgccttcaggctatgctcgcttccgggagtacctcgtactccgggtatatcctccgggacccatgcgaataacgcttcctggtgtcataaaaagacttagcagttcttcccaagtaatttgatccacgtgtcccctcttgattggtccacgtacattgggcgattttaggagcaacagttatcatatcattgttatacattataggaagatataacttaaaatcaacacaaataggtctattaaatgtatttaccaagttatttataataaaataaaagaaaattacaatatcaactcaactaagtcaccaagattagacactaaactagtgtgaagtatattagttttacaatctaaactaaatgtttacttatgacaatcagctaataataaaactaaacatcttataattctcaatcacaaaaggttaaaatacataacatagagctaataaagatttaaaaatctccttatttgatgatcaaataaaaaaatcaagatgttcttgccaaaatgactagatatcatcgatgagacatacattaatccataatagtgatggagaagcccccaacagcaccacaaagaacccatattgaacactaaacccttatcactcaagtatcctttaattttgtaatccatttaatctctgtgaacctctagtacccgatcttaaagtatatagaacttaagacaaaattaaattattggactcctatatatagtttaaattattaacaaaattgtaattctagtgtaatagtaagactttctctaaagttcaatcgttcataaccacacattaaatattttttagaaaaataaa

SEQ ID NO: 331094 - DNA, 839 bp, Cannabis indica
acttgatttgttaagtgagacagaaaaattgagaaaaaaaccttgtagtactccaatgaatcctattgtgcaccttacaagaggtgggaaaccatttgaagaccctaaaaagtatcgcaggttagttgaaaaattgaattatcttactgtgactcgtccagatattgtattctctgttagtgtggttagtcagtttatgtcatctccaataattcatcattgaacaacattagagcaaattttgagttatttgaaaggagctcctaaacgaggcatcatgtacacagatcatgggcacactcatattgagtgtttctcaaatgaagattggggaggttccaaggtagatagaagatccacttcaagtttctgtatttttgttggagagaatttggtttcttggaagagtaagaagcagaatgttgtgtcacgatccagtgcaaagttagaatatagagctatagcacaatcattgtgtgaggtgatatagatatatcagctattagctgaagtgggactcaaaattttagtaccagcaagattgtggtgtgataatgaagctactctttatatgacatctacgcctgtgttccataagcggactaaacacaaggaaattgattgtcaatttcttcatgagaacattgagtaagatttaaattctacaggatatgtgaagactagagaacaaactaaggtacatcttcacaaaatctcttaatggggggcggattgattatttttgtaacaaggtggggatgaccaacatatatgcttcagcttgagagagagtgttagatataatatatatatatatatatattagctgtaaaattagt

SEQ ID NO: 331095 - DNA, 731 bp, Cannabis indica
taaaattaaaaaataaaaataaaaattatagaacactactttgtttttcatttttaaaataaaaaaataaaattgtgttatagaacacatttttttttgttaaaaaaaaaacagaaatttaaaaacataaattttacttttatttttgtgattaaaaaattaataaataaaagtattaccaaatgtgtcttaattattcgtttgttttttttctaataaaaatgaatcgacaactgccaaataatacgggaaaaatgtcaaatatataacggtgatccaatccaccagaccatagaaccatttacagaaagagcaaatttagtcaaatcatgtgttacaaaattagcggacctattacatattgctattgtgtaatttaagggctcgtttgatattgccgtataaaggtcatattatactaaataattaatagcactatactaaataattaatagcactatgtttgaataaaacaattgtattaattatgacaactaatatttttaatataatataagttgtattatttaatacataacaaatggtttgtattagcttatattataatatttacataggatctggggtcaaccccaacctccgacacagatccaggacttagaccaaaacccggacccgtacccaaactcatgacctagattcggacgcagacgcaaatgcagacttggatgcagacctgggcgcaatcccagacccagactcggacccag

SEQ ID NO: 331096 - DNA, 568 bp, Cannabis indica
agtttaaattttcactgaattaattttaaattgtaatttttttaatcaatttatttgacttaatttggacggtttgtgtgtgttttttttttaacaccaattagtactaaattatatatgatactaattaatatcatcatataacaccaacaaatagataaaagtaagagaacatatattgttaaaacaatatatttacattaaacacccaacttcattaaactttcaaatgaaaattaaaaagaaaagaaaagaaaaaagaaaaaagtcttacaaaagaaaagatttagctggataatagttaattagaaaaaacaaaactaaaagagaaaataaaataaatgcttaagaaaaaaaatattattaataaaagtaaataagtgataaaatagttattaaagtttaaaatttggttaattaagctattcgatattataatatgggtataataaaatttatattatgtattaattatttgtattattttaaaagtaaatagagtttccattaataggtaaaccaaatgtagtttattcagggctggccctgagttgaaatgggctataag

SEQ ID NO: 331097 - DNA, 651 bp, Cannabis indica
caatggatagaaccgatccaatttaatatccattaggatgctagatcgattggatgactgaaattaattggattagatcggatggtaaaatctatcatctaatatataattggattggatttggataggcttaaaaatagtagatgtgatccaataaacatctttactaacaatcttctttattcacattttaacctatgccactttctctaaaaatatcaattgaatgtattgtatggccaactctaataaatactaaaatgttaaatttgttgagatttaacacgaaattatttttgatcacattctaaaagctatgctaaatatatagtgtcccaataatattagtgtgacactatagactacactatatcattttttattagtttttaatttttaaataaagaaaatttgtaataaaagtcctcaaaagatcactttaatgcagattagtttctaactttcaaaaatagcggcaatagtcctcaagattatgcttttgtttgttcgttagtcttaattttaactgatccgtttacttatttaaaattgccacatgtcaaagtattattggtctaaattagtattttaatttaaaaaaataaaaataaataaactatttaaaaattaatttctttttctttttttttt

SEQ ID NO: 331098 - DNA, 553 bp, Cannabis indica
ggaaccctaatgggagtcagtttcccagccattacattccgagctccctcccaatgccaccgcgaaactcctttatcaactttcaccataaacggagcaagaacaatgagtggatctcgaagaaggtcttacaaatccaatgccacatcatcatcatcatgatcatcggttgcagagagaccaaggtagtggtggagtctttgcagagatgagaacgatgcgaaacccacaacttcgttaagagattttttggagaatgaaaggagatttggtgacggagctttttacggtgtgacggctgagcttgaaggtgttgttgtagttgacgatgatgatgattggaggaggaatggaaggttgttgtttgctgatgggagggttcttccgccggctcagacgaagatggagatttcttcatcttcttctccgtcgtctacgacggcgattgggttctgtcgataggaagaagaagaagaatggtagagaagaagaaagagaaagaaaaagaaaaagagaaaagaaaaagaaaaagaaaaagaaaaagaaaaaggaa

SEQ ID NO: 331099 - DNA, 585 bp, Cannabis indica
attatttcttcatactaatattatttattttataatataagagaaaatgttatgattttagtgtaggtgtaaaatatatcaatttgactacaccaataaaattaagcatcattggctttagattttaaggtagtttttttttttttagtgatggcaatcgaatgagttctattatgagattggtagggcttgactcaagaatttggttcattaatgtgttataaatgtaaatatgccttatttgatttaattgtagtagtagtaaccatttatcactatcaattttttttgaaaaaaaaaatctataaaatctagaaatatagaaaaatgcataaaaatgcacaaatttaacaatctcgcaattaaaaaaaaacatataaacatgagcaaaacatggactaaagcatgataaaacacaataaataagaagaggaaattacactttataccctttttatattgtcctcttttatttttaccttctttttaaaatctatcatttttatcttttttttaaatattgtaccaattttgcccctgtcacttcaagatactctctatgtgattctcttatgtaagggtatt

SEQ ID NO: 331100 - DNA, 893 bp, Cannabis indica
catcttgtaaccaagcaatttttgctttttgttggaggaatgaggcataattttctatgctaaaatcaggttttcccgagcctctctttcctatccagtcagtgttgtattcatcggctgctggtgtatttttgtctgccattcatccaattccagctgaagttttgctacagtatgctgcaagttattaaatcttccttgttaatctcgttcaatttgatctcgaaatgcttgagctttgtaaccatttgaaacataggagagcccattatcttttgtgtccaacactctttaagacagccatcatatcttgaatgtgatttccacattcaaaaatatttgaaaggcttcttgcccgaagcactattaggatggagtgtaagaacacctggagagtggtcaaatagtcctcattcatgtatactacttcagcatggtcatatctagttaatcaagaatgacttggccaacatcctatcaatgttagaaaaattactatcctctccttgttgcttgttagaccaagtgtagtagttcccactacgtcttaatatcttccaattggcattgagtcacacaattcaaaaaagctgaatccgggtagtacttcaccttattcccaattctctcttctttagctagtatgtcattaaaatcccccatcaggcaccaattttcattagtatttacttcacctaaactcttccaaagtaaccccttttcatttcgattatttgaagcatatatcacagttatgaagcttgaaaaaaatccatctattgttgatacttttagatgcataagttgacctgtgcatctaattatatcaacaataaatcttaggataaataccattttggaccctgtgttttgcaaaagttacagattggacc

SEQ ID NO: 331101 - DNA, 761 bp, Cannabis indica
tgttctatgttatatacaaatagatcttgggttaattgttaatttatctaacaagtatacctttcaagaaaatatctaaaatccaaaatccttgataaaaatagtaacacttaccagatcctggatccttaagcttttcaagcttggccagaatttcatcaatagactcttctctctctccttctttgttcttagtaacaattgatatttccattaggaataatgacacaatatgaaagctcaattatatgtacaaaatttaatgaatatagtgatgaatgactaatactatactcacattttcagttctttatataacactgaatcattaataatgataataaaaaaaattataagaactttttttttggagaattgaatattatatatcatcaaatttaattaatacaacacgtgaataggtgttataataatttgaataataccattattgtctcttttttattattatttattaacaataagaccattattgttaaagtgaagtgtcatgatttggtagttaagaaaataataataagatttttgtgtcgtgaattttttacaatattaaattgtatacattttattaatattatacttagaaatataatttttagggtaatgtgatccttccatcgtattctattcaatcaatatatatatatatactagatgaaagttacgtagcgagccacgtaaatattagttttatttaagatgtttttgtttaagaattcggtaactaattgtaaattatt

SEQ ID NO: 331102 - DNA, 696 bp, Cannabis indica
agtagtttttttttttaaataaaaaggactttttaaatgccttgaggttacgatcatatttttctcattttaaaactgcatgctttatttttagcaatttataacttcaaggtaatattattttagcatttattactctgacctttctctttccaatagttcccatccgttcgatctatcatcattgtgatcgaacaatttttatcttttgggtataaaatccaaaatccctttaattttgccattttcacccacgaagctctcgaaactcaaaagaatctcacccatcttttttctaagatttcatgccctcactgtccctcacatattttcttcgaatttcgattgatttcattttttaatcccaaaaattccatggtccaggccccttgcaccaggagttttcttcaagaagcccttcaagacccaaattttttcgtcgaacctgttacacccaaaattcggctagaggacacgtgtcaagattaagggaatatgaatcaatgcaattgcttttcatggaataactcattaattacgtaagtatcagagtatatttgtaacccgctgactgtaaggtcttaggcgaggaattaatgtacaaactgacacttagtatattagcgagaaaccatatgtcgctaaatgcgaatagcgaggcaccaaagaaagcgacatgtatcaatcgtgaaagtc

SEQ ID NO: 331103 - DNA, 863 bp, Cannabis indica
cactatatttatatatatatatatatctatataccaccactactacttgatatatatatataatttataaaatatataacacgaaaattgtatatgaaaataaactaaccccaaaatccaaagcataatacgatcaagatagatagatatatattgtgggacatatatatagctagatatataaatatatatatatttatgcatatattacaatatagtgttttctaattgtattgtatattataagtgggattggaataatatttaatcgaggagatctttagttttgaatcttcttatattacaagacaaaatacatattatataatatatatcatatcatttttagtactaaccaccgtacgtacgtatacattttggcattttcttacttttccaaaggatatatatacactcatatttatccttgttatatacgtcatcaacttgaccaggtttttattattatttattcttttttgaaacggattaatgaggttcatatacacacaaatataaattgttttaattcatgttacaagagagctcccaaaatcatgattttcaattctagttaaattaattttttaattatacatgtttataaatcaatctaatctaataacaaataaccgttaaatattgaatatttaataattaaattagattaaatattattttttaatggataaatatcattttaaactttgtattttgtaaaagttattaattggactttctattttatttaatgacaaaatagactctgtattttcttaaaatagtacaaataggatcttgaactgattttttattcaaaataaaacttaaataataatccaatctaaaggtgttatgacaaa

SEQ ID NO: 331104 - DNA, 975 bp, Cannabis indica
tatattttttttaaaattaaataataataataattttagtaatttaaaaaattaaaaattaaaaatgataaatatcaagtgtatttcttatacgacctagctatacaattatatcaataatcattatatttatttatttggaaattcaaaattaaaattgaacattattcattcctaattctattacaactcacttttatttttttatataaataatagtaaatcatatctcgtattcacattgtaattaaatttatagagagaattaataataaaatgacgaggtttttcatgccacatgagttgctaaataatagaagaagaagtactatgattcataggctttcattgtcgccgccgccgtctctacagccggagactcaaccttcttcgctactactgccgccagagaccttacctttgtcagcgtttttgccacatcaatcgatagtgccacgtcaaaaaagtactcaaaaagtacttaaaagtttgaaatattataaatcagaaaacaaagattatggtagtaatgaagtgtgtagtgtgtgcttggaggaatttttagaaaaagaagaagttgctaatacactttgcttccactcatttcatcactattgtattaacaaatggttatcactcaaaaaatcatcatgcccatattgtaggagacaattgttttaattatttataaatttattagggtatgtttagtttataggaatgagaattgtaatggttatcaatatgttcattactttgtttgcttttcttgtttaaattttgtaatcctttacattgtaatgattacattgtatatggtaatcctcattacaatgaaaaactattgtaatggtcattacaattagaatctattacaaaattaatataatattataatagaaaaattcaaaagtctattttaccttttatttaaatattttataattataaaaaataaaagtaataaggatattt

SEQ ID NO: 331105 - DNA, 1334 bp, Cannabis indica
ctaaattaaattttacttaatctaccgtcatcttaggattactattcacgtaatagtctaggattctatgtgtttgtgataaattaccatttctaatattgtcaaaggtatttttaattgtgatgaagaatagagcctaagttaaataaattatatgcttcattgatttattgcctagattaatctatctccataaatcttaaagctttatctaagttaaataaattgcatgcttcgtgaatttactatttaggtaaaagagttaattattgagcgcttcgtcttgattaaatataatagggagattgggataattgactgcttcaactttatctgtgggattaatagtttgattggacattaaaattacatttattaataggaattaggaatgattgttgagggtggcgaataaccttttactactttctcatattgtagtctcacttttaatttgttttatttttatttatgctattttctttctacacataaacacctcattttttttaacttttgtcactaatttttgagtaattaaataaacattgtcctcgtggaataaagctttacttacaattatactaaaactaggtaacaaaatcgcgctttgcgcggctgttaattttttttcaaaaaataaacctatatattttaagaaaatttgataaatatgatgtgagatttttaatatatttttttttttattaaaaaacctctaaaacaaatgaaaaaaattcccttttaataaagtacaattctatataaagcacataaattaattacagaattccttatgaagtataacatttccttatgaagtataacatttattataattctagaagttagtttatacacacaaaatgaattttttttatggaggaaaattattacttttaataaactacaaacaatgttaatgaaaaaaaaagttataatcgaattagaaattaatataaatcttaaaagagtatatagaaatatttttcttattcttgacaaaatcgtattgatgctactatttaagttaagattagtagtaaacataatttaatgagaaagactcaacagacaatcaaataaataagaaaattgtctaaactatttgatgattatacaaatacacaatcttttgagtgactcctcaccttctaaattaatgttatttttatattataagtgttattaggatgatatatacatatatctatatatttatacaatcttgttgttaaaccttatgatatagcagtttaactatttagaattttatttttttgtattttgtgagtttttacaattttgtttcattgttaaaaaatatactttat

SEQ ID NO: 331106 - DNA, 815 bp, Cannabis indica
ttttgtaatcgggatcccgagtctttttgtaattatatttttacaagtttaattaaaaagcaaaaattttaattaatcacgttttccataaacctcgttgattagcaacgagctgcacagcatgtttaaaaatcacgtaatacgcctatgttagttagggtgttacacaaagattcctaatgcaacaaagggaacaaagaaccaaagcaaggcatgagctcttctcccatggaaaatatgcaagaaggttcaatgatgatttctcacaaagggatgttctaaatgttaagaaatgtgatctcaaagcccttgagtatgtcaatttcaattatctttttgaatgtatgggatgggaaaccttgttaaaaaatcaaaccaatatttatccaaggctagttagagtttttgatgcttgcattaaggttaattacaatccatattgtgttaagggaatcctcataggggtagcatttgagttaaccatagactcgcttaatgatctccttaatgcacccaaagaaggcctcttgcttcaccataaactttgccttaaaaatgataccaccttcaactataacattttcaacaatcatgtgtgtaggtgacaactttaggttaaaaccaaaaacaaacctacctcacccttcaagacaaatactccatgctttatatgctttaaccttgttcctaggaaaggccatcaagatgaaataaggtggcgtttggttggaggtaatgaaatggaatagaatgaaaaggaacaattttattccattcctttgattgttgcattttaaagtattggaatagcattc

SEQ ID NO: 331107 - DNA, 750 bp, Cannabis indica
tttgtaagttttttaaaaaaatgccatatttagtgtaattaagtttttatgccatatatatcaaaacttatctttattttcccatatttttgtaaatagcccataataatatgcctattatatttgtaactatcttaaactatattttgtatcattcacctattatatcctaatccacctaaagactgatctcaataaaaatacaaagcaaaaatattttttaaaaaaaaactagactaagcaggtcgagttcatatttgaagggaaatttacatattatactagtttttgttatttttttacaaaaatactgtcaggcggtatcttttacttttagactgttgttttataagttttatactgcagtatactgtgttaagttttcactagtattctactgaagttttttagttgttctactgttgttttgagttgttctgttttgtattctactggtgttttataaaaatacaatatttttgaaaacttttccgtgtgacggtatttttataaaaattaacctaaattccagtatttttataaattttcctatttgagctactataattaatttctttgtctattttatattatttacaaactaatcacatacattattatattatattttttgagtactcactattttaaatgagtactctataaatttagtgtcatctaaaatcatcttcaatggtagcatgctttaaagatgctaaaaatttacacatcatcttaaaatataatatt

SEQ ID NO: 331108 - DNA, 783 bp, Cannabis indica
aaaaaaaaaaaagtaaaaaaaaacaagtatatgaggtaattcaccaattcaatatttactaattaataaataaatttctttaataaataattattttatttttatataattaacattaaatatatatatataagtatttttattttaattttttaaaataatatataagattcctgtattcaaccaaacagtttaatttaattaatagaaatatgattacatattaccctacacaaccaaacacagtttacacatttccctataatcatattattttgaacacctcgttagggaaaaaaaaggagatcacaccctcaagaataccctccatcctctgcaagcatgctttcatcacagatttcatcatctacctcttcaaacttcaggcgtcattatgattactcctctttttcattttctcagatattttctccacccctctctgtgttgtggtggttcagcatttatgtcaaatgacattcaactgtctccactccaccaattgaaatcagaatcgtcttgcttacagaagagattgaagcaggtgcggagaaacattaatgaggtcttcacaggtttgatctcgtttttgagcatatctcaagatgaaccctatttgcttttaattatgaatgtcctttcagatcttaatagggtgtttaggtttaattgttgtgtctacctgttggggattattttaccagtatctagacttactaccatgtatgttatttaacatcctaaatatgtatctctaaaataatagaatttaaacacatataa

SEQ ID NO: 331109 - DNA, 815 bp, Cannabis indica
tattatgattaaactaaaattataattaacaacaaatgtaaatatattgtgaatttttttttataaaaatattacttaaattaaatatttttaataaaaaatgttgttgtttattgaataatatctgaaaaaaaaattaattatacaactgaaaatatataaccaaaataaaaactaagaatataactaagtatgtgcgtattgcacgtaatattaattagcatatttatatatacgaacgatttactagaaataagaaactaggggtgggcaacatccaatccaattgagccaaatcgatttaatccaatccgattacaaaaattggatatccaattacaattggattaaatattaaaagttggattataatttgattggatcagctattggatgttaatctcaaaattcaattaaaaatcgatccaattcaattatattatatacattaaaaaaagttatttatattaattatatataataaaaattattaaaaataaaaaatgtttaattatatttttagttgattttgtttttaatagtgttgaatttgtaacacttagttattttgtgtattgattttcttgatattttgttctagtttatttcttgggagtgttgttgttttagttaggaaaaattgcagtataagtcccccaaaacttatatttgatgcagataaattttcaacctcaaaaattaccagtaacagtctcaaggatactattttcgtaagtctgttagtcctcttttataacaaatttgtttactaataaagaataccatctgttgataaattattggtccaaatcata

SEQ ID NO: 331110 - DNA, 874 bp, Cannabis indica
aaaaaaaaaaagattaatcaattataacacaacaattcatggcaacatggatggcaatgctctttcttataggatatagtctcaaggacaagctatctgccacacctagcatttaatttattaatgtaaaatcaatcatataaaagagtaggtgttttttccttcattttttaaaaaagaattttgaagaaaaaaaaaaaactctcgacaaagtaaggcagaatatataaatccaaaatatatttttatatttttatttttttacaatgtaactaagatggcagaagactggccacgtaggatgaacgggacccacagtggtgtttgtggggtcaaaaaggtgggacagactggttcttgattggctgcagaagaattaaaaaaattaaataaagagaaagtcttgttgccaggtcattttaagtttgccctgaccaatcttttaattttcccattttagaatttattgagaaaaattaattattttttataaaataggttaaaatcgggtgggaaaaataataatataaatataggaaaaggagggcccggaatttcctggcattggctcagacttcaggacggtgagaaagagagagatagagaaggagaaagagaaaggaaaagagaaagaagaagaaagggaaagtagagagagatagagagacgaagagagagaaagtactctcttttatatgtttttttttgcctaaaaccctgtcctctctctgtctctctctttctctctctagaatctctcttttcttctagttttttttttttatctctacactttcttctctcccttcctcattgatctgcaacctcaacctagctctctccctctctctcccttcctctctctctctctctc

SEQ ID NO: 331111 - DNA, 2041 bp, Cannabis indica
tatataatcaagcttacaataagcagttctagaatttaccaagtaaatttcctatcttattaattcctcctgactccactatagatttggaattgcactcctaattatatagaatgctctatatgttcccaacatagatacactattaattatccattgttattatcgaaataatcaaagatcatctacagatgatttacatctagtagggacaaatttaccgctctaccctttaatgtattttatccttaaaacacttagcttcctataaatgatatttcaataaactaatataattactaaaattagagctcttccatttatctctgttaagggaagctcgaaagaaatcatcatgtcacttctatgtcattatagaagctatagattccgtctatgattagcgctcccactaaattgtactaccatgttcctaagatgtaagtattgggccaatccatttggtcagctttaacaaaaattcaaagaacataaataatacagttgagctcgaacgtaacagtttcaggattaagatctattgatctaagatcaactaagtgacattgacttaaaaagatgtaacagtaagtttataatatcttatccaattttaataccaatccagtccgatgcatactccatacatccaatattatcatactttaccaataccctataaaggacataccacttatccaaggtgtaagtaaactttattgtttattatcacgtcagtgtaaatccaatgcattgacaaatcatggaataaaactttgaatcatataattataattactttacactttgatgacatcactgtaattgtgaatatctatatgttctagatttatcaaaaattgaatattaaactataatcataaaaataacatgtaaacttaaatgacttttaatcttctattaatagtaaataagattattttgaaatggattttattgagggcgtaaaatcccaacactctctggcttgctatttgacattggtgatggatctcatctccatgtcgtagtcacgggcagctatgaagtatttccagaaagtggactataattccttccaggaatgaattgatccgggagccagtcttagccagtcttttccaccaatcctcaacagacttgatgagggttagggagaagcacaagcacttggcatcttcactcacccttgccacgtgcatcattttgttgtatttggctagatggattttgggatctgtgcgcccatcatacaactcgatttggggcatcttaaagttctcccagagcaaagcttccgaaatcctcctaagacatggctttaggtcctcatccttagagtcggtgacgaccccactttgcttctgaacaacctttgttaaggcaataatttgctcttctctagtctcttgtactatttgggagatctcgtccgtggaacttgtaatttaaatgattcccgaggtcgttaccacgtggcctcgccttctcacttttttctttttcatacttgctttcaagatgccttcagagatttattgtggaccaactgtcatcagaatattgttgggtttttgttaggctatttttagcctatattttggatcgattttatgtgcgcttttcactgtgttaggatggaattatgattatgcttgttttctatgttttcaggttctttggaataatagaggtctcgggatgcaaaagtccagtaaaagacgagctgagccaagaaagacacctttttgaggaaagatgcatatctggccgcgactagatacagcttggtcgcgactagatcatgaagcagaggcattgatttttgaggctacagtcaccgcgccgagatacaccctcgccgcgaccatataaaagttacagaaccgtgattttaagcatctatctggccgcggtgagatcctgtacggcccaggggtaaaattgtccaacgaaccctaaaaatcacttataaatagaaaactgcgattagaagtcaaaggaagcgatttggagacctaaaacacagcagaaagcagca

SEQ ID NO: 331112 - DNA, 856 bp, Cannabis indica
aaattatagcactaaaacaaaatgaatggttaagtttttgatactaatatgtatagacaagagtcatatattgatttcacagagttttggtagtcaagcatgggatactagttttgtcattcaagctttggtggctactaatctcactgaagaaattggagaaaccctagcaaaaggtcacaaattcgtaaaagaatctcaagttaaagacaatccatctggtgacttcaagagcatgtaccgtcatatttctaagggatcatggacattttcggatcaagatcaaggatggcaagtttcagattccacagctgaaggtttgaaggtatatatatttatttacatatatatataaatacctcaacatatatatatataatcctatcattaacttaatatatattattatacagtgttgcttgctgctctcattgatgccaccagaagtagttggtgaaaggattaatcttgagagaatttatgattctgttaatgttatactctctttacaggtaatattttctgtaacatgtgaaactttttaattataaattattatactatatcatggtaacatatatgagtagagtagctcataacattgattatcaaagcgtgactctctgatgttcttttataagatggttatttttgctggcggattttagatgacttttttttaacttactatatccattgctggttagcactataaaaattttatttttaatcacagtaaaacttgtaattaaaagtaaaaaagttgtgacaagttataaatcatcattcctatattgcgacaaaaaattacgtggctaaaagtattagtcatgaaaattataatttgttgcgacta

SEQ ID NO: 331113 - DNA, 500 bp, Cannabis indica
atcacatagagtttaaagtgaaaaacatagaagattcaaataatgaggaaaattaaggttgcgtttggttggaagtaatgaaatgaaatgaaaagaatcggaatgtcattacaatgaaactacattttcattattttaacggagtactattccattttaaaataaaagaaaagaatcattctagtacaagaaattactttcttttcatgcattttaaattaaatttttgtcatgtactcattctcacttatgttttaactatcctaatatcttaacaaatttttagtaatatctgtgataatattttattcataattttttcaaaaatacccaaaattagaaaatcatatagtagtgaaaagaagtccattatcaattttcgagttcataatgttgccaataagattcaagaggcacagcaacgtaaattaatggtattggtgtaagtagttttaagacatactttgaaaatcttggtcagtcaatgtggtattgaatac

SEQ ID NO: 331114 - DNA, 577 bp, Cannabis indica
agggtcaaagtcaaaataaaggaaaaaatgggtggcagaagtaggggcgagatggcagtggcgaggcaggtgttgttgcttacaacttgcatgctcaacacttgttccccttgaggcattccactatttaacccaggaagggaaggagtatcactcacccacgccaactctaatctctaaccctttttattttttattcatatttttaaagatttgcttggagaaggtttgcttagcctcaactccctttcgagcgcgtgcaacccactttttcattttcttgatttttggggtggaggaggcatagaactactaccaagatgttataaaattttgataccttggtcaccatttttatatatttgaatttataaattagtttaaaaattattaatcactcataagtataatatttaaaaaaattacgggtgcctagctaataataaaaacggtaataaatattgtcaaattatatattattgggaaattctacaatgtaccctcttaaaatagatacattaatgcactcttgtctgttttagcacctaaaataattttttagtcaaattttttctca

SEQ ID NO: 331115 - DNA, 619 bp, Cannabis indica
acccaataatttttcataaactaaaaattctgttatatagccacattttatatagaataaatatatatatatatatagaatagatatataaaaataagggtagttaagaatgtgaaagtatggtagagtaatacatatatcgtattaaatttttacactagaggataatgattttctgtgttatgttccttcttttgatgaaattaccattcatgtctttgataggcattccttacaagtgtctggacccaatgaaaagttgcttcttttgaagatgctggaacattgttgcgatggggtggtaaagtgtattcaatatttttttcatgatggtaagatggacaccaatctaaattttaacaatatctatctgataccaaaatgcagcaatgtaaagaaagttgagcaatgtagatatatctattaacatttgtaactttgcttacaaaattatcacctgaattttgtctcaaagactttgcccaattatggataagattatctccccctttcaatcaacttttatttcatggagatggattgttgatgcatttaggcttgttcattggaccacatttaatcgtttttatgcttaatttaaattcgatctaattatata

SEQ ID NO: 331116 - DNA, 1094 bp, Cannabis indica
caatacccacgaccatagaaccataccgaaccagacctagaccaaacccacgaccaccgcaccacctccagcaaaactcactctgaacacgaaatgtaggacaaaatcgaggaggatatcacgaaactacaaagagaaatcgtgaagccaaagccccaaaatctatgagttctcaactcgttgttttttgcatttttttttacgatgtcgtgaaacattgctaaatatcgcgaaacatcgcaaaatcatgagacatgctaaatgtctccaatctacaatatcacaaaacacatcgctaatatcatcattaaatatcgtaaatcatcgctaaacatttttaaatatcacaaatcatcgctaaacttcatccctaacatcagatttgttctatcgttgcaaatacatcgctaaatatcgcaacatataaaaaaaactggtaaaccagaagaaagaaacacaaaaaatgagagaggccgtgagagaagatgacgcgtcgaggccttgcaactggggttcagggtctgtgtgttcggcgataggggttcggagtcagggtcaacgccatgagagagagaagttttttttttgaaatataagggtttttttggaaggaaaaaaaattaaaagtatatatatactatttctaatttggtggcatattaaaacaatatatattacatttaagcatactaaaccaaatttcccaataaaaattgggtattttgcctgatgataggtgatttaatgtgacagtagtacatgagtaaagatatattgagttgttggagttttatgccataaataaaatctaattttaatataatcttgtttgctaacaataaagatcagattttatatcttgcctttgtcatatgtttggttcacatgtttattgtatgatcatatgtttaatatataagttctattaaatcttaaatatatagttattcacaattatagtgatgccatctcagttgaagataattatgattatatgcttcaaattatttagtcctgcatcattgcactaaatttacactaacgtgataatcaacgatatagtttacttacacttagataagtggaatgtcttt

SEQ ID NO: 331117 - DNA, 485 bp, Cannabis indica
aatggctctgatactaagtaaaacttttacaaaatagagaaatggataaacactacagctcaaattatgttactgttttattgaatatatatataggccgatacaagatcattctagaaaagggagacattattacactgaatacaaggcataacaataaagggaatattctcataaataataacatgaaaagattctctttgctatgcaacgattgtttatcatgagctattaggtacctctttgaattctaggtgctgagagggatgagtgacagggttaccacttggctgctaagttggacagaagtcactagtaaccatttcaattcttaacatatagtactaagataaagaaagaattaaggtatgttaacgtactaattaacatattaaaatcaaagtgtaagtacagtttttaactttaatttatggatgtgattatgaatataatttcctatcaaacgtattattattattattatt

SEQ ID NO: 331118 - DNA, 1392 bp, Cannabis indica
aatactgggattaaaagctactcgttcagcctttgtctgaaaaataaaaaataattcaaagtttaaaggctttatggcaagacatatataaaaaaagaaagataaaaagataagtgttcagactgctggagtcctaggctccttgtacgggtcttctaggcaggtaggagctggaggatttaccttgcttggtggacttcaaatcaaaaaactgactaacctcatggggagaaggaatatcccacttctagatggcgtagagaatgaacagggcagacaaatacttgatgcccttgggggtgaattgaatcggacagaggcggaagaagtcaaccaccttcctaaagtacgggtgcaaaggcagcaatgctccttgtttagcatgagcacccgaccaggcacacatccccctgttagagtttgtggctcgattgttataggcgcgaatgtaacagtctaactcgaccagatagctgccctgggcgagatcccattagcgtgcttcagtaaccttggacggagtggtcacccacctggcgcccaaagcaccttgcctcctgtgaggaaccgcgacagtaagttcctcattgttgtaatccacaccctcgaccaggacgtcgccatccgcgtcaactggctccccacgctcattgtatccccaaaagttttagggtgcaggctcctcctcggaaagactataagtacgggcattgcctaattcctctattccctaaacttcagcgcccccctcctcctaggtgggtggatcctgttcggtgctgggcaggatggcatgctgggccacatgagggttagacgcgtcaactctacgcattgtctgtttggtacgagccatcatcctgtggttggacgagaaaagtgaaccaaaatgtccgtcgcttgaagagggcggactagaacaaagtcgatgatgatcctcgtgcaagagttgaagcagatcctggtcgattcggtgtttgcttcccctaaactcacctgggttcatctacaaaagacaacacgcgagatgagtgtttggtcgggatatcgaacattaaacaggaaaatatgcttaccaggagtacttagcagattaaagaataaaaatattcgatgaaaagtcaaaactcagaagtttgaaatttttgtgacttagggccaaaatttcatgaagcttaaaataagaaagatgaaagacaggcattgtgcagttcaaaaagcaagcattatgaacgatgaagtcgcatgaatcgttacaaaagaaaaccacagagtttctaagcctaggattttctacataccttcaacaacatagctaaggttgcattcagaaaataaatgtgcaaaataaaagtaaaagaaattgagaacttactcaaggatcgaacgtct

SEQ ID NO: 331119 - DNA, 517 bp, Cannabis indica
atatttggccgatttaatgtaattatgatagctctagaataaattaattaaatagataataagtactagatgaaaatgatatatattaatttatacctcaaataataataaaagccatgcatatgcatgcagtaattataatatatatatatatatatattatatatatgataatatatataaatataatacgtaccagctggtttgatgaagaggcaggcaagaattggtgttggaggagaattaggagcctttaggagttgagatcagtggtttatttgttgaattttactttgataaattgatcaaataatgaagatatacatatatatatatatatatattaagattttattaaaacctagctgattcatcaaatggatttagaattggttacaaaatgaatgtatagacacgtacgtaattacttgatgagtataacttaattagttgagtccaattaatattaaacataattaattaatatttatccaaaaatgtgttcattcttatattt

SEQ ID NO: 331120 - DNA, 933 bp, Cannabis indica
attctcctccctattctctcatcttgatttatattcacttgtttattttaagtttcttgaattattttattcttttgaaatcgtacaaagtattgatttgcaaaatagaatcataagtataatttaatggtaattaatccaattccctgtggttcgacctcacttgcgtgagtttactacttgattgtgtgcacttgcgtatggttttacaattttcgtaacagaggataatcattacctcccctcttatcaagatgactagtaacattattcaagtctccaataacacaccacgggagagtagattctgacttgagagctcgcaacaaatcccaagtcttatactgcatacttctattaggctcaccataaagaccagtcaacctccagggagaagaagcagcgtctgatatttctatgtcaatatgattgaaagaatagccaagtaactgagcttcaatgtcattatgccagagcatagccaaacccccactatgccctcgagcatcaaccgaaaacaaaccatcaaatcccaacattacccgaagtcgttcaagtttctctttattcgaaaaagtttcacaaagaaaaagaagtttggatttcttttggaccacaaggtccacaaggaattgataaacccacgggttcccaagcccacggcaattccagcttatgatactcataatgaccggtgggcctgggaaccaggacccaccgaaaggccattttttgagcccaaaaaatcattcacaacaacctcatcaccaatctccatcccactatcaatagccaatacattggccctatccacttaggctcggcccatactagacccattcaattgggtttggcctacatgggctttcaccatacgtcgtcgttttgaatccaacacaatgaaactatcaaccccatcttccaactcatcca

SEQ ID NO: 331121 - DNA, 519 bp, Cannabis indica
taaaatatttccaacactaactaatatagagtttctctgggaaacgttatatctagtatggctagccaatctagtattggtcccaaactctaatggaaactagagaatgtgtatagacttcacagatctaaataagacttgcccaaaagactgatttctactttgacgctacttcagggaacgagctcttgagctttatggatgcatactccgactataataaaatcaaaatgcacgtggctgaccaggaacgcactagcttccaaactgataaaagcatatattgctacatggtcatgccatttagattgaagaatgctggaggcacatattaatgccttgtcaataagacgttcaaagatgttttgggaaagaatatggaggtctacgtcgataatatactggtaaattcaaagtcttcatgagccacaatgaagatttagaggaggctttctctatcatctagaagtatggaatgaaactaaacccaaagaagtgcactgtaaagaccgcttagtt

SEQ ID NO: 331122 - DNA, 1239 bp, Cannabis indica
tatttttctttttaatttgtttttttttattattgttaattatgattttttttttgtttaggtgggtggattatgcacgttggattgggattcagaagacaagagactaattaaagaatcttggcaattattaaaaacattcttcttcatcttcatcactactaagtagtgttgaaaatttgagaaaaaaagtaaatttttggaatagctgaaaattttggtataaataaatatcaataataatgtgtttatgtttgtttttaattatgtggcggaaaactagtgaagtgattgtaaatttcttgagcaagtgaaatggtataatatgtaaacaaataacacttgtcatttttttggccccaaaagaaagccaatatgtaatagcaaatttggattgaaatattgtttcttttgagttgtacaatatttcaatgttggagcttggaatatttttatataattcgaaatgtaaaaataaataaattaatgcacatgtatggttttgtcttaaaattaagaaaaattagtatttttttacactatccttcggttagcatctatttgattttattgttgaaatgacatgggtcaatcttttattggtccacaatttttttttaaaaaattattttaattcaatatgaactttaaatttataatttataaattaaaaataattacattaaaaccaaaaattacaacccagaaaaaccatcccatcaccgatgctattcatattaaaattaaaacgacgtcattcaattacataaaacgacatgtagttttctccttcttgaaagtttattacaacgacttgtcgtttagagaaatttgaagctaagttaaaaccgcagaaacagaagaagaagaagaaggccattcctcttaaaccgccatggaaatgaacacaaatcaggtatgtttacatttctctttctcctcttcccatttttttttttggttatgtattgttgattatacatttctattatcacaccagtttttgcttttctgggtatcaaaattccaagttgatgaattagacttttagttcaaactgtagaaattttcatttattactatggataacctaagattgcagtcatgggtttgaaaaagttgggtttaaacttagaatgaggggttttatgttctcttgatattgactttcattttattttaggtaataagtgtaatttttcaagtttacttcttgtaagtcttgggtaagtaaaagtc

SEQ ID NO: 331123 - DNA, 2208 bp, Cannabis indica
tgattatgactcagatgaggagctcaaaccttttcatccaaacattatgagtgctgattttctcgagggatttaaaaaccctcacgtctcgttgtactataggactacatatccagtcgctcatctcaacaactttgacacaataatgcgagctaacaatgtcacaaataacttatgttgtattttatttcccaccttgcttactggggcagcgagcagctggttcaataaattcacccatcactcgatcatctcttgggaacaactgtctaaggatttcaagaagcagtttcagtcagcaagagataggcgacctgaagcgtcttcccttactaacataaatcagcaaccgagcgagacacttaaggcctacttatgtcgtttcagtatagccgctgcaagacttagaaagttgaacaacagtatacagcttatttctctccaagcagggattacgaccaacctctcgatagctagaggcgagttgtgggatgacttacatcgccctataaaaaatattagtgagttcaatgaaagacctcaagtgtttgtacaaaaagaagaagcaaggaaagagatgaaattgataaagactggctcggcaaataaacctagcactgtctcaacaagtaccatctcgatgaaggctgacaatccatgttgctctaacactaagagaaaggattactataggaatcagccaaagaaaataaaaagcaaaagaagcacgataagtacgtgccaatttacactatttacactgagcttaatgaaactcgggaaaatatattcctcgcacatgaacacagggttgcattttacaagcctgagcccatgagccatgcgaggcacaaacgggatgcaacaaaattctgtagatttcacaatgacatagggcatacaatagatgaatgtcgttagttgaaagacgagatagaaagccttatctcgtgaggttactttctgcaatatacaaagcggcaaggcaatggacaaaaccaaccaaatccgcccaataactcgaacaaccaaaaattacaacctcctcctgtagaagaagaggatatcttggtttttctagggagggccatatctcgctggagaaagtagcaatgcccaaaagagatatgtcaaggaaatcaagaacgagcgattaaatttcgctccagaacgtcaaagaaagctaagactgaggaacctcctattgtgttttcggaggaagacacaatgcacgtgaggtacccccatgtcggcccactcgtgattacaatccatctcgccaacaaaagaataaaaagggtgttagtggataatgggagcccagtgaatatcctttacaaggatacactgatgaaaattggactgcaaaacgcgaagttaaaaccttacatggtgaatttgtgcgaattcattggggacaatattgccggtcaaagaattatcaaactcccgttaactttgagtgagccacctatatccagcatattgatgcaagactttctagttgttgacttaccaacggctacaacatattattgggtcatcctacactaattggactaggggcaattagctcaattaaacacctgtctttaaagtttcaaactctgccaggagtaggtgtagtgcgtggtgaccaactactggctagggaatgctatcagatagagctacaaaataaaaaagttggtcatcaactaatggcagttacaactgaggaaggagagaagcagaacgaagatctggatccttgagttcaagatgaaaagaatcaattgaaatcaatcgaggaatttgaggaagttattttagaaccagaaaatcccaataagtgtatattcattgggaaaaatctagatgaaaaactaaaatagcaactaataagtttttgaaggcaaacaaggatcagttcacctggagccactcagatatgatagggattgaccctacagttatttgtcaccacttgaatatcaacccaaattatccagccaagagacaaaaaagacgacccttggattttgaaagagaaggggcactcaaggaggaattggataagttgttaactaatgactttatacacgaggcattttatccctcgtggatatctaatcctgtccttgtcccaaaaccaaatggaacttagagaacttgtatcgacttttcaaatttaaacaaggcatatcctaaggaattctttccactaca

SEQ ID NO: 331124 - DNA, 1582 bp, Cannabis indica
ggatgggaatgtttggggataagaacgataacagtgtggttaatggtcgctatgttcgcatccccattcagaaaactttttgcagccagagtcacatcctttccaacaatgccccaatttttttggaaaaaagaaccattaaacccatcagagccaggggccttgtcactggctaattgaaaggtagcttttttgatctcggagtcagtgtatgggcaactgagggagttaatctcaggttcagtcaggtgatttttgatgccagagagaacacgatttatggtttcctcgttaggattctgactggtaaaaagttgatcaaaatactgttcaatcgtgctcacaagagcttgattatcagtggctgttgatccatcgggatttaacaaagaggtgattttgttttgagctcgccttgaggaagcaaagtgatggaagtatttcgtatttttgtcccctagtttaagccaattcactcgagatctttgcttccagtaatcttcctctttgtacaaaagatgatcaagttcaagctcaagtcgccgcccaagttgaagctgatgctctgtgggaaaagagtaactttgcaccttcttaaggttggactgtaaagctctaattttggaagctatggggggacccagagattttttccaagtttgaaggtgcttcgaacaacgttgaagtttctcagataaattgacaatctcatcagtattattgctttgtgaatgtgaaagccaggcctgttttaggccgtcttcaaacccaagttcagccatccacagtttgtcgaaaaagaagcgatttttgtgatgttgagggccaggaatgtggtggagattcaaaaccagaggacgatgatcagatccaaagtattcttcatgggtaagatgatagtttggaaatagaacatcccattcagaattggatattccccagtcgatatgctcttgagtgtgagagtgctggctttgtttatttgtccaggtgaacggattgcccgtaaattttagatcatggagggcaaaggaatcgagaaaatttcgaaagtgtgttgaaggcgcacgagccgcgtctcccccaattttatcagttgagtttaagtagtcattaaagtcgcccaagattagccagggagaattatggacattggatccaattctgttaagaacattccaagagtgcattttttgggaatgatgtggtgccccatagaaaccagtgaagtaaaaagcagaaaagttattaggcttgagatagcaataaaaatgacttatattatatgacaaaagggttacatcaatatcatgagaccaaagcaacaaaagacctccactgaggccgactcgagggacttctaagccattaggaaaattaagatttaacttaaacctagttaaagcaccagcagggagtttagactccataataaacaaaagtgcgggcttatacttcctagttaatagggagagggatcggaatgctcgtttactccctaatccacgagcattccagcttatgacaatcatggcgcttggcgggtgcgctgcgcagcacccgcctcatcaatgtatccttc

SEQ ID NO: 331125 - DNA, 588 bp, Cannabis indica
gtgatcctcacattaaagaatcaaaggcgcttctcttaacccttcagtggttcattgaagaacaactcccagttaatttcattgaaacaaattgcaaatcaatcacagatgcgttgcgaaaggaacacggtcacaacaacaattttggggaactcctttcccagcacaaggctcgactctctacactcccaaatgtctttcttcgccatatttatcgctttgcaaacatggcggctcacgacttggcaaagaaggctcttagatcctccgaaataatttgttgaattggtgatgaagctcttagccctaccagcctctttaccctaaaaaaaaatcacattgtagttatattaatagttagtctcacattactaatgtgtggaaataaattgtgatatataagatgaaagggctactcctcccattgccgattggttttgggatggaacctcattcatcttattcccaaattctaacatggtatcagagccacttgcgatccgttgtgagcccaaattgccaccgatccaaaaagtcgtttgtgatccgttgtgagccaaagtgccgccggtccaaatagatacttcc

SEQ ID NO: 331126 - DNA, 1157 bp, Cannabis indica
agttttaattaaataaatttaattaatcatgtttttcattaacctcgttgattagcaacgagctgcacagcaagtttaaaaatcacgttaacatgcctaggctagttatggtgttacagtttcttttactcgatcatcattgagtcaaaacgataataatcggttcatatcattaccctcgattataatcgagtctcaacgatgataatcgtttcttatcattttccgtcgatcataatcgagtcacaacgataataatcgtttcctattatatccctcgatcataatcgagtcacaaccaattcatatcgttaacctcgattaagattacatcacaacaacatatatcgagatttcaatcttaatcgatactataacaatcataacattaaccttatacaatatttaacaattttcttacctcagtccagaagtttagcgtgcatcctttctaaatggaatcaaagcttggaaatcccgggtcgtatgtcacgaaaacaacactcaataaatacttcaatcaacatctcctgaataaacttaattcctaaaaccggacaatccttatcttcaatagtcctaggttaggctttacaatttctaaacattccaaattaaacaccgaaaaccaccccgagccctaaaaccaacctggaggaaaagaattgaaaactctcccctgatggcaaccggtcgaccggttctgatacactagaaccggtcgaccggtcttggcagggcagcagcctagagttttctccccaaactcgagccaaatctgaacctcacctgcccatcacctccagatcaatcctatatcaccaatataacataatccaactatcaattcacaacaatttatccatttaatcaaaatagcataatcacttaaattttaagcttaaaaaccataaaattccattaactcaacactaacagctttgattctaaccaaatcaagcataaacaaactccaatataagcctagaaacttgttttaatctcaatataataccttaatcccgaaatcaccaaaaccccaactaatatcaaaccaaaaacctaagaaatcatcaagaacacatgaaaaacacttaccacaacatgattcgctcctaggattgaagattttgctagaaaattgatgaagtgagcta

SEQ ID NO: 331127 - DNA, 694 bp, Cannabis indica
gcatcagcaaggtttcaatcccaagaagcatcaaatgaaggttgctgggtggttgaccgatggttgcatcagatgaaggttgctgggtggttgaacgaatgttgcatcagatgaaggtttcaatcagaggaaggttgctgggtggttgaccgaaggttgcatcagacgaaggttgctgggtggttgaccgaatgtttcatcagacgaaggttgctgggtagttgaaggtgtgtgtaagtggtacttgtgtaattttttttatttgggctgaattatttttttatttgtgtacgtatttttgtaatattgttacctttcttcgttaaaactaagcctcaaaaaatagctaataatatttttgctccataaattttgatatgtatcaaactataccccttaaattttttctgactgttaaaaattcctcataaactattgagattattggattcaagaatttttgttcaatttcattcaattttactaattcagtgattgtccatgtactaaataatgcttcctagactttgatatctatcaaatcatgttgctcgaactttaacatgagttaaatcatgcctccagaactttcatacatgttaaatttttatttactaaaatcagacaaaaattcttatatactaaattagtgaagtattaaattatgcttcctgaactttgatatttattaaat

SEQ ID NO: 331128 - DNA, 713 bp, Cannabis indica
gagttctcttgtaaggcaattgaatttttgtcataattaaaactctaagcagatgtagctccattacctttgcaataaggggagtgaactactataattatggtgttctctttttatattatgttcatacattcgttggctgccactacttattagacagtgcgaagttcatcgtttttcaatgtaaaaattttggtgctttcattgagagcaccactcgagtaccttggtttcctttaagtttttagaataagtgcttcatttcgaaaggagttcgtaagttcaagaacctaagaactttcaaaaaaaattgtgacaactagttccaccagtattggttgtgatgctttattagttggcacgacctcgggaggtaggtcaagatcccttggctcaataccaccaaataagacgccagtaggggcttggttctgtgccactaggtaagccgtgtgtggaccttgacggtgagcatgtgggcctcaaagaggaacacttgaggcatgatgaggagcctgggctcaaccctgaggttaagcatctaaaagagtcctttgctaccttgcaaaggaattggcgagagtcactggataagtagtgagaagagttccaatgtgttggaaatattttaccaggatctagatttactaccaagtatgtttcattaacatcctaatatgaattctaaaacaatgaaataaacacataagagt

SEQ ID NO: 331129 - DNA, 1663 bp, Cannabis indica
ataaataatcataattaactgctaatttccaaattaaactaagcgggctttccattgagccagacaattttcaatcgtcttatgtggctccgcgatagcaaaaaactcgaccagtgattcaggtcttcgagcttgcagttccttccagaaatcggttcttagcaggacacctattatcaacatacacactagcaaagactcgggagccttctctagttttgttacctcggcattaaaacgtttaaagtagtcttgtaaagactcacccagttcttgcttgatattagccagagtgttatagggtggcctataggtcatcgtggcttgaaaatacgtgaggaaaaagttgacaaaggtctcccatgttgagatagatgccttgggcaattggctaaaccaatcgtgggcatagtcctccagagtcgccgcaagaatgcgacacttcgcaagttgggtacctgatccacttcaataatagtattaaatttttctaagtaatctataggattagtggtacctttatattttagagactcggataaccggaatcccttgggtaaccgagcttgttgcacttctgcggtgaaaggagaagtcccatgcagcttgtatatgggctttctctgctgctcgaacatctttaaagcctgtaggagcataccttgatttatacctccggttaaggcagtattttcctgtgtcatcgcaggtgtcgttatcaccgcaccgatatttgttgggatattggatctagttgtcgcaactggtgaggtatgcgggttggtatgattgttaacaccttgatcgcccacctgggaatcacgaggctcttcactgttccgaggcttctcagagcgtgccctgaaaatagtgttaagatgatcgcaaagatcacacatatgcacctggtatcgccctccttgcagtgtttccaccgagcctgatctggtgtatttgctgggcgtgcgaccgttcgaggatgaggaggcagattcaatatcgttgtcttcgtctcccggctagggtctgctgcgaggattatgtcgctcaggatcctcctctgtttgcgcctcctgattgaggttccttgcggattggtccctcgatgtcggttggttcaaatcgagtccttcctgatttgccctccgttccctacgagtaaggttactacgacgtctagaattggttacctgagggttgtctgtgcaagtagcaggtactcggggaggacttcgagccctatttcgtccatcgaccttggcctgcagagcacgtagctgatcttgaattacagtgtattgataagtagttagttggatgatagcttcggataccactgccggtgtgataggtggaaaatttcctgttgtggctgctgttgtagacgtttccccagcgtgagcggctggagtctcagggaatatattaagaggcgtcacattgccccatcctaccccgccattgataacatctacgggaggcaccctgcctcctgacaatgggatgttcatcattccgatgttgatgaattcgttgttaagacccctgtttgcttggtttcacgccattatgattctccttctaaatcagcaagaagtattgtcgttccctcagacggtgccaaatattgttgaaggaattttacaacaccaaaataaattat

SEQ ID NO: 331130 - DNA, 525 bp, Cannabis indica
aaataatattaatatttataaaattaataattctattattaccgttaaatttaattaaatattttttatatttttaaaatattctgttaacccaaacaaaaaaaaaatcgttagataactatattttatatataaaaatataatttgatttgtacgtacctaattaaaattatgtatgtagatagtactctctcatgtactaagtttgaaagttcagagttgttcttgcattaattaaattgattgatcatagagttgtgactgtcatcatccatatatgcccaattaattataatatataaaagacttctccacttacataaattgatagatattctttcaaaaaaaacgaaaaaacaataaaattgatagatataagtaaattagatccgtacttaaagtcttctaaagaatcaaaaataaaaagtgaaaggttttattacgtaaaattaaatctacgataaacaataaatattcataataattaaattaagggtaaataccattttggatcctgtgttttgc

SEQ ID NO: 331131 - DNA, 889 bp, Cannabis indica
taaggaagcttaacgaattatttccttccctaattctcttattgcaaggttcttggaaactaagtattttaaaaataactcttttatggatgctcgcaaaggttattctacctcgtttacttggaagagccttttatggggaaggaaatggcctaaacaggggatttgttggaagataagtaatggtaaatccatcttgactgttaattcattttggattcatgattgtagactcattaattacaaaagtaatttccatctcctagtagtacagtctcatattttattaataatggttcttgggatattggcaaactgcgttattttcttgatgaggttactgttaatgccatctttagtgttcctattggtgacttttctagtgatgattgcttcatttggggacaccatccttaaaattttactattaagtctgcataatatttagctaactcttcctatgctgttcctacttctaatcctttctaaatcaataaatggtagaaattttttcggagccttaaaattctttttaaaattaaacactatgtctcgaaagctttgcatcacattttacttcgttctctgaatctttttgtcctctttgctctgcgattttcttttccaataatcgagccctcaaaacgtttctttattggtcgatttttcctttcttcaaacattcgacccagggttaggtttttcaacaacggtggtagtatgatattttttcttgctcatctatgttaatatgaataattacatgtaatattgaaaataataagttggattcaattctccataaggtacacttcttaatgggtattacccatgaattgttactaatacaaatttaactataactattaattttaaaaatatcaaacta

SEQ ID NO: 331132 - DNA, 1365 bp, Cannabis indica
ttagtatttttatttccgaactttttacactacagagttaattgatgtaagcatattttaatttcatatagataaaaaaattgattaagtagttaatagaaactcaaatatttttattaattactagttattggattaaaatctattaatttaatatttaaaattaatatttataattatttttagttattataaaaagagaaattacccccatataattttttttaactttttttttcaaatttacggtttagatttttaaagtagttgtaacactagttgcaataggagtttctgtcggattttttgttgcaatttaggttgcagcgctagttgcaatggggtttctatatagaatttcttaaaaaaaaaaaactaatttaaatgaaaaaatcacttctaataagttttaaaaaatgatagtgagtttggcttttgtccatcttcaatttttttattattatatttgagtgggagaagtaatcttagtctatagtcattagtcaatgtccaccttcgttttctttcatttttatcataatataacgacgattatttccataattatctattagctggaggcatagagtaataatttttgcaggcatagtgtattgggcataatctcattttatttttattttttcataaaaaagagaagtacgtaacttacaaatggacaagtgtttgtccatcttcatgtatctaccaatgagggttgagctaatttttatagactacaaaagtcgtggtcttatctttatatatatgtcctatatctttattgtttctatatgttttcacttaaatcatggcgtgggattaatagacttatttgtttaattttaaatacaaataattaagtaagaaagcaccactagatagaaatggatttccttttcaaaaaagaataaaaaatggatttgacagtttaaaatgtaattagtgctataaatatgagtcaggttttttgacatgatacaaaataaacacgagtccgaaaggcacaaaaaaatacgagtttgggcgatgacaccacatgatgctacgaattggcacgacacggcacgaaaataatatccttaattagcacgacacaacatgagaagcacgacacgtaagcacgaatagtctagcctgaaaagtacaacacacgacatattaaaaaactttataatttattaataataataacagtaagatatgaatttatcaattatatataagttaaaataataattaaacttaaatataacattataattttataattaaaactattaaaaaataaaagattaagattatatattaatttatttatagggtgtgatataaaaatttgagtatttataaataaatattcaa

SEQ ID NO: 331133 - DNA, 1045 bp, Cannabis indica
aaaaataaaataaaaaattaagtagtaaaaaaattaaaaaaattcgcgttaattactccaataccatatagctgctttatttttgggaaatttgtcgtttttttccgttaatatagcacaacaccaacatcacacttagtttgttccgatatggctttccataatatctttgtcgtttcgtacgcacgataatatatagttgaagggggagagtctctcaaatgttgaattgttaataataagagtaaaatatgcactaatattatatatatatatataatatgtttttttttgacaaagaataatatgttacattaaattaaatatgaatatgttatgttattatgtataatattttagtttatagattaagtattattgttattttaataataataaaaagaaaacacaagactccgtgaaataaatattttaagttggtttttattttttagaatagaaaagaactcttgaaatgtttgaaaaaaaaaatcttataatttttaagattgtaaagtcatattttagcaatttagatgccaaaatattttttattttatggtgagatttgtttgtattcataaccgattttctcacctttattattcggttttattgctcttttctatgttaggaaagattgtatttttagctagacttttattgtatggaaacttcttgtaagagaataaattctcttatggaaagttggtttttaaaggaaactttgactattattattttccttaataaattcgattatgtcttgatacaatcagattatacaaactgtttatcgcaggtatcaagacccaatacaagatcgaattcgtttataacaagtttccttttctggtctgatttgctgcgtcagaatccgtttctgatgcttcaaatcaagtttttcttaggaaagttttgtacatctgtaaattcgactttgtggctgtctctagggtttctatgttctataaatagaacctagagagcaaccattcggatcaactcttctagttttcattttttacatttttcttatttgtga

SEQ ID NO: 331134 - DNA, 716 bp, Cannabis indica
aaatccgatgttgttatcttttaaaagggaggagaatacaattcaacaaaacacaaatcataatatctcaagctagatcacaaaaatacaaaattgttttgacctctttatttaattaacactaactatatagaacatggaagaaggctttatgtggtgtggcaactttgattgtatatgtgggcacacatataaagaagagatgaataattaggatgagaagaaagggttccattccaattggcatttcgaagttttccactccctccttttgacttcttaaaaaatatggctggccgcacaaggaacacgacagactaaaactctcccaccaaacaactatataatgctttagttttttttaataaaaaaaaaaagaaaaagaaaattcccacccaaactaccactcgtacgtatatgtccttgctgaaaaccttactgagttttgcagcttgcacgtgtttgaaaggcagctacagctaggggtgttcataaattatccgatccaatccaatccgcacgatccaatccaatccaatccgcaaaatgcagatatccgcacttgtgcggattggattggattgaaaaaactaaaatccgcacttgtgcggattggatgtgtttgacctcaaaagtaaccgatccaatccaatccgcacttaattatatatatttttaaaaaatataatatataatatataataattaaaaaaaaa

SEQ ID NO: 331135 - DNA, 851 bp, Cannabis indica
ttttttttttaaagaaaaaaaagatatgcagtgactacagtatatgtcgtgcactgtaaacaaaatctcgaaatgctgcaagaaatacagtctcgttggagcaaatatgcacaatatatataatatataccgggtccttggtgttgctctaagccctcacataagcttctctactctatattctctcctttaaaaaacttcatcaaaatttattattttaactcacacgttaatttacgtttttttttttattttaagcgtttatatatacaatcatgttttacttgggacttgaagccaagacctccaagacacacacacccacctatggccacttgagctagcctcaagtggttattaatttacgttactacagagcttgtatttctcaatatcatttaaaaattattatttttaatatattgtattatggtataaaaaataaataaattattataataatatcacacacgtgcataaaagaaagttttaaaaaaaattaatataatataagcactatttattgaactaagaaaatgtataataactcatttgatgcaaggttatttttgttacatcctctttatgttttaaagaagagttttttgcgtcaaaacttttttagtttccatttcgcttgtatttaatcttttaactttaaattttgacggtaaaaccttttaaattacagaactagtagcaaatttaagttatcattcgattaactgtcactatggtctacttatgtatatatatatatatatatttgtacacatgacccgtttatattagtatacctaatattattatttaaaatttattttcaatattcattttaaaattaaataaaa

SEQ ID NO: 331136 - DNA, 1252 bp, Cannabis indica
aattttcgcactcactgaaacactaccaaaacttatccaaatcacttcaaacttcacagggcgcatatataccataaatattaccatccttatgtaacagaaataaaaatcgagcccttaaatgaaaaatgtcattaacgttcggacgaagctttgaaaagttccaaactcgatttctaactcgaaatcaaccagtaaacatcggaactagtcccatgactacccgagaacaatcttataaggatagaaccttcataacaattctaattgaccaaacccctatatgaaaccaattatttttaaacttaaaataaaattaaaccataccttaagctttttcttttcaaggatttgctatcctactactaccggagcttagatagctagattttgggttgaaaatcgaagaaaatagatataggaggagaagattttgtcgaaaagaagtgaacgaaggttcgttcgttctttagtgttatatgtaaaacttacatatatataatgaaacgaaacaaaactgataagtttagttttatatatgtataataataataatataataatattaataaaatttttataattagtagttatcttattattttttagctattaagaaatctttatttctaaggtatttggccaatttcgagtatctcaaaatactcttgtatttctaaaatcaacttatcacaataattccatcaatatttctaactaaaactgttgttatatttttggtctccaatcgggtcttcagagtcgccaaacttgaaaatatttttatttcacaaataactcatattatattcacgtatttcaaataaatctctgtaattaacaaattacgcttatatatccacttatcgaatcttcaggatcaccgaacttaaaaatagttttattccacatatagctcatattacattcacacatgctatataaatctccataatttataaattatgcttatttactcacttatagaaaatttaaattttatactaaaatagactagtaaaatcataatcccacttattacctgattaacccataatataaatctaaacccaatatttaccattaggcttatcgggatatttcacttatattccctagttgatcatcctatggattcgtgagatttttgtggttattttctctagagcttcctcatttctcctatttctcgaccatctaggcctttctcgaggttgcctagtggatgtgtttagtgttaggttttatgccc

SEQ ID NO: 331137 - DNA, 666 bp, Cannabis indica
aaaaatattactaatttttaactactaaaaactaaaaaaaaattaaaaaaaagtagttaacaaacaaaacctaaaaagtttcaatatttctctatatcatgtatcgatgactaatttatatttattgaagaataatgactaatgaggtaatacttagattcattctagtgtgtgtcggtagtattacttattgaactgatgatactcatactttttgttttaagagttatctacactataagtatgtatatatatatacatatttgcaatgtgtgctccaatataataaacacacaaaaagaaattgagagagtaataatgtctcgttaccttcgacatcacactcacgaccatcctttgatacaaattgatgatatagaaagggtgtacaccactggagttcaaatctactgcagcctatgtgagcttatgatcgatcgcaatcaaacatgctatgattgcagctcctcttgtacctattccctccataaagtatgtgctgagttgccgcaatacgttgatcatgggcttcatcctcaccatggtcgtctaatgcttggtaaaagatcatcacaccacacaactacatgttattactgtgacacttcttttcaaacccaacgaactcttgcttacaaatgcactcaatgctctctccacatgcat

SEQ ID NO: 331138 - DNA, 907 bp, Cannabis indica
gatctcatgcttagttatttttcaataaaaaagtattttattgtttttgatttttattaattattttatatagactatcgtgcgtgacatctcaggaaatcggagtgttacaagtatgatcaatatctgaacttggatcttcttcagtggcagatttctacataattttctacactatcttgagtattgtcttgaattgtatggacaactcctcaatttactataaggttcaaaaatataaaggagagaagagaatttcaaaatacaagaggctcttttctatttttaatttttctgataaagagagactgttataaggtattagcttagaaaataagagcatcttattctatttataggatagtttctagggttaggtttagaattaaaatagaattaaaaaaataaaaaattggtggctttattaatcattaagtggtcgaacctattgtgggccctacaagattttaatttttgccattttatttaaattttttttcacaaataccatattttaattctaactctataaatgtcaaatttatctatttgataattataattaattatcaaataaaattgtcatttaacttctttttgacgtggtcatttaacttatttattaataagaccttacaaagtctcttaattaataaacaaaccctaaatcttctacttttcttctcaaataaacacttgcttagtgaaaattcacaaacaagacaaagccttatatattcagaattctaattgattaattaaaactaattaattgagtctacaagacaatatgatctcaactagtgttgggaccatggtaccatgtacctatataatcaagctcctaataagtagttttataatttaccaagtaaatttcctatcttattaattcctcctaacttca

SEQ ID NO: 331139 - DNA, 702 bp, Cannabis indica
gatatcactgtagcaacttgagtcaaagctctatactctgactcggcacttgatcatgacattgctgcttgcttctttgaggaccatgatacaagtgtgtcacccaaataaacacaataaccaattacgcttttctagtcatctggacaacaagcctaatttgcgtatgagttgtcggtaatattaagttcattggagtacttgatatggaacccatagtgaattgtcccctttatgtagcttagtatccgctttgctactgactaatgtgttgttgtgggggcatgcaagtattgattgagtttgttaacaacgaatgaaagatctggtcaagtgtgaactaaatattgcagcccctaatagcacttcgatagactgtaggttgctacagtaagtcaccatccgttttggcgatggctttgccaacaactatgggtgtagaacatggtttgagatgtaacatttttattcttatgaacaaatgcttaattacttggcttgactaagataaaggtctgttttgtctttgtgtacctctatgccaagaaaatagttagtggtccaaggtctttgagggagaatatgttgtttagttgagtggtgaattcctgtaatatcttcgaatcattccctgtgacaattatgtcatccgcataaataaacaccataataattatgtcattccatgttcccaaaatgtac

SEQ ID NO: 331140 - DNA, 624 bp, Cannabis indica
tatcacatatttttttaaaaaatatatatataataataaaattaagttacataagttttttaatattgcatattattatattgtaacaaaaataaataaatatattagatcatttaaatatatacagcagtgttagagatatcgtagtacagaaaattaatataccgtagtaataaaattatataccacaaagaaattatggcaatgctaaatgttgggtatttggttaatgggccaatgctattgggccttaacaaggcctttactaacatggtcttgctcaagtttgacttagaaattaaaagaagtatggtaaaatttaaagaatttactttttttatagcatatatttttttgtatttagattatgaacttttacaaatatttacatttttatgtttaaaatatgcatatttccatattttattttatttttggtccaattaagtttttgtcctttttattttctgtctgatacggatcaaacttgaatttagaaaaaagactttgagatttttcaccactcaaagcaacaaaatcctttacaacaatctagaaatataaaaacacaaaacaatttaaaaaaataaaaaaaaaataaaataaaacaaacaataaccaaaa

SEQ ID NO: 331141 - DNA, 749 bp, Cannabis indica
tttttttacaaaaaatagtatctgatctaattatcccatttttatttgtagtgggccattataagatggtttgtgggccattattgaggcccatatgatttcaatgctagagggctcaagtcttttatgcttctcaactactctataacacctatgtggggaggaatgtgtcacctctcttttcttttcaatttttatatcaaaccagccattaaaatggtcccctctccatagtcccatgtgctgtgattcaatatatattttttcctttcttgctattttgctttctcgagtgatagcctacataccatgatcatgtcatgcatataagggaaaaatttgggaacttggctttacttgtttaatgtttggaagatggctagaaaagtaactattcgaaaagcaattctagtacagagtcactatctaaaaaaaactagttgccatgccatcaagattttgatatatgatattaaatcatgacagctacccttgtacgtttggtaacaaactataattgttgtttagttaaaataataataataataataatcttttaagggtcgcaattggaggagataatcaaggtttctttggattccaacttgaatttcaattatactttgctcattttgaaatcttaattttagggtgaaaaaaaaaaacaatattttctttctttttcttttttttttacaaagtgattagaatcactcatgaattaatgacgcagacgtccgccaccggcg

SEQ ID NO: 331142 - DNA, 638 bp, Cannabis indica
tcaagttcaaaaactactaatatgtaaaattagttaaaataaaattaattaattttaatcggatagttggatttgaaattttaaaaataaaaatctagataaaaattacacaaaatatttgaaattaattccatgaaatattatgaaaaaaataaaaaaaaaacaatttttttttgcattgagtgcggatgttatgtagtgcataccatctgggcgcataagcatagggggctggccgagaaacctcggctaagggggctacttgcagcctatttcgcggacagacggggcttcagacccgaccctgattgtgttcctggtgctgtctgaataaacgtactgaccgagtgacactcggttccgtacgcgcacgtgggtgtcaccaccccttagatatttttgattttttaaaaaatcataactaattcaaataaaatcgaaattaagttctgtaaaaaaaaagaattgcttaattttttccatactattcaaaaaaataataattctagattaaaattctaattatatacgtcaaaaatgtgcaaacatcaaagaatcatcaataaacacatagatcaacatgaatcacatccaaatcatacatacatcattttgagtctaaatttcttgaaagtaaa

SEQ ID NO: 331143 - DNA, 528 bp, Cannabis indica
ttttttattcaagaaacaacttttcctttaaaaaggaaaaaaataaatataaacatattttattcaattaaaaattaaatttaatacagttgatctcaaattaaataaataataactttttaaaaaattattaaaagaataccaatatatgtcttgtttttgttagatatctatccttaaatctcaaatatatagagtttttctttcacattatattagtattagatctatgtgggttttattactttctttgttttacttggttttgtggagagagagattgatgtgaaaatgaaaaatgtatgctctgatcaatcgatacatagtgtgagctttgagttctttttataaccagagaagcatatcaaaatctgttacaaagacagttaagctgattcttacaaactagagactaactcatagctgagctaactcagggactaacatgactcgtttgtaaagtattatactgaattgtattttatgcaatatttttatgttaaactatatgtggtattgaattttatg

SEQ ID NO: 331144 - DNA, 521 bp, Cannabis indica
ttatttcgtgggtgtaaggacccaatggaggcttgaagcggggacgttacacatgccttcgtactagcaagttagtgcaaagatagtgtgacctattgttgtttttttttctgttgtgtgataagcccatagtacttcaaggagttgttcaggacaattccttttttcttgctctaggaatttctttaacgtatccttaagagtttggttgactgcttccacttttctatttacttgttgatagggaatcactatgaaactcttaataattccatgtctaatgcaaaaatagtaaagaggtcactgtcaaattatgttcccttgtttgacaatatcttctgtgggagtccaaatcagaaaatgatattcttgaccacgaaataaagaactttctttgatttgatagtggataaggggtatgctttggcccatttggtgaagtactcgaccacaactactgcatatagtgttggaatttattttaccaggatcttagatctactcacaagtatgttgtttaa

SEQ ID NO: 331145 - DNA, 743 bp, Cannabis indica
agatattttttttgaaaaaaaatttaactgcattaaaattaattgctttgtaaatgtgcactaaatgaaaatggtacaacacacatgcacaaatataaacagttggtctaaattgtacgaaatttcgtataaaagtccagtagaagtccaactaatacaacagtttatattaaatatatatttcaaacatccatctattaatcaaacaaatgtgccatgtatttatatagtcaacaacatcgtctcattaccaaactggggaaacccatctactcatcctagtttgcttctactaatctggaccgttaaacaatccgtggggccttgttacagatgatataaaccggttaactaatactatcacctcatcaataccaaatttgtaatgctatgctatattttagtatttttataaattaatgcttctctaataatttgtactagaaaaattaggtcaagtttagcattataatatatacattttcttttgtatttataatatcgttatttagcatagccttatagcttttttttaatttttattattataaaattgtcattaatatttttaaaaagatattctaattacagtagaacctctatccaagaatacacttgggatcaagtaaattatattctaattgagaggttataactaaatagagttacactaaaaaaaaaaattaaaaaccaaaaaataatcaatgttacaataataacaataaataatcattaatactata

SEQ ID NO: 331146 - DNA, 715 bp, Cannabis indica
ttaatattatcacggtttttaataattaattattctattagtattaaactagtttataaaatcacacatgtggcgtccctatagattagggcgttacactcatactcctaaattatgttagtatgaaggttggtagatttttgtcaaggttaagaaaaggaaatcttacaaaaatatttaattttttttatcatatttatatttttactgatatactttttttacatttttattgtactaaatttttaaaaatactttgttaaagtttcaaaattataaaatattgtatttcagtgaaataataaaaaaacaactctaaaataacttaacagacaacataaaaataactataaaacaacaaaaagataattacaaagtaacaaaaaataacaaaataatgacttatttgcaatatgctaaacaatattactcatcaatatgtttttgtattaactcagcttaaaaatagtttaactaaacaaaaggtaacgtgatatcataattaggagaataatattagggtgcatttggaaagccataatgtaattagatttgtgtgtacgtaattggaggtaattacacaatttgacatgtttgtctgaccatgtaattacagtactgtaactgtgtaatttgaagtaattgagggggttctaattacactctctaattctcatggcccccatgagaattgaatgtaattacactgtgtaat

SEQ ID NO: 331147 - DNA, 1448 bp, Cannabis indica
acatccacataattattaatatttataacactttattattatttattttttcataaaatagaatatttattttattactgtcttaatttaataaaatcatcacaattattatatctaattaataatttatataaactactaattaataacatgataactcttctcaaaattttgttaacattaataaggcttgataattaattctatgtatgaagataaataataaatgatatatgtttcgaagtaaaaaaataaagagaagataaagattcttttacatggctttgtaattaattttacgtactttacgagtcaatgacaattttgtagagtttccttaaattaaaaaatagtggtcgttacaatatttttattactataaaataagattataattacttttgatctaatccaacaacggttatgaaatataaacctccccacgttcatatttaattaataggtgggaggtgtacataactgtctgtatttaaaataaaaagataatcgttgccttttgacttggtgatagtgagttatggttgagcatattcatataaggactcctcttctagggaaactcatcgaaggaagtgtatattgagactaggcttcttgaaaaccgacttgatccaaatcattttccttccgaggtgaccaccaggaacaagtttaagcaagttaagcctctcaacattaacaatattaacagcaaaacagttcttgaatgtctcgacaaggttagcacccttagcccatattatgaattttacaagacgttcatcaagagtgagattagttgttctttatcttgattatgccacaacaactcctcattatttcttgttggtcgcttaacatcacgattatatcacataaaagttatattctaagatttgtattttattttggatctttcattaagtcagtcgaatagttactttgatcattaattgtgttcgtacatgtgtcacgcaatcagactcatttatttacttctcgaaatatgggtataacaattaccccttcaaaagtactttttaattaaataattacttttgatttgccacctaggaaattgtaccatcctttttgcgtattgaatacgctttcatttcggcgattgtaattttttgagaaatctcttaattggcaataagagcagtctttttaccttaccccgtaagttaatcatcattgatcaataattaatattgattaatggttttgctaggctcgctataaacaggcttttttttagtattcttcttcacttcctccatttttaagaaaaaactttactgaggttctaactttctctcccattcacgttgtatgccctctttgtctttcttgtattttttcgagttccaaatattttttcgaaactgagaccacatttgtaaagaacgcttagctttaatttgaaaattagcagataattaagg

SEQ ID NO: 331148 - DNA, 574 bp, Cannabis indica
aaccatgcaacataaaatgttatttctgttctttattaataagtaaatctgattatatgaaatgagttttatttaggacataaaacccaacaattttccactcaggtcaatgattaatttgagtattctaggtcttgattatgatcgagattctgattaattatttgtttagcctcggttatgactgagggttgagaaatggtcattaccgttacgagtagttactattgaaactgttgataggcttcttacttatcatttgctttatcgggtaacgatagtgacatatacaactcgtggttaacgagtggtaagggtactttataaagtaccagcgttgtgattgtaatattgtgtaaatgtttaaatgtactaattaaggttgatcgataaatgtcttaatgattattgctttaattactttttcttgccgagtctttgtgactcaagggtgctacatggtgcaggtaaagggaaggccaaagctgagcagccatgagtttgaagattggaagcatcgatgtacatatcagccgtggtgttttcagcccagtaaactgttggaaattatttt

SEQ ID NO: 331149 - DNA, 694 bp, Cannabis indica
aatgtgggaacaaaaatcgccccataccttaaataatctttcgacaaaggggtcgatttcaaagaagaatggaggataataacgaaacataaataaaagacattctatacatcacataacagactcaatcaaagttattccccagaaatccaacacttaaccacaaagttctaccccagcatgcaaataaacagtaacgacatagagttcccaagaaacttacatgaaagttaagaactgggggttggtgttgatcgacggttgaaggtggattggcagcgacggaggaatagcagcaagaaatctatggtttctgatattctttctcaaaggtgttcttgtggaaaaatggcaaagtggcgaaagtaacaaaatgaatgagaaaagctggcttttataggccaaaaagggtgcaaagcagctgtgatcaggtgccatcgtacagtgggaatctcaatcgattcgcattctgtagatccaacggttaggatagatgctcatcagggctgctaaaaatgcttgagtatttgtctgacaccgattaaatgtgtcggatcattaatggacgggaagcgaatcgttgcctgcaaaaagcaataaatattaatgatgattgtcataaatgcagcccacgcgtctgaagaacgtgctaggaaatcaatgagaaaaccggaggcaccagacaagccttgtt

SEQ ID NO: 331150 - DNA, 1555 bp, Cannabis indica
agatcctggtaaaataattcccaacaccctgtgtcttgttaccacttgagatgctcttcccttcttcaacacttccatggttcactttttgtctactgcctttctttgtaacaaacttccttcttctttctctagtgcctttttgctgagtggtattgccagtttcaaagcttattagaacctccacaagattggattccatatccttgtccagaaatttagtagccatggttcttgctttacatatcctttcccccaactgattattagtcaacccattgttgagttcatcacccattctttttcgaattccaccacccgattgttccatctgaatatggggtcttgttgcctcaatcattgcattcagtattgcaggagattgattaaaagaatcagttagattggtattattagcatttagaacttcttgttcataattattaaataaaggtattttattgagattaccttgtactggtttagtggtggtatgtgcttcccctctctcttgtcttctctcatctgcatctttcaaagattggatcttttgattgccagggagttctctatgattgtttgggcttggttcattgatgtgagtcgattccatccttacccctgaatccactttaagccaagaaccaaagattggtctcacttctccctcttcgtgaattcccgtagctctaggttcctgacattggcgcatttcatagccaattctgccacagttaaaacacatatatggcagtctatcatattgaaattggagcgaaattcgtcgtccttcatgggggaatagatagcctaggaagagtttggattgaatggagttccgagctttgaatttgaagaaaccattgactgcaattcgattaacatccgcttcttgaatgtcgatgatttcccctgccattcctgccaatcgcagcatatttgctttagttatagctttaattggaaggtttagtatgcgacctgagatagtgtatgagcatagagccgtttcccaatccgtcggtatgccctgcatcctttccaaaatgagaaaaccagcattaagtacccatggagattttcccagtgtcctttccaattgtatgttcgaattgaacgaaagaaccaagaacactgctgtagccgtggttttcttgatttttaaatcccagtcggtgtcccccaaattccagagtcggcatagaatgttcttgagaaaagaacggctaaaaggcttcattgtacagagcctgccaatcaggcaagattttccgatgtctgcaactccttcctcgttgatttcccatccttcttcgtcggtaaccgttagtttgctggtgcgcgagagcaactcctccatttggtccatgcttgccgagcacatcctctgattaggctcttccgaagagagcatgggagtttccagtctcaggtgagaatcgtcttcgagagaaaaaaaaactttcgtggtgcctattttgaatgtgtcgttttctgtgttttctgtatttcttgattaaccaaaagtagttgccaaaggtatgtatagaatcca

SEQ ID NO: 331151 - DNA, 355 bp, Cannabis indica
gaatccatggtgtgcatatagtaagataataaaaataggattatgcgtggtaattaatattattattgctgacaaaaagagagaaaaaatggtaaaaattaaagtagtggtaaattgtgcatttttctgattattttttattttctattattaattatatatcgggttggtatatagtactataaccatcactaacaaattcactggtcatttagaatattgaatgtgtaacgtataattactctttaattaatatttacatacttcatattaatttctacagctgcctaaatatatattgtttttttttaatttcaattacacagcattaatttatattaatcacattataaaa

SEQ ID NO: 331152 - DNA, 711 bp, Cannabis indica
atggcaaaactgtaaagcagcaagcgaaacgagttaagtgagttgtcaaggagctgtaccaccatgtctggctggccaaggggagcatataggctagcagagatgagcttatatggctgtctagggcttgggcacaagctggccaactacaaggtgacttttagacaaaggaagagtccgtttgaccaacgaagtctgccctctacaaggaaaaggtattcaagggctagattccacctacaaaggttggcctctagctacaaaggttggcctcaacctaccaaggttgtccatcaccaaagtttcccatcaccaaggctgaccatcacaaaggttggccatcagctactaaggctggccaacacatgcaaagacctggccaactcttaacaaagctggcagaaacttagcttgtcagtccatggcaggaacatggctggccaatctttaacctgcaggcattgtattgtcggccagcctgcatcctgtaggtgcatcaccggccaacctttggcctggtaggatttttatgtgcatctctcattcatggataacaattcaagcaacgattttggccttgaatgcccacaaaaatagagggaaaatatctacttttgatgggtaatttatcatttatattttattaattaattatgtaaataatagctttattacctatttctaagggatattaggcatgtaagctctact

SEQ ID NO: 331153 - DNA, 1468 bp, Cannabis indica
ttgcgatatttatacgatgttcatttttgcagatggttgttcttcaaattttgtatcctcggaattgggaggttgattattggaagatcaattgtgagggtgaggtccccatggtggatatgggcttggatgaggtcgaagaaacacaagctagggagcaagattcgaccgcattcgagaaccaagtaaaacgggtggcggattatgttcaaagtgcaaaaattattccaccatcaccacccaaagaagcaccagacccctccacatctgccactgtgcccctaacccctgccactgtgccgccaacctttactgcagccaatgactccgactacctattgttggcaaagagattggagaaggtcgaagtgcaacaacttgcgattctgactgcacaaactgagatgaaggctaacttcaaaaaaaagtcaaaaagagatgaagaatcttatcatggatcaaattgcaaccgtgataaatttgttacagaagtagccttcggagctgacacagctatcagggccgacacaacaatcatcgccgacacatccatcagacccgacacatccattacagacgatacatccatcaccgccgagagatgattgtgatgaggatgatgtgtatccgaaagataacatagatgaggttccttctactccaacagacgccattatgattgccctgggtgatgcacaatctaaggatgtgcaagagttggacgggtcacctgctggggtggaattctccagggttaggagaaaacagaagccgcttttcttgaacgactacatagtggggaagaagaaacaaagacgtgggccagttgaagtagacactctgagaccagcagactcgcagctgttaaaatttttccaaaagtggattacttacgcgagggacaacggtcgtcctagggatgttcacactggcccagcatatcgatcccggttcatcaatttgatggtgcaaggagaatggctcgacgatgctgtaaggtatttcttaagtgttcattttttgttttttaaatttttgtgcgatctatgtgcgatttatttgcaatattgtcaacgttatgcgattgttatgcgacttatgtgcgattttatgcgattcctacactttttgtattttatttattttagcgattattgtgcgaccgttatgcgattttatgcgatttttacagtaattattttttgcagtttttgtgagatttatgtgcgatgtttgtgcgatttatgtgcgatatatgtttaactttttttattttgaacataacaaattgatgccatggcgcacttattgagaagaagacggaacctctatccagaagtgtacactcgaaaaggtgtgattttggacacatctgctctacagatattctccatgtattggagttattatgaagtgacaagagcacgatgaaatgggatgaggccgtttttaattatgtgctggggat

SEQ ID NO: 331154 - DNA, 760 bp, Cannabis indica
ccaagaccattgtgcatcacttttcttggacacgttaagagaaaaactaattttcaagcactaacaattaatttaatcgaaatagtaaaaatctcacatttctgatagtggtaaccctttgtgaaatgtggcctgaacccatcttgaagtatttttccccactactcacaatgtattcgtactaatgatatgtaaatacgaagattggtttcacgttaaatatggttaaatttgcaccctaactaaaaattaaaaatattactctttttcaggctaaattttaacaagttttttcttatttttacactcgttgtgttctcttaaaatctcaccctacacatctcaaaaaatcatgaaatttcacagagacgaagccaagactgttgtgcataactttacaagtagacacgttgagagaaaaagtagttttcaagcactaacaagctttttaatcaaaatagtgaaaatctgatatttctgatagtggcgcccctttgtgaaatgtggcttggacccgtcttgaaatatgttttaccactagtcacaatgaattcgtattactaagatgtgaataaaaagagttgtttattaaatttagtcaaaatagcctctaattgaaaaattgaaatactcttcatttcatagtaaattttaaaaatttatttcctaactcttacactcattagtgttctcttaaaatcccaccctactcatctcaaaaaatcggtaaatattacagggacaaagccaagaccgttgt

SEQ ID NO: 331155 - DNA, 619 bp, Cannabis indica
ttaacatggcaataccctaaaccagtagggaattaactaattaaagctcggaaactaacacgaatcaacaacatgaatttttcaagaaacctaggagcaaatcgagttaaccagttttccacctgtaaaatcggttagccggtttacagcaggaaacccaaacaactctaaaacctaaccaaatggattccaattcttaccaaacattccaggcctgtatattataccccaatagacatataccaagtaactaaacaaccacacaaactcagaatcaattttcaccattaaagagccaagctgaagtccaaaaactcaaagcttgctcaaacctaataacagcccacaaaataagcttgattcaacatatctaaacatattttaacttcagaaacacaaatcaaacacccacaacaacaacagtagcaaaaaccacaaaacatgcaaaatccataacttaaaactcaagaaaactaaaagaggagttgctaggagcttaccttggcttggatacactataatcttgctggaaattgaacgaatttgaaaagaaaatagaaccctagctggtcttaggggtttcgaaagagagagagcttgaaagagagagagagagaga

SEQ ID NO: 331156 - DNA, 742 bp, Cannabis indica
gtcaggaggaattaataagataggaaatttacttggtcaattttggatctacttattaggagcttggttacataggcccatggtccccacattatttgggataatatcatcttctacactcaactaattgatttaataagtcaactataattcgaaaatagactatgtcttatttgagaacttacacaaagtttaggcatttttgagaagaaaggagaaattagagtttatttattaattggtacactttgtgggtctaattaataaatatatttaaattgtattttatttgataattatttatattgaaataaaattggtatttaaataattagaagagatgagcggtaaaataagaaaagacacattgtttcatttaaatagaataaagtggcataaacctaactctaaagcccaataagaaattatgcactagagttagacttcaacccaaatctctattttaagcccaatctcatctaatgtcgcttcttcctatactcttgtttttttgaattcaccataaaaactctctctcaaatttgttccaaaggtgatttgagtatcagcccacactattattcaaggtgatactcagacttttgtggaagactgtgatgaacaaaatcaaaggacgggaagatccaggttcagatattgagaatactctgcttcagacaggaatcaaggactagagattctaaatagaaggagtcatattattctgctgccatcactataa

SEQ ID NO: 331157 - DNA, 666 bp, Cannabis indica
aaaatttaatatgttagggaaaaagttatttaattattttttatgattttcttatttatttttttaaaaaaatatatacgtggactaataaaattgtgccatgtgtacattatgtccacatggacaatccaacatggtaacaaccaaattttggtagaaactgtaaattactaacgttatcgtggttttgggagttttactgctaaaaaataagttttggaggttaagtgcaagcaaaataaaagtattgagatttttgccgcaattaacctataaaaactaattaggagcttttatttttttagaataaaagtaaacttcaatcaacaaagaacattcatttaaaaaatcaacaaagaacatttataagcaaggatactatagacacaataagcataatagaggcttacgcaatagcatgaacaactttattcacatatcgtttaacaaaaactaatcgaaacattattgaactatgaaagtaaagcttggcagtctcttaaaataatatcatatggattaaattttcaacatctcgggccaaatgtaagcagtcagattccactcaatgaccaaccacctcgtgtctttaatccaactcgacaccatagctagctggtgcaaacccaaaagactcttttgcacgacctgttgggttttatgccc

SEQ ID NO: 331158 - DNA, 648 bp, Cannabis indica
cactaccctttagcatttcacctcgtaacaattatcttacaaataaatttgagtaatttttgataattaagacacgtggtgatgatgtggacatttcccaattagaaaagagtaagagaaagtcatttttaagacatcgaatgagaaatgggttataaatagagatgattctatgatatctctaacccaaatcaaccccttcttcctttcgtactcctaaatttccaatattacatagtaaaaatggcgatgaagcgtgtggccgtctcagcatttcaagctctttcatcttcatcacaatcatcatcatccctcactaggcacctccatgtaagaccctttctttatttttctcttttttatttttgtttagatttttaatcagagattaaattatatttatctgatcgtcactaaaacagttcaaactcacactctaagggtttatgatttctgaattgggtgagaattttcacttcatcagtaatctgttttcgtcaatttattattttgtgtggtgtgaattttgatcggacgatcgttatagtcgaagaaagttatttgtttatgggttacagacagtgacagtacagaagttgaaatgcattttatcttagaaaaaaaaaaaaaataaaatgaaatttaaat

SEQ ID NO: 331159 - DNA, 657 bp, Cannabis indica
agagagagagagaagaaaagggcatccgtatgttttgggtataattagtactagtagtgtgtataagtttggtacctaaaatttatgcataattaagggatattttgtattggatgcaagcatataagccacttaattacaaatgagactaaaaatcagaagcagcccaaggtaatggcggctgtcctagagccaaccggaaccaataagctaaaaaccacaaaataaactcacaaattaaaacaaaattattatgacattaacgaaaatgaaataatttgacaaaatatgatcaatccacttcatggtatcaaaactctatatctatttcaccaagttggccatgcatatctacaacaaaacaagtaataagtcttaaatttggtgtcaaatttaattatgtagctataatgatcataagtcaaattagaaatataacaacaaaaaattttctcaagaggccttttgactttaagcttcgcaaaatattgagttaacctatgattatttgccacttgctaaaaataaataaatttaatttatttttgagggaaaactaataaatatttaattttgtgaaaggaaaacaaaacctagttttatgaatttaaaaagctatgttttttttttaaaaaaaaaattataattctaataaat

SEQ ID NO: 331160 - DNA, 979 bp, Cannabis indica
tctacatcttcttcatcattacaactcagaggcttttctgattcagattgggcttcctgcctgaccacgagacgatctattactagtttttgcatcttccttggcgattgtttgatatcttggaagaccaaaaagcaacctactatctctagaagctccgctgaagcagaatatcgagctttagctgccactggaagtgagattacttggctacaatacctccttcaagacttacatattcctcaaaactaaccggcattcatcttttgtgacaatcgatcaaccatccacattgccaacaaccccacatttcatgaacgtacaaaacatattgaattagactgccatttcattcgagataaaatcaaccgctctcaaatcagattgagccctgtcaacaccactatgcaactagctgatatctttactaaaccacttacttctacaattttacacacacatattcgcaaaatgtctgttcacgatgtgtacagtccatcttgaggggggtattaagtttccaattctgtctttctactgcttatctctgattgtattaccttgattgattctatttagtgttaagtcaggtttatctcaattcggttagttgtgtcagtagttagttaggttgttaagttggttaatgttagtttaggcggttgtgtgtttcatctgctctcttgtatatatatatacctcctgtcattctgtaattaattaatatagatcaatacaattaaacactttcttttattccgcactttacgatataattttagtcataactatatagtgaacatttatttgtagttgattactacaaacacatttaattacaataaaatatattatgatctttgtaactaatatttatattaaaatattttaaagttagattttagtggagaaaaaaagaggtaattaaaaaaatgtaaggaataaaatgtggaaaataataataaataaaattgatttc

SEQ ID NO: 331161 - DNA, 820 bp, Cannabis indica
taattttttttatatatactacacgagatgtagctatagtataacatccatattatcgttctttttggcatgtgtagacaaaacaatcaatttaaagaccatttataacaagttaagaaaaattaaaagacacgataatacttatatgttatagttcatagccaaaaattctaaatagtttaaactaaaaatctgttcaatagatgtattttggtggcctgggttaataattaaatgagaatttttcttgaaaaaaaattatgttttcatctattttttttaaaaaaataatatataatggcaaaaagactaagatggagcctcagtttgctctcacctctcctcataatgaaaaaaataaaaaataaaaaaagagtattttgagtcacattatatattatgaattttgaatcaagattgtatcatgtaatttattggaggaaaagaaaagagtttttttttttttttggattagaggacccctggaagcgccagggggcgcgaaacaacaaaacgaggcacaaaggccacacaaactgccaggacggcaacaaccaacacaaaaccagtaacaaactaaaagaaaataaagaactagcaataaacagcagtaggctataaagcaaaataaacagatcgcagttcagctaacaattagaataaggatagggagaattcaagtcatcaagctcagagagaaccgagcgtaagggactattctcgagggacaaatcaaaacgcccaaaagagttgttgagatttgcccatttggccaccgaatcggccacaccattgaagttcctggggatccaagagactt

SEQ ID NO: 331162 - DNA, 621 bp, Cannabis indica
tatgctttactcctcttagggtacaagattctatactgttgggcaattacatctgtctcaacaccgagtcacactagtaattattcatgatgtttggaaatagtaccaaagtttgtatcaaacattcctgagtctaaataattcccaaattactttttcagcatccttattattcagccttactggtagagctagtgattccagataggcttttacactttatcagaaaccactactgcactcccagagtaatatttataaatattaaatgtcgatgtttaccgagattatcaaacactgaatatttgggagctaaagaaataataaaacttagaaataaatgagatggatattttacgttgtacaattgttaattaaccttagttcacgagtcattaaattagcctctaagggcgtattaatgttaaaatagttttgcaggaaaccctaactctatgctctatgtttctcttgaagaagatgaaagtttggagtaacaatagggtttcagatatctaggttgttatcccccttcgtatgaaaatagaagggtatttatagggtatgtggtgggtatggacatgtgttgggttttctgttgcgttttatgccctaaataaa

SEQ ID NO: 331163 - DNA, 841 bp, Cannabis indica
atagaagaatctgttgttgcaggggcttggttgactggcccttcttaattgaggtacagtccagaattggccagagtctggctaaccctaccctaggagagggtattttagaggctggccagccctaggcctggcaattttccatggccggctagcctagtggttggcagggtttggccaccctctcttccttgattggctggtggagcctgtgcattgacatgggatagatcacactaattgttgcagtttggtgaatttaagtctaaagtgattgtattcactccttaagtttttgtcttgggtgtttccacctatcctcaagcctagccagttgaagattgacatttgagtggtcgctccccttggggagggagtgttgagcttgagatccctggtgggcccctcataccgttggtttttgagatctagctgttctcaccattagacttttgttgcaaggtctattctccctttgacaagggaagatctgtcctagttcctaaggaacctagttggtcagcttgtcaatagaccctccctaaatcaactagtcgtccttggaatggatctctaacgagatcttggcctctttcattggttctctaattgaacttccttatcaagtcgctagcctctctattgcagcgatctaactccacctagtgagatcaaaggatgtaccccttgtcatccatgcatcttaggaattcgcatctttactgagcgaatacatagcaatcagcagaacatggttcttttctatggccagcctaacagatagcctctctcaatttggctaactcgagatcttctcccaagtctacatggggctcaccaa

SEQ ID NO: 331164 - DNA, 721 bp, Cannabis indica
aaaaaattaaaaaaaaatatttctgcatgtgatttcgaacgtggaagttgacttagatattttaataggagattgtaattagcactcttcctttatatttaccatttattttatatgggacaatataaaaaaaaattggctaaaacactcaaatagattttaaaaggtattatgcaaaaagttggagaggtgatgacttgtagaaaaacaaaaagtgggtgataagagacaccttggttggttggttttttatttttattttaatttttctctcaaattcttaaacagttcttattattttatgtatataaagaacattgttacaatagaattaaaagcatcctacataatattattaggaagcatttttggataaataatgaattttattaataacaattaattaaattaatagtctacaatttaattaagatatatctccggttgaaaacacaaccaagatatctaattaggatagtcttgtgtatgtgttatctctagttgtctcactttcctttctcagttcggtttgttagttcaagattgtcgcgtgttgctttcttctctgaataatattaatatacgttttgttaaacaatccgcaaacaaagtagctcattgtcttgcaagaagccactacaaaaaatcttacttttagtcataataaaacttatgactaaaaataaaaaagttgtaattaattataaattatgattcctgt

SEQ ID NO: 331165 - DNA, 1235 bp, Cannabis indica
ggctcatggagagtttgaatggtgcattcagtctctgtgaggttgagagcaacagaaagagatttggttagctcatccatggtgcaagtgaataagtagtgactgagatcaaatgagatgatattaatataatgggaccgagtgggtaagataagagaacaactattggacgcctgaagaattatactgagcagaatatagtgagtcagggacaagggcgaaccggtttgtggttggacagtaatattcgaaaggctgaaaacagggtaactacaagctaatggcctacgaactatgggagaatattgaccagaaaattgcaacgactgagtagacttgagactagtacaataccataactgaagccttgagatatcagagagagagtttgtgaagacagtgtgcagaactggactcggctgggttaattggctattatagtgactgaagtatatatataaacagcagtagctattattggaaagtttttgcagagaataaaacttagtaatgatagggatgtatatgcaaaaccacagggatgttctgcacttatataggaaagaaattttgggatagttatgaacagatttggtaactatcacatctgtagcatttactgtcaaacagagttgctgcacaataggatttcgaattgtactaggcagatcacaattgcagtctaaaattaatgctatattttgaaaaactttgacaaaaagaatatggaaattaatataaaaacaatttttctacccaaaatccttttctggtatcggtttgccctttgataatttaatgggaagcccaaatttatatctaaagtaccctaagaaaaacccatttctctgatgggatttgacagtgaatagggaaaaaggatcaaaggagttaatacctgtaagagagtgattaatgcgtgtacggttcgatcgtctgggaatctggccggagttatggttgatacgactggagtggttgagacgggtcgttttgatgcagctgagacggcttgaacgagtcgagctgcactggttgtcgttggaagatgaatcggagccacctagatcgagggatctggggcttggcaaaggttccacacagtgggaacgcgaaggagataggtgtgaacacattgcagagaaagaggaaggcctgttcagactttgcatgtcgagagggagaagaagaagagtctggaagtgcaaaaattaaaaaaatatcttatttatcct

SEQ ID NO: 331166 - DNA, 1026 bp, Cannabis indica
aataatttcatgattaacataaataactgctaattttcaaattaactaagcgggctttacagtaaccctatatggaatttttgggatgcaaccaaatgggttataaggaatttatggagaacaaaagacacatgttcactaaatagaaaattttggatatcattaagatttctgattccgatcttataaagatttttgttgtgagatttttgtcacatatggttgcaaaattaggaatggcattgaaaaataataaagatatatgttgtgataataaatcaatcaggttacattttagtaacaatacataagctctgcaaggtcaataccacattgactttgaactaattgttatttataaaatgaagttaagagtaataaggtatttatagaacatataccgacaaactctatgttttcgaacttggatcattaaggatatactacttaaggcttttcaggagcttgttgctcatatatggatgtagtattatttaagattgtattggtttagtgagagtttgtattttaaatattctatcaagctgatatatatatttatagtttaattctgcagataaagtatggacttaagttttgagtactctgaatgtttactttctactgcggtttaagtataaagttagaaagaattaataaaggattgatctcaattaaggaggaaccatttagaaataggtacgctaagatcacatttgcatgtaatttccatgctatgcatccatgattgatctatttcatttagttatattgatatatgtgaccattgctgggcttatctacgctaaatatggcgaaagccgctttgatcctatgttagtataatcaatagatgagattattttgaaacacctatagttatgatagcaataattaagcgcttataaggttatacactatcagaaaatgtagcccaagttggagattgttggattaaaattctcaatacgggctcaaatgaattagtgtactgctatttgaaatttgaccaaaataaagtgatta

SEQ ID NO: 331167 - DNA, 846 bp, Cannabis indica
tctctacaactttatagtaatgatattccaaaagttaaaaaagtattttttttttttttttaaatcacaccaaacataacattttatctaatcactaaaaactctatcatagtgttaataaggcttggtagctactataagagcaatcagatcaatgactcactctattcttcaaaataactcacaaaaattttactttatctattttacctcaaatttttatatattactatatatcagtttctttatttttttataacatttaaatactatattttttctattattatttattcatttaaaatatataataataaaaaaaagatgaaaaatataagagatgagaaatggaagagatatttaaaataagtttgaagaatgaataatattttctaagcgaatagagattgagctaaaatagctataaagtaaagaatctaacggatgcttaattttaccacttatgacgctattttttttaacgtgaaatttagctattttaagtattttaagtatcactttctcgttgtcacgcccttttggacgggatagagtacaacttagtagtggtagacactttgagaagaaaaaatttaacaactcaaaaatttgaggtcaccattttaaagttgtgtaatcatcaatagacacaaaaattatatttattcttaggctttgataactttgacctaattttatcccaacaaaaagtagataaaagatttttattaaaacctcaaatatataatctttcaatttaaattatagctaaattatattagggaaaaaaacaggaatattctaaaaatggtaaaatattacaacaatactgtgggccggcccaat

SEQ ID NO: 331168 - DNA, 1038 bp, Cannabis indica
actaggaccaggaccaggaccaagactcgaacccaaacccaaataaaaaactagaccgagatccaaactcgaaccgcgactaggacccgaacctgaacttacaccaggacacaaacttagacaagaatcgggacctggaaccagaattgggattgggaccttggcaacggaactaggactgggacccaagacttgaccccagactcagacttgaacctaggacccagctcgtgacccggcaccaaaaatggaaccaaaccagcacgcgagatcagggtccggatcaggacccggggcttggaccgaacccgtagttagtgtcaagatctgggacccagccccaaacccaaaccaagaccaagatgcaaacccggacgcagacctaaactcattcccaaacctaaaccttgatccaaagccattccctgtgacctaaaattggaacaaaaatcagaagtagaccgagtttcccacccagacctagatctgaattgggacccggacctgaatcgtaatcaggacccagcctcctaccaagacctagatccgaactgggacccagacctgaatcctaatcaagaactagactcggtgccgaaccttgacccaaaatggaactagactcgggacacagaattggggtcgagacctagaggtgcaccatagtcacggtcccgaacccaaacttagacatgggacccaagacctgaactagaaccaaaatcggaccgagacacgtgatagggatttagatctaggactcaaacaaggacccgaacccagactaggagcaaacctcaaaccctaatccagacccgagacttgaaacttgaacctaaacaagaaattctagacgaggatactcaaacaagactaggaccgtgatcaagacccaaacctagaccttgaacaaaactcgaacctagccccaaacccaaatcgagacaggaactctggcctatgcacggtcatatacatagactgggaccaagacccagacccaaacctggacccagacctagacctaggacctgatcc

SEQ ID NO: 331169 - DNA, 1417 bp, Cannabis indica
gaacttgaaatgctagcatttgaaaaatccaagacttggaccttattttgtgatctaacccaatttggaaatgaaggacctaaatggcatgaacctaagacaaggccctttcgaacatggaaaggaggggtccaatttggacttacagttagtgtaaagaagttggaagagagacgtaagttgtccaacttatgcaactttagaaaatgtgtttcagtgatgttaccagtcaattggttgaaagaaacatccaagaaagacaattctgataactcgcctaagttttcaggtagagtcccatttagcctattttcagaaagatctaaatgtgtaatgttttgcaatgaccctaaagattttggaattggaccatttaacaagttcttgttcaaaataagcttaacaagattcctaagttgacccaaccattgtggtaatagaccaaccaattcattattattcaaatgcaagtactcaagactaggaagtggactctcagaatgacaactatgtgttccttcaagtaattcaggtaaagttccattcaatttgttatatgacatgtcaagccaattaagattgcaaagcttaccaatggagcctggaatccttccttgaacattattctcggaaagatctaagtaagtgagagatgtcatgttcccaattgaagtaggaagtctcccttgcaccttattattactcaaatctacaaattttatacttttccatcttcccctgaaaatttcaaaacaacttgcattaagattataattggttcgcagacgcaaagtctgcaaattcggtagctctgcaaaaccaagtggaatccttccatgcaagccaccatcacttacatcgacactcagaaggctgctgatattggctaaccaatcaggtatttttgagttgaaattgttaaaactaaggtctaaaacagcaagtgatgttgttgaattaacaaaagaaactgagggaaaaggaccctttaagctacaagaagacatatgcaactctgctaaggatgggagcttatttagtattatcccaaaccaatctaaacccaccattgaaaggtcaactccatccatcttaagatgctttagagagactagacctgtgatccattcaagattatcaacatacaataattccaaggcctctaagtcaaggtactccaatctagagagatttcctatatttgaaggaaaccaaccactaaaccttgcataagagagatttagatacctcaaatgcttcaaggatccaaaaaagccaggaattgggatgttcatgaatgtgttgtaactcaagtccaagtgtctcaatgacttgagttttgtcaatgaaggccttattttcccaccaaacccccagaagtgatcatacctgtttcgaagatcaactgtaataactg

SEQ ID NO: 331170 - DNA, 950 bp, Cannabis indica
ttttaaaattgaggtaataaaaaaaccttaggtttaaaagacatacataaaaatagtatttttatgttttataattcatatttattgtgcaaaatactttgtattaagaaagaacaaaacacattgaaatcgattatcatttagttaaagaaaacattgaagtatagacttcacatacttcttctctaagaacaaatgacaagacatgtttactaaggtataggttgttctctctgagggtggcgtataagtctattattatcaagggtcgttggagagagtctgatcagatttggaatcggatttggaagctccagattaccgacgtctgaaaatgttcctttggaaactttgcatagatataattccttttggaaatcgcctccaaaggatctttggtaatgatactagatgtgcaatttgtggtgaggcggacgacttggctcaacatctgttttttaagtgtcctcttgctaaagctgtgtggtttgccagccgttgggctcttagaagtgattcacttcgttttgactcccctcgaaacatgatggagtggctcttatcccctgattttttacagggtgctgatgaagatgattttggtgaatttgttagatttggtatctacttgtttgatgcgttgtggactgctcgcaaccgtgcctttcatgaccatattagtcctacttggcgaggagtttttgctaaggtgaacaatgttgctgccaacctttgagctgcttgggaatctccaagagttgctaatgtactgcagcaaaatctgactgagatttacacagataagctggtgttgttggtggatgcagcgtttaaagatatgcgtgctgcagttgggattgaggctgatctccttgctcagtgagcgttttgtaactcctttttctggttttctaaatgctgaggacttggcccctcttgtggccatgtga

SEQ ID NO: 331171 - DNA, 523 bp, Cannabis indica
tagaaatttaatttctgtttaaaaattaaaactacaacattttaaattgacatttttgagtttaaatttaaattgacatttttgagtttatattgaaatatttctcataaaggacttcaattatgagtttcctcattggaaagtggactttatattctacaatcagataaacatattgctcttaataacgaactttcttagtgttgctaaaccaagaaactataaaaaagaaaaatattaataatgatgaagaaatatatttatggaacttacggcttggtcatattatctattacgtagactaaccatgggtggtctattgaaaaatgtcactcttagagaattacctatctgcaagtcatgtctagaaggcaaaatggctaagcgctctttcttcgcacagggaaatcatgccatagtaccactcgaatggttcatgcatgtgtctgtagaccactaaatgtgcaagcatgggtagatttaagtactttgtcattttcattgacgattactatagatatgg

SEQ ID NO: 331172 - DNA, 1045 bp, Cannabis indica
gaaccacgtccttcagataaaaattgagagagtttatgcccgttttactgacatgggaaagtggcagctctcaggcatgcatgtcttggacccctcagggtgtgtttgacttgattttggatggtgagtcagatttttggggatctagggattccaaaacctcattttgacatccgaaaccctaacgagagacgattgccaccagtcggggctagaaagtggcagtggtcggccatggcttgtgggaagccatggatggtatttcttgattatttcagtcttatggatgctagaaaatcacttcagtcacattatttcttggccgatttcttaagagagcactgccacaattttcgctaaaaagtggcagtggtcgcatgagagggctatgaagccttgggtgacttttctcccttgtatttgatacatggatgttaaaaatacaatttcgccaaagaaactgccccttctatgtggcggtcaaccgctgctaccacttatgctaaaaatgtgatagtggtcggacaagtggtttccacaccacttggtggcttctctcacttggttttgacatgttattgataaaaatgtacttttggcaaaatatttcatccccatttcttatgggcgaccactaccaaaaatttttccacaaagatggcaattgtcggctaagttgcattttggtgagaaatggtttctttcacttgtgttgcactcctttgtgttgagggaacacattttgacaagtcccctttggtgctttataagtggcgaccattgccatctccttgtggtagtgttctccaaaaataggagagtaaagccatctccatatgacagtgggcgcataagctctattgcatgggaatctttgctggaattattttaccaggatctagatttactaacaagtatgtttcattaacatcctaatatgaatttctaaaataatgaataaacacatataagtttaagaaaccttacattgattgcagcggaatataatgactcattccgtacagatctctagcccttgattcct

SEQ ID NO: 331173 - DNA, 1037 bp, Cannabis indica
taaactagattatttatagtctcatcaaccaaataatccttatttattaattccatgattactccactaaaatataggattgactcttagtaattatagaattatatttactgaattttactgtaatgtccattgatataatcaattctagtgattagccctccatatattggtttttaattagttttgatcaaattactgttttacccttctaattacttctttatcctttagtaccattaattcactagtagtagtgatccgtgcattatgggtttccccttgaattcttgttcccacgtggccagttggctggcaaggaatctctccaaccaactttgaatgacccctacgtggggtagtcatgcaattggagcaattatcttctctaatttgttgagacatgttagcccttcactgttattgctcctctcatcggttcacaatattctgccagttctccatgaaatagctttgaaactattcgtgttttttgtcaagagagccttgtaattgctgttataggtcagccactgtttggctaagctattcaactcaaggatcgaccttctctgggtcttcttgttccacacgtggtttcctaagtggaacttgttcgctggtttcagtaccggtagtagttggtggccttgggggactagttgtgaagctggttttaagatttccacctagcatatgtgatgtaggtgtagtccaatcaccagtttcagtgactggcgtgcccccagtttgctggccagtttttttggttattctttcaacatgtgaggatcgtgttgcaactatcttgtaagtgtttccttgaattgcaactcttaatgaatataataaaatgttgacgcaaaattctagacacagatctttaggccacacccgctctctagattgtcaataatgaattgtaagttaagtatatatattagagacacacagatttatagtagttcatgttggaaattattttaccaggatctagatttactaacaagtatgttggattaacaccctaatatgaa

SEQ ID NO: 331174 - DNA, 1166 bp, Cannabis indica
ttcttgactttgttgtagaagataggtagaaaatttacgtttaaaactttgcaattttcttcacaataatctgtaagacttcacgattcatgatgctcgtctctgatcataaattgtctgtctttcacctttcttattcaaagtttcgtgaaattttgccctaaacccaaaaatttcaaacttttggattttgacttattgttgaatatttccattgtttaatccgttgggtactcctggtcagcatattttcctatttattgttcgatatccaaaccaaatactcatctcgtgtgttttcttttgtagatgaaccctggtgagttttggggaagcgaacaccgaattgactaggatttgcttcaacttttatacgaggatcatcctcgtcttcgtgccagtccatcctcttcaagtgacgggctctccacttcaagttttccatcaagccaaaggatgatgcctcgaacaaagcaaacaatgcgtaaggtcaatgtgtccaaccttcacatggcccaacacgccacattatccagcgccgaataggatccacccgttctggaggagggggatcatgaaggggacgctgaagtccaggaaattgaggaacaggaggatgcccgtcctgatagcccttctgaggcggaggaagaggaggaggttgcacctccaaattttgggggatacaacaaggatggggagccagcagatacggacggtgatgtcctggttgaaggagtggactacgtcactgaggagcttactgctgcagttccatacaggaggcaaggtgccttaggtgctagatgggtgagccctctgtccaagatcattgaggcacgcctaagggatctggaccagtccggctatctgggggagctagagtgttatgtcccttcctcaaatcaccgagcctcaaactcaaagaaggggatgtgtgtttggtcgggtgcccactctaaacaagaggcaatgctacctttgcacccatacttcaggaaggtggcagatttcttccgcctttctccgacccagtttactcccaagggcattaagtatttgtctgccctgtttgttctctacgtcgtccagaagtggggcgtgaattctccgcatgaggttagttggttttttaacctgaagtttacccccaagcaaggcaggtc

SEQ ID NO: 331175 - DNA, 1566 bp, Cannabis indica
ataaattagaaagcaaataaaatgtgatactacgatattcaatgaataagtaaaggttaatctctaccctcaacaatcatctttagttcctaataatgaatgttattttagtattctaattaaattattaatcctgcaaataacgatgaagcagtcaattatctcaatctccttattgtaattaaccaaggcgaagcgctcaataattaatttttttacctaaatagtaaatctatgaaacatacaatttatttaacttagataaagcattacattcaatggagatagattaatctacacaataaattaatgaagcatataattcatttagcttaggttctattcttcatcacaattaaaaatatatttgacaatattaaaaattataatttatcacaaacacttaaacctttgactattaggtgaatatcaatactaagatgataatagattaaaataaaacttaatttagtgatcatctaaacaaaattaaagtaataatcatgacaattgaaaatagaagaatagaagtaatttgatataatagaaactaaaaaattaacattcatcatagaaattaaaattcatgtcttgggctttaatataacccttaactaaaaagaaactactctgaactagacattataatataaatcataataaaaagtatgagattaaggagaagaaaaggaacaatgatgtagaattattggtgtcgtaatctccttcttcttctttctttctatttgggttttctctcaaaaacacaattcaaaggtgctaaaaattgaacgtcctatatatattccttcaaagatatttgattaaaaaataagtttgaaaaaaaaaaaaggaatcacactctcaccgcgacgagcttctccattcgccgcggccataacccctgtcagggagcttcttattttcttgctgcaacaaaactccagccttcgctgctgcaaaaatctcgagttttgggtcttcatagattttcaaaactctaggggctcgtttggaacactggattggacataaaaggattggattggactgaacaggacaagattggattatgttaaaagtaatcatgtgtttggtttagactttttattttatttttaaaaaaacttatattaaaataaaaatatataataataattaaaaataaataattcccatcaaaaaaataaaaagaaatagcaaaaataattaaattataaaataaaataatatatcaaatatatgtatcataaatatataataaaataatttatcatatttatatttaataaataattacaataatatatatttatttatgctaaataataatttaactaatttaatacaaatattagttttctaaattgataatataaattttttagtaatttaaaaagaatatataattttattatcatattattcttctataattaatttaagtagcaattgtttaattaattttattttaaattttgaaagcttatgtatgataattcaaaattatacattttcactaattttcataaataagtttttgataaaaaatctataaataaattt

SEQ ID NO: 331176 - DNA, 1249 bp, Cannabis indica
gcgagcccccaagctacgcacgcacgttacacttgcacacaacataatggctttgccatgtgagccccccacatggggctcgcatgccgagcccccaacctacgcaagcacacaccccacggctcgcatgcgagcctccctcatgggctcataggccgagccccccaaactcccgcacacatagacaatgctcacacatccatgtacaatttacgaggtttgttttggagctacaagtatcaacaatgattttgagaaatgcacgccgagtgaataagctttttgaatgcgttcttattagtcttttgattatttgtcgacttatcttgagagttagcagcgccaaatttcagggttaacacttgcaacccagtctacaagaattcttctaactattcttgttgactgagtgacttggagaattttcctttctaaagtgtgaatcttgtcttctttgtgttctataaggatgtgcccaggagcctcccttgcttgaatttcacttcataacaacaccttagtgtaatggaaaactcttctcaccctgtctaagaggtcctgggtttgatccttccctagatcaccctttcgactctcattcctatcatttactttttgttgcagagttatctaagttaccatgcggccaaatgaccttggtcaccatgaggccgagtaactttgagtcgctcttggggctgagtgacatttctttactttttggccgagtgactctgtcaccatgaggtcacgaggcagtgtgacatttttagctaatgtgggccaagtgactctgaaggttattctttggccaagtgactttcgtaactgatgtttgtcgagtgactctgagggttactctttggccaaattacttttgtaattgatgttggctgagtgactttgagggttattctttggccagataatttttgtaattgatgttggctgagcgactctgaaggttgctctttagccaagtgactttttgtaactaacgttgggcgagtgactataagggttactctttggccaagtgactttccccactatatatggtaagcaggtttcatttgagggagtattactctttcagcggtcttattctcttattatttactcttcctttgactcagatgtgagggagcttaattattgtacttgactttgctaccctattgatttgtaagctatttgcttactctcgagaggcgtccctctcgtttcagcgttagccatgagtgtcttt

SEQ ID NO: 331177 - DNA, 413 bp, Cannabis indica
agttgatatttcattttcaaaaacgaattatctcataacatcaaagattttgacgagaaaaataaatgttgtgaatctcaattgatttcaagaaactgtgaaattttttcttcaactaaggagcttgaataactgaaaagaaatgttaaaattctaaatctaggttttaacatttttaaagagcttcaaaattcaggataaacgagtcatgttgatttgttttttgttaaggctcaatctaaatcaaattgtaaatttgtcaaatctgaaaatttggtttttggatgttctgacattacttttgaaggttctaattctacaataaagtgcactgttgtcacataaaagaatcagtttggtaagtttgacaattttaaaggaaataggaattggttcatgttggaaattatttt

SEQ ID NO: 331178 - DNA, 821 bp, Cannabis indica
tagggcataaaatccaacagaattaccagttcccactcgtctacgtaatcttttttttaacaaagatttaccccaaacgatactacgccacacatagctaggggtataaccaactgcaacaaattgaaaaagaaaacagataaagaaaagcataatataaatataggaaaaattaaagcttaatataaacatccaaacatgaacctgtagcttttaggaagtttgtgtttcgatgatattgggctttaaagatcaatgatggtaaagagtcaggtttgttaagaattcgccatgcttgtgaagccaaaagggcttgagtgtgaaactcaaaatcacgaaatcccaccttcattttttggaaaacatagtttataccatgctaaccaatgagtcttattactttgtacaaaattcgtccaataataatgtgccatcattgattctaaattttcacagaaacctttcggaatttgaaaataagacatcacatatgtgggcatagcttggataactattttgagtaaaacttttcgcccaccatatgaaaatagttttgaattccatgtgttcagtttttgccagaccttctctttaacatctgcgaaaagcacttccttattccttccactcaacattggaagtcctaaatacttcactattgccattgtaattgggacattgaatgtagtcacatagtaatcttggacattctctggtgtatttggagagaagtatataaaagacttattaaaatgaataatctgtaacataaaaaccattaaaaatacttagaatgtaaattatataaaaataaactagga

SEQ ID NO: 331179 - DNA, 1189 bp, Cannabis indica
atgagggctcaataaccagagttatttagggtagatttcgaggacaaaatccttttaaaggaattgtaaagaccgcttagttttgttttgggaaataagcagataattaggatttaattatgaaactagaatattaattatgaattattattttatggagatttatttgaattcagggtgtattatttatgtcatatatgaaattttatgtttttgtatgttttgtgctcagtaatattgaaacacagcatttggccagtagaatcacattttagtattttaatagtaacggggcaacttagttagacattgagaatgtcaggaattattcaaggtagtagaattgaccaaaatacccttaagtgacaagtgtgcttgttgttgtgtgtgagagcaaaatggtctttttggcctttattgcttttgtcctttagtgagttaaattatgccttaatctgatcctttaatgttaatattagttagataaatacattctattaattcatttatttaaaataaggaaaaatcaagaaaattcttctctctctttaaactctttttctttctctcgagcaccctagaaccagcaagaggttagggacttttatagctccaattcaaggatttcaataagtttgtagtgtttcaaccccaggtataatcccttagtaccattcttttttatttcttaagcttaaagttaagatttttgcatgaaataatgagttagggttctgtggttataaaggtgtgtttaatatgagttctgatgttgtgttggtgttattcaagctctgttatgttgatttcatgggttgttgttgtgtttgagcaaggtttgagtttttgaactcaagctttgctctataatggtggtttgtgattctggatgtgttggggtgttttattgcatggttttatgttcactatggtgtaattagcatgtttggaaggttttgtttgatttagggttgatttaaagttgtagggtgattttgtgagtttcctacattgaaccgaaattccagttcaggaggacctgtaggaaccagtcgatcggttggtccccaggaaaccccacagaaccagaattccagttggagaaccgatctaccgatttgggcatttttgggaaccctaatttttcccatttttgcgatatttagggtattgtcatgttatccatcga

SEQ ID NO: 331180 - DNA, 1346 bp, Cannabis indica
aagtgttaccaaacgtcaccaaagtgttaccaaaaactacttaaaaaagtattttcaaacgcaatatttgtttttctttgatgcggagattgaaggaataaaaagagcacaagagatgcatggtaattcatgaccattagtacaagataagagtgtctttcataatatatttttgatgctttaaataaaaggatttgggtcggggtcgaattgtgtgattatacattgattttggttaatataatagttaattgacacataatcacttaattaaagtgaaccaattttcttatgatcatcttacaattttattatgtattattttttaattgatcatgaaaattatttcagagacaatattaacatgcttattagttgaaggaaataacaaacattattaaaatttcgatataatgattatatcttaataatttagtggagttgagattttgttacatagatcacagcatgatgaatccatttaattagttataaacaaatttctagtggaaaatttgttgagtgtgtgatgaaatatctcttaggttgtcaatctataattgagatttttgagtattttatatataatgctcataaaattgttagtgtatcatatagtacacacataatgaaattgttggtgtatcatatataatgcatttattatattgctatttgttcattaaattttattttatatttctatatgaaaaagtgttagtaactatttatagtcactatctatgtacttaatttaatttataatattttgtacatagataattatagataaaaaatcttcttaaataggtattacacattcacatcgatacatcgataattactgatgatattaattttagaaatattatattattagaatttaatccaatgaccaataataaaaaagaagtttgattttctatacttaattttaattatataattattttttttacattatattattaaatatgaatatatcaaaaatatctaactcactcaatttttttatttctctaagttggaataatcgaaccctagcccatataaggtaaaaatgagggaaaaaatcaatttaataacaaaattaagcataggaagtcaaattttgttaatatatatagtatctattcatgggtaatatccattaaaagtgcaccatgtataaatattcttagtttttattttggatatgtatattttaattgtataattagttttttattttttatattgtgtggatgttattcaataaaataagattattttttattaaaaaatatttaatttaagtgtatttataaaaaaaatataataatattcaaaatttattgttaattata

SEQ ID NO: 331181 - DNA, 978 bp, Cannabis indica
aaatgtctattttttttaaaaaataaaaaatagtcaaatataataaattagccaataaaaattagagctgagatgcaaaatgactctaaatttagagactaagtaaatgtctattttttaaaaacattaacaaatggtcaaatataataaattagctaacaaaaattataaaaatatattttactacatattattttgttaaaaaaatatatataataattgttattccgattttttcccacatatatgacgtggcatgttaacgtggccaacatcagtacaacgtggcaatacaactcaccaacaagaaggccaagtcatctatttagcatttcaaccaacgagaattgattcatatatacaaaatatatattgagatacaaacaaatcatgaaaatagatatatttttttttttggtaaaaatataattggaaataaagtaaattacttattgttggtataggaaaatgacaaaaagagagaataagtaatattaaatggtgtgtactatgttctctgtagtagcaataccagaagaaaaagagtagaggaagaggacgaaactcaatagtaaattttagaatggcaatagtttttttttattggagtttagaattacaatccttagttgtgggcagagagagaagcgcgtgacttacaagaagttgtggggtcttacaatatttaataaataaaaattattaatttaataatataaaagaaataacacatatgcaagtgacgtagggaggtactcgacatctctcccattttaactttttaccacttatttgcttctccattaggtttaagataaaaaaacacaatagcaaaaataataaatgatggagcagagagaaagagaaaagagttaaatgcgggtaggtaaggcgattcaattattgtttgaaataaagaaattgacattttcaaaaacaaaaaaaaattgagtgaaaagaagagaagagattaaacat

SEQ ID NO: 331182 - DNA, 671 bp, Cannabis indica
tactaagacatgaatataaagattagttttgagttaaacttgattaaaatagccccttaattccaaatttgaaaagatttatgtttttatgataaattttaacaagtttttttcttactcttacactttttagtgttctcttaaatttaaccctacacatctcgaaaaattataaaatttcacaaggacaaagccaaaatcgttgttcatcacttttctattagatacgttgagagaaaaagtaattttcaagcactaacaaccaatttattagaaataatgaaaatttcacatttgtgatagtggtacatctctagtaaaatatggccaagatccatctcaaattatgcttccccactagtcacaatgaattcgtactactaaaacgtgtatatgaagattagtttcgcattaaatttagttaaaataactgcctcattaaaatttaaaatatttttcttttaaggataaattttaacaaattgttttcttactcttatattcattagtgttttcttaaaatatcatcctacacatctcgaaaaatcgtgaaaatttataggaacaaatgcaagactgttgtgcatcacttttctattggacacagtgagagaaaaaataattttcaaacactgacaatcatattaatcaaaatagtgaaaatctcacat

SEQ ID NO: 331183 - DNA, 999 bp, Cannabis indica
ctcatcagtataactaaaagcaggagaataataagaataccaaaagatcatattcccttttattttctagaaaatccaacagcataacgactgtattttgaataaatctaaaaatcataacctgcataaatatttgtacaaagatatatctggcactcagggccccaaaacagtccagaaaaatatgcagattaagttttcaattttttaaacaatttgtaaattataaaaattggaatgtgtctaatgttattcaacacatataaaatcaagttgagtccctacctctctcaagtcgttaaactttatccaaaaaacgatcttaagctctcaagtcatgagctccaattgtttagtctaatcttagatatcacttccacctataccatcaaatagctaaatagttatcatctttgcattttacattcaaaatcgagtacaacaacatataaaataactatatttaaagtttagaattttaaaacatcacataactagtgcacattaattattagaaacgggtgtactagaaacattactaaaaatagggatagtatatatcaaaatgaccacctcgatgagtagatcacacccatactaactatttatcgaaacagtacatgatatcactggaaataggcggagctataaaattattaccagaaaaagtagcgggttgggctaaatgacttagtgtagattgttctcctcgacgagttgagtctaatggtgaagaagactcgtcaaacaggcaccggaaatgactagaaaatttgttaaaagtttgaaccttcaaactttgacttgcgatcttgggcaaatggcgacggaaaggacaacaccacttaggagttgaggtcattggcatctgtggatttgaatggtccggcacgtgggtcagacgatgaccgaatggtggtcactgaagttacaccgatgattgtatttatgggtttttcttttgtggtttgaagagagagagagagggagggggggggt

SEQ ID NO: 331184 - DNA, 1205 bp, Cannabis indica
ttatttagtaaaagttttttttttttttttttgtagataatattttgaaaaagttgatgtagcagtaaaattccttaaaattaacgaaatatatatatatatatataaacaaaaatatatatattgattctctttctataaactaaagtgggagttgattgggacattagttttatccgcagccctcgatgcatgcatgctcgaaatgttaaagtaaattgtacttttgttttgttatgattaagttttcaattaaatattttgatcgaccaaatcaaatgtgttaaaatctaaatcgtcccactcgctaagacccctatcccaagtgatgacataattgcactttatataatcttgtaaataaataagaattcatacccgatatgtgagattttattgattttatacatactatgacagtctcttattaatttgtctaaaatcggttcaaattttcacaatatattagtaattatgtatagatttatatgaaaggtcgacgaatgacaaaagagattaacttaacgtggatgagtgtgcaatggtgataatttcttatatcttattttggtaaccaaattggaggattaataaaatcatcacacatggagttattcgaaagtttctcataaagaagttaattaagctttgcgattatattattcatgacagttatgtgtgtccaattactagcttttctgtcgatcaaaactgagatttataaatataaatttatatccccaccaaagaggaaaaatgatcgatatagaaaagaaaaatcaaaaggaataagacttggcactgcctatgagctatatgtgccctgtaaagtacatgacatatgaagaataaacattttatacatagtaatcaagtactctctcgatcgaacccacattcaaattacttttgttcatatagatctatgtacatgcagggatgagttggacaattgtattttctcattcaattctacttctattgattaatatatatacttagttagtgattcagctgcaggtataagaagaagcatacatatatatatttagaggacatttcttcttctataagagcttggaaaaagaccctataaataagggtaagttaaaaaaataccacttttattaatcaattaatcaaatttacctttaattttatatttaattgaaacatacctctttttatatgtattgtacccaaaa

SEQ ID NO: 331185 - DNA, 766 bp, Cannabis indica
atattatgccagtactatatttgcgtgcagcaaatataacgaaatttacaagcctacgtttttgtttgttctgttggatgctataatttttattacatttacatgtacgcatataaaattagaaaaaccatgtatattaatttcgtgaattttggaatgcaaaattggtttttttttgttttttttttttttttaatttgaataaaaagagaaattaatatcagtgttattagaatattgacacatatatattccattcaaaccatagagctatttttctttaatcataatagcgcgttcatcacggagaaacatctgggtgaatgttcgccacataaataggtaagattataagatatagagtttgctaaattacaaatttcattacgtgtgtaaatcaaagtacattttccgagtttagaacgtaatattctagatgcatatatggtgactattaatgtaactaaatgtatattgtcaaagcaaagccttatctcaatagtatttggaacgtccaccctcaaatttcataacagaatatataaaattagagatagaaataatgtataattattagacagcttaatttatataggtgtttgttcgttactccaaagatatggttttgaatctgattcctctcaattttatcttctattttgatttatatctttatatattaaaagtgcctatctaacggcaattcttggtttaacagaatatacttaaaaataaaaagaatacccgttaataaataaacccaata

SEQ ID NO: 331186 - DNA, 1311 bp, Cannabis indica
aactcgcatgagtactcagacctgcaagtaattggtcaaaaaattgttgaaaagtgtaatggtcttcctctagctgttaaatcacttgggggtcttttacgtgggaagcaaaataaaaaggattgggatgagatattaaacaacgatatatgggggttgtacgagagtgagagtgttggtattcttccagctttatggctgagctatttttatttaccttcacatttgaagtcttgtttctcctattgtgccatatttcctaaagattatgaatacacagaagaagagctggtcttactatggatgggtgaaggtcttttagagaaagacagaattgaagatatcggaaagaaatacttcaaagatctaatttctgtgtcattttttcaaccatcaaatgacacttcgcaaccgacttttctcatgcatgatcttatacatgatttggcaatgtttgtttctggaaatttttgtttaacgatgaataatatcaataaatgttctcgcaaggttcgtcatttttcatacatgcagcaatgtgcaaaggcagatgaccctaaggaatttgaggatttatttaaagccaaatgcttgcgcaccctattgtggaaacaaggttcaagcagtgatcaactgaggttgttaaagaatgaagacttggacaagtcattcccagtcttgagagtgctatccataaaggacgataagatcacaaagcttcccgattcaataggaaatatgaagtatttaagatatttgaagttagattgtggtaagattaaagagatacctaatacaatttgtaagttgtataatttggagacactactgctggagggtacaagtgttactcgactaccaactgatataggaaatttaatcaagttgcgacatcttagtgtttctgtctatttaaaagggatgccattgcaattggggaagctacaaaatctgcaaacacttaatgcatttgttgtgggaacaaataggattgtggtggtattgaattgttgaaagtgtttcaagatctacccgggagtctttctattaaaggactagaaaatgtgaatgtgagtaggcttgaggaagtttcagatgctgcagggccattattaaagagtaagaagtctcttagtcacctatctttggaatggagtcgtcatcattatcctaatgagttgcagaaagaaagagagctactcaataccctccagcctcatccaaaccttagagaacttatgatttctaactacaaaggcaacagtttcccagattggatgggagatcatcgctgcttgtctaatttagtaa

SEQ ID NO: 331187 - DNA, 479 bp, Cannabis indica
ctctctctctctattctttctctcttttctccgatacatcaaatgattccacctttaaagctctgtaaactccatcaagataaaatccatcaacttcggcaacgacatgagcaataccacaacttcagcaccggcaagaacaaacctccacttccgacagcaatacgatcataatcatacacctgaagaaccgatcaacctccataaaaagattccaatcagcaattgaagaaaaggtctctaatcatctctgttaataccgacgacaaaaaattcaggtaaatatatatatatatattgttgaccgaggtttttgacaaccaattaaatgaaagaatgagaagagttatggaagctttaatgcatgtgatttttacgtggttcgggcattaatgagccgtagtccacgagtctttgttatttatgagagtgtttatatagagaatgttcttggtgaatctctctctctctctcttctt

SEQ ID NO: 331188 - DNA, 610 bp, Cannabis indica
atttgagtggaaggagacattatattccgctgcaaccactgtaaggtttcctatactttatatgtgtttatttcatatcgttttagaagttcatatttaggatgttaaataacatacttgtttgtaaatctaagatcctggtaaaataattccaataacatcatcattttatatttaatcttttatataagtatatatctatatagattattgataattttttttatttgttattattttgtaattttttaattttatataaaatattaagttttagcataaaaatctaattaaatgataaaaattaagcagactaataatgacatgtttatataaattgtgttttactttataaatatatgttttaaataataaaaaatataatttaaaaattaaaataaccgaaatttaataaattttttgtttgttaaaataattaaagaaactcaagttttgataaaatttgaaaaaatcaaaaatataccttctatttatctaaaaattataataaattaaataagaattatcagttacacgtacaaaattatgtaatattaattttgcacaaactaaagtgaaagaaataataatctataaatagtctctaagt

SEQ ID NO: 331189 - DNA, 654 bp, Cannabis indica
tttttttttttgaaagaaatgaagatttcattgaaagacaacttggctttgtgattgtgagtgagggatggctaaatggggttttttcgcgaatgggtcactgcgtcatagaacattcgacttgttttcgcaatagggttgaacatcagacacgagttgatcgaatttcaggttaaaaaaggtaaacccgaacctacttgttcacgtatagattcacgtaatacacaaccacgcaggagcagaggtatattgtagtcaagggtagccatgcccccacctccaaatatttatatatacagtatttttattacttctatttgtatatgtgattttactcttattaattgttagtatgtagcactctttggcccttagtcaaaccataactaaatgcaaaacaatttagaaaaaaatattaaaacaaatattgagtgtaaaaaaatgtatatatatctattctatataaaatgtggctatataacaaaaatcctgaatttatgaaaaattattgggtgactttttttttaaataaaaaaaataataaattattagatattgccacgtaaagagttaacatccataaagctaaatataattaatccacctaaaagtgttgcaattaataataaatttgttcattattatttttttttt

SEQ ID NO: 331190 - DNA, 1710 bp, Cannabis indica
caattccggagattttattaaactctagaggtattatttgacttatatgtgaattatgtaatttttgttcggcgacaacgaaaaatgcgatggatgactagtttgatcacatgggtaaatctagaaccttatttttagtgggatatatattggagaaaattaaataccgaggctgtgcagggttatggtttttgaccattttacccctaggttgaaaataagctagaattagcattaagggcattttagtaatatactaaagaaagtgaattggtagcagccttttatgatgacacttggcaagttaatttcagctaaggaattgttttcctaaccttaattcaattaaatgaaaattagaagaaaaagccaaaattagaaagaacactctctcctttccttctctctctcgaaaccagctggaactaagggagattgttgcaattcttggtgttttcagcaagaaattcagcaaaaaatcaagccaaggtaagccctagtaacactttttcttagttcttgaattttaaggttagttgagtatgtgatttttgaagttatgggctgttagggtttagtttttgtgtagtttgaattctagggttcattagatttggtttcagcttctagcagctggttttggtgtatggaattggttttgctcaagtttgagccttgaactcaaagtttaggtctttaatggcatgttgaatttcattgggtttttctgtgaattactggttagaatatgttgtatatgcattatttaggtactctggaaggtttggtggcatttggatgagttttgagcaagaaatgaatggttgggggaaacctggtgcaaaccggctaaccggtttgccaggcctgtaaaatcggttagccgattttagcaggatccccgaacaagtcattttctcgattctcgtccatttcagtgccgtaattgggtgttttcctgtttcctgaattagtgtaacccctagtgtatataacatagcgcagagttgtgggttcggattttccggattagggttttgttcatgtgatttacccggtttcattatgtgattagggcatccatttagcacaagactttccgttcaggtcgtccagcacacttgaatttggaaagaaggtatgaactgtatataatgtgtgatatgaatatctgagtgtatatatatgttaagtgtatatgcatgcttatatgttagttgcactaccgataattgtacagttatggtacagagtgcattggtatagtagatattgtttaagagtacattacactgataccagcacaagtacgggaaagtacagggtgtctgtggtatatcactcagtggtactcagggtacgaatcaaaccctaccaacactcatacagtaaggtacatagtgtatgtggtatagtggctgtaccctagtatgaaacgttcttactcatctgttaagccttgtaaataggtgtatgggcgcctagatacaagtcggtattatatataatatgttatatgcttttcttactgagcctgtcgactcatagttatgcttccatgtgtaggtaaaggaaaggcgaaagctgaacaggagtgagcttgggctgagatgagattgtacatgtcgtggcagcgcgacctggagtgtttggtctcgggacatctgggaatattattttgttgtccctgtgcgacctggttatgtattt

SEQ ID NO: 331191 - DNA, 1081 bp, Cannabis indica
gtttatttagggcataaaagccaacactcctatgagtgtgcgcactcgcgaggttactcggttttgacgcacatttagataggacttgtcggagcatccttggtcaagcttgtatgaacaagcccctacgcgtgtggaaatgctgcacgctgcctggagctcggccagcctcggtcaaaatcccccctacgcgcggatggtatgcattgcataccatccacaccaaatacatttttttttcaaaatttttcattttttttttcatattttttcttggaatttaatttcgattttttgggtaaaattttatgcaaatttttagttattaattaatattagatattattacattttgaaactgaaaaagaataatttctacatttttttgcttaattgtttattatattttaaaatttaattattttatcttatttttaaatctaaagtcagatattttatattttaattatttaaatatgtttataaaatgaccttatttaaaatttaaaaaatatgatatatttttttctaaaacctattattgtttgatctaaattggtatggttaacttgttgatagatccaatgatctaattttaaccatagtccaattgtcaattattcaattaaataatttataataggcaaattttgtaatcatctttcatctgtgtataaacctagtaatatgataggatccatccaaatcattgtgtatgtgtatacttgagcctatatgtttgcttttggacctagatgcatatagagagcccatttaattttgatagttaaaatggattaggttgctaaaataaaagggaattttacaaaaatactgcttttggaccaaaactttacatttatactgggacacggcaaaaacaacatttatactgccccagcccaatttcattacttttgtactgcccaagcccaacatcatttcatttctactgtgaacagtaaaacacacgggaaacaaccttgttcgtgtgtggggagacgtcggagacggaaatcaccaagaaaaaaccattaaatccggcgaagagttttttgaaaaggaatcagaattgaagaac

SEQ ID NO: 331192 - DNA, 902 bp, Cannabis indica
tgaagaaaatgataataattttttttgcacatattttgtaattaattaaaataatgtatacaaaattgtaaaatgcccttattttaaattggtgcgtgtgttacatggtatttatagtattgtactgttctgggaagtttcagcaggtttggagaagatttgtatggtttttggggtgaaaaccaagtttcccgtttatgccaactgagaaaccggttaaccagttttactgctgctgtaaaactagtcaaccaatttttccaacaagggaaaattctggttttagccttaaaactagtttttgctcggggtgtttttcagaactttgattagggtaatttagcaatattttaattattcaaatccagtgggagttagacgtccgggtatggagattaggctttgattccagagtttggataagttgtttatcgaattttgttgttgtgatataggacccgggatcgtcgggcgtaattccactcaggtcagcccgtagacttgatttctggattgagatgagaaaagtgttatgcatcacgtacggttaagtgattaacaattgtgtggttatagtctcaattatgatcgagaacctgaatatatgtttgctaatcctcggttatgaccgagggttggaaacggtcattaccgttatgagtaattactcctgaaatcgcggataggtttcttacttatcattcgctgtattgggcaacgatagtgacatatatagctcgtgggtaacgagtggtaagggtactttattaagtaccaagattgtgtgatacgatgttgtgtaattgtttaagaatgttaatatgtgttgtgattgaatgaatgctatgttgtttatagaattattcacttttcttgctgagtctctgtgactcacgggtgct

SEQ ID NO: 331193 - DNA, 1212 bp, Cannabis indica
agaaactcattaattattagaaatcaacaactacatcttcatcaaattatcataattgagcttgttatatatatagatgaaagaaactacagaagagttcaaagtgaacagtgcaaactccaaatctaatgaattgatgcattaggggtattgaatatagattaggagcagagcactgactatcgaccaattctcttattctctgtaaatgcataataagttcataaaaattcatgtataattgaatgagatggatttatttatatgtatttattcaacattagatttgaaattcaaacaattaccttttggtacagcagcgcctttgaagcagcttgcatagtcagataaaatttacaatcttcttcgttaacaattctaattttcttaacctctttagttgggggacttctatttggtattttttaactttttaccaaagactctgtctataaaaaaaaaaacaaacaacaatacaaatattttatacctttgaatagttcaatggcaaatacatttacgaacacaaaccagataataatacatttatatttgaaaaggacaatacaaaccagaaaataatacaaatattttattctatttacaaacagttccaatacctctaaaaaaaggcaaatacctctaaagtatctttacaaccagaacacagacgatttctagatcgtcgcctttgtcatcatcatcgaaaccccatatgggtcatatcgtcgtttgtgtatacctttgaaatctagttatcaaaatcccaaatcgtcatcttcctctgtcaactaaattgcattcattaatagatattgagattgtttcaattttaatcggtagatattaggagtgaaaatttcaatcgtatatttttttttccttccctcctcaatcactgcaattgggattgaacatttcaatcgtagaaatttttttcttcctccctcaatagctgaaatcagaattgaatatctaccagtgaagaaattggatttgttttttcaaaatttcaatcgagtggaggaatatttcaatcgtagaagtttttctcaatcgagtggaggaatttttcaatcgtagaagtttttgaattctgttacataaagatataaaaatattactgaattgttttggtgagaataggaagtttgatttttttggatttaattattgggtttatttattaacgggagatcaaacctaatcgtt

SEQ ID NO: 331194 - DNA, 660 bp, Cannabis indica
aaaaaatattaccaaataactgtcttctgtttgttctattttgataaaaatttagttcatatcattaaaaaaaagattgaagcacaataatattaaaataaaaaaaatatacaaaaatagtgtaagattatcatttccatttaataaatttatgatatagtcaaatacggtacacaaacaaaatcactaaccacatcataaaaaagataactaacaagtttgaaagttatcccctaaaaaattaaatataaaaaagataaaaatagaggaagaaggagttgagagcccaattaaatttttaaagtaataaattataaattaatttcaaatgaattatatcattaaattaaaagaagttggtaaaacagttgaaacaaaattattctttcttcttttaaaattattcatgaagagcaagaatatgacttttaaaattagtatttgaacattgggaagtgatctgatttgtcagggcttttccgtacacttaacaacataatacaacagcaacacatcataactcataacacaactttcatggttgtcatgcttaaaaaaacaccacctattatcacaagtcatttttaattttggatattcttcttaataaaaataaaaaagagtatctgcagtctagcatctttctatgtgttaatatcg

SEQ ID NO: 331195 - DNA, 818 bp, Cannabis indica
aagtgtgggccctaggcacgggcctagcctgcctatgcttagggccggccctgcataggtgtagtctcataaccgagatactaattaggtgttagaaaatcagttgtcacttttaattttgtgtattaagctgtacttactaggatttaagtattttggttgttaattatttggttagttactgactattggtcagttagttagcctctttactgtcagttagttatttatttcctttgtttaagttagttgttagtttatatatatagtgtaatatttttattaaattctacactcaatgaaatttatttcaatttgctctgtttttcgcaatatggtattattagagcaagaaaaataagctttttcctattcgattcttctctctctgatcactgcacgtcttctctgacaaggttgtgtggatctcgatccctcatcttgatcctctgcttccactcccttcttcttctcttaccccgttgttcatgtcctttcttgattgttgattctttttttgagatttaataatgtccacggattatcaagctacacaacccgcgactcaaacaaggcaacaaacaactacacaagccatcatcaatgatcctcaaattccaactagtaatcggaacctccaggtcgctcaatcaaagaatccacttgaagatctagcacacccttattgcccccatcatggtgacaacccaagaaacactctggtttcccaacagctcattaggcaagataattacgtgtcccggggcagagcaatgtagcttgctatctcaatcaagaactgttagaaattattttac

SEQ ID NO: 331196 - DNA, 771 bp, Cannabis indica
aagtttttgtcgtactaatttttcattctaagaccaaagatgggttatttttttttctacttttctttttacaatctattttctttacttttttcttttccaatcaaaatccaacttttacatagggtggttgtgacatttttaacccctataagcagtaattaccttgtagaaaacatgtacttgaaaaatgtctagcctgtaaaacttaagacataagagatgatggattcatcaaaataggctaagcttaattatattggatgaaatttctaatatcctaccaagtacaagacaaggttgattcatcagaatcaatatcctattatacaaacaaaactatggagtagtactaattactaaacatgaacaaaacaaaaatgaggtgcaactcatatacttgagttgttcataaacaggaaatcataggcatagtccatccaattttatgaaacatctttatcaacttggctagttgttgatgttttgaagcattggattggttagtttatcgctttgtgatggcattgcatcttcaacaatgcttgtacttgtacacgattcatacaaggtaggatgagttgtcccttgttcaatttgattcattaaggtgctgacatcgttgaatttccaatcaaccaagtaaccaggcctcgaaacatcagtactcacatcagtgtctcctgaaagcattgccaccactcttgacattgatggacgagctgcaggtgatgcttgagtgcataagaaagctgttcttatggttctcct

SEQ ID NO: 331197 - DNA, 816 bp, Cannabis indica
aaaattaacccaaattccagtatttttgtaaatttcccttcttattttactttattactattaccattataattacctaactattctaccaaaccaaacatgaccttagggttttttttttaattgagatccatgttattataggatgttaggcataatagagtttacctaaataagatgatatcagtcgtaaatatattaaagaacacatgacatgtttatttatgaataatacattggatttggtgtggggtcatagtagtccttatattgacatgcttttatgaaagaaagaaagagaaaaacacaaatttatgcattaagaaaatttatttccatgactataatggatgcaagcaatttaatttagaaacttttatggtagtgccgtagtggtcggggacagcattgagttccatatcgatgtagtttaaaactttattatgggttgaagatatgtacactgaaaaaaaggtactacaaaccacaaatcatccacacttttcttttcatcatatagggaaaatggatgcagtaattatttttttatttagaacttcttaaaaaattttaatttttttaaataacaatatacattataattatagtagaaattttattatttttctgatttttttaaataatttatatatctatctatatactaggttgatgttacgtgcaatgcacgtataattagttttttttttttatttagttcaattagttgatgttaagtgcaatacatgtttaattttttttaattaggtaatgtatttttttaatttttaaatgggatttgagattttgatcttt

SEQ ID NO: 331198 - DNA, 1119 bp, Cannabis indica
ctctcttagatcactcttttctttctagagtatatttttgtagcaattctctcgatctctctcataatgaggctaggtcactatttataagaacttaatacatgagggatggttttcctattgtttataatgaatgaaataggaaactaaattagttctataattgcaatgtgacaaatgggaaactaggatgtgttgtcgttattcgctgactcaaatttttaatatttaaacttaaatatcaaatttttagatgaataatatttaattttttaatagattattattaatttctaatattttgaaatttgaatttaaaaattggttattttatatttgaaattatggttagattttaaaaattttattaatttctttaaatgtacaaattacataattataaggttagatattttaatattgggtatattttaaattgaaagatgacattaaccttttactttggaatgttatattaaaattattttatatgataaattaaataatactaaatttgaaaattgacctagatatttttatagatatcctaaccataatattttcaaattcttaaattggttattttgtaaaatattttattatttagaaattatagttagaaaaatgatatttatggctatattatatcattttacttattaaaaatttataaataatattataaatattcaaataatatagatatttttgtagaaatttaaaaattgcttaatgttagatattttggcatataatttgaaaaggagggagtttcaatggtaacattaaatatgtaaccaccacagttacatttatttttagccggtagattaatattaaatggttgtgattaatttaaaaattaaaaataaataaataatatttaacttgtaacctgatcataacttgatattttattttcttataaaatattaattaaattgagttataaattactaataattattaattaacttattgcattttgttattaagtaaggatctcttagaaatttttttattgcacttattcaaataattgtaacaaaactttttataatttaaattattacacatataactttaattactaaaaaatagtaagaataacctctaatt

SEQ ID NO: 331199 - DNA, 923 bp, Cannabis indica
aaaaaaatatattttaaaatttagtataacaaatatacacaatatattttattcttatttatacaaaaatataatttaccaaaattaaatatttttatagacatacatttttttcatttgaattttttattttatttgttttatttttttatttttttagaaattttcactattattataaatcaaagatcatttacaaccatatagaaaataggatgtggattttctcccatccaaataacatcttcatccaattctagagcgtactttgctaactcgtgggctgcttgattagcatgcctacgaatatgagtaacagtaactctagaaaaaaaaaacaaaagacaacgaacatcatctattagatccgaaaaacaagataagtctgtacatgtgacgaggccaaagcagaagaaactcgtaaaaacatccatttcaacttgtgctattgggctttgttgttgaaaagcccaattaagactataaaaaagtgctttcgcttccatttcatcacttctaaatagccctaaattggtttggataatgcaacaacaacttccctttgtaatttcgaatcactgctcctatatccaatacttagtctatagtgttaacagccacatctacatttattttaagacaattgacgttcggcggcttccacggcatcccattctgcatatttgtgttaagacccgtagcattatatgtgacagtcagtagtcccgttatccgtaaggagaaataccgggtaagtcccgtgatccgtaaggagaagtaccgggtaaatcccgtgatccgtaaggagaaataccgggtaagtcccatgatccataaggagaaataccggttaagctgtacaatcccacatcgcctggggaaggtcaaatgggatgattatgagattgtgtaggtatgggact

SEQ ID NO: 331200 - DNA, 591 bp, Cannabis indica
atgcagcatgcatgtttactagacaaattagaagtacaggaataaagaaaaactaattgtatatttttaaattaattaaaaatataagcagctaaatatgcatttgatgaaccaatagtttgtaatataaatgattttcatagagctttaccataccaatttttctgcagtcccagcagcattccatgccacttgatgctcagagtgttcagcaaatcgtgaaagctgtgagctaccaggtcttgtttccgcacttcgagggcgcaatgctatcagtgatgtctggcttgaggtcaatgccccagaagctgacgatggcctagaatttggaccagaaacataattgtaggttcatgagctctatcactgcttgcagttgaagggcgagtgccacttccagaagaagggcggccacttagaaaacttggagatccaccaccatcagtattaggagaaagtgatgaagaaccccacggacaagatgatttactgccccagccaagggtacccctacatgtaggtgtccagtacaagtaattgctgagaattcatttttagtgacagctttttttctctttttttttttttggt

SEQ ID NO: 331201 - DNA, 961 bp, Cannabis indica
ttttttgcaaccgcctaaacatatttaaacatagctacaatattccattcagcaactgatttaaaacccaaaccactaactgatttggaaaggcagatcttgctccaagctacagcagcaacccctgtcaaatggtgcttgccattccataaaaagtctctacatatagcttcaattttcttaataatgctttttggaagcaccattatttaactccaatatgtatggatttccatcagaaccgaattgataagcataaccctaccagcaaaagacaaatttctagagctccatgttcgaatcttggcaaccatcttttcagctagaataaagcattcctttgctgaaatcttctttggacatataggaatgccaaagtatttaaatggaacatcatgttttgtaaatccagaatcatctaaaattctttggatttctgtatcacacatgttattacaaaaaacagcagtcttattggggttaggcttcaaacctgatgtttgtgaaaatagctcatgaccctgcaacatgtagtagatgatcttatagtccccattacagaacaacaaaacatcatttgcaaaactgagatgattgaacttcaactctcgacatctctcatggaatttgaactccagtttcaacccaactttcttcataatccttgatagatattccattcccagtacaaaatggagaggagacattgggtcaccttgtctcagacctctctttgcctaaaaaaaatccatgcatggaaccatttaacattagagagaatcttggagtcttgatacagaccattattaacttgacaaagctgactggaaaattaaaagccataagcatttcttcaatgaaatctcattccactgcatcatatgcttttggcaagtcccacttgatcatgcaattaaacttagtgttacaaaaattatgaacaatacgcaagtgcacgtaa

SEQ ID NO: 331202 - DNA, 809 bp, Cannabis indica
atacaaaatttgtgtacacaataaatattatatttttatgtttaccattatatacattttaatattttattattaattttaattaacaaactcctttacattaaatgacttgtattatcattaaattttatatttaatctttgcattattagtattattttatatattttttaataaattattaagtagacattaaatcacatattaaattttacatcaagatttataattatgcattagtgcacaatagtaaaagttaatgtaaaaatatcactacaattacttttgtgtcatatatagttcaacttttacatctctcattagagatgatcttagagcatctccaataaaatgctaaaatattatattttaacacttttaaaaaaaattaggtctctaataatgtgctaaatcttgtactgaatttgacacacattaaaaatttactagtgccaaacctgataatctaatttttttaattatagttttactattaattattaatgatagacattaataatcaatctgtacattttttttttataatattgttattaactatttaatttattattgatattgttaatgacattttactttttatcctaatttacatcttaaaatattattgtatgtattagactatcttcaataaaagatataaaattgtgttatatttaatacaaaaagtaactttgtgataattttattcataaatttttaacattgtgctctaagacacaattgcaaaacttaatctaattaatatttttattaaaaatataaaataataataattttttcatata

SEQ ID NO: 331203 - DNA, 691 bp, Cannabis indica
atattttcttatatacaactgacatttgcaaaaacacggtttttcaacatgaacattcgtcttctttagattagcaagattaacatccaaaactctaactttaatggctagcttagcagaactactcatagtttttatagagttacaaacaaattcaaagacacacttgttacgattacactaaatagaacagaagacagtagaaatagtggcattgcaaataacttccatcaaatttgagaggtgattcatactctgatgcctccactcagcaaaatcctttggccaacgaattaaagccaaccaagttgtaatctctgagatgactttatttgtaaagagacaataaaataataagtgttggtgtgtctctatatcagctccacaaataggacataagcaagaaatgagctccaaaagcttactaaagtgaactcaagtaaaaagttggccattgatcgtttactgttaggctaaaattagtttaagtttcgggtcgtattttcggttagttttcactctttgtttctagttttaggattattttacgcttaattcttttgtttcaggtccttgggtgtttaaagaaagtatttacaagaattgaggacaagtggtgaaagaattgagaagaaaaacaaacaagaaattttgctgcctaatcccgtcgcgacgggacaatatccccgtc

SEQ ID NO: 331204 - DNA, 633 bp, Cannabis indica
ctagatctctaaattagaagcatatttatattattattaaaagtttaaaattgtgataagacaatatgtctttatagagttaaagaaaggacttaggtatataatcttagttggattgggcctgctcaataaattcttcaataacacacttctgctttaattaaattttacacacacaaatgataaaagttgatagatcaccaacaatatgacctaacaataatagattatctaagaactcatattataataaaaataataaaatgtaaagataaataaaaaagtctatcaaaaaacataaaggagatttttaggagtgtgccataaaataccctaaattttatgggtatcatatatatatgaattgcaaaatatgaatatttgtatatatatttttaaacaattaagtaaatttaaccttctcttcttttggtgagtttctcacgtaataaagcttgttaccacttttagtggtatcgactttatatattcccttcaccattaaccagtatcctttcatttcatggtatggtcctgcaaattttggatttgaatccaaatgtcttctttttcttttctttctttatcttttacatttaatccttctcgtgcgtgaagagagagagagagaga

SEQ ID NO: 331205 - DNA, 532 bp, Cannabis indica
gaaaagattacattgaaatagaactttatttagggcacaaagcccaacacagacttgccaagagcaataagtctccttcgttgcaatgcttggggattgggaaaccccggtgcgttgtctgccttacgagcagtggttcgtaagtattctctaagttcggtctttctatctgagactaaactttatggtagttaggcagaaggtgtgaagagacagattaattttcttaataattttcatgttgattgtagttgtaaaagtagtggtttgctgctattatggatggatgatttggatgtgtcgattaaatcatttactaatggtcatattgatgcactgctgaagagcctagtgattgagttatggagattcatggggttttatggaaacccaaattctcagcttcgtaatgaatcatggaggctgcttgagaggcttaatgatatgtttactttgctttatggtggggattttaatgagattcttgttctgggggaaaataagggaggcattgtgtaacgtccccgcttca

SEQ ID NO: 331206 - DNA, 671 bp, Cannabis indica
gtctctatcccacttcatcaaattattattatttaggctgtgttggaaagtagtaggtaattaaactatattttaaaatgcaagttgtatttggatatgagctgataattacatataaatttctaatatcttgtttgacaaaacagttagtaattacatgggaaaataatattttttaataacaaatatttaatatggaaagtttttagtaattacacagtgtaattacattcaattctcatggggagctatgagaattggagagtgtaattggaacccctcaattacttcaaattacacaattacagtgtaattacatgctcagacaaacatgtcaaattatgtaattacctccaattacacacaaattcaattacattgtggctttccaaacgcacccttattgtatttttatggaattaggaaaaaaaatttctatgaacaagggatgatttgatttaatgttgtttattagaatacttgtgtgagctattcctacttgtaatttgaactctcctaatttaagttgtataacatgcaaaaaagaaaaaaaaaaatctttaaatattttatttattggtgttttctaaaggatcattaacagaaaaccactcgaatttttttttttttttaagtagatattggcagttaaactacttaaatttaaattt

SEQ ID NO: 331207 - DNA, 1080 bp, Cannabis indica
aagtgaccaagagatcgtaagtctgtgcgttcactgagggagcaccctacatcgtacaatgcattgaagtagcacatagaacttatgtagagaaattttaacgcttagaataagctactaaatctacctttaagtcaagtacaaccatacttcagcttgacataaagaaaagtaaatctagatacttacgtgttaaggccataagaagatagccaggacgatcatatgtccatgataaaagactttaaggctaaatgatagtagtgttcgaaaatagagggcctataggccaaaagcaagaacatgaaagccataaggctaaatatgaataaaaaatcagttcgcatgcataaggccaaggccctgcaagaactgtatagccaaaaaagaactgaacagagtttctatatgggctacggctaaggcagagttccttacaggttccaagccatagacaaaactcttgacaaccgtacccaagggtactttccagaccatgtcagcgtataggctgaatatcaacgaagtacaagtctcaagtgtaataacttggacaaatattgagtcttaagttgaacattcgactataatagactcaccattaagtttcatatagagtttctaagggaaccacgtatgagattaaggttgtatatgcctacagggccatgatagattgttgccgaagtcaaaataggacagaaaattggtaaaccacttggaactaagacccaggccggccaaggttcctaagccttgaaagggtcggccagggttccatgactcaaccaagaactggccaggatcactaaacccaggcatgaatcagctagccttatagggtgaaaaccttagagctggataactcccatgatcaagtcctaggacaggccatgtctcaagaaagacctcccaagctgggcaagtttagttttgaatctaaatgtctgtttttctttcaaaatttgaatatgtgcctcgtgttttttatgactcaatgagttaggaatcacaacgaaggccaaaataaaaaaatttcaataaaaaaaatcacacattatacattccaaaactgtcatg

SEQ ID NO: 331208 - DNA, 591 bp, Cannabis indica
tatatcaacaaggtgcatcttattttttggtagcccatcatgaaagaactccatagttaagcgtgcttgacttggggtaattttaggataagtgacctcctggaaagttttcccaggaagcgtgcgagtgagaacaaagcacgctggaaacactcatgttggttatacttgtgtataagagctgtcattccgtgggtgtaagggcccgatggaggcttgaagcggggacgttataaggaaagctagtcttccttcggaaaaattttctggatggctagttgttccctcctagaagggagtctcaaatagtcgactccaactgtcactattcctatctgggaagtccttttagtgtatgctttgatctatcttctaggaagtgtatgactcattcggaagcgctttaacttgagttgacttggagatatttctacgaggagtttgttaagttcgtcaagtcataactaacttaacagcttatcatttgcagccaccaactttggaaatcacatccctgatgtaatgccctaaataattagacacgctaccaaagtcacttattaaagcttaatcccctaaacgggattacta

SEQ ID NO: 331209 - DNA, 690 bp, Cannabis indica
tatattctgttaaaccaagaaaccaagaaatgtcgttagataggcacttttaatatataaagatatataagattgtacatgtataaatttagataatcttatagggcaattttattttaaaataagagtatgtgtccaaaatatattaaacagcagtggagcggtaaaataggtttcgacaagagacacaaagataaaatgacacaaattttatgcattagtgtcaaaaaaaattaagtgcaagtcgaaaacgggtcaacacgacttgacacaaaataacaacgcgtcaaacacaaaaggacatgcttaacacaaatttgacacgtttgataatttttttaaataaaataaaataaaaaattattaataatataacttttgacgcagaaatctagacatatctagcaatacccactcgctagattggcgacaatgtaatgagagttaagtataaataagagagacacaataaatttacagtagttcactccccatgatgcgatggtaatggagttacgtctacctcgagtttttatttctcacgagaataacaaagaattggctaagtgtggtgctcgaaatctagatagagataatagagagagagatgctttgacttttgttagggtttatgccctgaaaagccaataaagacatagggctgaacattttgaacgggtttgacccgaa

SEQ ID NO: 331210 - DNA, 735 bp, Cannabis indica
tttatgaaaaaaaaaaaaaaaactagtgtaactaatgtgcaagcacaccttttatgttgttgaatattaggagtggcaatttaattcatgacaaaacaacacgacatgaacttaatacgaattattgtggcttcggatcataaaaaatagaagtgagttgaaattgagttgaacttgaatgatacgatttttatttaggttgggttaggattaatgcatgcgacaccaaaaaatcgtttatatctaatatattattaaaaatattaatatataattaaattattatttattttcataaaaaataatatagattaaaaagaaaattatttacaataagatagataatttgtaataaattattttaattaattaatattatttatttgtagcttgatataatttaatatttaatttattatttaatttggttaaaaaattatataattatacatatgtaaaaattaaatatcaattatgttagttaacatgtgttgtaacatacgtatagtcgacatgagaacacggcaggtcgagttaaggttgagattttttgacacgaaatatatataagtcagattaggattggtcaaataaacatgtcaacctatgtaatgaaaacaaatataataggacaccacgaattgccaatcctaaaaatatatacactagtggagaaaacacgtgctatgtattagaatattttatttatggaaattattttctaattaaggaaat

SEQ ID NO: 331211 - DNA, 1012 bp, Cannabis indica
actttgtgcgacatttatgcgatgtatgtgccattttattccatatttcataactgttgttttgtgcaatttttatgcaatatgtatgcgacttttgtgcaatttttttgcaccatttttttatattttctttgcgatgcctatacgatttctgtgcgacatttggcaatttttactggtaacatgtctaataatctatgctgtctaattttcacgatgtctatgcaatataggtgcgaaatttttagcgagttaattgtctttttctacaagttattattacaactgttaaattatttgcgatgtctatgcaatataggtgcgacatttgagcgattgaatatttcacagtataatataatataattgtaaaagattatgtgtatatatgaataacgttacaaaaaactaccatgtcaagttctggtgagcatgttatcatctgtaacatgctcaaacgaatggtccaacatgctgtgctcaatgtaatccatggcaaacgttccacaatcgccactacaaagtaaaaaattagtaaatattagcaacaattaagttaagtaattcataatggagtgtaaaattaaataaattacataaattaaaaaagagaatttaccttgtattcgtctgtggtataactttagaggtagctcttctataatgcagtggtaggagctagttgagatcaccgcaatcaactggaagtacataactgttcagttcaaaataatcactcgctcgaattatggatgcaaatagcttgccgtaaggcttaaaatatgactccatgttctgctcagtagtggcaccgatatcacaatcatataccataatctcccagttatcaatatcaacctcaactgccacccagtggtgctctttgggaaggttcaacacaaagtagatataatcttggttctctcaacacagcaagtgtttgtgctctatccccagcacataattaaaaacggcctcattgttgggttttatgccctaaataaaactcttt

SEQ ID NO: 331212 - DNA, 1211 bp, Cannabis indica
aaaaaaaaaattaaataattattcttaggttgggcaacaatacactctagcaaatttcataagtgtctttccatacaaatctcatttcttacccccttcggtaagtgcccggtgtccacatatccaggcttccctaaacgcctagggggtgtttggtatgaggttttagacttgatggtgttagggcaattagttaggttagttagttagtatggttgttaggttggtggttaattcagttaactgcctaactacctcttgttacacgtttaattgaactgtcctctaatcatgtgtatatataattgcaaagctcagattaatcaataagagacttatttctctctgcctttcttcttcttcttgctcggtttttgttcttctgcaactatgtccaagaggttgaatacctctcacatggtattagagccatttccgccattaacggcaaacatggcttctgctgatcatggcaattcgaatcaccaacctataactcattatagatttggatcgaactattaacactcccagaattaacactataagaaaactaatattcaaccctttgggaaagtttagattccattattatataacatgttcccaggcactcatgttattaagctcctaaaataaaatttgtaagaatcatcttgtaacgccctaatctatagggacaccacgtgtgtggttttataaactagtttagtaataatacattaattaactattaaaatctatgataatattaaaaatttcattgaaagaaaatcctagtaatgaacaacattgttccaggaaccttggtacaaaaggactatatacagtagtaagttaaaatacacagcgaatacaacccaaaataactcctggaaactcgaccacacaggacggaaaggttaatatgtatattcaccggagaagaccgtcgcctcatctgctctaacttctccttgcccttacctgcaccacagagtacccgtgaatcacaaggactcaactagaaaagtaataaaggaaatacatataataattaattatatattttatcatcataaaataattaaacaataatattccaatgaccgtataatataaccaaccatatttattggactgagaagtaatcatctccatcacattgcctaattaggcaagtcgatgctttaaattggtatccatatattgcattgcctaatcatgcaagc

SEQ ID NO: 331213 - DNA, 555 bp, Cannabis indica
tttacaactacttattcactaagtttatttaatatttgagagtgtttttttttccaaagatcaaatttctcttattctcattatgctatttgaaatttggttttttttttattaatctactaataaatatgttgtttgattttgtttatttgatttgtcagtaatagaaataaaataaatgagttaaccaaatttgtaatacaattatttttgtgaattataatagaattaacttaaaatatttctataatttaaattttataataaatatcatttaaaaatatctaatataatttatacatacggaatataagtttgaacttaaataaatgatccactttatttactattctattattttattttatttatactaatttatagttaattaattatttaattaaaattaggctaattagaatttttactccctaaattttgacatataccaaatcacgcacctgaatttttttgaccgttaaaatttgggtttcttcatatatagccttattaaggtcaaactttacatttttattactataagagaaaataaac

SEQ ID NO: 331214 - DNA, 676 bp, Cannabis indica
ggtaaaataattccaacacccactccttacgaggtcatatactattttgacttggagtttacttcatagcaacatcggtttggatacttctattttagtcaagttggccaccagtggttagatgataccaacatctcacctatgctaagagtcagcaagcatgttaacaaaaacttcattgcttaggatgttaaggggattcgccatcgacggttccagagagtaccatttttgaagcattccattcccacattacaaataagggatagagtgaatcacatcctttctttgtcagctaaatagaggaacattattcaattgacaagtgttgacaacttccaaatgtatggcttgtattctcctgctcgtggagctgtaaggatgccagctaaaaacgaggcctgccctggagacgggcaagaccttaaccttgatgatgatgaagtacctttgtctcgcatcacacaaaatctagagagaagcgagagagctctccgtaggtgtctgggcccgtgggggtccagtaggtgacgcctcccttcatatcgagcctagaggcctagttctgatagacatacacgccctgtgcctacagatagaggcaagggcaaggctgtagtgtgagttctgatagctcctctctgatgatgatggatagtttgtaacaacatgcttt

SEQ ID NO: 331215 - DNA, 875 bp, Cannabis indica
ttgcacagcttacccggtatttccccttacagatcatgggactactgactgtcacacccgtgagccaagcccagcaaaacagtataactataacaaccacaattatcatttcacatatataataatgccatttagcatattgtctatttgacatagacctacgtgttacgctcacacgcctatttacgtctatgtggcatagacccacgtgttacgctcacacgtctatttacaataaggcctagaacagttcatctcagttctaatcaccgagtccaaccaaattatgctttgaatgcataattcttttaatcaatacattaagcatggcataacacttaaaaatcattgattagtagagttataaccctaggccatataaccactaactttagggtaataatcctaatcctggttctcaaataatcacaaccatagtataagacatgagcgccatagtgcttaactctacgtactaactactgtcttacatgatgtccagtatacgtggagattccaaatccccgggtgctgctgaccaagtgtcggtaatcctagtcacaaatatataggattcacaaatagggttaatcccaaaattcatttccacataattacaaaattttcattcaaattcaaataatcatatagagctcgcagcgagctttccaacgatacctggaatacccaaatcggagtccgactcacactgttatgagcattcgaataacacgttcgaaactgcccagaaccacaaggcgggctgcggcactccccactgttggaaatattttaccaggatctagatttactaccaagtatgtttcattaacccccgaatatgaattgtaaaataataaaataaacacatataa

SEQ ID NO: 331216 - DNA, 631 bp, Cannabis indica
tttctttttcttcttttcttcttcgtcttcttcgttttcttcttcttcaacccaaccccaaccagccaccggagcaccaccacgaccccaaccacaaccacatcccgactgctaactccggccagccctaaccccactgcagccccgaccccacgaccccaaccacaacccccgaccccacaaccccagccctaaccccaaccacattctcttcacttatcggtggtaatctcgaaatgtaatattctcggataggaaaatcaaaattacatatatatcatttactagatttgttgatgaaaacctcccctcttgaagaaaattattattaaataagtttgaaacagatctaaccagcctcttcgtagtcggagacgcttcatggatggagattcttcgtagtcgtcgtcgtggtcggagagggaacataacgaagttgggcgatgctgactgagatgctcggggttgggcgaaacctccgacgagatgaggatgagaatgggcgtgggtttctttgggtataagggttgtggttttcctgggtatcaggggcgagttattctgtgggacttgggtatcaactatcaagggttgtggttggggtcgtggggtcggggctggagtggggtta

SEQ ID NO: 331217 - DNA, 514 bp, Cannabis indica
tatgttgttgatcgtgctcgttaaatagatctttaataatatataaattatattccctcttatccgtacacatcaatgagctcaccttatggcccactaaacattaggcatttgaagtcacaaaatgacacacatcagctagaagccatggctgatgcaaaatatcaaccatcacactagaacctattgccaaacaaaccctagacttgagaagctcctacaattcaaagacactcttctacacaaaacttggattattcctaagagatgctgaaagaaaatcaccgctgagaaaataacaaaccttatataacttactcaccaaagagtttggttttgttagtaaacaccacccttgctttcccaatattactaaattaaagtcatgaagattacgaaagcctattccactcatagttttaagtctaatcattctttcctaactcatctaatgaatactgccaccatggaaagaatttgaatgccaccaaaacttactcataattctctccaa

SEQ ID NO: 331218 - DNA, 908 bp, Cannabis indica
ttttagatcattgggtctagatataaatatatagtatcatttactttcaaatacttctttaagaaattcaaaagagagtctgtactcacaaaattggaggaaaattacagttttacaaatattaggtacttatgccactaaaaataaacattaattttatgccctttataaacttaaaactttgagtacttatgtcactatttaccctattattaatattaatacttcagggcaaacctagaatcgtgcccccaatatgttgtcagccgaactagatagagaaataattataataataatagagttatctataattgtattattaattatatattgttttaagaacaagaatcttatgcccaaacgaaaccaacaaatgcaactctaataatattatagtgtatacagcttttttgatattttataatctatatataaactaatataaatatgtatatatggatcattttttaataggtattacccatactaaataaatttaactataaatattaattttaaaaatattaaatcatcaaattttaatccaataacgaataataaaagagaaatttgaatttctatgattagtttaactacttaattaaaaaaaaaatatcaaaaaatatttctttttatactatttcaaaaatatgttcacataaaaatatttaagtgaaactcaacttttacttatcttttttttgctttgctaaaaactttttttttaatttttttaaaccgatagaacaatctcagctcatatgatataaaagtgacagaattttctagttatatagaaaaattaagcttaaaaactcaattttttctaattttatccattcataggtaatacccatcaagagtgcaccccatatatatatatatatatatatatataacagaga

SEQ ID NO: 331219 - DNA, 1050 bp, Cannabis indica
atagcggcataagtaccaaaagttttaagtttgtaagcggtataaactcaatgtttatttttagcggcataagtacccaatgtttgtaaaactgtaattttcctccaattttgtcagtaaagacccaatgatcaagaatctagaccttatatgtggcatgtttaagaaaataatttgtactgacaaaattagagaaaatttacagttttacaaatatttggtacttatgccgttaaaaataaacattgagattatgccacttgcaaacttaaaactttagatacttatgccactatttacccaaaaaactattacaacatgagttaagaaagaaaaccaattagcaacatgatttatacatcataatttcaacaattacttaattaccctttactatagaataaattatccttttacagtttttccagtccatgcatatcatttggggattaattagtttaaattaatttatattaatgtgaagttcccatttagtttaattttcatgatttttaacgagtataaacataaatttactcgaagttcacacgctttaaacatattaaaggtaactcagtccctccatctcaaactcaaaatagagaatgattgctttattggaattaattattatttattgcaattattgaaatttgatttaagttctttttcctttcttttgctttttgatttttttcaatcttttgaaaagttaggttccgttgtactggttcattccagcaaaggaagaaaataacgttcaattaaaattaatgtacctttaaggcaagtttgccagtagttactattccaacctgtatttctagtcgttataccaaagatggtataagtggacaacaatgctcactactggaaacataattaaactaatgttatgtattgtttaatttttaattaaaaagaaataaacagacacacactgataaaagtaggtaaactcttcacataaaataaagtgatcacttttttgattacgcaaagaaattattaaataacaaaattaacaacgtaacgtcaaacacgttgttc

SEQ ID NO: 331220 - DNA, 787 bp, Cannabis indica
acgacgccgtttgtgtgcgcctatatttgtaaaggaaacgacacttcgtatttagtttgtagtcgtcgtcttactgtgtaggtttgtaattgtcgtattgaatttgatcagttggtcccaagccaaatataaaaaaaataaaaataaataataattggcagcggtaaaaccctccaaaacttttatttgcttaacaattagctctccattctttatttttagtgacaaaatctatcaatctaaagtttgttagcaaatccaaagtgcagttcataaaagtagctcgagatggtgctggtcgtccattggaataaaaaaaaatagaatttttcggcggttaaactttttcaattatcatttcatatgcacttaactttccaggctcaaattttgacagtaaagcctttcaaactactaaactgttagcaaatttattctaggacgttttctcacctacctagcatcctggttgacgccagatgtcaacttgggtgctgagatgtcaacatgggcactgggtcttaaacaatcttcagtaaaatagccataactcacttaatgttgatttaattgacgcgattcaacttgtatttcgaagatatttcaattctctatcaagttatgtctcacacttcaatcgaaattctgaggctattaagtccaaattttactctcaatagagttacaaaaataagccacagcatgcccgaagtgggtcccgccgttgcgactcgaactccaaaaattgacaatcaacttcagaagttaattttcaccattagatcat

SEQ ID NO: 331221 - DNA, 1181 bp, Cannabis indica
atcctaaataactacaaagtacactaccatgaaaaaatataaactttaaaattttcctggatgttaaaacaatatgggttgcatcgatgcacaattttctaaggagaaatgctaaagggcactcatggtgtctagcaccattatgaggtgtaatatcgttatttatgcaatttaatattgagttccacttattttaatctaataaaaattataaaaaaactactaaccaattataagacgatatgttatagaggtaatagagacctgtatgcctcgtagcaatgctcgttttgaggaggtgcaccataaaaactccctaaacttttaaatgataagtttcactcaattattaaacaatcttcaacctaatttgttttcacattttaagcacatggatatgtaacacttaaaaaaaaaaatctatatatatatgagaatgtacattgtaattattaagaattgggacaattttaactaatttacaatggtaaaaatatgaaagatgttatttaaaagtttattttatacactcataaaatatacattttcatataaaaataatttatccaacgttgtcaaaagagaaaacttatataatgttaaaatttactataaaaaatttaaattaattaaataaatattaattatataaatttttttggcattctaatttaatcaaaagagacatatttatagtacaaatttatatttctatggcacaaaattataagtttatgatatgtatatggcatgtttttttgaattatttaatgtaattttgcactccttttatgtagagaaataaattctttgtgtattaaaattgcagtaaaagtctcaaaaagttaactttgatgcaaataagtccttaatcttgaaaaatagcgataatagtccttaagcttgagattcttgtaagttcgttagtcttcattttaagagatccattagttgctcaaaaaatatcacgtgttgatattaaattatagtataagtcctcaaaaagtttactttcatgcaaataagtttttaatctttaaaaattgtagtaatagcctcaagatcaagattttcgttagtttgtatgtacccaatttaattgttctgtttgttactcccaaaaatgacacgtgttgatattttattggcccaaattataattttaatttaaaataaataaa

SEQ ID NO: 331222 - DNA, 631 bp, Cannabis indica
atttgttatttttttttttattttaggttggatcactcctttatctagaaagcaagtgatcttttggattacaaaaactggtcaggactaatacaacatcaattacatataattaagatagaaaatgtttatagaataaatgagagaacagtttcgagtgttcttatttaatatttgaacgtatatactactttggaaattgcatattgaccattcactttctttattaacatatgaatttccaacctatctggtgtaactcgtacataaggtattcggaccacttaaaacctcttgggattatttataagatagaagacttgtggctagactgatcgcatatcgggcattcatgttttgactgttggaagttatatttttactaggatttagatttactataacatgtatattgattataattctatagtctaacaccctaaatatgaattttctaatacgataaaataagcacatataaagtttagaaaaccttacattggtggtagtgaaatattataactccttccgttcagatgtctaactcttgttcctttctatcgcagagtaataacaagatatgaacctagatcttcttcaagtgttggattcttcacaatcttccacacta

SEQ ID NO: 331223 - DNA, 526 bp, Cannabis indica
ttacttaaaaaaaaacaaaaaaaaacaaagaagagtatgggtcgtttttttatctggaaagactcagcctagtcgatgggcacaaaatcttcttcccaggcgtgcccgttccagtctttgagatgcaaaatatgggtagaattatgggtttgcttttatcaatatcttaatatcaattatctataattttttacgctattggacaaattatttttttcttcaaacctagcatcttttgacatcattatatctaacattttattctttttgtcaccatatttttttttttaaaaaaaacaataaattatttttttcattaccaccaacagtttttctcttcacattataaaatagtttgcaacttggaactttactttaggtgtttcaaatagctaacccaccttggcaaggccatatgagttttacttgttcaaattgttactttgaacatgagataagaaataggaataattacataaggtaccattttgttgtaaaataattacatttttacgttcaatttttt

SEQ ID NO: 331224 - DNA, 634 bp, Cannabis indica
actgactaggtaccgtacacgacctcagaaacaaattgaaccacagaagaggactagatgggcaaaatgtactacctactgtccagccaaacaatgcaaacaactatatcccaggtctagtcctaagagatcctaatgtaatacaagtcagtcaacaggctggcctagctcatccacttgtgcaagcataaatagactagcttaaaagccttgtacaaggcctgactggccataaactcacagatcttgaacttgactaggcaagaggttcaccattctcactagaaatcaatgctctcgacctaccgcccaagttcaaaatgatagtatggaagatgtatacaggcaaggaagatattttatctcacttaaaatactttgaaatgaaaatggacttacacggggtgagatataatgtacgatgtagaatcttcccaacaatattagcaaaagccacctagcaatggtatatcaaattagccatagggaaatccagttcatgaatttctttctcatctaaattccatgcataatttgttgggctttgtgccctaaataaaactctatttcaatgtaatcttctctattcaaatatcaataaataaacagatttaatttcattacttgtttaatg

SEQ ID NO: 331225 - DNA, 1024 bp, Cannabis indica
aaataatttccaacacacacttcaatcaaaatttgaaatatatcaagtccaaattttgttttcaagagagttacgaatttcaattacaagttacccaaaaaaggtcccgcagatgagattcaagtttcgaaaattgacaaccgaccaccagagtcaattttactgttagatcatcatcaacggccaaaaatatcctaaatatatatttcttttttatatatattttttttcatattttattattactttaataggacctcattccctataaaaggagagctcctctgacattcaaaaaattacctataaggtcagaacatttttctagaaattagagttttcagacttagctaattttcttgtaatcattctcgtgagaataacaactcgaagtagacataactccattattgtcgcgacatagagagtgaactattataaattattgtctgtactctttattttacttatagttacttataaatttcatctcgtctatacatacgaataagttggccaattttctccgtcaatattttggtattttcattaagagccacaactcaataagttacttttaagatggttgcaacactatccacaagtgttgaaagaagtacaactactggcctacaaaatgagggcacgctagttactgggactggtgacgagacacttattatatatatatatatatatataaagaacacttcttaatgggtattactcatgaatggttactaaataaatttaattataaatattaattttaaaaatatcaaaccatcgaatttttgatctaataacgaataatgaaatcacaaatttgaatttctatgcttaatttaactacttaattaaaaaaaatatcaaaaaatatctctttttacactatatcaaaaatatgttcatataaaaatatttaactcaaactcaacattttcttttcttattttcttgctaaaaacttttttaattttttttaccgtatggtaacaatctcagcctatatgatataaaaatg

SEQ ID NO: 331226 - DNA, 995 bp, Cannabis indica
taaatcagctcaataacatcaaaacaacatctaaaaacaaaatcaaacatcctttaaaactacaaaaccctaactccaaaaatcaagcatagaacctaacttagaacttaagaaaataaagagaagtgagcttggaagtttaccttggattggaaccactaagatcttgttaatataccaaaaattaagcggaaaaaccctaacttgctgttgtttttccaaagaggtcgagagggagagagagttgaagagagagagtgtaatttatctaaattctaatttttgaataaaataaaaagaataacttaattgttttacataataatatacaatataacattaaaaatcaaattacataaacttaatttaatcttttaagtcactaaaagataaaggtcaatccaaggcaaaagactattttgccccttgcatcaccaagaatcaaccttgccacttagaggcattttggtcaaatctaaaactactaatattctcgacattcccaatgtctatctaaattgtcttgctatttctaaaatactaaaccatacaaaaatgtgactctatcagccaaacgtcgcgttctacttttatcgggcataaaatatgaaaaatataaattttcatatataacataaataacacacctaaaattcaaatatatctccataaattcatgaatcataattaaaatttaaattcagagttaaaccctagttatctactaattctcatactaaaattaagcggtttttacaattatccccccgttaaaaggatttcgtcctcaaaatataacctaaacaactctgaatattgatccctcatgtcggtctccaactcccaggtggcttcctccaccttaaaatttcttcagagtaccttgaccaaaactatggtcttgtttcaaaggacattatatttcctgtctaaaacctgaactggttgctcttcgtatgataaatctagatggagttctagattttcataactca

SEQ ID NO: 331227 - DNA, 975 bp, Cannabis indica
tatataaaatagatatatattttatttacaatataattttttttaactaaatatataacttttagttataatgaaaatttacttgtaattaaaatataatatttaaatataaattgtcatcattaatttacttttagtcacaataagtattgtgactacaaatacattaattataataaattgtatttttgtaactaatatttttaaccacatatattttaattataacataaaaataaaaatttataataaattatgatttttttaattttagtcattaattaattttttatcactaaaaataaatttttttacagtaaataaaaattactgttcaaataatatataaaagaatgcatactataaaaggtggttatatatattcttgtcctgttaatatattgttgtatgtaatgttaaattgagacaagttaaggctttggattagaagaataactcaattttataatttagtggaatataattaatgagtagtcctgtttttgtcttttaggtcttattactaccatatcaaaatgtcctcttttataatatttgtgtctatctttttcaaataattaatataaattgaccatacatatatatatatacattagaaatagaatataattattatttctataaccagtcccacctcatatcatacatatccatgtgaattttgcactcaactaaaattgactacacatatttgtgatatgtttggtttttttattaatcacttaaatgtaatttagaaattttaaaataaaccgaaatttgaaatgaaattataaaaatatgttaataaggaaattatatatatttttacagtttgaatatttatatttataaaaatacaaacttgagtaaattatttaatatttttttagttgtttataatttaggggaattaccctatatactatttctttaaatttttttttcaaatttacggtttgagtttttaaagtg

SEQ ID NO: 331228 - DNA, 852 bp, Cannabis indica
aattgactaaattgtccttttgagttaaactatattatatggtagttattttgcaagacatattttaaaggacaaaattgtcattatatatttaatattaaaaaataaaataaaaataataaaaatccattacccttaatggcattccttacaaaattggtgggggaagttctccctttcttttctcccttatttaatcaacttctccctttcctaattttaataatgcaagtaaacaaatgtaagggaatgattaccttactattgattcccattacttattagtaaacatgccaaaagtaccaaattgtatggggtgacgtttttggattcgaaatcttacaaatctaatactaataaaaataataaatattttttttttctaaaactataagcatagcatatagaatttatctttttatcttttgatttttgattttttgattttttattttgatataaaattcctctaaactatacaaattattgtaattgtccctctttagttgcatttttttttcaaacaatatattctatgatcatgggccagatagttgcaatacataagtttatttaactaattaagttagcttaaattcttttttttttttttaataaaacgtttataatatagattaataaccattagacctcgcggtcattacaaaatagagtttccggcacagaagcaaccggaagagacccaaacgtctgatgggtgaaagcccatctagccacattatgagcggcaaaattacagatctattgataaagaaaagcaacaactactaaaagagagagagaagactttttacaaaatgagatgtagttctctattgcccaacggggccc

SEQ ID NO: 331229 - DNA, 548 bp, Cannabis indica
ttttttttatttaaatttctgatttatctatttatacatgttacccccctaaaaaaaacacaaaaaaaccggggcatgttactcttgatttcgtggcattgtgttccttaccagtttccacatattacaacctcgaagcaagcatcgattgataagtcaatggtgtaagattttccaactcatcgcatccgaaagggaaagattgggtttaggataaagccataataaatgtagagtaatgctaagtcataaatgctacatttatttcaaaacaaacaaattataatttttacacatattggaaaaatacttgcatattaatgagaggcccatgtttcacaataatgatatacatatacggctcacgcatttaaaataattagattattaattcaatagttactgtcacgactcgagccttagccgagcaggtatgtaatatttataatttgggtggtaaaagatcacactttaacctttatagaaagataaaacttataaataatccttttatttacatcacaaaatactaatttaaaagtaatgga

SEQ ID NO: 331230 - DNA, 987 bp, Cannabis indica
tggaagcccatttcggaatctaagttgcacctctctactacaactggcaaaaacgacaccgtttgccttgatgttgactctgcaaatgaagttgtgatcataaacacttgtcattgcgtgagtagacatagttcgtgtgacccgtctaggcaatggttcaaacttgttcacagcacaagaaaaccaaagttgtttggatctttttctgatagttttgattattatgacacaaaatcgtgagtattaggattgcttatatcacatgcaattgctgtacgtaactgtgttcacatatttacatattatatgagaagggaaaaggactaatacatcataactctttgagaagaatataaacttttattgacggtataaactcatccatgatgttagttgccgaaaactcaatgtatgaatgttaaaaagttttttttttgggaagaaaaaattgtatttcatctaaccaaactttacaattctatagcgcttccctttaaaggagatttagaaaaaaaaaaaaaaccatctattgaatctttataaacttataatgcctaaaatcagaatgtcggaaagttagaacgtagatgaaatcaaaatgaaacttaaaaaaaattcgtagagtaacaatggtaaaaaatatgtattgtattatcaacttaatagcttatgttacaaaaatatttctacccctctcaacttagaaaattgggtatttataggctcagattgcctaatactgttgtgaaaattatgtagtatatgtagtcacacaaataataaagtgataagtaagatcgtccccacagggattgtaaacaaaaatataatgtaaaaccaactaattacaacttaaaataagaggaaataatataaaaatgattgagaaatgattcaaaattaaaatgacagtaattaaacttgctaaaattaatgttactgttgctaaaaaattatttgaaaaaaaatataatatggtaaaaagtg

SEQ ID NO: 331231 - DNA, 793 bp, Cannabis indica
ttttattaagtttataatattgaataatattgaatctttacttctctcatttttttataatttttttattatatcaaatattaattaattaattaattaaaaaaaatatatatttatatataattcagaaaaaatatgctaattgtttactgagatttttttaaaaactaataaaacgagacctacaaaataataaagtacaataataaagaaaacgggaatttttacatggttcaggtattaataaactctagtcgacgagtcagtataattggccttaagaggcttgtgtaatgtatttacaataatgtttgcaagaaaccataactctgttctcttgctttctcttgaagaagaagaaatcttagagaaattttagtagagcttcggctatctttatttgtgtttcccctttcgtatgaaaatagaagggtatttataggctaaagtgcgagtatggacatacccatgacccgcataggatttctacaatatgcagggtaaaatacatgcaataatctgactgttgggcctgaagaaagttgtgtgctcgtatgtggaagcagctagacaataggggaccaccaggacacgtgttgtcgaaaggttttaccttacaaaataaatgttagaagtggacacatgtcatcaaaaggtgtcacctagcaaaggaaacgcctagacaaattgtcaggcaaaaaggtaagtttagaggcgaggcatatgcatgcactaccatggtttgacgcaggggacgtacaatttttaaaactaaaattatttttcataaaga

SEQ ID NO: 331232 - DNA, 499 bp, Cannabis indica
ttctcatttctaaaaataatttttcgaaaaacacaaaaaataaaaaacaataccaaacatgctcttaacattccaaggctagttttccatgcaagaagtaacttttttcagttatcctctcatttgttatgtgttcccaaaacagagttcattgctatccctgaccttcctgacaaaattgatgtgatgaaagcttagctaccagagccaagaacctcagaaatgaaagaattccaagagcaaatgaaggagactgagatggggtcctatggagtaatcataaatagttgggttatttgcggcaaaactccctaaagtatggaagtttttgcaactaacccccaattctaaaatttttgcggtaaaactccctaaactcaagttctgttagcacttagccatttccgtccatttttagctgttaaatgccaggttggaatgtccacgcgtacacagtgtacacgtggtacaattttattggtccacgtaaataaatatt

SEQ ID NO: 331233 - DNA, 601 bp, Cannabis indica
atgatgtcaaacatgcactaaagatttagtttggtgactgactattagatgtcttccaataatattttaactcctcttgaatgcctgatgagaaatagtgttgtaaaagggtgatgaaacaattttacatgcatttgtggttgtcttttgttagaactttgtggtggtactcatgggtcatttggtagtgcatcctgttgatttctcagattagttgttacaattgagcggacgagtgaataagaggaaactaggggaggttgtgttgctatgttggtcgatctctttaaaaattgaagaaaaaaatcagtaagtgatttcgtatgcaaatgttgtaattagcactctttttcattatattgagtctctacgagttgtatcaagcccccacctacccggtctactttctcacacatttctgaagttctctcctaagcattaatggcgaagaggtctaaaatagagagccctctctcactcggtaatgtttatgtttttgagatttgttggttcaaaagtattcacaatttttcacatgttaatgattaaagaaaaattataggtttgaatcttaattggacttttttagtatttttttttt

SEQ ID NO: 331234 - DNA, 658 bp, Cannabis indica
attaatgatatgaataataactatctacgcaaacaacaacctgagagcattattgtcacttttcttttaaattggaaataaatgtcaaatgtcaaatgtaattcacaaatatagtaaatttaagctttacttttatagatattgcaaaataaaatataaaataataaagcctccaaaatatatatgacctttctagttttttctttatatttttgtaacttttttttctttatcatttctttgttttctttctttactatattcggttagaagagtcgaattttatattgaaaattgatattgtagtaagtaattatcactataatctaaagttggagtactaacaaaaatacagtaaaataaaaaaaaaattacaaaattactgtgatacagagtttttgatatttttatagcatcaactttataaaaataatatgtttaaagtttcaaaatgacaattatattgtgtttcagtaaaataaaaacaaccatagaacaatttaactaacaacataaaaataattatagtataataaaaatataactacaaaacagtaaaaaaaataacaaaatattgacctaattgcaataagcaaaataataatatgtttttgtatttacaataattttttttacttagttttgtataacttaattt

SEQ ID NO: 331235 - DNA, 624 bp, Cannabis indica
tgaggaatacttttttttgtatccattaaacaaaaatactttcatattatattttattaaaatgtacttatttttgtaagtaggttgcccaatacactctcactctccatttaaatctagtttgtaagctcgatttctaattaattctaagtataaaaaaaattagacgaaaatcttttggtgcaagtttatttattttgaattatcattaaataaaacacaaaataatatatgtattactggattatttgcggcaacgcctccatcaatcatattgaattctgtattttggttggtgaacttataagcaggaaggtaaattggtgctgcagaggtgctaatgcaaatatctgatagacatgcattcaattcttcattcttattttccagtacctgcattatcccttaattaattcatatataaataaaaaatttatatatatatatatgcatagttcaatgataattataacaacaggcagactcacgttgagcctagaaagagcaaataaagtctactagctctaaaattttaaaatagggtaaatactattttggaccctgtgttttgcaaaagttgccgattggaccctatgttttgttaaatgacaaaatggactctgt

SEQ ID NO: 331236 - DNA, 1239 bp, Cannabis indica
gaaagaatctcaatccaaagattatttgcagtcaaaactacaaagtggaaagattttaaacaatttctttaaatgaagggattcatatatcccaatacaaactaaaattaagaaaaacatctaaaaataataataaaaaaaaaaacttaccaaaatcttaatgtcctctcaagctttcaagcaacaatctcaaatctttccaaaaaataaaaaaaaaatcatttaagattcgtaaatggcttacggttatcaattcatttatcttttctttttttttcatttttttatatattacataatattatttaaatattttttttgtagataaatattatttaaatattaaagaagtcagtgttttttgtttggggtgtcagtattattagacactactgtacaaagctttttaatcagctatacgctaatatatattagttaacgtgtacacttaaaagtcatttacgaatctctacagcaatggcacagacaaaaatttggcaatataaaaaagaaaatttccaatgctcagaagaaggttgctgatttaaacaatgttactgaccgaacctctaatgccatggaagagttgaaacacagtgaaaatgtcttagatgatttgttaactcaagaagagacatattggcagcagcgttcgcgtgttgattggatgcaaaatggggaccaaaataccaaattttttcatgcctatgcatcatctcgcaaaaagcataacacaattaaatctcttgttgataatgatggagctgtgatcacctcaaaaattgtaacatcagatatgaacgagtccttacttcggccttttaccaacgatgatgtttacaatgctctcaaaacaataaattcgaacaaaatcccaggaagtgatggaatgtcagcaatgttctaccataaatattggtctatagttggggatgtagttactaaagttgtgttgggagtcttgaatgatggtgactgtttggaatctattaatcactcactcattactctcattccaaagatcaatgttcctcaaggtgtgggagattttagaccaataagcctatgtaatgtcatttacaaaattgtttccaaggctcttgctgtcagatttaaagatgttcttccagcagtaatctctgaaacgcaaagtgcttttctctctaatcggctcatcaccgacaatattctgtggcctttgaattggttcaacactaacaaggggaaataaaagctact

SEQ ID NO: 331237 - DNA, 327 bp, Cannabis indica
aaaaaaaaaaaaaaaggaagacacgctgtaggattgtttatcaattttaagttaaaaattgacatttagtgttggttatttcatatgaccaattaacgccataagagacgtgtcggttattaggaataatcgatgccatatatgtgaacgcaatgactgacatgtgtcacttatggcatcaattatttcttaataaccgacggcatatggccaaatttatataaccctaagccagcttcgtcttcctcatttcctgaccttcaaaccagagccaccgagagaaactctcgccaaccaccacataaccctcgccatttcatcatttct

SEQ ID NO: 331238 - DNA, 871 bp, Cannabis indica
ctaaaccacagccattacctttttctaaaattagttcagtgtatccatttgtttactaacctcagtcccaacattagaacgattatcttttgatataatattctctaattcaaccaacctttcttctatcatttttctaaaccaatagagtcgtatatctatgtgttttctcttttcatgataaatcagcttcttacgaagatggatggatggctggctatccaagtacatagtcactcctccttttagttgtttcaattcgaacaaaattctctgaaaccataaagcttccttgaacactttcgtatagtggccataaatttttcttccttggtggaaagagcaattgcagactgtaattgggccttccagcatggttgattttctagtatctatatgcgaggcatagtgagcatcgacgaaccctttcaactccggttctccttttgctttcttataggtcataccataatctcaagtgcccttcaagtaccttactaaccatttaagggtcgttcaatattcaatgtctaaattggacattaaccgacttaagatgcttagagcatgagcatatctcttgtttggttctcaccattacttacattaaacatcctaaaatcattgcatagggtacatccttcatttcctctttctcttttgcactattcggacattattctttcaataagacaaactatccgcccaatggtacggatgtactctttgcatcttctatatttaacttctgaataactgtcttgatgtatcagaattgcttcaagctgattgtcccttcctttttgttccttgaaacttcaattcaaagtatcttttgaactagtccaagctccttcatctcaaattctct

SEQ ID NO: 331239 - DNA, 316 bp, Cannabis indica
tggtaaaataatttcctacagcactcagcaacctcaatatggttggtcggccaagcatacatgtcacgctccaacacttatgttttttcccataagccttccaaatcgtcctcaatactcatacgacttcggaatagttcaaactgcccaagattctaggaattccacaccataatgtaacaatcttattctttagggatattttccatcttttatgtattttcaaatcttaacattatataaagggtcataacgctacgtgaaaaagactatgctaaacaagctcagaagcactaaggcatagaactctctctct

SEQ ID NO: 331240 - DNA, 489 bp, Cannabis indica
ataacacaaaaaaaaaaaaaaataaacactaataatacattttaacaattctcataatcataatgatacaagtccttataaatgaataatatttaatttacgcgccatgcataccaatatatatatatgtttatattaagatgcctaacaacatattgatataataaatttataattcgtagacaattttctatatcaatatttatatattaaattaaaggttaattagtaatttttctccttaaccttgacatgtactaaatcgtgcccttgaacttttttagccgttaaaaattttcccgaactattgagattattaaatttaagaacttttgtctaattttattcaattttactgtttcaatgattatttatgtactaaatcatgctccttagactttgatatgtactaaatcatacccctcaaactttgatatgtactaaatcacgtcccctgaactttcattcatgttagaaattttttactaa

SEQ ID NO: 331241 - DNA, 1294 bp, Cannabis indica
ttttttttgttatttttgtgtatttgtgaaatagtcttttttgattaactaacaacacatataacaaaaagaaattatttttacgtttataacccttaaatttaaatttaaattaccaaataaaaaaacacattaaaatattatttctctcacctatttataggtactatcgagttacaaaaccggctatacaatgtaaacacacattgaggtgtgtaaaacctcaaagtaaagtgagcaacatcataatctccttaatttaaaatatataatttttttattttaaaatttttaagtatttaaattagtaaagttatttagatctataaaaatatgtcacgtgtacacaatgaatatcataattggcacttaacaatataaattaatagttactttaaatttaattagaaagaaaaataaacttttttagaatgaaaatagaaaacttcattaagaaagaatagccaaatcggccattacaacattgttaatagcatcagggacattgctaccaacaaaaagacaatctgaccaataacaagcaccacgaacaagacaatgagcgacgttgttagcagatcgtttaacaaaacaaacattaacatgagacaaagactttaataaattaagacaatatgtgataatagatccaaacatagaatgcatgaccacattactttgaagagcttgaacaaccacaagagaatcggtttccaaaataacatgttcccatcctttctttttgatccaacttaaagcttctttgacaccaatgacctccactaaactaggttgaacacaccctactttgtgcaagcaaaaagcctcaaggagaagaccattagtaccacgggcaaggcatcccacaccaaaggaattggagacagcaaatacggcaccatccacatttaccttcaaacaaccagcactaggtgctgtctaggaaatactgctgctggtggtgttgtttatgacaacaggcaggggagcaaaccgatttgatgatgcaaccttccattgattcagcacaattgttgcagtagagattacctcagccactctagtaacatttttgttccatagcaggttgtttcttgctttccaaatagctcacgacaccattaaagcttcttcaaacacaacagattgtccacagttcaaaatttgctctaaaccaacgcacccaaatcagtcagcagaatagcactagcaggcacactagacaggttccaacaagattgagcaaaagtgcaagaaaacaaacacaacatgaaaatattgattcttcctctct

SEQ ID NO: 331242 - DNA, 1240 bp, Cannabis indica
gtcataatgcaatatacagccacaatacacataatatcaactaataccctcccacgtaggataggattgagcttcattatgttatgaccgcatttaatacaaactagcagccagactctgcaatataccgcattgatacagagtttcacattcaatcagccgccagaatcatgacttcccttgcttaaccctgagtttaagaacttgaacaacttcacctttactaatattacctttgggtgtacaccaaaaacaacaatctgaaattccttgagcatctaagaatgagtaatgctaaagataagtatatgctttaaaaccgttccgttcttttgcttctctttttctatctaaatctattaaaaaactatatagaaaggttgatgagccaagccaagtacgcaaaacaacaaaaagaatttatttttcggcttttctctttcggatgacccttttccttcgtttattgaaaattaaaaagtaaaaaaaaaaaatggcacaagatcaaactcagagagatacagaaacccaacccagaagatcaacctgatttcagaaatagcaaagaaaaaatgaaatctcatttaatcaagaaattcactctaaagatcaagaattgaacaagaacccgcattctaaatcctcccttatcgaacaactaacccgaattcaaatcaagaaacgccaaaagaatcaaggagcaattaccattaactcaatcacaatcattgcctaagtacgatatcaaaataaacaaccgaaacccaaatcaagaaaaagcaaaacaaaaacaaaccgcatcggtagaagtattatcagcatccatctcgggtcggagcttggccataaagctgggggctgcgatacaaagaaccaggggcgggtcgatgcttgatgaccggaacaacgtcaaacgagacagaacccatgtataacaacatgccagagatgtaaagaagcggagcgaagagaaaaactccctggcggcgaataagtacagagagaatgtgccaggtgaatcgctggagcaagctccgaccaggcgggttaaaccgaccggtcttagaccgaccgtggcgcaaccgaggcgaccgtatcggcgactgtggcggcgaaggtgtggtgtggccactgctcggcagccgattatatgggtgcatttgggatcgatcgcacgctcactctacgtcacatggagctttcgttgtgctttctccctcctctctctctctctctagtc

SEQ ID NO: 331243 - DNA, 999 bp, Cannabis indica
tcacaattttttcatttttaatcacaagttttattgtgactaaaaataagtgacatttaaaagaaacttgtagtacgtacacacgtacaaaaacaatgaaacaataattgatcaaaatttaatgaatatattctaaaaaattataatttcttaggaaccaaaataaaaattggatacattggcattgtagggccagattactcccctataaatatatgtcacttgcaaatatttggaccatctcttccaatatattttctagtcaataagtcaagctagctaaaaccctaatctcatcatgtccactcaaatcttagcatcatcatcatcttcaaatgaaaacccaaataaaattgttcgtcctacaaaaacatttcatccacatatttggggagaacaattcttacattacaacatttcagaacaagatttggtaagcatatatatatatatattatatagtatataatattggatatatataactatgaggagactaattatatttaattaatgtgtttattattatatatagtatcgtcaacaacaaaaggttgaggaattaaaagaagtggttagaagagaaatatttggagattattattatgatgcttggaaaaatcaattgaagtgtattgatgtggtagaacgtttgggattgtcttatcattttgaaactgaaatagaaaatatgatagaacaaatctacaacaaaaccaataattttgatcttcttaaggatgaagatttgcatgatgtttccttgtgggttagacttctacgacaacatggatttagggtttcttctggtacgtatttctatatatgttatatatattaaatgtgactatacaattaaagatgagtttttttaaatttatacagaaatttttaattttttttttcttttgtgggataaaattttcttaaaaaatactgtgttttaattttttcaaaaataccgtataagttttatactgtgtactataagtttcaact

SEQ ID NO: 331244 - DNA, 783 bp, Cannabis indica
ccttctttcttttcctttcaatgtcatattcctaattagagggaaagataaaaaaaaacataaccctaacttcaataattgaagaagaaggcaattcaagcaaaatactaataattgaattcaataaatttttaaaaatggagagtttggaagaaagctaaaatagtattgaaatcggatcaatacacttcaccatcaaattcttttgattgatctcctcggtcacgtttaattaacaataattaatattcaacggaagatttagtcaatagctagtgtgtccaatgatctaaattctaataagagaattatgagaagactattggattttcgatatacaaactgaacaaaaagaagaagaaaaatgggaagatgtagtaataaattcagagaaaaataagaaatttgttaccgtagaatgaggaaaggtggatagataggttcctagtactcagtcgtcaggtcgaaattgctatttgtcgtcaacgttgggggttgggttgggcctgcccttgccggcggccagagataacgagcaccggagatgggctaacggcggcaactgatatgaacgagagagacaggtgccaatgcgaactgataggaataggttccctctcttttatttttagtaggtaattgttgtagtgttagttttatttaatattttagttatttattttaattaataattaaaatagtataattatttgaacgatttgttttataaaaaaaaaatatgtgtgagtatataagtaaaacatagttgtgttataataatgt

SEQ ID NO: 331245 - DNA, 895 bp, Cannabis indica
tttttttttcaaacaaaaaaaaaaaaaaaaatcaaatgtatatatacatacacactaccatattatatgtgatatgtgatgtaagctctatttaaatttaatctgggtaatctttatttatatagaagtaaatatataatattacaaaaaatgtaaaaaaaaaatataattacataattttatacaattttataaatatttacaaataaatatatgtgtttacaattttaatttattaaatactttcaattgattttttaaaaaaacgcataaagctaaatatataaatattaaagttaatatttatatttttatgtattactaaaataatatgtttactaaaatttaatatgaaatgaaaaagaatatataaacacatttataattttttttttttagaaaagataattttattatagcatatcagctaaaacaatagcttgcaaatcagtagggacatgcccccttgatcagagaaatacaatcagcaactaataatccaaacggataatacatagttacgttgttttgaatagcattgacaagtacttgacaatcagtctctagcactacttaagggaaatcgatagttttaagccagcttagaacctctttgagccctgtagcttcagccatagcaggctccacatctacttggtgcgccacagctgaagcaaaaatgacctgtccctcaggatctctagccaaccacccctacccaaacctcttattagcagtaaaaactgaagcgtccacattgacattgacttttataaacaatgcatatatataaaatataactttttttattaaaatatcataataattttaaaaatagaacacttaactttatttatttatttatttaaataaacactttaaataacacttatgt

SEQ ID NO: 331246 - DNA, 619 bp, Cannabis indica
atctctttcttatctttccaacgcattttgaatcgtccaattctgacatatatcgaaaaagttatgaccaaaacgctatgaccattgaagtgtgcaagtggggttgcgagtggaggagcctttggacgagtaatggagccttttgagcatgatatgagagtgggggtgagggagagggtattgtgcgagtggtggtgagtgagagtgtgtgtgggtgtgagtggagagtgggtgagagagagatagggaggttgcgagttggagagagggggagttgcaagtgggagagggagagagagggggagttgcgagtggaagagggtgagagagagggagagctgcgagtgggagagggtgaaagagaggggaagttgcgagtgggagagagagggagagttaggcaagaaggagaaatatgagggcaaaacttgctttagtgttagagaaaagatcgttaagagaggaattagaggataatgcatgcatgtgaaaaaggtacgagatagagtatgatcacactttcagcgtaacctgatggcgagagggtacaagtggaggcacgtcgtttgcaacccctaacgtcccgacaataggtactctacaaccacttgacacccaa

SEQ ID NO: 331247 - DNA, 411 bp, Cannabis indica
ccagtagtgccctttagcatttctcttaacaaactccatagtcgatatatctcggctaaattaagccccatcttaacttggaaatatatattagttgaaattttatattgtctttatgtattttggcttcaaactaaaatatatgacttatagaggcgtttaatttctgaaatctttttgggtagctattgtttgttgtttactaatctatactaaaaattcagttaaaagaattaaatgtaattggctaaaccaaaattcattttttttttatctcctgctaaatatatatgaatggcatatatgacaattttattatttttgtcgtactatattcctagttaaacatgcaaaaagtacgtagcaaatgaatttgtactattaattagatatatgcatactaattaaaaa

SEQ ID NO: 331248 - DNA, 584 bp, Cannabis indica
aataaagttgaataaaagtgcatatccatcttggagacgccttgttttgtggttaaatggtacaaaatattatgtattttaagtatttaaatttatattaaaacgtgattatataaaaaaatataaaaaaatataattttatttttaacatatataataatataaaattaattaaaaatattttgttaagtatcctagattctgttaaagttaactaaaaaactataaaataacattaaactatgaattctattacatatagcgatatatatatactagtagaatatatactatgtatattcaattaatgtaaataatattattaataattaaaagtaaatactgaatacaatatatgaatgtttaagaaatcttgataatctaactgcaatttgttcttaagttaattcaaaataaaccaaaaatcaatgttcgaaaaataaagcatacacaatttaaattggctaattagtaatttttccccctgaactttgacatgtaccaaattgtgcccctaaacttaattggcctttaaaaattaccctcgaactattgatcgattgttaaatttaaggacttttgtc

SEQ ID NO: 331249 - DNA, 937 bp, Cannabis indica
ttttttgacttttcaaacttttaaaaggctcacctactcatgaacctctatttaaaattcatttaaataattaaaaattaattaattaataaaatttattactctgattccttttaattctctttttcattctttaatcttccattcacatcccttatttattatttggtacatttaatgcacatttagtattttatgaattattttttgataacgtacataaatattgggtcacaaactattaaatttactgtaaatagtttttttttttacaaaaagaatatgctaccacaaagcacttcttgcacttcaccatggcaattggagggacttggtggagattttggcttttcatgaccggcgaagataatggcagcatccatttgtgatactatcgacgggaacgatggggctttggccacaacacagctatgcgcggagagagaaaaccaatgagggagggagacaccaaacgggggtatggggtgttaaaaatttattagaatcataattgtatatataaaatgtgtgttggatcatcaaataaataagttaaatttatgtggcttattttgaaataaaatttatggcttaaatatatgattctcatgattttaatatgtggataccataaagacaatttctaatttgattatgggccaaattggaaatggtcaaaggattaattactgtttttttaattattaataaataggcattagttctcattttcttgcatcgctttatatcgtatcattctctcctcaatctccatcaccaagagactaaggtttcaaggaatttttgatgcaaaaattgaaagatcatttcatttaaaatcgattctatagatactggtacactttctgataactctagaaattacagttatttttcacattttttttagctaaaattggcttagttcttaagtttt

SEQ ID NO: 331250 - DNA, 971 bp, Cannabis indica
gctgaaattgctctgtggtcggaactgtaatagtccagatgctgaatccgtggcaaagtaaaagaattttcccaatggtgattaacaaaacaccaatcaagtctttcttttagagtattcacaccatgtctattctttatccaagtgaatcatctccgtgacatggcaaatctgttaagtggtagtggtctaaagcttgtctaaaggcatccatttgagaatcatttcttagagaaccacctaccttatttgcattggacatgatttcactgaaatctcctattgcaagccatggtagaagaggggctgaatcagcaagcctttttaaaagcaaccatgaattctgacggttcccgacttcaggagcaccataaaaaccagtgaagtgaaacactggctcactattaaaagacatataacaatcaaaataagttggtccatagtggagcaaggtaacatcaacattctcatgccataataacataatgccacccttgagaccagttcgaggagcttcaagaccatgagagaatttaagtgattgctgtaaacgagaaatcgaatttgtacagagttttgtttccattagaaacaaaacatggggagattactgttgaacaagcaacctaaggtgcctgaatgaactcgggttccccaaaccccgagcattccaactaatgattttcatggcgaggagcgggattgcaaagcaacctccgctgagcagtcaaaagtatcagtagaatcatcaaatggcgaaaaaactactgaatcagtaccctgttcaattgaccaaagagaaggggtaggaggagcattaccacgacaacgtttcagagtcttcctcagagacaaagagtcatttgggcgtttatagatagaattgggggcaatgttttcttttccaatggtggggggtatatgtactctaatttttatatgataatttatattatagttataataaatat

SEQ ID NO: 331251 - DNA, 1371 bp, Cannabis indica
gtgtgcactatcataataaaaataatagaaacgaaaacttattatatgtttaaaatacgataacgatgtatattatattatacagtgatatatataatatcttgtagtaatattgagtaccaattgtatttttcataaatattttgttacgtgttattttaaaaatactaaacacacttggtactaaataatagtactcatagtgataatagcaatattttgaatttggaaattttggttcaaattcaatttgtgtgttcgtgggagctactaataatactacacatagatagattttagtgacacgcatggtacgcgcttaccgttaagtgtcgttatttccattaaatacaagaataaattaaaatatgattggagtgaataaatgaaaatgtatatgaattgatataatttgattgtagagaacagagttgtatctgggctaggttttattcattcataatatatataaatatatatatatatttatatatatcaagtagtacctcttcttcaaagtggtcacacttagaggctccacgccataatttccctacttaattatatgcatgaaatcaccacttacgtatttcactatcttttttcactttcatagctttgttttcatccatagcatggctaatggttttggacatttcctttttctttccaaaactaaaacttatctgaaaataatggaagaaaagtaaaaataaataaataaataataattatcttcttgctataaaagtttctcatgcacactatgtatgctgtttgaaattagatctaaaatttgtatgaatcttgaattaataaaatagaagacatacctgatagtattgaatgtgagatgtgattgtgggtatatactatatagtaggggtggacattcgatccgatccaatcttttttttcttatgcgatccagtccaattagtaattggatttagaaaatcaccatctgacccaatccaattagacctcaaaatctaatccaatccaatccaattactaattggattggatcagttttttaattggatatctaattacacacttaaattttaatataaacttaaaaattatgaagaaaaatacgtaaaaactaagtattacattttgtttaagtttaatacttcataaacatactattcttacaagtgtaatgtagctaaaagttttaaataattaaaacaacaacaacatttctaagtaataaaattgaacaaaacatcatgaaaataaatacacaaaacaatcaagtgttacaaatttaacatgcaaaacaaatctaataaaaatataataaatatatattatattttcaatattttttattatataaataattttttaatgtatataaat

SEQ ID NO: 331252 - DNA, 1159 bp, Cannabis indica
tagttgaaacactataaaaggaacatgatactgtcatctcatccaacactttcaacctgccaaatctagtttctaactctgtcagacaactagtagatgagagataccttctatagtgattcaaaccctccttcatcgttcttcatcaattctcccatagtgatagagtgccatgcccacacataggaagtcaagtactcaatcatagtgcggaagacagtggtaaccaatccgaaggagagaaagagatccatgctcatatcttgataatactctgtgagagaaaggaacaagggttagagatctgagaggaaggagtcatattattctgttgcaatcaatgtagggttttctaaactcttatgtgtttaatttcatcacattagagatattcatatttaggatattaattcaacatacttgttagtaaatctagatcttggtaaaataaattgtaacaactggcctcagagctataataatgatttacttcgatgaaatataaatttaaaacgatgaatttgttaaatttgttgatttggatgtgttcatgttggtttatgtgtgatttgacgattgtatgtgaattacgaaatttttctataaaaataattttattttcattttcaaaatattttatttggattcattgtaaaaaattaagcaattttaatttttacgaaactcaattccgataaaaattgagaaagttatgaaagtttgaatttttcgggttcaatgggtgtcgagatgccccaatcgcacacacagaccctcagacaaggaggatctgcgcatgcgtataggggacaaaatcgtgtctgaagacacggtgcactcagtcaactcccctccttcggacaagccttccgctcgcgtttatgctgtaggctaccaagttctttctctcaaggaccctgcatctcattcatgtgcgcgcatttgaaggctgcgtgcagcctattgcctgcccaagtggattttcaccccaaaatttcgaattttgtgattttttcactacttttgggattttttcatttcaaataataaatatcaaaataaatttttaatatttaaacctaaatatcaaattttcaaattaataatatttaattttattagattattattaattctttgatattttaaagtttaaatt

SEQ ID NO: 331253 - DNA, 2011 bp, Cannabis indica
acaacccatcatcctggcaaagagcctatgtgacctcaaagaccaacacatctgaaataccacgtttaaagaggaatgatggtaacaatgataaactcagaaaggaggaatgaggatgttaataactctgccagatacatgcctaggagcgagaatgcttatgatgcaaccacatatgtgccattggtaaagttagagaatagacaacttcgacaacgattgactgaatctaaccgacaaaatgctgagttggagagagaagctgcagcagccagggctacacaggggacaattcctcagaacagatctaatactgcgataaggagaccacaaggaagacctcgaggccccaaaatcaggaggcaggaaacaaaccaagggaatcccccaaatacccaggaggaacaacctaggaatacaagggatgtcccaatggacaggataaatcaaccgaattcgagtagtgcaaggaatcaagaatattgacgagatgttccacaaactcccatgtatttgctaaccaaggggatgaacgaactcacatgccaaaatcatctcgcgtgaatgaagaagtaaggtctcctagactagggaatcagggattttgtaaagaccgcttagctttaatttagaaattagcagataattagggtttaattatgaaacttgcatattagttttgaattattaattattgatgatttatttgaattcagaatgcattttatatgtcatatatagaattatataattttgcatgttttatgcccgtcaatattggaacgcggtgtttggctattagaatcacatcctagtatttttaatatagcggggcagtatagttagacattggaaatgtcaggaatagtcgagattttagaatttaccaaaaataccccttagtgacttttttataatttttagtgtggaagggcaaaatggtcaatttgcatgagggagttttgtcttttgtgggatgtactaatctgaattttaaagctttaataagttgattatttttaataaaaccatttattatttcattttattcaaaaaataagaaaaatcaagaaaagcatttcattctctctttcaacctctctctctttcgaagcccctagaccagctagggtttggattatttttaaaaaattcaagcagtttgcagcaaggattaagtgttcttaggctctaggtaagctcttggatctatcctctttagtttcatgaattttgaaaaaatggattatgcatgttttgagaaattgagttatgtagctgctgttagtggttgattttgttttcagaagtttatttatgtttagatatgttgatttaagcatgttttgaaggttgttactagagttaggcaagttttgagttttagaactcaaacttggagctttaatggtgtttttcaattctgagcttggatagttattttattgcttgaaaaatacttattggggtataatatgcaggtctgtaatgtttggtaaagtttggaactgatttggttggggtttgaaattgtttgggtgttttggggaaaaccggtacctgtaaaaccgggtaaccaatttttgcagtagggattcccaaaaatttcaggttatcgattcgtgctagtttcaggtttctagttggttaattccttgctagtttagggtattgccatattaagtagtagtaataggtttttggtttaaaacctaagtcctggttgtgatttagcgtgtcacttatccatgttgttatcgatgtgatttaggagccagtaatttgtcgagcagttgttccactcaggttggctggcatacctgaattcagaattgaggtaagattagtataatgtcatgcatatgttattacatgtttagcgtacatgttgtttatgcctgttagattgcattgatagcagtaatagtatacatagagttgtactgattactgataaatgtatgttggctgaaatactgattgatgatgtcacatcaatatggctagagta

SEQ ID NO: 331254 - DNA, 817 bp, Cannabis indica
aggtgatcaatcttaaacatagaaatacacacaaatatggataatttcacaaacaagaaagaaggaatataaattatcattaactaagcaaaacgtcaatcaacattcatcgtcttccccaaatgggagtttagttcataaaatccatagtaacattcataatcaaatctaaaatagaaattaatataaaattcaagaattaagaaagaactagttggtgattgcgctccggatcatcacaatagcttcctctcctccttctttaacttttcgggggtatctctgatgatttttgttataaaacgcgaatcccttaaaaagaaattagggttgctacctctgaatggcaaaaattcaaaacttgtcaaaaatctcgtgttttgcccatagtcgcgactaaataaagcctagtcgccaccataggcaaagttaaaaataccatgtctctacctagcctcctagtcgcgaccataggtctagctggtcgcaactactgaagctattttgacagcttccgcagatttttctccagaataccccgtcttgtcaacaattgataaaatttgaactctaatccctcggggacctgatacaaagaaaatcaagcgtaaaaccattccaaaaggaaacattaatagagaaaacacctatgaaatcgacctggaacttaggctaaaaatagcctaacagtagggacaaatttaccgttttacccctcaatgtattttatccttaaaacacttagcttcctataaattttatttcagtaaactaatagaatcactaaaataagagctcttccatttatctttattaa

SEQ ID NO: 331255 - DNA, 566 bp, Cannabis indica
gttaaggatgttggctacgttaatgtatacatacacatataatgggcctttgtttaataataatgggcttgggcaattcccctctcgtccttcagcgagcactactagagtaaattatattatattctcactttattttatctattttaatttttatctttattttatatgctagacttaagtggaagataacagtatattaggcaacccactcataaaagtggtattttttaatgaaatataatatgagagtatttttaattaatggaaataaaaaaaaaaatattcctcaacttttaccccgcatgaatcacggtgatctcatccctatcttcgcatgaatctagctacaacagtcccaacttgcctcgttcattatcatctcattaaagttagcaaaaaataataataatatcgtgtatcattttaaagattaaaaaaaaaaaccagatcatggctagaaaataagagagttaaaaataaataaataataattctataagtgttacctaatgataacaaaataaaactacaacaaatcaattaccatcagattaaaaatcaaa

SEQ ID NO: 331256 - DNA, 689 bp, Cannabis indica
ttaacgttttcttttcttttttttttgtggtaacgctttgttaacaaaaatagtgtacacgcactaagcactgggcactgggcactgggcactgggcagtcatcgactcatcaactagatcggcatataatgggttttttttccttattttatttgggaaatttgactttttatgcttacaaatacttaatatttttatcctaaacacataacatgtaatatttatgggatatgacacattttataatattcctaaaataccctcatttacattacccctctccccattagacacaaatacaaaaaattaaattttaacatagcaatcggaccccatcgggttacacatcggacaccttaaaattttgattttttacgcccccccccccctccaatcaggttagacatcccatcggacacaatgaaatttgattttttttttaacatgaatcggaccccatcaggttccccatcagacccatcggacacagatgtaaaaaaattgaatttttacatagcaatcggaccccatcggacacaataaaatttaagtttttttaagcatgcatcggacctcatcgggttccccatcggaaccctcaggccttcatcttccccaaatcgcagatctgaacctaaatcgaaccctaaatctaacaaatcaatacctatcaatgacaaaaataaaa

SEQ ID NO: 331257 - DNA, 494 bp, Cannabis indica
ttaatttcgaaaaaaaaaaacagtataaaagttattttgggcgtgtaacagtataaaagaaagaaaatgggaaaacacagtaaactgtgtaaatttccctatatatttctgtttgagtttgagattaaatctgttaatgatttattcaacttatgtcaattaaagtaatacaaattgggtaataagtggtttcttactattaatatagaagtgtcaataatagtatattctcctcacgatttcttagcacttttgtctttttccttacaaatgtcctacttagtacttctcttctcatgttttttttttgtcctctcctaaaattttcattcatatatgtattatttcttttttcatttaatttgtattattttgttaacattttgttgatgactcttaactacacgtggcttcattaaatcagtttttgtgcgtaaagtttttttttggcaagttagttgacaaaatattttcttttatggtaagattgtttt

SEQ ID NO: 331258 - DNA, 501 bp, Cannabis indica
atatatatatattatttgaacgagaaaaagattgataggtggaatattggaattattaattaattaattaataccttggtgagccaatgagtccatcgatgatgacatgagcgatgtgaattccgagtggttgaaactctttagccaaacattgggaaagtcctctcaatgcaaacttcccacagcctgatattaattaattaatcattaattaattaaatttccaatcattaattagtcaattcattaataataataataagtcaaatcagtaatattaattagttaatgaattaattacatagttcagagtaaccagcaatgccattaagagaagctgaacatccagtaaagagaatagtccctcttcctctttcaaccatacccggaagaacctatatatttatatatatatataatcacaacgccagttatatatgtgggtgtttggttgccgagaaaataggagagagagagagagagacagagagagagagagac

SEQ ID NO: 331259 - DNA, 1025 bp, Cannabis indica
tgctcctgctcgggtatttgcccagacttaggtagaggctgatgttggcccttccactgtgataggtcagcttcctattgccgataccttattgaccgttttgattgattttggtgtgacacattcctataattcaagtagagtaattgagaacttgaatagacctagtgatgtgttttcgagcagttttggtaccttgctgcctactagagaacaggttatttccaacaggtcagttaggtcccttctggtgtttgtggaaggaaaagaattgtcaattgatctgattgagttaaatctggaagattttgatgttgtactaggtatggattggcttgcaaaatacaatgcaacaatcgattgtaaaagaaagatggtaacttttcaaccagagggcgaggacccatttgtatttgtgggaaaagtgcaaggatctcagattcccttaatctcagtgcttaaagtaagagatttattatgtgaaggatgtatcgctttcctagccagcatagtggatactatgaagaaagcacctatgggaccagagcatgttctagtgatttgagaatttctgatgtttttctagaagagttacctgggttaccaccgaagcaggaaattgattttgaaattgatttgatatcgggaccgaagcctatatctagggctccttatcgaatggcacctgtagaactaaaagagctaaaagttcagctacaagggatgttggatttaaaagtaactagactgagtacctcaccttggggtgcaccagttttattcgtgaagaagaaggacagaactttacagatgtgtatttattaccgagagttaaacaaattgagagtaaagaacgagtatcctctcccaaggatagatgatatgtttgatcaattacaggaaaagacagtcttctccaagatcaatctttgatctggttatcaacagttgaggattctggaagaggatattcccaagacagccttttgtacccggtatggacactatgaatttctagtaatgtc

SEQ ID NO: 331260 - DNA, 759 bp, Cannabis indica
agattggcaatgcccttgatcttcagtaggtgatcattcaaagaacctatcattttggtgtttctcaactgagccttgtacagactaatgttggatgcattgagtgttgtgtagtattcattcaaaggtgtccaaatatgagttgtgctattgcatcttatcatatgactggttattttctcgaacatggatgataaaatccaagaaacgagaagattgtcctactattcctaatcttcgaattcaggattgactctattgtgttcttcatctacaacagtaggaaaatgcatgggagcttaagttgaatataagaatttttgaagcctacttcccttgatcaaggcaagaacttggtgtttccatgacaagaagttgtgctcatcaagttttagcgatagagaatgagtaaacgacactgaataagattttggaggaagattttgtgcttgagcttgaccttgagcctagttcaatcttgaggctccaccattgtcggtcaattggtgttccgtggctgtgaaggattacagctctgatatatactatgttgaatcttagaggagagagagaaggaaagaaattatgttattgcattgaatgagaatgaattggttacaactttatatacaacattaagtaataacagaaaactaactgagagagagttagttacacaactaacaaccactgacactagctccttgttggaatttattttaccaggatcttagatctactcacaagtatgttgtttaa

SEQ ID NO: 331261 - DNA, 813 bp, Cannabis indica
attattatcttgtttaatatttggtccactaatttgtatttgggtactttctcgagttgtttcttcctcattagttctgcttttcagcatcccaaatccagtgtcttgcaaacttagaagagggtctttattcttcaccagccacaattttaatccaaccataaactgccaaaagaacagaaaagttgtccaaattaacgcttaattaaatagcgtaagagcaccattcaaaaaaaaaaaaaaaggctaagagcacctccaatctctaatatcactttttgactaaaaaaatttgtagccatttaaaaatataatattttatttaatctctcttgtatcttattttttaaacaactctaaaacttatcaaaataatattatgttatttattcaaccattatttaatatttttgtcctcaaaatataacctatatcttatatctaaactggctaaatagccatatcatcattttatttgatatgataaaactttacagaataattcaaagattatgtataatgggttgaaaagatctcgaacacaataatgcatgagtcataattcggaggcaaaataaggtccaatttatcatttaacaaaacaaaatgttcaatcaaaattttttacaaaatgcaaactccaaaataatatttatcctcgttattattatttttcttttcatattttgtaatttatgcaatagctagacgagtccatttaagtagaggacataccgttgcaatagatcccgcaggtgttgtcgatttgagaagaatctcaaacgcagtcattcccatcttattgctcattcc

SEQ ID NO: 331262 - DNA, 905 bp, Cannabis indica
ccaaacaagccaaattggttttttaaaaaataattttctgtttttaaaaacaaaatacagttttttagttatgatgccaaatatgcacttatcatttgtatggtaaaaaggaacgaaaaatttaaagagaaaaatgggaagataggataaaagggtaattatttcacacattattttaaatttttttttatttaaatttttagtttaagttgctccgatagttttttatgtggattgctatataaattttaattacaatttaatttgctctgttagttgctatataagtttatatgtggatttctataatatattataaaaaaaaattgttttaaagtataaaaatataaaaaaattcctaaattaaaatatgtatggaaatgaaaagtaagtgaaaaaaaatatgaatactaaaaaaaactttctccgaaattagagtgaaaaactttttaaaactactaacaaaatttcattactaaatataacctttaataattttatattacaataataataataataataataataataatataaaagtgtaattctaaaataaaataactttctaattttatttttgtcaactctaccaaacaattataattttccatctcaaaatatttctttctaatagacaaatattgagtcatatataaaaatttgaactacttcattaatcaccaattaattttaaaatgaatatcacatattttttaacacagtatattttttcatttgaattatgatgtagtactactacttagtttatagattaagtgctgaatagttattaagtcaaagtgttcatattcattcttaacaaattaatagttgcaatttgtgagggtcattctaattttatacgattaataattattattttattttctactttttatttt

SEQ ID NO: 331263 - DNA, 579 bp, Cannabis indica
aaaggtggtgacaccttgtggggaattgaaaactatactagataatgtaaaattctctctgcttttatgtcttgctgtaatttttcttttatcactagaaactgtaattttatagcccataatgtggctaaatgggcatttgccagcaactttaacggtatggtagaagtctctactattccgaatgctatcctttgtaacgaccatgaggtctaactctttcttctatattaaatgcttttattaaaaaaaaagtataaatcttgtattttatatttttgttaaagaatgaatcatacaccactataatctacatttcatttcaaaaatattctattaattactatttataaacacaatatattattaatataaaattgaattaaattaaaacttaaaaataattgcaccaaattaaaagaagaatacacatatagtgatgtgtattgtgagttagagtttactatagaactcggcacagtggactctaaaaggttattacaatggaataagaatcttctgtcaccaaagttctgtctcccttctgtcccaataatgaggaaattgttggaaattatt

SEQ ID NO: 331264 - DNA, 1065 bp, Cannabis indica
tagtattataaaaaaatatgatatataatccattcaatataatacaatacaatacgacttaatacgacattccaaacaagtccctaatgaattatagctgtagtattattattgattagttgtaactttgcttaattttcaagttttataactctttttttattactaaaacgggattaagtggtacagatttttttttttcacttcatatgacaaaaaaaaaatctttgagtgtcggtggttattgcaaatgtgtgtatatatagtattttttttttttttgttgaattatagtatcttggtttgtttgtacgtgtgaccaagcaacactccccacacacgaaaaaacaaaataaaaatctaatagttgtgaatcaattttttttggaagaagttgtgaatctaattaaaagttctaatctaccacacccacagtcacgcctttcaagaattcaccaaaccaatcatcaacgtgatctaactttctgtacactctttatagtgctgtaaatttgtgtccatatttattattattttttaaaaaaatatatgtcatgacgtgttaatatttttaaagtgttttacttgtattggtctattttttttaaacaagctaatctatttttacattttaaagtgttttacctttggctagttatacttagaaattttgttgtttgttgttactagtcaaagggtaatacatttggctagttatacttagaaattttattgttttttagttttttagtattgttgaacttgtgttttaggttgtgtgttaaattctaagtttgtattttaattttaatttgaagaatgccattctaataaaactgtattttttggttttggtgttattatgttttttcagtttcgctacttctgacgacaactattataatgggaaggtatttttcaatgtgacggggagttgtttgaagacgttatagctttattttctaaatttctgggggcagttttgtcccatgttgctcgcaatatgtattctgcagctcatggtttgacaaaatatgcccttcggttagacgatgagttatcctg

SEQ ID NO: 331265 - DNA, 1087 bp, Cannabis indica
aaaaacctcaaataaaactaacatttacatggctttgacacgtaatattcacctagtataaatatatatcagtttaattttgtcactatcatatataggtataaaataagtatttatcatataagattatattttccacattataataattaattaagtgcaaaagctacatgacaaacgcaatgtctttggctattaattataagttaaaatgatcattacaggtagttaattaagtaattaattaagtatgatatttttaaaagagtgtttctattattaagctacttttttttttttatgaatcaacaaggttatcattactccaaaaaaccaaatacaacttaacagcatctcaattgagacttgaaaaataatctatacaacaccaagtatatatttgtctcttttttacaaattatcaaaccatattctattcttgacactaattttcttaggccatacactcttgattctatacaaaatgtctgactttattttggtcactatttgacttgtttccacactttctccttcccataatactctgttttgtacttgccatatattgtaagccaaggctgcaattgcagcaatttaaaccctgctcttaaagttgttcaccttgttcctttgaagccatctcacaagccgttgaagagagcatgtgacaaccctccatttcagccacaatttaatctactgtagacaggctgctgcaatattgcagcagaaaaaaaaaacatgattttgtgtctctttaccaaccctgcacaacacacagcaatcctctgtcaatcagatttagttttacattagtctttctcttgtttcgtagttttgtcttgtactgctagccacaagaggaaactatgtcaaggcatgttcatcctactccatactaccgaggcccattgcaccttattaccttcatttttgatcagattataggcctttgatatttgatacttctactcgcacatccagtggcggacccaaaatttaaattgaggggggtgtaaataaatttaaaaagaaaatataaagtgtatttagtggggtttgaacctttaccctctaacctatt

SEQ ID NO: 331266 - DNA, 1397 bp, Cannabis indica
tgttaaaataacatacttgtgagtagatctaagatccttgtaaaatagattccaataagacattggctagaatttgtgaaggattacgactgtgagattctttatcaccctgggaaggccaacattgtagctgatgccttcagaagaaaaggactgactcagttgaatacagtgaagcagatgtccaagcagttagcagatgaaatgacccgagctaaaattgagttttttgtggggcaatgatgtgctcaatcatttacgttatcttcaatttgctccatttggaaaaagaaaatgaaaagaatctttacatcaaaatggttggaagaagaaaagtattttctttgagttaccttattggcgtacattgttattaagaaataatttggatgttatgcatattaaaaaaaatgtatgtgaaaggtacttaacactataatgaatgtttaaggaaaatctaaagataaggtgaaagctcaactagatctcaaacacatgtgtattagagaagcactacatctaatacaaaatggggacaaattttttattccaaccgtgtgttacacattttcatcttgtgagaaaagtactttgtgggagcttttaaaggatacaaaggttcttgatggttatgcatcaaacatatcaaaatgtgttaaaagtaaagaacaagagattattggacttaagagtcgcgactgtcatgtgttgttgaaacatttgatacctattgcacttcgtggtttattaacaaaagatgcgagtcgcgttaatatttagttatgtacattcttcaaagaaatttgttatcgagtgttaaagatggatgatctaaactgacttgaatgaaaaattctactaatattatgcaaacttgaaatgatatttctaccagtattttttgatataatgattcacctatgtgttcactgttaggctttgtgccctaaataaaactctatttcaatgtaatctttaccatccaattatcaataaagaaacagaagtatttttcatcacttattttgtgtgtcatttggttcatgtgatcatttatatgtttattttatttataaattcatctaaatccttatcacattgatgttcttgtttattgtgtcgtcagcatagtggaaagtgatcaagattatgtgattaaatatattcctagatttatcagtacatagggtttaactgatatgataatctacaacatagtttacttgcaccttcggataagcgcattggttaaagtaaagcttgggttgggtggcatggagtatgcattggaagggacccatattgaacttggattagatatgatacatttaccgttgtatctattcaattcaatatcacctagttgatcctagattaaatgatctaatcctgatatg

SEQ ID NO: 331267 - DNA, 544 bp, Cannabis indica
aggggcatgttgtgatggtgcaaaataatattgggttacagataattttatttaataaattaataataaaaaaaaaggggaattacccctatattatttttaaattttttttttttttgcaggactagttgcaataagaggttttgtacgattttaaaactattttgaaatgtaaaaatcaaaaaacaaataaaaaatgactaataattaatcgtaacatatagggcctaatggctagcagttctcttaatttttattggaagcatatatatctggaatagtaatataataaaaaatcaaatgataaccgaacataaaataagcagccaagaaaaataaataaataaataaataattacgtatatctttatatataataatatatgtagctaattaatcattattacataaaattatttttattaattcttggtatatatagaaatacgttatggatgaagcacaccttaatttgttccaaatatataccataagtgatatatatatatatatactagcaaaagttacgtgcgaggcacgtata

SEQ ID NO: 331268 - DNA, 1629 bp, Cannabis indica
acataaagtaatttgatagtgatcgattcactgatttttgtgcgaaacatggaatcattaaaagctttgtactgcggctagacctcaagcaaacgaacaagttgagtcatcaataaaattctaaagaccactctaaaaaagaagtttttgccttgtaaagcacaatggttgaaagaacttctaagagttctttggacctacagaataattaaaagaacttctacaagccacactccgtactccatgacctatggatgcaaggtcgtaatcccagttgaatccacagtgcctactcataggagggatacctatgacctaaattaaaaccattctctacttcaagaaaccttggatttaattgaggagctttgagaacagtcacaagtctaactctggatgtatcaaaacaaagtcgctaggaatttcaactctaaagtcaagagcagaagatttgaaattagagaccttgttttgagagtttcctgcctcttaagaccccagaatgggggtcttaggaccaaactggaaaggcccatataaagtcatagacaaaattggtgatggaacttaccatttgaaagatgaaaaaagaattctaagagcatggaatgctgaccacctgcaccgatactatcaataaactgagggtggtcaggtccctttttgtttttctttacttttgattttaataactaatttccatgtacacctcagggcaggatatatttgaataaaagaagaagttttcatttcatatttggtctttaaaagttctatcatgtaacaagtgatcaaaagtctcaactattaatcacttgggggtagcatatatgatattatcataagtaattttacctctttcacaaaaaatagctaagctaaattctcaaatataagagtagggagtattgcctaaaattggaaccttagggaaccaaaagtaagccactaccttattatatttgaagttatttagcatttaaccaaatataagagtatagagtattgcttgaaattgatttctcagggaaccggaagcaagccactactttattatacttagaatcaattctcacacattaaatagttaatctaggttaacttaaaataaaagttcagttagcccaggttaacgcgaccaaagtattcaggctacttaaaataattgattcagattaattaaaaaggtaagttcagaaaggccctattcttaaataattaattagcccaggttaattagttatttaaacaggaaaaatattcaagtctaaacatttaatcaaaaattcaaaggtttaggcctttgaaaccagaacctcacgaggctaaaagtattaaaacttagcaaattttgcggataaaatgcaaatatctaaggaattaatgaaatagtactatgtacttaaaaaccctacaacaagggtataaaagattgtctatgcacacataaccagaggacccttgtcccccaaaagaaaaaaataaataaggataaagttgtttgagataagcaaggattggtaaggctgagctgggtccttcaaggattatgaatcttgggtttgaaaatcaaacgagaccttcgggatcacagagttggttgagataggaacatcagaggttggaaga

SEQ ID NO: 331269 - DNA, 694 bp, Cannabis indica
tcgtaatgatatgttcagaatttgatcttaccaaaaacataagattcgaagatctctttcttatctttcaagtgcatcttgaatcgtccaattttgatatatatatatatatcgagaatgttatggctaaaatactaacactgccaaattgtgacagcttagtatgcgagctgacggctcccatgtgagctggtggactgttgtgcggccccctggctattgtgtgaccccattgggtgttgtgagaacccatgggttgtttgggtgagctggggggcatttgggtgagccgtggaatttttatgcaagtgatggagcttcgttcgaccctgggggtgaaagaaggagaggctatacatgtagggatagacgtcatggttcgggggagtgtcagtgcatgggggctcatgtgtgaacccacgaggggtgcacatgtgagctatgggagagagtatgtgcgagtggagggagtgtgtgtgagtggggggctcacatgtgagtcgtgtgtgcatgtgggagagtgtgtgtgagtggagtgtgtgcgagtgggggctcgcatgcgaaccgtgttacatgtgggggagtgtgtgtgagtggggggctcgcatgcgagccatgtgtacatgtgagggagtgtgtgcgagtgaagggagtttgtgcgagtggggggccttgtatgcgagcccatgggggg

SEQ ID NO: 331270 - DNA, 3941 bp, Cannabis indica
ttttcttaaaaaaaaaaaaattcattttacaacaaatatctcataaatgccaatttactaaaatgcccctaaggcctcataacactcactttagcaaacaagggcaatttagtcatttcatgctcaataattttcaaataaaatttagatttctcattatcaaattaaatgccaaataattcaatcaaatttgcatttcgggcccgaaccaagttcggcccgaaataccctgttgtgactataccgcgccaacttatcaaaatacacctgaaaagacaacacatgcatactatataataatatagttccattaagcacgtagttaaattaatttcatcaatttacccttctcgggtcataattactaaaatacccttggctcaccaacggggtcttaccatgtaattattcaaataaattctcatatattgaactatataataatataattcctcaattattcataattatctaattagagttttgctaatccatttctttatttagggtattacacttataaagtcgtactaggtaatcatggccgcttatagacctacaaaggaggtctggccacccaaggtgtacaggatctggcaggacaagggctgcagggtctggcaggacaagggttgcagaacctggtgtgtcaagggctgcagagcctggtatgtcaagggctgcaggacctggtaggtcaaggcctgcaggacctggtgggtcactataactctgtctaggggaggccagacttatggcgccggttatggtgacaggattcaccacatctataatgtttatcaagattctagttatgactggaacccgagtatctggacctacagtctgtgggtcttgagggagacctgaagatgcatatggtgcaacaagaattcttctcatcttaacaatgggatttgatcagatacaatatccacattctcaatgaaagcaccaaactattgaccttaaaaatgatcaactaacagatgggtcatatagatctgatgcttgccacgtgttacataaatagaatgaaaaagtaataacatagatttttatagaggtttggcccccttgtgatagtgggtaatgacttactcccattttggttgtattgatacctagagataatactattcagatcactataagtgagatctgatatatttctctctaaggatacaaatcatgaatcagcaggcagatctctaatgagagagtgagattgccttagaggcgtgtgagagagatgaagagaagagaagcagagcccttatgggcgtgtagcagagagagagagagagagcgagattagggttttgacttagaacaatttggaggcttaatgactaagaggcaacttagggaacttaggttttcagttagaggttaaggcctttatataggaatccttaaaccctaggtttaaaattcaaatcccttaaaaatagcatagttagttagatatttataaaagaccaaaatgcccttaattctagatattcttcagccagtctgttgggctttaagggcccaattcccaacccatatcttgtgtccacgtgtaaagttgtacatggagtcttgttaggtcaatcttggccgtcgataggcctacagggaagtctggccggccattgtcctgccaggtcaatcttggccgcccatagtcctgccaggacctggtaggataaggcctgcagggtctggcaggacaaggcatgcaggacctggcaggtcactatagctccaccaagaggaggtcaacctttgagtgtagaggccagccttttgcaagttgaggacaactttgtacattgtttccttgaagaggtcagtttcccttggttgaacggagtctccttgggtctggaagtcactccttggccggcaagcttgtgcacagatcctgtccagcctataggttcaccctgcctggcctataggctcctcttggccagccaaggttgttggtacaactccttgtgggctcgcttcactcccttcggctgctgcttgacggttttgctatatcttgcatggaggctctgttttgctattggcggggctgcactccacttgtactctatctttggcttacgtgaaaattccacgtcaggtggataaaatttagaataacacttctcttatcttgatttcttatgattttatttgtgtctagtttaattatggatttaattatgggctaaactctctattttgaaatgtgatggatattgtttgagattatttcatttgttaatattagtttattatttttcttccttgattgtgtgatttattcatctttctgtttatttcatgtttaagcttcattaccttatgcatgattcatgatcctaatgtgaaatttgaaaagtgaatgttaggaatgctctaaatgaattaatataggttttgatgtgaaacgaaagtacttacatagcttatgtggctattaaattattacttaatgcaaattgtatcttgatctatctcagatatacattagttggcatgcaatttaagaccttttatgatctgaaaagagcttaggttaagttataatcagtcatcactaagcagcaggaagaagaatggttaattagtattaacaattgggtaatcaaagtaattgaaatcatatccttaattttacatccattgtttaaaccttttatttgtttgttttatttaatttttcttagttaattagtttcgaaatctatttattccattgccaaatagaaataagaattcaattgattggtatttagctacagtcctaacgatactaaacttttattattattacttgtaaacgatacgtgcacttgcgtagcatagttttcgcaacaaagggcaaggctaaggctgagctatagtgagtgcgagcagatgaatattgtacgtatcgaggcggttagacctggaatattcgatcttcggggcaatgtgatttattttgacagtcgcaaggcgacaacttttgttgttatatgttttgtaaaactgttgtaacttcttaaagacgggatcccggattatgtaaagtttatttattaaagtttaaagttaattatgaaaagttttaattaaacacgatttcaataaacccgttggttagcgacagatttcacatttagtatttaaatcacaataacacgcctaatttagtagggtgttacagttcgggggacctgattcagtacatggacaattgccgcattagtaaaagtgaacgaaattggacataaattcttgaatccaacaatctaaatggttcgggaagaatttttaccaacttgaaaaagtttagagatcataatttgatacatatcaaaattaaggtggctaaagttctgaatagccaaaattttatattaaaactcccctatattaatttaggatagggagttttatttgcaccctacaaagttataagtgcaccccattttaatattttttttattttatagaaattatatatctttaatttgtactaattttttttaaaaaaattgttccctcttaagaaatatacctataaaataaaaataaaatttattttatattaagacagaaaaattttaaataaacaattatatgaaaatttaatttaaaaaatttaaaaaaaataaatcatgcatacttttttttaaaaaaaaaaattgtgaacatgaaagaaaagtaattattgatattaaaagaaaataatatgaaaaaaaaatttaaaaaaatattaaaaaataatttttaaaaattaatttaagttaattattttttaatattaagatacacttatacaaataagagtaatttgtggcgtaaatacttaagttaaactcccagttgcagataaatacctaacttatttttttgcggtaaaaatacattctgtcattattttgttgtaaatgaggtacctcacgttaagt

SEQ ID NO: 331271 - DNA, 848 bp, Cannabis indica
ctctctctctctctctctagttctctttgttgcgtgattgagacccacagccctccctctctctgattctatctagtgcatggccaatgacccacaaccactactgtcgaacgaacagacaaatgatttgtggtttctttgtatttttttgtttcttatgtgttttctatgatttttttgtatatggtacgataggatacgatagtggtccgatgatgggtacggtagcagtgcaatctggaggttagtgatggtggttcgatacaggtacgatgcatttttgttattgaaatgagtaaaggttgaagacgtaggtccgatggttgatgctacctatgaatgtaagatatggtccgatgatgatccgatgcaggtttgatgtcttttgttattgaaataagtaaaggttgaggacctagaaccgatggtggccgatgctacccaattttttttatgtacaacaacatacactaaagggaaaattgcagtaaaagttctcaaaaagtttactttgatgcagataagttccaaaccttaaaaaagaatggtaatagtccacaagctcaatattctggtaagcccgttggttctctttttcatagatccgttaattcctccctaatatatcacatgttgatattaaaatgtagcattcagtccccgaaaaaattattttgatgtaaataagtccccaaaaaacttactttgatgcagataagttctaatctcaaaaaattatgattatattccctaagctcgacattctcgttagttcgtaagtacccaatttaaaagctctgtttataattcttaaaatttcacgtatcaaaagtttattggttcataac

SEQ ID NO: 331272 - DNA, 768 bp, Cannabis indica
atcggaataatagaaaaagccctagaacaaccacattcacccaacaaacaagagatttgacggaatccttataaatttttttctcctcaaattttgatataagtttgttatgtttccaatatcaataaatatatatatatatgaataaaaagatcatgagacacgtaatctctctttaatttttaattattacttttaataataataataggattaggattccctgtacgtgtcccttttttacatatatatatctttttcattcaaacttaaatttagtttaagagttttcttttggggtgtttttaactaacaccgtttagaaaacaaaaaaattaaatttaaaaatatatgatagaatttaaattaaaaaaaatgatacaaatttaaaatgaattaaatcttatatatattttttaaaaataaattgaaattaaagttaattttttcattattattatttaaattaataattttttatcaatattttgctatagttattagacacaatatttgccatcaagttttatttaatagcaaacatattggccctcattaattgggttttagggtccgtttggtacgcaggactggattggattagacatgctaatttgtccaatccagtgtttgggcatgttacaagtctggataactaatccagttaacctcatctatctggattatttatcccatccagcagggtgggataataatcccatgcaggtgagattttttttttatcgtttttttaatttaatttattat

SEQ ID NO: 331273 - DNA, 661 bp, Cannabis indica
atatattgtaacaaaatcaataaataagtaaaataaatttataaatgtatataacacacagcacgtatatatatatgtctacacatctagattaaataagcaactgtattatatatatgtatatttatatatatatttaaaccaaaaaaaacataaaaagagacaatttccaccatgcaagagatctaaattggagaatatgcaatatttatatataaatatataagagacattaggttttacacacctgtaaatttgaaaaagggctagggttttagttttatggctagttagttctatattaattgtgtagatttatgtatatatataattaaaaaacaaataataaaattaaagagtagaccaataagagaggggacaaaaatgaggattacatggaaaggaatctagataatttagatatattattattattattattattattattattattataaaattaataaattaattataattttaattaattaagctgtcatgtctagtcacactaaatttgtatccttcatgaaaacaaccaatcaatttgtctctatactcacaaattctttccatccaccaattaaaaataatcaattaactaaataatataaaaacataaatcaataaaccacattattaatttttttaaaaaaat

SEQ ID NO: 331274 - DNA, 845 bp, Cannabis indica
aaaaaatagtgaaaaataactctaatttctagagttatcaacaaatatattgagaataatattaacaattacaagtaagatacggtgatcatatcgaatttgaatgtaatgatgagtacaagaaatatacaattataacaacgtttttgatatcatataagtagtttttagaaatttatcaattgtcatatatatattttgtaattctaatttaatttatacaaatgatatatatgacttaattattactaaaaaatacaatcgcacgtgaagcgcggtttgtttcctaatatatatataaagaagaggtataagaaggtgacacgacagtctaaaattgctttaaactattctataaattttctaaacttttctaatttaatatatacataatttaataaatatctaacaactaatatatatgcacaatttgataaacataataatataattattagaaattttttattaatttattttttctagttattggtgatgtgatatttttaaaaaataaataaataaaataaaaatatttataaaacgaaaaatacttaaatatctcattttgtaaccaattatataaggggactattacagtaggtattgggtaaaatacctatcaatagggataataatttataacctttgatttaatctaatggctcaaattaactcttgaaaactacaccatagttaatatatttatttatttataattaatcttgaatattattaattatagatttaagtaacaaaactcaaaaccataattttttttattttttattttactatctactaaaaatttaatttaattatatatatttttaattttaaattta

SEQ ID NO: 331275 - DNA, 757 bp, Cannabis indica
atagaaaggtgctaagtaccacttgtgctctttagcattgctcttaaattccctatacatatctttcttatatatcttttatttttcttatattaaatgcgtctatataacataaattatttttttaatatattttatttaaaatttaaatttattgcacatatgtaaaaaaatctttttctgttattaattttttacccaatttacatatctaagaaaatatctttctataattatttttcttataaagaataaaatataaaaagtgtttatatttattaaagaataactgttataatgctggctactttttgcagttattgaaaaatatctttttattattaattttttttaaaaaaatagaaaaattgtataatatttctaaaaaaatgaaagcattataaaattaaaagtattactattttgttcaaaaaaaatattactattaaactaaaattataattaacaataaatttttaataatactatattttttttacaaatatcacttaaattaaatattttttaataaaaaataatgttgtttattgaataacataaaaaaaattaaccatacaattaaaaatatacaaaactaaagatacggacattgcacataatattaacctaatatatatatatatatatatctttatatattaaaagtgtctatctaacggcatttcttagtttaacagaatatacttaaaaataaaagaatattctgttaaatttaacgattaggtttgatctcccg

SEQ ID NO: 331276 - DNA, 499 bp, Cannabis indica
ttttagtttttttttttttatattttacatactctacataaaactcttattgcaactaactgagcaacctataacattttatatttgaattcataagacgatgtacattaatatagttttaatagtagtcatttcatttgtttttataaaattttgaatatcttatgataaaaaattaaaatacaaaataattaattgtatgggtgtataaaaattataaagacacgtgagtgtaattgaatgtttcaactttgttcttgaaacagtaaattagttaaattttcataaaattaacatgtaaaatgcttgctttagttcaacaataaacacaattgtaaaaaatttaaatcataatttatttaactacaaaaatagtagggaaatttacatggtatactaacttttgccatttttttacaaaaatactgtcaggcggtaatttttacttttttactgtgttttttataagtttcatactgcagtatacggtgttaagttt

SEQ ID NO: 331277 - DNA, 1002 bp, Cannabis indica
gatttatcaccaaatgtccacgacagtggatgacaccatttgcaatattcaggttatgtgaattagatctatgggtgtgggcctcagctagagtaagtgacattaaaggaaattggactaggcctggatcccatgtcttgggctcatgccattctttatctgaatgggtcacctcaaaaatatccagggacagaacacgatttagagatgagctatgtacgggaatccatgagtctcgttcctcggccatcttctcaggcggcgactcccgttgctgattcttctccggctccgtcttcagcggcgttttcttctttggccatttgtcttcttctcctccaacattcatgttcatctccggcgccattcccaacaaatccttctgctcaagcaacgccaccagcagatgcttctcctcaggtgctatccccaatgatttgttcttctctaatgtcgttcattgtcgaggtgcgatcgaaccccatggaataacttccagatccgactgcgacaccgtagatgatttttcgtcaatctccatagctctaaatatctcaagcgacgctgcaagtggagcctgagttttcggagattctatcaatggaagcacacccagatcccgcgagaggaaccctcctcgattttctttctccagcaacggaaccaactgctggtttttttccaacatcaccaccaatggagccttggtctcggcggattccatcaacgaatgcacacccaattctcgtgaccaaagttctcttcgagtctccttctctagcaatgttgactgctgtgggttcttcgattgtagatccttcgcatcaatagcaacattcgtcactgcccacactcgtgaattcctcttcttctcttcagacaatggtggtgcttctccctaaaggcgctggctgtaggttagagaaccagtgatgatttctctggagctgtcgagtctagcaaaggctcttttgtgttctcttattgccatttccatctctt

SEQ ID NO: 331278 - DNA, 1379 bp, Cannabis indica
aagcattttacactcatatattttacccagcaaaaattaattttttaaatatgagcaacgtcttatgtgacgttagtgctctacatgtgtgtgtatatatatatatagatacttaagggtattgcatgaggtagtatcttatatatacagtatcatatatacaccgcacatatattatatacaacatatataacttatttatatagtacatattatatatataattgttcttggctgggatattatttttctgctgtttctgttttcctggttctttcattgtaatcagaagacctgttgaatcttgggggattactttgtaaatccttaaggacagtgtcttatttgcacgcttcaggtgttatcaatttattattgtattgtaattatttttttaacaggtgtcccacggaaaaaaaaatatatatataaatatggtaattacaataaaaatataattattaactatagttagtacgtgaaaaaagtaatagctgtatcatgtacttcaccgccattttggcaggtactttgtagagttaattagagaaatgtagttcaatataattgatccgcacatataatttcaaaaatcactgaagtaattttaagaaattacataattgatatttgataattaccagaaccccagccggggaaaacactacacccgttgcttatatacatttatatactagacttgaaattacacaatcaagttattcagtttttgttccaacttcgatagatcgaagcttctctcttcactcacagcctgttaattaataatacacatataaataatcaaaattggttgtgaagcatatatagatatctggaaattaatcaatttttgaagaataattattataaaaatcaaataaatacctcggtttgaatggtgtggagaaatctttggttgacttttgcggaaacacagctgataacatcaaacccttctgtggacaaagctctaagaattaatttatggagtgaaaatccttcactaatactgaaaacctcaactgatcttctcttactacaatgcctcaaactaattatcttagttgactccaaattaataatctcattattattattgtcactagaatctgacatcttttttaagctatccctttttgccttcattctttccatctttctttctaagtctcttatataatttgcaacttcgtgtatttggttccgatgttgacctctttccctgaaaaccaatatacatataattggttcatcatcatcatcatcaataaagtaaaaattagtgtgtatatatatatgtcattatgtgtttgttgtgtttaaccttcgtagatattgtaagagggagtaagtgatcttagagaagcgtataaggc

SEQ ID NO: 331279 - DNA, 1344 bp, Cannabis indica
attatcaatattgttatatatattttaaaactcaaaaaaattaaaatagagatggcatatcaattatcttaaaaataccgttatacacatgcttcatccacaaacatcatcaaagtagtaaatatatagtttttagaaaaatatactacaactattatagtatattataaattatattaatatcatcagtaaatttatcaactccataaaatatcattaatcatagtcgacatagtcttaattttgtgctttgatatccactattaattttgcatagcacagacttataaagatttaagcaaacatagaaagagagtattagtctcaaagctcccactctaatatgtatattttaaacacaaatcaataatatataataacacttaattgtagatacaaaatcaatacttagtgattttttttttaaaacaaaaatatagaagttggaaaacaatttcccatataaagaaaataaactgataatatagagagaggcatagaagggagagtgattcaataaaaaaaattataaaatttagggtagattaatatcacctggtctcaattttgtgttttaatgtctactatttacatatcaccagaccagtaagaatttaagcaagagagtgttagtctcaagattatactctaatatgtatattataaacataaatcaatacataaagacacttaattgtagatacaaaatcaatactatgtaaagttattttcttaaaaaaaaatatacaagaaaaacgatttccccatataaaaaatagaaaatataaattaaaaaaaaataaactgataatgtagagagaggcatagaagggagagtgattcataaaaaaaaaataaataaataaataaataaataaataaataagatttagggtaggttaatatcacttggtctcaattttgtgttttgatgtctaccatttacataccaccagacctataagaatttaagtaagagagtgttagtctcaagattatactctaatatgtatattataaacataaatcaatatataaagacacttaattgtagatacaaaatcaatactacgtaaagttatttttttaaaataaaatacacaagaaaaacaatttccctatataaaaaatagaaaatataaattgacctgtacagtaaggagagaatggagagggattcataaaaagaataataagatttaaggtaaattaatatatatatttatatatatatatctattctatataaaatgtgcctatataaccgaattcttagtttatgagaaattcgtgggtgattttttatttatattaaaaataaaataatttattattaaaaataaa

SEQ ID NO: 331280 - DNA, 1205 bp, Cannabis indica
tagttgaaacactataaaaggaacataatgctctcatctcatccaactattcacttcaaccaaatcaaatctagctttcattctcttgcaactagaagatgagagacaccttatgaagtgattcaaaccctccttcattgttcttcaaccaactcgcccatagtgatagagttccatgcccacacatagcaagtcaagtactcaattatagtgaggaagacggtggtaaccaacccgaaggagagaaagagatctaggctcagatcatgataatactcagcgacagaaaggaacaagggttagaaatctgagcggaaggaatcatattattctgctgcaatcaatgtaaggttttctaaactctttgtgtttaatttcattattttagagatatttatatttcggatgttaattcaacatacttgttagtaaatctagatcctggtaaaatattcctaacaactggtattagagccatggtaatgatttactttcatgaaatatgaatttaaaacgatgaatacactaattgtgttaatttggatgtattcatgttggtttatgtgttgtttgatgattgaatgtgtatcatgaaatttttccatgaaaataattttattttcgttttgaaaataatttatttggattccttgtgaaaaattaagaaatttttgttttaacgaaacttaactccaataaaaaacgagaaatttatgaaggtttgaaaagtgggtgcacatggtgtcgaagcttggtgcccgcatggaccagaagctttggacaagaagcccatacgcgcgcaaatgctgggataaattgtgtctgaagacatggtatcaccccattcagacacgcgtgatgctgcatgcacgccaaggaggaccttgcagctgactgagaaacctcggttaaggaggctacaatactcctagtttgcgcgcacccaaggctgtgtgtagcctatctcgtgggtagcttgcatggttgaatccaaaatgcaatttttgtggattttttctaaaaattttgaatttttccaatttcaaaccctaaaattaaaataaaatattaattttaatatttaaactttaatatcaaaatttataaattaataatttaattttaaatagataattattaattttaatattttgaggtttaaatttaaaaatttgattatttttttttaaaattatggtcagatt

SEQ ID NO: 331281 - DNA, 644 bp, Cannabis indica
tatttttattcctctcaaccaaacgccaagagaattccctattgtacgcacagaattagtaactataaaatttaaaatcatatattaaacgtttttcttgctccatctccatagtttttctaagcaaacaaacaccaaaatatcaaagaagactaacgactaaaacgaaattattacctgaaagtatgctgcaaatgcatggagtaaaaataagtcactaagatattatgtccaatagtttatgggcgcacaaattctgtccaccattttttttaatttaagcgtttatatattacaatgcataatttggacactcgaatctagaacttccaaagcatcttctattacaaacaatctgattatctaattttgaccggctaatattacagatcacttcttaccctcagcattacaaattcatagttggagctctacaatacttgactatcaccatacttgaaatctcatacattgtgaacaaagtatgtcaattcatgtcaaatcctcttcacacacattggaatgatgttaagaggatcttgagatatctcagtagcactatttctcatgacctgtctctacaaagacctactgagcttgatgtcactgccttctgtgatgcagattgtgttgggttttatgcc

SEQ ID NO: 331282 - DNA, 963 bp, Cannabis indica
aaatgtaaaaaaaataagtaaaattcattaaaaaaaattaaatatattcaattttgcatcaagttattataaaaatattaaattttgcatcaaattttgtaattgttggatcataatactaaaaaattgatgcaaatatataacaaagttttttttttttttgccaaatatagtataatttttacatatttcattggagatgttcttgcaaatttatgtataattaaaaaaaaattaaaattctaattgaagttaataaggatatgtacaaattaataataaaaatgttaagggacacattaagatgtcaagcaccacaaaaagtagcatacttttattggtgtatttcaatattagctcccataaattttaattgaataaataatttaaaaaattgctaatcaactattaggtactatatcgatacggtattgaacactttaaggaaaaaatttaaaattttaatcgaagttaataaaaaatgtacatattaataacaaaattgttaagggacacattaagatgtcaaacaccgtaaaaagtagcataccattatttgtgtatttttatatcaactcccacaaattttaatttaataaatagtttagaaaattgttaattaattattgggtaccacatagatatactattgatcaccttatagaaaaaattttaaattctaatttaagttaataaagatatgtctatattaataataaaaatattaagggtcacgttaaggtgtcaaacatcataaaatgtagcatactgatattaatggttcatttcaatatcaactcccataaatttagatttaataaataatttagaaataaataccacattagtataatatttagcatcttaaataccacattagtataatattgagcaccttaaataccacataataataataatataaaaaattatttattaaaaaaaattatataaaaaattatt

SEQ ID NO: 331283 - DNA, 708 bp, Cannabis indica
aataaattttatttttataataggagattccccgccccgtccccaccccattaggggatttcccgccccgtccccgatggggaataaatggggatggggattaaaatccctaacggggatggggacggggagagaactccccgctaattccccgtcccatgcgcatccctactggggaggtcccaagtcatgttgttagagatgaaagaagccaccctttcggggacaagcccgataggaatcacttggttatgcccaagaatcaaattatcgagagtagtggaagtattttacccattgcctattttcaaaataagacccttgtgtagcaactcttttacccagaaaattctacgccaaacaaataagggggaatggcctaaagagaaggtcataaaggtggagttcgggtggtatctggctgctaagattttggccatagttgagtttggatgcttgaggatgcaccaggcttgtttagcaagcaaagcctgattgaaatggacgagggaacggaaaccaagtcccccgtgccttttggacttgcaaagcttataccaactttgccaatgagttttgggacggttgttctcattgaaaccccaccaaaaatttgcgatgatcgattcgagggagtgacatgtggcaaccggaaggcgaaatcaagccatggtataagtggggatcgcctaaataacggacttaagg

SEQ ID NO: 331284 - DNA, 869 bp, Cannabis indica
ataacccaacgtgaaggtggccaaaactcaaaaacagggtatgaagaacccaacatgagtgttggtggtgctcaacccatggatgatgatgatggtgcctatgatcccacgagatacgtgccgattgtagagttggaaaattatcatctcaagcgccgcatgtagaagacaaaccgacgaaacactgaattagaactagaggcagcgcagctagggcagcacagaaaaataacacacaaaaccaacctaatcctggagtgaggagaccaggaggtagacctcgtggttcacgaaccaggaggaggagacgtctcaagaaaatcctcagaatgctcaagaagaataacctagagaaattgagggtccccttgagaatgaacaaccaaatgacaaactggagccttctcataaaaatgggaacagaaggcaacccgggaccagggaataggaaatcccccgtgagaacgagagaaatcctgggactcaacctgggacaggtgggttcccaccgagacatctccaatgtccttctcaaaccaacagggaaggggcacgtacaaaccccagcaaggggcatgcaacaacccatacccaaggaaaaaggatgggatgtgacgaggtgagtgccagctcgagacacacaagaacctgtagtcgatcaatgcgaggggggacggaactcgttacaataatgatcgagagagtacatgcacaagtagaactaaaagttactttgggatgaggtccatgagtaggacaaggtccatgagtaggacaatgttagaaattattttaccaggatcttagatctaatcacaagtatgttgattaacaccctaaatatgaactttctaaaacgatgaaaataa

SEQ ID NO: 331285 - DNA, 599 bp, Cannabis indica
aaagttcaggggcataatttggttcatgtcatagtttgacaaaaatcttaactagtcttttttttaccatttcaaaaggggaaaaaaattaacacactctctctctctatatatacccactgaatcgacgatctaaaaaagaacaagcaacacgagccaaaccattggccaccttgttcgcacatcgtttaacaaagataatagagacattgtataaagaaaaaagtaaacgtttacaatcagaaaataatcagcctaaatagagaagatatttgaagagtatgacggattgtatgaacaactatttgacaatcagtctctataacaacttgagaaagattctgatattttatccaactaagaatctctttgactcctacagcttctaccatagtcgattgcacacaactagatgttgacggttgaaactcgccaactaataacttgtggcagaaaagtcaagattagaaatcaaaacttctaaagaatatgaagatgaaagcgagaaatgataatattcaaattctggaggacatgttacgagcctgtgtgttagattttgaaggtttatggagcaagtacctaccattgatagaatt

SEQ ID NO: 331286 - DNA, 541 bp, Cannabis indica
gactaaatgtatttttagtcacaatacttattgtaactaaaactaaattagtgacaacttgtatctaattactatgtttttgtcacagagaaactttttattgagactaaaagttacatttagttcaaaaaattatgttatagagatagttattttttgtagtgtgggatatgcatcaaatgttacacatttatacgtagaatatgatagtgcaaaattaatttcgaatatacatgcagtatgaacaaaagatcgaaataccttcagtcattgaccctttctgcttcaatccacataagttttggatctaaagaaaaggaaactgatttgtgtgggtaatcagaatttcaagctctctctactctttttattagatgggtttactgtattttacagaattgagtagtaagctcgaggagcgagaccctatattttatgtaggtgagacattccatcaaagtctctgccacaagtctaatgtcagaatatttgacattaattcatgaattaaatcgagaaatcaaatatttagaaaaatcat

SEQ ID NO: 331287 - DNA, 1431 bp, Cannabis indica
atgattctcaacatggtatcagacttatatcccttttgtactattatataattatcatcatttttagtgttaattacttatgtgttaattaatagaactaattctcaaaaggcctacttaccttggattggatgcatcatctgattgtgtccattatgtaaaagcttgttgataagccaagaggcgatgtagcctaataacacaaactttacacccctttttaacatgtatgcatgcatggctagtcatcttcattaatatatatacacatacattatgatacatattatttctctccttagatagttaacacgactaattattccaaaagcaaaatcgtaattgatggaggcatatataaattagtctcccgcttcttaaacttgtacctttttttttatatagtactataatgatatgtgatttaaataaaactcttaatttgtatgttaagtatttatctattatctattaccttgataaaagggcaatatctttgatcctggactaattaaattactaaaaactccttttattctcaattgttataattgttatattattgttatttgttgtttttaaagtgcacaacattatatatgctataattttgtaatgcaactataataattaagtgaataaaaatatatgtatttaataattttgtggctcctttttttaaaaaaaaaatcatgaccgtccataattacaataacataatttttaaattttatatgttttataattatagtagagatctaatagtttttttcaataatttatattttcaaaaataatattcaaatagttaaatgcagacttatttttttattattattattatttgtgaccaaaaaaccaaatcattagtaacagagtatcacatgaactgattttttataataataaaaaattaggaaagttcaacatatttaatatgatttataaattaaaaaatagtaattaaataaaattattaaaataatagtattaatatcataaaaataacttcatacatacttgaaaatacaattataataaaattgaattgtaaaaaaataaataattaattttcaattatgattataatgttatttcatttactatttttatcaaatattttggtctaatctttttcaatattttaataataaaatttatgaactatattgatgttttaattataattttgaacaatagacaatatagtgttttttttttttttagagttgaatttttgattagttttcaattaagtgataaatgtaaaattgtaggcaaaacatacaaaatatagtataattttataggataaataagaaatttgtccccaatactactacacttgtaaaatttggtcctctaaatttttgttctattgcctgaattttcgttctattgccaaaaaaaaaaaaaattgaattagaaaat

SEQ ID NO: 331288 - DNA, 707 bp, Cannabis indica
atttacagtttagatttctaaagtggttgcaataggggtttctatacgattttttgttgtaatttaaattacagcactagttgcaataggagtttctatgtagaattccgtaaaaatacaaaaaaaaaaaaaacctattttaaagtgcaaaaaaaaagcccctaaatattttcagtattataaattattttattaatatatatattacaagtatgtattaacttctatatatcaatcatattatgtatttaaatatcactaaattacaaactaataatgtacaataattgttaatttcttctctttctataattatgtgtaatttaatattaataatttatttatatttataatgacggagctaattaggggattagaggtgccgtggccccccaattttttattttattttttaacaaaattacatttaaaatataattaaaaaataaataaataaataatttatttaaagtaattgaggtagctagccatcacagtattatttatgggtaggtattagttttgcaaatgcaatcaatgacaccatgtgcatacaatatataaatataaaatatagcatatatatattatttttcttaatgatatatataagagaaatgttaaaggagtagtggtgcctagcacttttttatgtgtcaatattactattggtctaattaaatattgagtctcatatagtttaatat

SEQ ID NO: 331289 - DNA, 1457 bp, Cannabis indica
ttatttggtgcagtggtaaaaggtcttactgtaaactaagagatcatgggattaattctcaacctctactttttaatttttttttaaaaaaaatatttaatgtgtagttatgagatattgaaccttggagcttttaagagtttttaaaaactttaccattacactaagcattgtaactatcattttcgtaatagttaaactatatatataagagccccaaaatttgacttcgtcttaggtcccatataccttaggaccgaccctgtattttgatttggtgaaagataaatggtttcaaatatctaatattgcaacaagttgttagagatgttttagctattccagtttctacagttgcttctgagtcaacttttagtacgggtggaagacatgtgactcctcatcgtaacatgcttcatccttatacattataagctttaatatctgcacaagattggataattcgatatgatttttttttaatcattctctttttatattatataatagggaatttttaataatagtttttttttattattttatttataattttacggtctaaagtttttaattacgaaaatattcttgtaaagttttaaaattacaaaagtacactttgtttggcaaaaagtaaaaataacaactaaaaaataataagaaatcaacctcacgataactataaataaactataaaacaaccagcaaaataatcttatgacaactataaataaactataaaacaactaaaaaaaaaatattttttactaaaggggtattttgtaaataaatctaaaagtaaaagtgaaaatttttccgtaatgtatttttgtaaattttttcaaattattggtcaattatataaatttttctataatctttccttattttcattatgtttttagcattttctttattaagtattgtctatttagtaataacattagtttaaatacttcttaatgcattttattctattattctttatgtaatgtcataatattttttttaagaatattgttattttcaacaaactatataaaaatatataatataataatgtatattaaaataggatgcgagtatatataacaaaaatatttgctccatcacttagaccatacaaatatgtgctatatatttaaataaaaaaaattaatatgtgatattaacataatatttatcattatactagtccaatgtaatgttcatttaatatttattaaaaatatataaaagaaataataatgtttttcttcttatatatttaatttaggggaatcacttatatactatttttagaatttttttttatctttattgtttgagttgtttcagtaatttctatataggttattatataaatttgagttgcgatttaaattgccctgttagttactacgtggattgttatgtgaatttccgtaaaaataaaaaaaaattgtaaatataaaaat

SEQ ID NO: 331290 - DNA, 959 bp, Cannabis indica
ctgaagttgataaaaattcaaacttagacttcgcttgaagagatcaaagggaaagcatcaagaggggtaggatagacttcaagcagtccttccaagtccgggaaggagggttgaagatgttttgtacccctagtgaactttcctgcacaaaaatacgtgcatgcaagagtcatgttgaatttttatgtaacaagcttcaacttccgggaaggaaggctgaagttatataaaaattcaagcttagacttcgcttgaaatataaaagggaaagtatcatgaggagtaggatagacttcaagcagtccttccaagtctgggaaggagggttaaagaccactccactctatcaaaggccttggccatgtcaagcttaaccgccatccaacccctcctcccacaagacttaagctttatggagtgagcgacttcctaagcgataatgatgttgtccgagataagccgaccccgaaggaaagcactttggtttggagagatcagattgttaagaacaagtttgagcctattagcaatggttttcgagatgattttataaatgatattgcaaaggctaataggtctgaattcagagattgaggtggggtttttaactttggggatgagagtgatgagagtggtgttaagaggggcagtattcccatcaccgttaagaaagctaagggcagcagctagaacattattctttaggagggaccagtttgctctatagaaatgagagttgaaaccatcgagaccggcagccttgtccagggggagctgaaagaacgctctctcaatttcctcggtggaaaaagactaaatatattcgaccaaatttaacccaaaatataattttttttcctcaagctaaaatacagaacaccttaatgctctaagcatacagttttatattagggttttttacaaaaatactgaattttagataaaagtttataatttta

SEQ ID NO: 331291 - DNA, 512 bp, Cannabis indica
tcatgccttaatatattgcaacatcgtgccatgtaaatacatagagtagagttactgaagaagttaggaaagactacttgatttgtttctgctctatgaaattgatttcgtacttgtccatatgaaagttgggtggtgcgaggttgatggagcatttttcatagctaatttgataaaggtgaggtagtcattctatatttgtttgttctcgttgttagtattcccatgcatattttggttggtggcttaggttggtttgtgaccggatcccacgcgcgagtcttcaagccatctttcttttttcttcggatagagagaggagttttcaaggcatcttgtacttggaagattgctggtgaaatttctcttaccactgctttgaagaaaaatgtattttagaagtttttgcgtcatcatgttttgtaggcagctttgtgttatattatttatacaatactgttttgctttttgatgtgtgaaatgttaagaagaaaaacgacagaatattccta

SEQ ID NO: 331292 - DNA, 591 bp, Cannabis indica
attttatgtaagatttttatgtaaaactatatagtggcatttaacttttatggacacttaaatatataatattttagtataacttaaagtttgacatagtattatataaaaatataatgtataatctaattcaatataatacaatacaatacaatacgacctaatacggcattccaaacgagcccatagatcacatttttctgattttctgtctcattacaacaaaagtgttttttgtgtcactttgaaggtgacacaaaaaactcatttacatcagtgataaatctaaagcaagctcacccaagttaaatctctccaaagcatttgtgattgtcgattaaacactaatgactaaaatattaatcgtgtataagacttggtgctctacataaaaatattttcccttttaatcccaaattttgtatttgattattgaattgtgttttcatctttcaaatgtgtttattgatgttaatattaatctatctcctgtgaaaaaaaattgcataatcattatatcttgagtaaatactattttagaccttgtgttttgcaaaagttatcaattgaatgttggaaatttattttacc

SEQ ID NO: 331293 - DNA, 1417 bp, Cannabis indica
tttatattttaattgtacttaaatttttttaattttttttccaattcatattacttaaaaaatatacctatcaaacaaaaataaattatattttaaatattatgaaggaaaaaattaaaataaaaaattatatgaaattttcttaagaaaaaattaaaaaaatatatacatgagtcaagaaaaaattatgaaaataaaattaaaataagtgttgaaattaacataaaataatgtgaagaaaaaaattttaaaaaaatattaatagtaatttttaaaaatgatttaagtttatattttttaaaaaatgaggtgtacttattattttgtggggtgtaaatagaactgccctaatagtaattggtttattttatttgtagtagtggctgaattaaattaatataggttaggtttatttatttagttaaaaaggaaataaaacaaaaaaaggttgtgaggtaaagtcaaaatttaggttaccatcaactttattcttttcttcttggccaaactctaggggagttggaacccaggtttttctttttcaaattcttcatgattgagctgaaatgacaaggagtggaggttggttaagcattgaggtaagtttcttcacttattcttgatgatttctaggattttagattgagatttttgaggattttacttgatttcgggtctgtaggttttgttgagtttagagtatgttctttggtttaattaaattgtttaaagctttagtttcaagttttagggggctgttatgatttggttgggtgagttgagttgggaactcaagaactcactcaacaatggtacttttgtgattttaagttaattgttggttttgagtgttgagatatgttgtattcatgttatagaactgttctgtgaagtttgggaacaattggttaggtttggagcaagttttgggactttgaagatctgaaattttcgagtttctggtgtggtgaaccggaattccggatggtacagggctgcaccaaccggaattccggatggtcaattttcaggaatctccgattttcgtattttagccataacttttcactcgggtgtccgttttagacattctatataccgttttgaagcttatgaagagctctacagtatgagacataaattagagccaaaagatatattttattttagggtgtttttaccataagatttggtagaaaaccctagagttattttatgcgagttttagacagtgttttggaatagacccttattgatttacctttgtcatgacataggactcgaaattgtcgagcatcattctactcagttcggcccacatacttgactttggacttgaggtaagaaaagtattaagcaccgtatatggttaacgttatgattgttacagtcttgattatgatcaagatctcgatat

SEQ ID NO: 331294 - DNA, 2057 bp, Cannabis indica
cccacagcgatcaactcgaagaggagaaagtactcaacaagctaattatcgagaaagcataggaacaagtaaatccacgagtcactcaaagacaaagtcatgagcaagatgaggtccatgagtagaacgcaatctgtgagtaaaacaaggtctgtcagcaattactcccaacaggatctacgagagcatttgaattgcaagaaacctgaccattgccaacaactcgatccaaagcaagaggattccatccaattgcgaatatacgagttggaggacaacttcaagagaaatcaagtgggagaacaagggagacaacctagatacgactcaaatgagatgcttgagccgtatcacccacacatcatgaataccccttttccttcaggatttaaaaacctgcatgtctcgtcatatgacagaaccactgattcggtctcgtatttgaacaactttaatacaataatgcgagcgagtaatgtaacgaacaatttatgttgtatcttgttccccaccttgcttgttggagcagcaagcagccggttcaacaagtttgctcaccattcaataatttcctgggaacagctgtccacagatttcaagaaacagttttaggccactagggatagatgacccgaagcagcgttgctaactaatataaagcaacagctcggcgagacatttaaggcatacttaagtcaatttagcacggctctggctatggttaagaatttggatgatagtacgcaacttacagcccttcaggcagggatctctactgatccatcaaccgctgagggtgagctgtgggacaactaacatggtcgtctagtaaaaacatcaatgagttcaacgaaagggctcaggtattcgttcaaaaagaagaagcccgaaaggaaatgagtttgttgaaaataggctcgggaagcaaacccagcaacgtttcaacaagtactatctcaatgagaattgataacttaggggcttctagctcgaagagaacgtcgaaggataaaaagaaacagaagaagcacgataagtacgtgccagtgtattatttataccaagcttaatgaaactcgtgagaatatttacctcgcgcatgagcaaaaggttgccttcgaaaagtctgagcccatgaggaatgcgaggagcaaaagagaccctaataggtattttaaattccataaggatattggacacacgaccgatgaatgtcaccaattgaaacatgacatagaaagtctcatcgctcgaggccacattaaatagtacgtgaagagacagggccatggacacaactagcccagtctgcttaataacccaaacaaccaggggttacaacctcttcctgtcgaaggggaggacatcctggttatttcaagagggccacatatcgcaggggagagtaataacatccaaaagagatatgtgaaagagataaagaatgagtagtcggcattcgccccagaaccttccaagaagcttaaattagaggaacttccaattatattcaccgaggaagacgagaaaaacatgagatatcctcacgttgatccattggtggttaccattcaacttgccaataaaaggattaagagggtgtttatagacaatgggagctcagtaaatatcctttataaggaaatgttgaggaagatggggctcgaaaaagccaagttgagaccttgtatggtaaatctttgtgacttcacttgagacagcatcgccagtcctggcataatcgagctagcactaaccttgcgcgaagcacccctatctgccactattatgcaagatttcctagttgtcgacctgccatcggcttacaacatattgttgggtcatctagcattgatcggactaggggcagtcagttcgatcaagcacctatccttcaaattccaaacactagaaggtgtgggaatggtgcagggtgactagatgttggctcgcgattgctatcgcatagagttgcagcataggaaagccggtcaccaattattggcaatcttggcaaaagaaaataaaaggaaagacgaagatcttgaccctcaagt

SEQ ID NO: 331295 - DNA, 1354 bp, Cannabis indica
tggcactctattattggttagcgatattctctaaagttattttcttaagttatatgagatccgatacttaattacactaataacggtatgataccaaggagggtgttaggcaccattagtgcctttttaacattttttttaattcaaaataactatcatagaatatcattgaccatttacaaaatgtgtagtgctaagcatcgcataataatgcctagaaaaaaggtcaaaatcaatataaattgtgatttttttaagtaaaattaatattagttgtgttagggagtcccacattgttaatgtgtggaaagataatagaatacataaggtgaatgtaatactcctcctattatgatggaaccctattcaccttatcccaaattctaacatggtatctgagcaaaatagaaaagaaaaactctagcgattatctgacccaacaaaaaaaaatgatcgaagtagagccaaaaaaagaagccaccaaaaattaaaaaataactgatccaagaatcaaagtcaaaaaagccacttgtaattcggggatagcgagtcaaaaaaagagccaccaatccaaaaataccgatccaaaagtagagtaaaagagccacttccgatcagggatagtgagtaaagaaaagcccgcttacgatcgagttgtccaagatggtgggtaaataaaatagctacaatcttaaggagggacgttagagagtcccacattgttaatgtgtggaaagattatagaatatatataagatgaatgtgctactcatcttattactaattggtttttgagatataacttcatttaccttattcgaaattctaactatgaacacaatgtacatattaaaaacaatttaaataaaaaaaagattccacaaatttgtgaaagtttaaatatggttgaaataaaatagatagaaaagaaataattttcatttcattaatttgtttggttgcatattaaagtaaaaggatattggcggctaaaccacttgaactttacggtttgtaaccgttaaccacaaaaaccaaaattttggcggcataactacctaaaccccgattccgttttgctctgtaccctccgtccaaaaactacagtttagtgtcacagtggactgtccatgtgtacacacttgtacacgtgtcaaatttttagtgacccacataatattaattttaaaaaataattataaatatttaaaaattaaaaaatcagaaaaaaatattttaaaaaaattattataaatattttaaaatttaaaaataattaaaatatatattttttttcctttcctcttttttttttttctttttttttcttttgtctttccttttttcttcttta

SEQ ID NO: 331296 - DNA, 1878 bp, Cannabis indica
cactttgagcattcctttgaaatggtttttggaactatttgagagggtttttagaaaagcttttatttttaatatagagtgaagagtagaatggatgggttgtgaagagaggagaggcctatttaaaggctataaggattaattaatttttttttattcttattatttcacttcttttgtttatgtccaaagatgcttaaaaatattggtggtcttctacatgtctacactcggcagtaccaatatatgcgggtgtgaagtccaagcgcgcggggattattttttctacaagtccatcataacattataaagttatgataaacttggggggcaaatgttatctctcaaaaaatccaaaataatggtgcatgaatttttactctagatatggaggtccaacaaggtggagcttattggccatggaggagctcatggaccaaggaggagctcaagggccatggaggagctcatgggccatggaggagctcatggaccaaggaggagctcatagggccaaggaggagatcattggtcaaggaggagcatttttgggcgcactaagctcccaactccgtccggtgccaaggtgcaaccgtcaggtgctaaggtgcaaggggctcctcagctgtcaaattatctcaaggacctgatgggcacgaaccgacccgaatcagctcccctcaggtacccatgaccgtccgggtccgctaaatacgagagacgagtgctgtgctgccgaaaatatagtcaaaaaatgattagtgaaaagatatttattttgtaaataattattttattattattttgtatcttgaacctaacccaactatagttacgggagggcatacctatgtttaagggattttaaatcctagatgaatatctatataaggggggtgaaatcacttgtaaagggaccctgaaattgatactcgcgatatcatactcttgagctccctctctcaaattctaaaaactcacttgaggagtgaactcttggagaacataactctggagaactcacctcaagcattgagatcaataacactccaagtggactagcctattaccgctgaattttgttttggccataacttttgactccggactccgttttgggagttctttgttttggctaatgtgtggaaatataatataatatataagagaaatgagccttcggttgccaattaattttgagatagaattttattcatcttatccctaattctaacacattaaaagtgaataatattaaatgtatagtttttttttattattatttattatttttagtaattgagaagtgaatgttgttatataatactgatactatcaaatataatatgaaattaccaacattggaaatttgctcaaattttccataataaaagaagaaaaagaaaggaagacataaagtgtgtgaatcgaccccttgagttgtgattagggttagcttttgattgtatactaaagttaatatataataaattgcatttcaatattgtgactggcaagcaataacacaaacttactaagtcatcctacagcttcaataattagcattgttctgggaccttcacagatcacaatatatttgataaatgacatataaactgtaagtcgaatgtttatgtcaattcagaacttttcattttctacatattcttttttcttttgacaatacataatattttagtagcattatcaaaaggccgtttacatgtaaaatgttcggtagttttttcttatggattattttacaaatacacaaaacaataaaagaattacaaaaatacaattttacggaattttaaatatttttacgtatttttttgtattttatttatagaatatataatctttttatgttgtact

SEQ ID NO: 331297 - DNA, 445 bp, Cannabis indica
gcaaaccccatagggggaacgaggtgaatcaaacattaagaggaagagcaaaacgagaagaggtgagggataccgcgaggcgtacaatatctcataatcgatcaatgcgaggaagagaagacacccgcctcatacaacatataggaagggcaaggtccgatggatgtcacaaccaatgtgacctacgagaacacttcaacttgagaaaacctgatcttcgccaatgacttggtccaaaataaaggaatttacttcatttctgaatggacgagttggagaataagttcaaaaggcatcaagttagggaacctggtgttggattttgtgccctaaataaaacccatttcaatataatcagatttactaataaagaccagaaataacattttatgtcgcatggttcacatgatttatttcatgattatatataatgtttaaattctat

SEQ ID NO: 331298 - DNA, 1066 bp, Cannabis indica
cttcacaatcttccacactatgattgagtattgacttgaattgtgtgggcaagtactcttcactacagggttcaaaaattttgaagaagaaacagagaggaattcgaaatctaagagaggctctttattttctcagttggctgacaaagtagtgtgatgagcttatgttgtcaggttttttttgaaagtaagagcctatcatttttttgatgaatcaattagttgtattgctcataaaactcttctgtacaaacaaaatagcataatctatactattcactatatcttatattttggaaaaccaatcttgatccctcctcttgatctctttcggccaaagcaccaatacacgggtcttgactatctcctttgtttgctgcataatctattttatgttcaccatcttcatgatccatatgtggtcatttcttgctttcaaaatattatatatcaacgatgctatggcagctgagagtacctttttcctaaactttgatagctttgctcttcctatccaccgcaccagctgcttcattgagttagcttgtgcaccccattatagccattgttttacttccagcaagcattttgttgacactgagcattcaaacaataggtgctcaacattttcttgttgcagattacacaatacacatctatcttcctacacaattttatgagctttcaaccttgcttttgttctcaaccggttgtgcattgctagccaaaaaatgtagcaattcttgggaacattgagtcttccccaaacctctctatcacaggtgactttctgctatgcacgacaaagtaacttagacccttcaacaatggtatatcaagttccaataaaccgctgaatatccatcttgcttttgatttggtccttagcagccaccacctgttttcaataccagctaccattttttcggaatttatattcccactaatgaccctatttgatatacacactatgtaccaatagaacccacaagttatcttctttgtttgctaatacccacacgtactgtaaagactgcttagtttaatttggaaactagcagttaat

SEQ ID NO: 331299 - DNA, 803 bp, Cannabis indica
gtttctttattaatcgtatcgtttgtatcatttcattccttttaaaacagatccgttttaaactctcatctgggctttagcgtttagtaagcgatatacaagtctgggaaggacacttgtttcttagaaaccaaatcatagagaaacagcaaaaaaaaaaaaaaaagaatcacagaagtactagttttttaaagctgttcaatagtacatagatagcatgcagaagactgtctccatgagtttggtttcattttatgtcgtgttggttttctgcaggaggaaaaaagtgaggatcatcaaggagacaagcacttttaaatagcatggaagttgctcttgagcctggcttcttctctatctttataggttctgagtagcatttgtaagtcacctttctcttgtcctcagaaaatgagaaatctgattgacttcaaggatcttttcaaggtcagctccatttatcatcacttctttgtgaaactattttctcttcatcttttcgattaatctttctcttgagagttccttagctactctatctttaaaatacatcaccaatgtatttatttattgttttaaaattttatctcaaacttttacattacatcatatatataaaaaataccataaatcctatttttttaaattttaatatgtcatattcattttaaatatataatactaatctattctatataacaaaattcattttttttgtatgattatataacggtatttttagttttctatattaattttaacaaatttactattatttattagaatattctttattaatttta

SEQ ID NO: 331300 - DNA, 761 bp, Cannabis indica
attcctcgagatccaccggtaaccagagcggtttttccatcaagattccacctcatttcatgattggtataattctttggttcagccatattgttattgtttatcttccgactttacttgcctattatgcataatgcttgtcttatttatagctatagtttgaagcacagtaataataatggctactgtagtagtgatttgtcctctgaggtggttgagacgtccactctataacttaatttctctctagagtctttatgacactgtacaaaagaagattcttgtttatatgatcaattatggtgaccactataatacaaaacaaaatggcattttttctcatatagctttattttaataaaaatttacctttttgctctcatataaaaaattaaacaaaaaaggaacacttaatttaaaaaattaattaggtctcttcaataaccttcccaaattagctttttcaattatttgagatctgaaatgataactcactaaacaattcaagatctattcaatattaatagggaaaagttttattattattcaaaatgtaataaatgagaatagaaatagtgtttatataggggaatagttatccaaccctagaatacacaccaaacttaactaagaataaccttatccttatacccaaacataaaatatttatttaatatctaatatgcctcctcaagatggagtgtacaagtttgtaacattcatcttagaaaataactccttgaagtgagatggaaaaagag

SEQ ID NO: 331301 - DNA, 868 bp, Cannabis indica
gtctatctctatctcagtctctctctctctctctctctctctctctatatatatatatatctcgatctctctcctatctctaatctatatatataccataatattttttaggttgttgtgtttgcaggcagagctacgacaatgattgcttgagttgtgggttcgatttccaattcgagttttaccgaaaggagcagtttcagaggtgccttaagttcatcgttagtgctgagctttcaaagtcattctctctcagtctaggtttagattattctcaggtcttaacttcttgttgttacttactatttattttgaaggtttactctataattaattactaacagagtgaaattcgagatccgctaagatcctatttgaaagtaattaagggacaaattttggcccaatgaatgcatagatattcaaattttccttttctaactgtcaatattttttgctttatgaataagacggagaagaataaaaagaaaagaaaaaactaatatttctataattttaaaatagtatttttagatttttatttaaaattatttttagctaaaattttgattagaaccaataaaaaattaacatgtggcattttattagtatctaacagatctgttaataaaatgactaacagacaaacaaaaaagcatgatcttggaaactattattactggtaattttgaatattggagactaatctatatcaaactcaagtttttaaaaacttatgctgtaattttgctttattaataagtactttaattatttattaatttatttaacaagcttattatataattaggagtcttgcttgcgagtacatattatataaatgtatttatatatatatataaagtat

SEQ ID NO: 331302 - DNA, 469 bp, Cannabis indica
ttatctattataaattgtatataaaaaatatatacctatcccgccagttgtaaactgtggttcaaagttgtttttctgtcgactataatctgcatttaaagtattatttcccgtcagttacagttcgagagaaaccttttttgacagtgataaaccgttatttaaagtgtttttccgatcaatattttaaactgtcatttaaagtgactttacctgacaattataaaccgtcatttaaagttctgtatttttatgacgtccacctagctgacgattttataaatcaacggaaataggataaaagattgtttaaactgattgaaaagtctaagtagtagttcttccacaaaaatggctggtctcggagacaaaactaacatggtgataagcaaagactcatgtgacgaaatattgtgaatttctttgatgagcaaccccaactcatactaagggcacctcattcaatgca

SEQ ID NO: 331303 - DNA, 823 bp, Cannabis indica
aagaggtaaaaataatagattttaataaagaaggtaaaaataaaagaggacaatataaaaagggtatagagtgtaatttcctctatattcattctataattcactccatggcatgtgtcttgttcgaattcatatggagaataaatttatactctaaaattgaagttatatatgtaaaattattcagaattctacaatatactccccacaagtaatgtactaatatattattatttgtttcgaaatctgaaagactttttcagtctatttttttttttataatcgtatacgttattatttaagacattttgtaaaattttaaattttaacatgctaaaaataatgttcaaattatctgttatatacgtgactcttttattttatatacttgtgaaatatactgtttgaatattactttttatattgtaaattattgtaaatttctgatcaaaattatacaagatatcttaaacaactaaaacatatattattatgaaaaaaaaaatgggtttttttacggttaaaccctcccaactattgttctacttgcacttaaccctccaagtttaaattttagcagtaaaatcctccaaactactaaattgttatcaaatttaaaatgttatctatttttcatagttaattgtcaacatagattggttatgtgtttactcttatacacgtaacacttttatattagtacacttaatatgattatttaaaaattataaaaaatttatttttttaatttttaatatttttttataattttattaatttttaaatgattatgaaataataatattatgtgtactaatataaa

SEQ ID NO: 331304 - DNA, 692 bp, Cannabis indica
tttcattgttttagaattcatattaggttgttaatccaacatacttgttagtaaatctagatcctggtaaaataatttccaacagtctacagctcccaccaaaagtcactaacttggtttggcgcgcgtgctctggctgccttcctactctagtgcagctcagaaccaagagagtgaatgtcagcaccctttgcccgatttgtcttgaacgtgatgagtctaccattcattgcttggtaacttgtcgtgtggttcgaaagtgttgggatcgggttggcataggtaccatcatcacttcgggggcatcctttttagactggtgcagtcaacttttcctcactttgcacacggatcagaagtgtaccatggctgccatatgttgggctatttggggagctaggaatgaccttgtatggaagaaaagaagctttaacccggataatgtagttatcttcactaaaaaatatcttgatcaatggagaaatgctaggaaatccgacatggattcatcatcaaatggtcttcggtttggtgatgtaaaagagcattggactgttgggttttataccctaaataaaactctttacaatctgattagtaatcgatataagaaatttgaagtgatttatgtttgcatgaatttaacatgctaatggtttaatatgtttattacatttatacacaaaaatcag

SEQ ID NO: 331305 - DNA, 858 bp, Cannabis indica
cgatgaattttccgacgccggcaacaactcctacgacttttccggcaccgaccgctactccagcgactttccggcaccggcagtaaactccggtgacttttccggcatcaatgacaaatagaacttcctaaacaaataaaaacattaaatatgagatttgaaaacctaattacatatatatggcatatcaaataccataaaaagatctaaaaataaaaaaataccatataaattggttaaacttaaatttaccatatttatcataacaacttttaaaatcccatagtaagtataatttcctcaaaaaattaatgtaaatgtgttagaatttaataggccgaccttattgggttggtccactaaaataactttaaccttgccaacccaactcatgcccaaccttagtgtccaactaaattgagaaggatttattagttgtggttgtagataagaatatttaaagaggtatttattaatgtcatcagccaccccctacctatctaccttgcatctctcattggtcatcacagtttaaatttgtttttatagatcaacattgtaactcgtaaagttacagtgtgttggaatgcatagaataagatctagagaatgaaaatggtaagggaccttaatattagatcccacctaatttgatttggtaaaatacactaattaattatcatggtattaatcactttaaaatatttaataacaatcgtgggaaacttaattaattaataataaagtatttattagcagaacttataaacgtttgggagtagaaaaaaacttatataaaatggcatttagtttagttagaggtaataaaatataatagaatagaaatgaataaatttt

SEQ ID NO: 331306 - DNA, 1864 bp, Cannabis indica
aaaaaataaattaaaattttagaagaaatagttaaaagatattttttgagaggttgcggtatacatccacctctaaatcaaaaaggtctctagaaattattatcattcttagaaagtagttgactcgcgaatgcaggtcttggaaggcttgtttgtccttctcggaatggtctccaggaaacctagtccatctcctggaaggtagtcccgaatattcaactccagcctcttttctatccgagaaggtctttcagtgattgccttggatcgtgactctgggagctctcatactctcccccgaatgcacacttccttaagccgatgtggagacctcgctcaaagaagagttgattaaattagttattgtctaactaagcattaaatccacgaaacatgtaatttatttaacttagataaagttttaagattaatggagacagattaatctagacaataaattaataaagcatgtaacacatttaacgtaagttatattcttcatcacaattaaaaatacctttgttaatattagaaattgcaatttatcacaaacactttgaatcttatactataggtgaagagtaatcctaaaatgacaatatattaaagtaaaatttaatttagtgatcatctaaacaagattaaattaataatcatgacatttaatataaaagaatagaagtaattcgatataatataaactagaaattaatatttatcatataaattaaaaattcatgtcttgaattttgaatatataaaaaatattctaatataaaatacttcaagtccgtataactaatattttaatattcttcaagactaagatcatccagtgatcaatttgactattaacttattattttacttaatatttattttcatcatgttgttcttttttaattttataattgagtgttatgttgtttttattttatttcaacaactaataattagagttgtgtgaaataattaatgaatgttagaacttagaagagataattttgacacggttgtggcattaatgagccttaatccacgagtcattgtattaatgagagtgtttattacagaaatttttttgagcgatccccttttctactattaggatatttataggctcatgacagtggtaaaaaagtcactattgtcgtgttattataaaccatgctttgcacgatttttcaaatatgatcttaggacatgattgcttacttttatgacgtgtttgggatgttcatagatgtttggtgagactagacttatctcttatttatgacttaacatctcatttttgtagtcgtcatttgatgtatgggtcttgtgaaatcagagaatgatgagtttaaacccttaaatacgtttgttcagcgtaagatattggatgttttttcccatgtcgcattaaatgtgtactcagtgttttcttccttaaacagtgtgttatactccattagtcctcccgtatccttctttgggttaacttcacttgcgaagaggaaaagacaaaagatatctattgtccagctagaccctccgagagaggactaatttgtcattactcctttaaaataatagactccaggagtaattaaggtgacgtgtcccgtaacgtgggtctcattaccacctgactcgctcttaaattgctatgtattttgggagaaatcctaagtaacatttattattgatattttgtatttttaaatgtattgttgttttaaatcaattattatttttgtgataagttttaatttgagaacaaaatataagattatttttataaaataaaataggaattttttttttattttacacttcaaaatatttttttttgtatttttatagaattctacatagaatt

SEQ ID NO: 331307 - DNA, 582 bp, Cannabis indica
cgcgttaacagactacttcatgaaatgggtagaggttgactcttttcagcgtgtttgagaccgagaaatgaagagttttgtctggaaacacatcatttataggttcggagtaccaaaagaaattgtgacacataacgaatcccaattcatcagcaatgacttcaaggattttcgcaagaggtggggtattcaactaagtttctccaccccaagataccctcaagctaatggtcaagctgaatccacaaacaaaaccatcattagaacgctcaagaaaatattagaaaaagtcaaagggagatgggcagatgaacttccaggagtcctttggtcttaccgaacaactgcaagaacatcggctggagaaaaacctttctccctaacctatggagcagaagtagtcattctagtcgaacaagacctcccaacggctcgactcctacatgcaacaaaggaccacaatgacagccaactgtgccataaccttgacttgatcgatgaacacagagatcaagcactgataagagtagcagcctaccaacagaagattgcaaaacacttcaacaagagcataaggactat

SEQ ID NO: 331308 - DNA, 1946 bp, Cannabis indica
tctctctctctctctctccaaaccaccaaagaaaaaccctcactggcgtaactccagagaccactctccggccaccgtctgatcccatgcgccgaaccattcaaatccctatgcaccgacaacctaaacccctaagcaatgttgcccctttcgtcacctttagcccgggatctcaagtcaaagtttgaagattcaaactttgaacggattttttggccccctccagtgtccgttcaataagtcgtcttcaccactagacttagcttatcgagaagaacaatatacactaagccattttgcctagcccgctactttttttggtgacatttttgtagccctgtcccttttcggtgacttttcgatgatattatataccgtttcgacaaatgattgacatgggtggtcattttaatgtatactacccctattgttagtgacattttcggtacacgaatttctactgccaccaatagttaatgtgcaccgtttagatgattttttttaactctaaactttaaatagagtcatattatatgtcgtggactcagttttgaatgtagaatacaatgataataattatttagctatttgatggtataagtgagagcaatatatttaagattagactaaacaattagagctcgggacttgagagcttagaatcatctttttggacaaagtttaacaacttgagagatgtagagactcaacatgattattggacttgattttatacgtgttgaataacattagacatatttcaatttttatgatttgcaaattgtttgaaaaaatgaaaatttaatctgtatatttttctggactattctggaggcactgagtgccaaatatatttttgtataaatatttatgcaagttatgatttttgagttattcaaaatacagtcgttatgctggtaaattttttaaaaaataaaagggaatatgttcttttgttattcttattaattgcctgcttttggttatactgatgagagccatgttgattatgatttgtgcatattattgtttcacaacctagtctctgtgtcattctaggtagatcaagtgtgcagtcacctataggtgaaagacctagaatctgtacatagagtgaattgaatctaagccctagtattatggtagttatcaggtgcgattactcagtttttggatgtcattttctatgattggtattgagagctagagacttagtggactgtgtggtatgcatttgaagcttggttttgtgattatttgtggtcactctattttatttaatacattttgataatggtgaagggaaatttctaaaaggtgaccatgcaagaatttttattaaactaatggtcctttgatattagttattttcctactgggttttataagctcaccccctattttctcccatttaaggaactcaatttgatgctagtacatgaggatggtactgttgaggaagaaagtcgttattagtttagtcttatattctatttgtcaaactttccaatgaaattcattttgtatttaagcttgaatggatggtatgatgagctatgtactagttaaaaatgaagaatgatggatgctatatattattttggtattttattgacttattaaatctatctattcagtgacttcataactgtagagatattattgttcttttatattgatgagtggtcctgatttcgttactaatatttttttttattcgatataggagttaatccacttatttttaaagaagtattttatgatataaattaaaaaatcatttataatcatagtcaaagtttgacctttgaccacccaagttatagatatttgttgcgataatttgcacacgcaagtgtacgtatcgtttaaagtagtaaactcactaggagtgaggtcgatcccacagggagtgtagttaagtacgttaaaattaaactttactt

SEQ ID NO: 331309 - DNA, 549 bp, Cannabis indica
ttgtgcaatgacccaagctgcccaatacttaagtcggccttagctgccacattacgtacccctaacaatatcaataacaccaccaggtcaccttagtgcaatatttttgttttttgaaataaaatatcaaacttattaaaatatcttagcattctgaatacataaaattttacaacttaatcgaaataggaaaataaaaaatgctacaaactaaatttttgatcgtctaatgaaatataaataaatattaagcaaagaaaataaaagaataattcaacaatcttggacaatcaaaccaaagaaagataacttgcacagaaaccatatactattttaatcacgacatactcccaatgttatttagttattaaattaagggctattttcaaaaatatgggaaaaattattaaggttatgataaatatggcataaaaagtaaataccactaaatatggcattatctaaccaatcaaactaaaaatatggtttttttctaaaaaaaaccatacaaaacattaaaaagaaatctgaatttaaaattcataaaaa

SEQ ID NO: 331310 - DNA, 1094 bp, Cannabis indica
ctatagccacaacaatcactcactaacagctcaaacaaactcaaaactactacaaaaaacaatttctaaacataccaagctcgaacagaaaatacaacctaaaattacatatttaaacctagcttctcatcaaaaaaaattcaaagagaagaagtgtctagggcttacgttgggtttctttttactatacacttgaaatccttgttgaaatcctcttattttgctctgaaaaggatgaaaaatttagattttcctttgggttttccttggtccgaagctagagagaaagagaagaagtggtggcttttttgtttaatgtttatcctcaaaaccctttgttttattcagctgaataaatctaagaaaacacttaaagattttactgaaaaatatactaactcaatgttaacttaagtggttgttcaaaaaaaaaatgataacttatgtggtaatttaccaaaatactcttttcttagtacttaagcaatttaaatatctatgggtaaaatgatcaaaaattataattcgaataataccgtcattctaaatgtttaactaacttgccccacttattctaagatacaattaaacgcatccaagttactctatattgcaaattgtcgtattctacggctaccgagcataatacatgaaaatcgtaaaattttgtatagtatatatattacatctagaattcaaatatatctctataaatgagaaatcatttacctaaggcctcactactacaaatatgggctttaaaggctgttttttcacccctatttataaacagggaagttaaagggtgtgaaaatacccgctttgttcggaattgacatttagaggcggttttttgataaaaaccgtaggtataaaattgcattatactatttagaggcggttgaaaaataaagcaggctaggttttataggtaacccctatggcgtcagttcctacataagaaccgacggcatagggtacacgataatttgacacgtgtatgttgggttttatgccttaaataaaactcatttcaatataagcagatttacttattaatatagattagaaataacatttaatgttgcatggtt

SEQ ID NO: 331311 - DNA, 581 bp, Cannabis indica
gaaaacaacataaaatcaacaagaaaattacataaaagtaacatgaaaataacatacagctaacaaaaaatcaacaacaaattaataagattacaacataaaaagaccgtattttctgtaaataaaatcaaaaaaatcgaaaaaaaaaatatttaaaattacataaaagtaacatgaaaagataacaaaaaataaacaacaaattaataggattacaacataaaaagaccgtactttctataaataaaatcaaaaaaatcgtaaaaatattttaaatttcgtaaaaccgtatttttctaatttttatgtttttgtgaaataattctttaattctatataccaataacagtataacacaacaaaaatattgatcactaataataaatttagcaattcttatatatatatatatgttataggaatatatataagagtaactttataggttgtgtattaattgaagttgtcttctatgagaatgccagcaaggttccaataaaccttccatgccagattttatgacattaggttaagtcttactctttttttactactattattatatagtaaatatatatata

SEQ ID NO: 331312 - DNA, 860 bp, Cannabis indica
atatatatatatattacaagtaaaaagtataaatgactaatcaaaatcgtttttaattgttttcaaatatagttattacatatcagctacgctagaaaagacgttggaaactattggaagaacattatgaaagatcaagcgatgccagatgtaataataggccttttccatgatcaagatcaagttcaaacatacctctccggttccagtaaacaagacaatttagtcaaggattttgatattcgtcctaatgttatcatataccacaaacagagtcatggatcataagtctcgtcaagaacctattaagaaaatttgtcgtgtccactgaaaattactattacaaaattagctgttattattacatttataaatattgtacttatacttagtagtatatatttataagttgcttggactttcggggtgtcataacctataaatcttagcctcttttcctcactccagtttcccttattattattttttttttagagagtgatttgaatcatactatgacaatcatcgacgcgaaacaaatccagccaaccagctaattgtctagccaaagatatataaagtcaaaatacgagtcacaacgagcaaagcaacttatataagaccaagttatcttggaagtttagacaaaacaacttcagaccaccttcaagtagcattcgatataaacaaccaattggaccgaaactacctacaaaataaatcgatataaaagatggattagtacactatacaacgataataatgtaaattttaaattaagggtaaaacacaatagtaatttaaacgagagaacttatctttgaagttttttttcactcagcatgtcaccattatataga

SEQ ID NO: 331313 - DNA, 297 bp, Cannabis indica
tggattcagatgcatatctcctacatcttgaggtaattacttttatatatacttacatatatgattagactaatacttattccacaactaatgaaaaatttattaatataaagaaaaaattaagaaaagaaattacttacatgcatggtaagctaattaactagagaaagtttcataacacaatttttataatgcaatttttattattcgtgtgctactaatacttacttgtcatgtatgacaccacacatgaatagcataataatttaaaagttaattaagggtttaaaatccaac

SEQ ID NO: 331314 - DNA, 833 bp, Cannabis indica
agagactcagtgaataaacatattaatctgtaaagatgtggactacctgtatttagagagaatgaccctatgaagctttattgttcttcgagattggctttggacttttcatgcgcagcttaggtgggagacaaataaaaattggttagacgcataaaattaactaagcattttattcgaacaaatatagaaccagaatggattgttgaaaccaatcactcaaatagatggcgataaactaataagttcatatattatgaattctatatttatcgaaacaatactcttatcaacttattaacaacaacaacaagttcccttaaccaagctaatgcctatgagtcgtcgactcattcttcaacaggcatgcagtcaaagctttgggctcctcccactgtttgggagcttacggattcatgttctacaatttttactcctgctaatagtttaacacactctttgttgttactttggggtcttgaaacatggaaaaaatttactcgtggtgttaattaagtgatctatgaacttttattgttctctacagtgctttgcagaggtttcatgttacgattttcaacaagagtgatgatcttaataaattgtcttgtttattgactaatttagtaaattaataagattataatttacatccaacaaatattagtgatatggctaattagaatttttatccccaaactttaacatgtactaaattatgtttcttgaacttttctggtcgttaaaaattttccctgaactattaagattgttagatttaaagacttttgtttaatttcattcaattttactatttcagtgattgtttatgt

SEQ ID NO: 331315 - DNA, 812 bp, Cannabis indica
tattaatttattattttttattagacgatcagcaaaccgagtagcacattatgttgctagacattctcggtatcaatctgatcgtagcatttttgatatttctatttttggtgaactcttatatcttttatattcagaatgctaaattattcaataaaattgacatttcatctcaaaaaagaaatatatacttgcagtattttaattaccttcaaaattttagttatgacattttttcctaaaaatttacataaaaaaattcatctagaaatagcctggtacaactacaatcatgatgtactatatagtctatattaataattgttattagggaacttatgttacgataatattaaatcagattaatcatttttagatttttcaaaaaattacattaaaattatgcatcttaatttggtttatacagtataagtaaataaaattaattaaaaaattatttaaattcaaatatttattaaatcatatttaattattttaataaataatataactgaattctgttatagatatttatttaaaaaaattaccttgggacaccaagttttcaaaatatttatggaaatgttgttctctattttaatgccaaatttctatttaataccttggttgcgcgtataccgaagtcagtaacgaagctagaaatttagctcagtgagggcttgaataaatattaagtcaaaactaataaaaataactgataaatgtatcctttcaaattttcatcatcagcaaaataaaataaaacattgtcaatagtattattttattttttaataaagtgttattttttt

SEQ ID NO: 331316 - DNA, 888 bp, Cannabis indica
cttattctattactgtcgttgcatccttggccaatccatcgagtttttagggtcttcgaacccaaaaatattttatttcaaaaaaattgtatatataatactcacatgttctaataaaatctctataattaataaattacgctcatataatcattttcccatacgtcactaattatctcataattaccattagtaagattataaccttactctaagacttatataactatatatttaataaaatatgttcaattaaacataattacactttttaggatattacatgtttggttcgagaatgttagactggatatttttacatgttaatagcacttgtaccatcacaaaaaagaaccacagagtcttgtggaaatccataatcaattaccaatttgtttatccaaatgatttgagtacagcagctcccagtcgcaatatactcacctccaacagtagagagtgaaattgaactttgtttcttactcgcccacaaaacaaggttattgccaagataaaaacaccttctagtggtgcttttttgtcatctagactcccagcccagtctaaatcactaaaaccaacaatagacatgttggtatccctcaagtaccataagccaaactcaaaagtaccagctagatatttgaatatacatttcacatcaaaaaatgggattgtttgggattggcttggtaccaagcatatagaccgacactaaagtatatatctagtcgactagttgttaggtaaagaaaactccctatcatgcccctataaatggtttgatcgactgactcaccagactcatctctagacaatctagtagtggtgcaataaggggcaggaccatgtttagtttgatctaagccaaatttctcaagcattttt

SEQ ID NO: 331317 - DNA, 632 bp, Cannabis indica
gtaaaataatttccaacaaattacttgtaggatttttattcccaatataacctacacacagcagtgaactaatcagaaaagccaaggtcaattaagacctttctcacccagtcaaaccctttgtttgacccctgatttcaattctcaaacgacagcccctctgtattaatttactacaggtcgttttcaattaaaagcataaaaccctaaccatctattacatatatatatgttatttcccaaacacataaccagcagcccaattcaaataaccctagccgagcctcctttcttcactgttcttctttgaagaacatgaagaacagcttcaaacccaacccagaaaaattatccctgcccagaaaataaacctgaaaataatatccctgcccagatcaatcaaccccagaaattaatcccttaaacccgagcaccttcttcgttgttcttcacagaagaacacgaagaacaccaaaaataatacacagaaaaatccctttctaaacaaatttaaaacccagaaaatcaagccaaaaacagtatacacacaacattaaatgcagaaaataaaatggagagaacacaccaaaattttatagaggttccccgaaattgtgcgggtacgtcctctt

SEQ ID NO: 331318 - DNA, 773 bp, Cannabis indica
ccttggagcagagtacaagagagagagagagaagattgaggttttgtctttttgattctcttgaattttctagctaaagaaacgataaaagggagacagtatgcaggtgtgaagtcgcaggcggtgaagaaaaaatggtggagaagaaaagggaggaacggttgctgcttcaaatttaaaagaaaattgaaggaaagaacagttaaaatgaaaaaaaaaaacaagttggaaagaaaaataacagctacagacccgaacagggcacttacagcaatacttaagttaattgttatttttatttttattttttcttaaattaattagaaattttatataaatgaagtcaaaattaataattgtattttcctttttaatcatattacgaaaatgatttatatatataaatatatatatatataaatatttgtgacgtgtgcaaagcacgtgccatagagtagttcatacataaaagtaatactatttctcaaaaaaaaaaaaaagtctacataatctagtaatgcttttcttatgtaaatagtatttatgtttacgtacgtaattaagtgaataatatttatgtatatacttttcttaaaaagaattggaattttctttatatagtaaacaaaaatagaatcaagagtaaattgagttgttttatatatatatatatatatatatttactatataaagtgtgcctatataactaaattcttggtttatgagaaatttatggatgactttttatgtatatttaataaaataataaaat

SEQ ID NO: 331319 - DNA, 557 bp, Cannabis indica
taacaataataattatataaaaaaaaagtgaaacggtttggacgggttaacccgaccaaaccgacgaaattattgggcaagttgaactttttctaatttttaaataggtaagttacgattaaatatttacaacccgacatatattgggttaataaaaatataatataatccaatcaaacgaccgatgtacacccttacatctccatacctccattaataaaagtttcacaaatttaagaggtgaaatgaacacctacttcactacccttcaaaataaaatgaccaccataagaggttatgaccacatagagtacagagttaccgatgctcaagaggagatggtgtaatggaaaacttatatggaccgctttggacctccaccaacttaacccacttgcatcatgtttttgcatcgttttcatatttttcatattttagtgtgttttcatggcttagtgcctttaactatccttgtgtgagtttatttttatttgtttgaatttgatttcatgttgaaattccgtattttaatattcccagtttgattatttaattaa

SEQ ID NO: 331320 - DNA, 512 bp, Cannabis indica
taaataaaaattaaatataattattaaaccaattataaatattataatttaacaccaacagtatttttttttgaacaaatcaacaatatttattaatgctataaaaatatctcaaattaaagtagataacaatatgttcaacattaacactattaaaatgtctcaaaattaaactaaattcttaaaagcataaactaattattctataaaatctatattaaggtcttgggttataaagtcttgatacacattattatcattcgaaaatcccaacagctgtggcgaagaagaaacatatggttgatctaacgataaaccaagtgttaggttctctagctagctgagcttgattgagaaaaggagtcgaaaaaaattgttgctcctgcgatgaactcccaaatatcccaaaatcaacaaaatttaaatagagcagaagagagtctgatgggttctatataagaactgataataaattactaaaattatttttaaaataaataaatataaattaa

SEQ ID NO: 331321 - DNA, 1099 bp, Cannabis indica
atgtatagtattaaacattaatgtatattaaagttatatgataataatctttataattttattatattaatcaagtgaatttattatttagtctcttgagtattggatatgaaaatttggctcttatttggcgtatatatggataatttataaacgctggctaagttggttataaagattgtaaatgtttttattttagcttatattttagtagaagttggtttagaatcaataattttaactaaaaacatgttataaaaagaagttaaaatatatttgttttcccccaacaaatagttaataaatatagttaacaaataaatgagtcaacttcgactgcgagttgtataattgtattactatttatatccacagtcactactacgacggtggtttaaaggtagggtagggacgtggatgtggatatgcaaggaaacaatgtatagtttggactttggaccatcaaatatctattttagattaatctaataaattaataaatactacaatatatagctccacatcattatctttactctcatgctcatgcattatcattttgacgattttctttgcccataacttgtattccacatattcccttgactcttcaaccaaaaataaaataaaatattctaccattttttttgcttgctgctgcttaaatcttggtaggaaaaggaattaaatttaaaaaacaaaaaaaaaaacatgggtgaggctaaagaaaattggataggtagttaaatgaaataaaatttcctatctaagtttgttagagttttgtggtcaacaacttttagataataatttggcctttatattttatattactgcagatttataccgagcatgtttatagaactaatctattttacaatcttcaatcaaccacaaacaacacgctatcataaagaagaacataacaacaccaaaatagtgggcatatatatttacaaatatacaaaattttcgacttgaactcttgtcccccttagtgtaacgcaagggttataaaaatcttaacagttgaaaaaacaaaaaatatggtgccgtttggtaacacttttttaatcagttttctgtttttaaaagtaga

SEQ ID NO: 331322 - DNA, 666 bp, Cannabis indica
agttactagtagttttttttttatctatgtaaatctatttgttatgactgtgaagtctagtctttatctatccaatttcttttaaataaataaataaataatttatatgatgaaataaacatccacttcaacatattattagtatagatatatatcgtgattaaggtgattaaaatgttgaaaaaaagtgctacaaagtaccatggtgaccaacaacaaaaataagtcaattatattaatatttatatatatatatttgtataaatttgtaattgtggtccattatatatatatatatatatattagtgtaaaataaatcaaaaagtcaacaaaaatattttgaattttttttttttaattagagtcacaaaaatatatgaaatgcgtacattaattagtgggaaaaagaagtaaataaataaaaagtgaaaacagctttagcttaagatatatttttgtgttgtgattaaatcattctaaaaatatgaatatttcatttttgtactaaatttgttataattttggtatgcccctaattcacatattttgcaccattaaagcatcattttatcaaagtttactaaaaaaaatagtaatacgtcatgttgagaatcatgaggttccatctcaaaaaccaaattggcaatgagtggagtagcccatgt

SEQ ID NO: 331323 - DNA, 649 bp, Cannabis indica
tttgctttaaataataattttcattttataagggaatatatatttttttgaataattatataaggaaaattttatatatgaataattataacaatttttgtcttttcaattatttaccatattaaattataatacgactctttaagaataccactcaaaatataagttttacaataataataaataaaagtaaattaaatatttattactatagctatttttattttaataattaaaattaaaaatataaatataaattattataaaaaagaatatacatgtattctattactcattaacttaaaaatgatgaatgatatttaatttgcatattacttcatttattttacgatatattaaattaaatataataaaagaacttgtaaaaaattatatttcgagagtaatcttattgacaagtggtatatgttatattatttataataatataatatatagattaaatatgtgtaataaactaataatatgtaacatatgacaatgtatattagttgtcatctttttgtaacatttgggagttacttgttactgtgagtaacctccaccatcatcaccaacattaaagagtgtaaaaaagatgttacacacctcttaatttgaaatttcttaatgctataggagttatggt

SEQ ID NO: 331324 - DNA, 1229 bp, Cannabis indica
ctctctcgtctctctctctctctctctctctctctctctctctctctctctctctctctattcttctttgattcaacatggtattagagttgtaattgttcatagccatgaagcaccgtggaacctcaagattgaaccaggctcaaggtcaaaatcaagctcaagctcttcttccaagatcctatctgtgttgtttacacactctttatcaatcaaactcgatgaacacaacttcttgccatggaaacatcaagttcttgtctcgattaaatggagcaaacttcaaaaattcctggattcaatccctgctaaatgagttgcatattccccaacgaagaattctttctatttggtgtgacaaccaaagtatagtttttcttgcagccaaccctgttcttcatgcatgcacaaaacacatcgaaatgccaatgattagatagctgattatttaaccaaacatatatccagttccaaatttcctcagattaggaacactctcaatgttgtttctcaaactacattgagttttcagggaactgtcaagggtactgataataaaggtggttaggggttaattgtttgtaactaactcttcagtgttagttggtttttctattatttgttcttaactgtatataaagttgtacaatgctcattcattcaataataacagaattcatttctctcttttttgttctactttgattcaacaggatatatcacttttaattatgtgattacaattaattatacaccattgtgtaaacagtgtgtgaattattattctattatatataggttagtttatttagctagtcaaggtaacactacaaaaaattactacttttaatgacaattttttagtttttagtcacaacataatttttttgtgactataaatgtgatttttagtcacaacaaaatattatttatgactgaaacatgatatttagttacaagttatcactgatttagttttagtcacaacaaattgtaatttttgtgactaatacttttagccacggaccttttagtcacagcataagaataataatttataattagtcacaattttcttacttttagttacaaattttgttgtgactaaaagtaaaaattttgtagtgtaagttgtctaacttgaaaaaccgtgtttttgcaaatgtcagttgtatatacgaaaatataaaaactgtaagcatttgcagcagcagaaagaaattctgcta

SEQ ID NO: 331325 - DNA, 546 bp, Cannabis indica
tctacatttattaagttatatcatttttattgttgacaactgattgatatcttatttgatgaacaacttgactgacatcttgaagagttgttgcatatcttaagattttattaattagtaaataattgtatattttatttatttttaataatgaaatagcatattttttaatatatatattattgtttattaagattttttttgaaaattaattgttttaataagcaaacacacttacatgtttctattaatatatttagataaaactacatgtatatgcaacgtaggctttatttttatgataaaaaaataatagtaatattagaaggagttattaatttttgcttatttattttttgttttatgttggttataataatttgtcttagtatttatttttaagtgagttctctgggaaaaatatatattatttaaaaaataaaaatctttaagaaatttctccttatcactacaaaaaactgttacttttagtgataactttttagttcacaatataaatttttgttgactaaatgtgacttttag

SEQ ID NO: 331326 - DNA, 1311 bp, Cannabis indica
taacccacgatcataaagcaaaaggaaaaacattattaagatatataatatatattttttaaaaataatttcatatatatagcagcatgattggaagataattatgcaagttagttgcttaattaattaatataaacaaataataattaaagaaaaaaagaaacaaaatatctagctgatggtcataaagtatttacataaagataaataattgatattaaaaatgttattattataatcaaactaagcctttggaaaccactaccctttacttattttattctccacaaaaaattgtgaagcttcatagtatgaaaagctaatttatgccttgttcaaaaaaaaaaaaaaataaataatagtaaaataaaataatgtatgccttttcaaaaaaggaaaaaaacaaaacaaattaattttgtatatatatatatattaattcttatttaattttttctctgaaggaatcttagtaaaacagtaatttagcttttttggaaaaagaagaagaaaaaaaagaagataattcttatcacttttgtggtggtcttcaacggtaaacaaccactatataataacggaattaaactaattaatatactacatatcaacttgcatggttaatatatatatcaattatatatatacttttttttcccactttatatataatgaatcatagtaaataacaaaaagaaatggattagtaagatgaagagaaaaaccaataacaaaagctagagaaaaaatgtataaattttataataaaacaaaacaaaaaaataggaaagtaaatataggataattctatgaaggaaattaacctagagatagtgatggttatatttttatatggtttgttataacatgttacctaagtaaaaattttatttttacacttagaataattattgttaattatatatttaaaataaattaattttttaattaaaatatttaataagacattttttacaattaatatttataaatattttatttattatttataaagaaataaataaaattagattagtgtaattaattacaatcgtttaacaataatccaacaattaaaataaattatagttaaaaacttctacatgtacatataaacagtgacgaagcagaaatttagttgagtgagggtttgaataatattaagtcaaaactaataaaaaataaatgataaatgtatctttcaaattttcatcttcaacaaaataaaataatactattgacaaaaataaaataaaatattgtcaatggtattaattatttttaataaagtatatttttttattatttgta

SEQ ID NO: 331327 - DNA, 1093 bp, Cannabis indica
ataaatatttatgtttaatttttaattataaataaatacttgagtttaatttatagttataaataaatatttaaatatcaagtcattatccacatgtcatttttttatttgtatattagaattaatttttttaaaaaaaataaaaatttaatgacatggacaaattaaaaattgccacgtggtaatttacttaacacttaacagctaagtacctacagaacttcttaaattataattttttttttgagaaaaagactattatattaatcagaaaaacaattacataacagtccaaagaggaggcggaaattcctccaaccaaatacattatgaatccactgtaagagcaaacttagccaacaaatgggtttcgttattagcagacctatagacatgagagatctatgctcgtgggaaattggatagcagaaaagaaatatcattaagtatagaataaaaagctgatcagaacccctaaattgagactttaaaccatttacaaccattagagaatctgtctcaattaagtttacaggtgtagagggtgaaatctacaattacggaatttgggcaccagcaacctgtcaagaacaaagagagagacaaaagttcaattgggagcaccggtggtgtgtcagccaaagggactctgacgctcaagttagtacgattattatgaaaaataataatagcagaaaataaatgtaatataaatgctagccggacggatgagtggacaagcagacagacggactaaaggaataactctgatggtgaggcttaagagaaaagcttagaaaaggcgactgtctgctcgagtcagtgagtagtgtgagtatccaatgtgttctgtccagcgtctatcgtatggttccttttatcgtgtgttcttagtgtccttgctctctgtccacgtcacccgttggactcgttcaaattggctacttccctaattattagggagtagtgaccgtcttcctgactggttctatatttacttgatttcacctgtttggctgactggctgggctcggacccggttgcggacgatctggcttgtggcccataagctcactcgttagtctatttcaag

SEQ ID NO: 331328 - DNA, 511 bp, Cannabis indica
agttattttttttcttttctgtatttcacttattaattattttcatcttccaccctctctagtttttttttttctccttttattcgtttttcacttttttttgaatgaaatcaaccaatacaattacaatcaaatcctaaacaagctaaaaaaaaaaaaacataaccaattatttacaacatcaatgatgtaaatatctttaggagaagacttccttaagcaacaaaatttagttttattagtctacctaatcaagtcatttacatacttaacataagaactatgttaaaaaaaaatacataaatatctattaatctatataaaataaacaactacagccataacaaccataaaaacatgatgttgtagactggaaccaagctatccaattcaaatctaaaaaagctattggctagattgtgaatccgagccattcatgaaccttacgcagtgttgagaatcatggggttccatctcaaaaccaattggcaatgagtggagtagcccatgt

SEQ ID NO: 331329 - DNA, 839 bp, Cannabis indica
agtggcttgagctagtattaattaattctaatccaactagtttgtattatacttagatttagtaaaagtcatgtaatgaaacttagactctctaaactttgaaataaggtattaaagaaaaggccaatgttgctagggttggagggtgtgtatacatcgaggttgacaaattgagtagctcactttgtagcaaaaaatgctttaaataaaaatacttgggaagggggtggttcctcctatagcaactgctgctttagcagttgatttatctcttataatatctttgagcattgttattaaacaccagtggtgcccagcactttctatatgattagttactgatattacctaaaaactatttttttaagttatatgaaatccgatacttaattaaacaaataacagtatatataacatcaaagaaggtcctaagcaccaatagtacattttaacaattcttaatatctttttgatttttgtactcgaaaaaagaaaaactttaaagtttgaggtaagggaagacatttatattattaaaaatagatttatacattgttaattttgtatgtttttctaataatatagagagagtgtcattgggttagaatggtggtgggagcatcaaactctaattggtttctcaaagtgaaagtaataatattgttgttgttagtttttatggtgtggagatttgatactttttttatgatgttcttagtaaagttttgtagattgaaaaattacacatggaattgggaaccatttacaccttattatgtgttaaaattagtataacatgtaatgatattcaaagagaaagggagagagagagaggaggt

SEQ ID NO: 331330 - DNA, 593 bp, Cannabis indica
acacacacacttcacataagtatcaaacccgagttttgttagtgatattccgaacttttgctcttttatcctactttttcactttatttccaattgtgaccgctttacattcaaaacaattttacttatacacctttcataaaattttattcaaaaaaaacactactcaacgcggtattataagattatatcaaaaaactatgaaaaaaattccctaatttgatcaattttttaagttttaacaaaattgatgtgaaataaatgattaaacttggaaacatatgaaatagtaattggaaatttgggttaaattaagtatcaactactaatttatcaatttttccaaatctaatgttatctctcttagcaatttgtattttcactaaatttgtttttaggcacattttccaaaagatctcatttaatggaaatattgtacatttttatatacccatgatattttttatttttagacaacgtgggacttagctgcacacccaaaaaatttctcctcaaacaaaagaccatcttgtctcccctcaaacgattctctatacatccactctacctcgagagttcttgctcttttctca

SEQ ID NO: 331331 - DNA, 1143 bp, Cannabis indica
aacataggaatgataatttataattagtcacaattttttgacttttagtcacaaattttgttgtgaataaaagtaagatttttcgtagtgatatctaattttatgatgaaactggattagtttgtagttacgcagtcataaatagtttaattagattacaataagaattaagattatatatgtacgattattaagcttttcatgtttagatagtgtcctttttttttttaattttgaatcatttcatatatttttaataattaattattaatagttataaatttgcaaaaataaagtattatgtcaccacaaaactataagcaaaatgacctttcaagtaattatatatgataatggatagtatatattttatttcataatgaaatagtataatagatatattgaaaaaaaaaattatttatatttcaatagttaaatatataccgtcttattatatttttcttttggcaaataaatgtttatttatttttttaataattatacatatttataattattactaaaagataataaaatagatgttgggataataatttcacaaaataatatcaaaatttgctaaacctaattccactagatcagcgctcaactccctattcttaatcctagttggcatagacccaacccacctcttggagataattaattctctaccaggtaataggggttccaaaccctttatcataattattacatcgcctacccaacttatcagttactctagctgccacataagaatgaatggccctagagtaaaacaaaatagagtaataagagttgttaaccgagagttgacatgtaacaactgaagggctagcttccgcatcagtctgagtaagaacaaaaacccttactagagtgggttttgcctttgacttttgttcttctttctttaactgtgggcaatctcttttatagtgttcagttacaccatactggaaacaaccttgacctctacactcacccaaatgatgcttcttacagttagggcattttgggtaagtgtattgattcttaaacccactgtggcggttaccacaaacttattggttccctcgaaaccttttttttactcgagccacttttctcttttgatcactggttgagtcactaccaccccta

SEQ ID NO: 331332 - DNA, 605 bp, Cannabis indica
tctgagtcgtgggttcgagtctgagttttggtacgagtttgtgtcttggtctgagtctacgtctgggtctgggtccaagtttcagtatctgtctgcgtccgggtctttgtctgggtctgggtccgattttggtatagctcttggttctggtccatgtctcgggtcacgggtcctgggtttcgggttctaggtcacaggtcctggcgcaagtctgggtccaggttcaggtatgggtctgagtatcgatcccgatctcggtctgcgtccgtgttcagttccgcgtcaagattcagatttgggtccaggtctgattccttttctagcgtcctgattccagttcttatttcgattttagttttaggtgcgagtctgggtttgggtcctggtctgcaaatggttccaggttcgggtcttggtccgattctaagatttagacaccgactatgggttgggtccaagccccaggtcatgggtcaagatcccgatccaaatcttaggtctccgtcttgttctgatttggatccggggtcccaatccttgtccgtgttcggtggactaggacctgggatgtaacaccctaactagcataggcgtattacgtgatt

SEQ ID NO: 331333 - DNA, 654 bp, Cannabis indica
ttaaagttttaaatgtataattttacataattatattcttattaattattttttattttattttaattttaaaaaaaaaatcgtatcaaacgtgtcaagctcgtgttaagtgactcgtatcgtgtttgacctgtttttatttcgtatcaagtcatgttaatctattttcaactcgcgtctaattttttcgactttctcgtaaaatttgtgttgtgttcgtgtgatgtgttgaaacatgttttgtcattacccctatatctaatccaattcaattaaatcaaaccaatctaatctaatttaattacaaaaaattatatatttaattacaattaaattggattgaatgttaaaagttattataattattttaaatcaattattggatattattctcaaaacttaactaaaaattaatataatctaattatatttatatattaaaaaattatttatgtttatagtaaatatttttgtgttaaatttataatatttagttattttgtatgatatttatttattacgtagtaattataattttattttttttgaaacaaatattgcaactttcattaaaacaaatcagctaacaaaataagcttccaaaccagaagggacagacccctactcgaaatacgatcaggacatgaaccagaa

SEQ ID NO: 331334 - DNA, 802 bp, Cannabis indica
taaaactgtaatttttcttcagttttgtcagtacagactccgttttaaatttattaaaggaacatttggaagtaactgatactacatgtttctgtctagacccaatgatcaagaatctagaccttatatgtggcctatttaagaaaataacagggtttgtaaggacgaaattagagaaaatttacagttttacaaacattgggtacttatgccactaaaataaacattgggattatgccacttacaaacttaaaactttgggtatttatgccgctatttaccctaattaatacaatataatattttatccaaacatagtgtcacttattacttaatacaatacgactcttatacaacataccaaatgagccctaaaaacaaaactatgaaagataataaggtaatgttctagtacgtcttatttattactgtcgttgaatttataaaaaaaaaaaattatcgcacatattataattaaatgggttagttcataaaataatattaagaatttaaattaaaaaaaaattataaatattacgctaaaagggtatttttaaatattttaattaaaaaattatttatttttagtatataattaattattatcaatttaatttaaaaaattaaatttttatctattaacaatgttagagcatctccaatagcggttgtaagacaatagtcgtatgatttttttttttatctaaaaaattattatgatggtgggcaacttttaaagaaaatttgacaaatcttatttgaatgatagaaaaaattaaaaatatatatattttagaatgat

SEQ ID NO: 331335 - DNA, 551 bp, Cannabis indica
tctctctctctctctcttggatctgaagctaaattaagaatgagtaactccactgttctatcattgaatttgttgtttaatgcttgtagttgaaagtctatcactatattaaaaagattaactctgtaataatgttccactgtagtggcatctttttgaccacgagctcttcttcttcttgtagtataacgagcattaaaatctggcacatgtatcttaacatttttacaaaatgattttacctcgtcaactaatttagtccattcattttctcttaatttttgaattagagtctcagtagatgaaacaagatgcattgcatttaaaaatatctgaagactgaaactacaaagcttgacaaagtatatttaaaatcttaagaatttttttcataagatgcaaaataaacacaaattcaaaagaagttactgcctcataagctgcatttgtatctcctcattgagcaaatgtagttccatcgtcaataatattcaataaaacttcacatgttgcactaaacatctttatcaaactagaaatagatttcaagt

SEQ ID NO: 331336 - DNA, 528 bp, Cannabis indica
ttttctttattttatttatagttattattatataatgatttgcatatctaaccatactttttaaatttactccctatttagtttagacttgtgatattctaattatttctgccaaaattttttagtagtattttactattatattgaattaatccatttatttggtttaaaattaaaattaatctatactaaagaaattcaaattataaaagaaatatataaagaatttttttgtaaggttagttaaaataaagtatgattggagtaaaattaagaaaaatactctctattttaacaatttagttattttagttaaaaactaaaaagtttttgtattaatgctcaaaatattttttttgctaaattttattattgttactcttatataaattaacttttacatcatcatatatagaaataaactaagctaaccacaactttttttttcaactatgctaacaacaattaaaaacaagggttaatttcacaaatgcacaaaaacaacaaaaatacgattttacggaattt

SEQ ID NO: 331337 - DNA, 1054 bp, Cannabis indica
taaggtttcgttttttccacttcctgatgggcccattaaggcaagaatctcaccaggccctaatacttcctgttatgcctttcaaaatgtgcttataattatcttgatccatgttgagttgtgatgacacttttgattacaactgattttactggattagatgttgttgatgatgatgatgcatgtttgtttctcaccttgtacttcacatcttcaaactgcatttttgttacaaaaatcatgttaagaggaaaaaaaaccaaaaatttagattgtatagttgaaacttattacttataaattattttaagatcccaagcagggtcggcccaaatattttgagggttttgtgcaaaaatttataattgtgccttttataaaaaataatgaaattaaaaaataaaaataatgaaatttaaattgtgccctttattaccaacgtttttttatttaagataagtttctaaactttcaattataaattttttatttatgtatataataaaaaatagagttttttttttttttaataaaaaaagttaagccttaaaaaatgaaaactttgtgcaatggtccaaactgcttaatacttgaaccgatcttgatctcaagtatagagatgtgtgacaatttcattattgtaacaaaaatcacataagaaaagaatagagatctttttatagtattcctaaccatttttcattatattttacaaaatatattactaaaaaatcttttttttatactttcaatatatttgggagagaaagaaaagagtaaaagaataaagaaaggtaattaatttgggagagaaagaaatgataataaatatattttagcatactctaaatgtagagcaattagagaaggaaataaataaattaaaaatgttttaatgcattacattatttgttagaatgagttattgtagcttttatattcttttaaaaaatcatttacatcataattattagacggtcctgggctaaaatggactaggtctgtaattaggggctacccaaactcagagctcaaaatttttatatagtatatt

SEQ ID NO: 331338 - DNA, 1093 bp, Cannabis indica
gataataatatagtaaatagttatttttgtttggttttagtttttttttattattttgttaaggaaagtaaaataagatattgttttatgtttctaatgttagttttttctcatatatatctttttttaaataaatgtcttgttttttttattcaattatattctctatttgtagtttatgatatgtatatatattttattttgattgaataggtaatttatgctgttgtttcccaccttacttttttcatcataatattttctctaactatatttctttcaccattttatctttgacatttataatttcaacaaatcactttatcttatacaaatttctttttttcaaccttatatttctttttaattcaatatgtatttattatcatcaattttttttttatcaatttttctatattcacgtttctttcttctcgtgatattatgttgtttcatcaacttgtttctaatttttttaccctaatctaactttaacctattagcctcattttcaatcccaattttaatgttttctttgtttttaagaaaaaactctaaatataaacgaattatattataagaattaaatttgattcgactagattagattgtgtgtaaattctacacagtgtttatagcctagattaaataggcttttaaaatgtatatttttaaaataattaaaatttatcaaataatttattttttcaaaatttaaataaatggaataagtaaatatatttaaaaatcgttattttatggtttgcctatctaatgtcttgacagttaatataggtagttagttagcctaggtgtcatgttctaataggttagtgacggtcagttcttcactaaccgttatagttagttaatactcttgtctttgtatctctcttgctatatataagggtatgtaattcaactatagactactgttgtaatcgacaccatttgtacataataaaataacatagcattgctcttttctctactgtgtctgtgtgtgtattaagtgttatggtttgattaatacatcttaggttcattctagcatggtgaattgatgctgaaccgaagtgaacttgtgtaacaa

SEQ ID NO: 331339 - DNA, 500 bp, Cannabis indica
tttaaaataattttcaaaataattttcaaaataatttgtataatgtttaagcaattaaattatgttggtcaattaaactgtactatgtatattgtgtccatgaagatagtgtaatgtgtattcataaataatccaacatatcacttaacactagaaaattaaaaagaaaaaaaataacaaaatgttaacatgatatatatttctcgctaaaaataaattttcggggttaatttaattgttgataaaagttattgtggtttggcgcgatttactcattaaattatgaaaaatttacattttagaccattcaaaataactaaatttcaaaaatattgtagtttatttaatacctaatatatacttctttctaaaataattatttttttaaatataacttctcaatctatgtttgcaatgatgatatcatcattgtccatgtccatcacattttaattcatgaacaattatcaacaattacatgaaataaataaataaataaa

SEQ ID NO: 331340 - DNA, 1292 bp, Cannabis indica
ttgttatatgtattataataatataattctcatacaatgtgaggtgacgtgagctggctgattaatttcttaatttttcaaatttatttttgatttctaattttttatattataaattagatcaatttacgtcttaaatattaacttccaattacaaataaatatttaagtttaatttttgactataataatacttaagctatatttttataactctgtagtatccattcattaaatgtcaagtcattatccacatattattttcttattggtatatataaattatttttcaaaaaattaaaaatttatgacctggaccaatcagggattgtcacgtgataatttaattaatatttaacaaccaggtacctacagagtttcagaaatataacttaagtattattgctgcaaaaaattaaacttagttatttatttacagctggggttaatcttaggtatttatacaaaaaattactttataaattatcaaatgattaatgtttttttcttttttttatacttacatttctattattactgctactatttttaaacgagaatactcaacactacactaatatgaggtcttataattagttagtggttctctatataatttattaaagagtaatttgcgacataagtacctaagtttaacttctagttgcaaataaatacctaagtttaatttttgcgataataatacctaagttataataaatacttgattgttagtattattacagccaaaaattaaacttaggtacttatttacaaccgagagttaaacttaagtatttttgccgcaaattactctttattaaattaaaagatatgtaggatccgatattaaaatacacaaatagtgatatgacacttgctttagcaaggtgtccgttagcattgctctttttaaatgccctttcttttttaccgttacaaacaatatatgctctctatatatatttatatactagattagtattacttgcaatgtatatttaattatattattagtttttattttagttatatatatttttaattgtataattagtttttattttttgatgttattcaacaaataaaacattttttattaaaagtattttatttaagtgctatttgtaaaatgaaaacttaataatacaaaatttgttgttaattaaaattttaatttaactgtaatacttttaactttttataagaatattatacattctttttaaataataatagaaagatagtttttgataacgtaattgttggtcttattttaccaagatctagat

SEQ ID NO: 331341 - DNA, 411 bp, Cannabis indica
tactatcgtacgaacgttctagactcagtatgcatgggatgaaacatagggtgatgattgggtgtatgggcgcgtaattataatccaattcatttttatgttatgattatactttccttactcagtctgtcgactcacagttattgtttccatgtgtaggtaagggcaaagctaaggccgaacagcagtgagtgcgagcagatgaagattgtacatgtcggggcagttagacctaaagctacgatctttgggacagtaggctgtattttgagtagtcgctaagaaacaactattgtatcgaatattttgtgttacgattgtaaatattttaaatacgagatcccgatttatgtaaaagatatttgtttccaattaaagggtaattaagtaaagttttaattaatcacgatt

SEQ ID NO: 331342 - DNA, 530 bp, Cannabis indica
tattatatttatacaccaaagaaagcatgtttaattagaatttaaaatcagtttgctagcaacaaatgtacaatttaaatacatacataaattatgctatcatacaactttatattggctaagttcacttgttggacataaacatacccaagctgttgacacccaacaaagattacagagtaaacctctccgcaacctctaaaaattttcgatctcattcatatcgtaaggatatccaaagtatcgtttaagaatgttgcgctataagagcaacttcaatgctacttgttacgggagttgctatcaaaaaaatggtggactatttgagtaaaaagctatgaattttcaattacaaatataggcaccgttgcttctgttgagtaccggtgccaatctttttttcttttttctaattggttaatttataatttgtttatttaaaagatcgaaaatgaggtcaaacaatgttgtaagcgttagacttaccctaaagacatgaagctttgctatttaaataataaatcgctgta

SEQ ID NO: 331343 - DNA, 709 bp, Cannabis indica
accacttctctttctctacgtctttcttttcgtttttttttttttttttttttatttatttccatgagattatattgtgtatatatattaacttaccccaaatgttattattccttttatatgaatgactctcttttctctttatctctctaccgttcaatttgtattttttattttcttaattttgtatctataattaagtgtctttatgcaaaattaggatcaggtgatattaacctaccctaaattttatttttttgaaaattgttttccacttctgtgtttttttttatcactatacatagtattgattttgtatctacaattgagtgtcattatatattaatttgtgtttataatatacatattagagcaggaccttaaggctaacactctatttttatgtttgcttaaatttttatagaactggtggtatgttggatcaatttcgacatcaaaatgtaaaactgggaccaggtgatattaacctaccctaaatcttattattttttatatttttattttctttatatgagaaaattatttgccacttcagtacgtttttttttaaaaaaatcactttacatattatcaattttgtacctacaattgagtatcattatatatggtttgtttataatatacatattagaggaggaacttgaggctatgtttacgtaaatctttataggtttgtgctatgcagaat

SEQ ID NO: 331344 - DNA, 960 bp, Cannabis indica
atatatatatttatttgtataaaagtgaagtttttttaatttatcaagtaaatgatatttatgtatgtgtgttaattgctctaacttcagtttatcagtttggtaagtatgaaaccggaatctaaatttcattgatatatatgttgaataatattgctaaattaatataatattattaaggtcaatgaatatcaagataattggctgatctttaatattaattaatatccattaagaaattggtggcaaaatcttttagccttaatacaaagttgcactgttattgacaagaaatgtcatcaagactacagctagcttgatcggttttctatttggccaagtggaagtctattattggtctttactatgtatacattattatgtgtatattagagagatttgattgagtgttaaaaataaaaagtactctgtagtgagttgatgagagcagtatcttcttgtattgaatcttatataatagccaattagctatgctcttttagtggacagaacgagtagagatataacgtagagttagagagtcacattgacaaggattacatagagctcgtttggtaggtagtatattttgtgttgtattaaatataaaaaaaacactgtttttatattaataaatatgattataataaattttaatataatataaattgtattatttaatacatgttattgtgcgaatatttcgcctaaaaaaatgagtacaatctcgtgaaaagcaggcacatggagtcaattcctaaagaaaaggatgacgtaccaataatatgtctctcgtgttagacaatttatatgtataaactgaaatatatgtatgtgtatataaaatgcggaattaaacaaacatatatatactatgaataaaggatcgaaatacctccagccattgaatctttaagcttcaaacccaaaaactttgatctgcaaaggaaactcgttgat

SEQ ID NO: 331345 - DNA, 644 bp, Cannabis indica
tatatatatatataatgtaaacacgatattgttcttactagtatatgtatatgcataggaaacttctcttgtctttcattttcactacataattatatattgttcatacatatacaagagtggagccatgattatttgactgcaggcatgaatattggactataataaatctttattatatatttatatatacgagacctaacaaattaaaacataaagatatagtactggtggtagctatgggtacacagaaaaatagttaaatttgtattgccaatagaaaaaaagtagcatatatctattctatataaagtgtgcctatataactgaaattcttggtttatgagaaatttatgggtgactttttatttttatttaataaaataataaaatattatttatatataataaaataataataaaacaaatcctattaatatttgaattgatatttagcatatttcaactctatatataatcacaactataactctagaaattaaaaatatatatatatataaaataatcgtccattttatttatattatttagaataattcattgtggttcaagatcacaatgaacagaaaaagtggcaaaaacacaaatgtagttcaaaatcatagtaaactaagaaagaatga

SEQ ID NO: 331346 - DNA, 672 bp, Cannabis indica
caataaatgaatgctggatgtggctgtggtatttgaaaatcgtggagaaggtattgtaaccaagtgagttcgcttgcagtagcagctagtgcacggtattctgcttcagcagagcttttagagattgtaggttgcttctttgttttccacgaaatgagattgtcaccaagaaaaacacagtatccagttgtggaacgtcgagtgatggggcatgatgcccagtcagagtccgagaaaccgcgaagagttaaggcagatgtggaggaatagaagagaccttgtccaggtttacccttgagatacctcaataaatgatgaacagcttgtagatgtggtgtccgaggtgtggccataaattggctgagacagtttacagcaaaggtaatgtctggtcttgatagagtaagatagagtagcttgccgatcaattgtctatatagggacgggttatcaagtggttcaccattttcattgtcgagctttagcttgggatccatgggcgttttagtaggcttgctgcctacataacctgtgtcctcaaggagctgaatggtatattgtctttgagatatgaagagtccctgtttggcacgggcaatctcaaaaccgagaaaatatttgagattcccaagtgccttgagcttaaatttctgatgcaggctgttctgaagt

SEQ ID NO: 331347 - DNA, 650 bp, Cannabis indica
ttagtgtagatgcgccaagcctatttagcaagcataacttgattgtggtgaacaatatccctaaaaccaagaccaccataaacttagaatgacaaacatgagtccattttttctaatgaatcttatgatgcttattatccaaagattcctaccaaaagttagccatgggcggtcttcctaaatgcttacaaatggagaggggaagcctatggtaggacatcgtatatgaaggaatagctgggatcattacttgtaaacaaaatctctttatcagctttagaaaaaagtttttgattccagacagatagtttactactggctttttaaagaagaaaaagaaactaacatttttagaacgagagaaacattggaaaacacctaagtatttatcatgaatgaaatgtttatccaccatattaagagaattcagaaaagaaattttatcaacaagattagtgttaggggagaagagaatggaagatttagcaagattaacagtttgaccatcgactttattataaatagtaatgatatccttaatagtattacagtcagggccgaccctgagggtaggcgtgcgcctcgggcccccaaacgcttagggccccgaaattgtagaaaaaaaaatattaatatatagataaaatttt

SEQ ID NO: 331348 - DNA, 553 bp, Cannabis indica
aaaccctctatttatagccaaagcgagtgaatgaaaataattaaatgaggctggtgggatatgagaagggtaaaaaggtaaaataaaatgtccaatttattgggtgagaaaatagtgtgagatggaaaaatgagccaaagaaatgcaaatggtagtgtatatttgaaattggtattttaatctcattttggggacacatggaagcaacaaagggcttcaaaaaggcgggttggaatgaggagctgacaaatggtgagcgtgtggagcttctgacaatggtggccgaagcagggggtgctatgtggcacgcttgaggaggctagcgtgggggacatgtggggtccacgcggctagaagctaggaggaaggacaggcagaacagagcttcacgcgcccctgtctgttagtgagactcacgggtgcgcctaggctacaagatcatgcgcggacgactatgatgaggagcttgctgatccgtgcgagtggcctttgcctgagctgaattctgatttttactttgaaatttgaaatttggctccacttcttcacattt

SEQ ID NO: 331349 - DNA, 614 bp, Cannabis indica
attgtcaaaaaaaaaaaaaacaacactctattcttataaaacaaataaaatatttttgagagagaaaaataaaaaaatttcattaataagtaaattagacaatagttcattacataattatatataattcaaacgagtagaattaacaagatatgcaaatcatgtcgtttacaaaaataagaatgaaaaccttaatagtaccttcaactaaaatactaataaggcgccagcgtgaaagcatcaaagaagcgcgaagaatgttagatcttcaatctaaatgaatatatgataaatcaccctgtcaacaactatcagccaaaaatctttcaataaaaattatgtaataacaactctattatccaatctagaataaaaaaaaaatcacaaaacgaccaaccatagtgataacaattgtaacaaacaatcatgtcataaactatgggccaataaaaatatgagaatctcccagatctgaacatagacagggatagtcatgctactaaccagggccggcccaagcattgggcagcttgggccattgcacaaggcccccatttttttaaggcccaaattttttttttttttttttttaaaaaaaaaagtcctattttttt

SEQ ID NO: 331350 - DNA, 1210 bp, Cannabis indica
taataaaaaaccagttaaagcattcaatggatggaaccgatccaatccaatacatcctttggatcggatcggatcggatgactcaattcaattggattggatcggatggaaaaatccaatatccaataaataattggattggattggatgaatccaaatccattggatgtgatccaataaacacccataatctaaacttaccctatatttatagctagcttatttagttgttgtttagtcatgtcactactgtataaaagaaaattgtaatctcgttcaatgcatggtgatgtgactaatactcttaaccctgcttgattagacacgagaaatcaaatacatcttctttaatttttttgtcttaccaaaaaaaattattattttatcatcaagatcttaccgctaattttcaatattgattagatgacacaattgatgttttatttgtttcaccaatggctggaacttattttgtaaagagtgatttaaaggtgggtattattacgttcaatgtaatggatttttgtttggagataatgaattattttgcttttagtaatagaacaatcattgttttattacttagtaatttttttttattagtagaaggtgtaattttgtaatctatgatatagtaaagtaagcttttaactataaccactgtttcgttgttttttctatattccgaactacatcttttatgacagcaaggaaaatttgtcagtctaattttttaattgtctatattataattatttaaaataaactataaaattcaaaaaaacaattaatatgttgaaaataaaatttaaataatttattgtagttgtggctcttttattttataagtgcaaaatataccatttaaattttatttttaacctattaaatgtttctaaattttttaaatttagatatcttaatcgttacaagatagatgactattatgaaaaaaaaaagactaaaaatttacttgaatatcgaaaaataaaaaaatacattcatacatattattattagtaatttttacatgaaaaatccattttacacaattaattacaaaattactcacacacgcctatgattacatttttacttacaaagttgcttttattacacaaataccacttagtcatcattccatccatcatcaatcaaatcccactctctttcctctcttttttcattttctatcaatcaatccatcatt

SEQ ID NO: 331351 - DNA, 794 bp, Cannabis indica
gtaaaatatttccaacagtcggtatgggtcttaactctttgcgtactcaatttttagcacgtaacccacttgtcaaagtctccaatgtaggccatttgatatgtctttggtaagtggaattttttgagttatggctccatggagcaccctcatttgtcttttatatagctagttaccaactttgcccctgtccaagatgaaattttgaaaaaatattcgtggcaaaaattattaaaatcccatggtcttaaagtgacgtgttagtaacgacattgagatttatttttatctcgtcgatataatgactttgcccgctatttgagttgaaattttgaaaaaaacattctggcaaatatttttaaaatcccatgctcctaaagtaacgtgttagtaatgacattgagatttatgtttatcttatcgatatactgactttgctgcctattggagattaaactttgaaaaatatgcatggaaaaattttttaaaatcccatgctcgtagagtgaagtgtcggtagtgactttgggatttatcttttggagtgttggagtatagtgatggcttataccatatatgttgggattttatgccctaaataaaacacatttgaatataagcttatttgttatcaatagaagattagaagtcatttatgtttacatgtattttttatgtttatgggttaatatgcaatttctgataaattaagaacatatagttattcacaattagattgatgtcaacacagtggaaggtaattgtgattatatgcttcaaaagtttatgtccca

SEQ ID NO: 331352 - DNA, 728 bp, Cannabis indica
aataaccatagttgtccaaaatagaaataaatatcagatttcttcaaaatggcggtagtacattagcctcattaaattgaataaaatgactagtctcaaaagataatctaaatgtgacaatgccttcaactagaactacttgctgtcgcccacaaaaatgaatctttcagcatcgatcatttggcattgagctccaaatacaaccttgcacagaaacacttgtgtgagtagtaacaccagaatctatccaccaagtattacaaggtacataaatttaattaactttagaacaaataaaggtgaaaagtctacctttcttcatacgccacgagacgtacttgggacattccttcttcacatgaccaggtttcttgaaaaagaagcatgtaagtccttcatcatgattcttttgtttcttgggttgttaaagtttccactgtagttttcttatcttgagtcatcttttgcttgttacctttttgaggtagctgcaagatgagcactttcagtctttcatctctgcaatctatcatcttcttccgcacaatgtgaaatgagttcattaagagtccatttatcattttgagtattataactcactataaacttgtcataataatatacaggaagggatatgggtaccaaatgcacaagaaatttatatgagagatcaagctttagtgcattaagtttggaagtgatgttagacatctccataatgtactccc

SEQ ID NO: 331353 - DNA, 949 bp, Cannabis indica
aatctgaccaatgttgtcaataacagatataccaaatccaggggctagaatgagggaggcaaaaataagcaaaaagtcagccttaaccaaagcctgtgtcaaggtaaaattctctcctcttcgcggtcttttaccacgcttgactctcacagctccatcagctgctgcttgtaacaatttagcctgcagatgagccaatcttttgcgcctttcaaaagctggaagcgcatcaagttctgaggtcctttcttcctcagcctcactaagaatgagctcgcttgtatcttgtctcggtaacaatggattagcaaggagtttctcctctgatgaaggctgtggtgttgagaagaatactaatactactggaattataattggaagtactatgagaatgattaaacatatggcaagtaaagtgattattgattggttcaaattaagagtatcctcaaggattaagactccaagcaaataagcagccaaaacaagacaaatgctataagtaaacaagaagctgatgacacaagacaaatgctataagtaaacaagaagctggagtcattagattcctaacttgtttatgaccttcaacaggtctacaacaaacatgaaaataacaaccattgttggaccaattgtaaccataaaaatcaatgaagccttatctgggagattgaatatggcataagatttcataaaattcaattctaccccattttggtaggataggctaacatttcataaaattgaattctacccctcccatttcaaacacctgaccttttctcatcctcccttctctctctcgctctctgaactcacccaaagactcaacccacaaccttggtcccttatctccacgaccaccacaaccacaaacccaagacttctccatcaaccacggcttctccatcgacaatgttgtcaaaggaataaattgtatgattaa

SEQ ID NO: 331354 - DNA, 828 bp, Cannabis indica
agatcctggtaaaataaattccaacataggagcagtagtgggtgcttcatttgtgttgtcattaggagcaacagggacattaaccatagtaggatgagtaggaggagcagtaggtgcttcatttatgttgtcatttgtaggggccagagatggggcacgatttggagggttagagtcacaagtaatctctggaataggtgggttgatgatgttttaaatatttgagactgcagttgatggagtagtttgtacaacagtcgtgtcaagcatagtggttggtacctgcacaggcaaagaggagttgcaaggagtatgggtgttagtgagagatgagtggtaccttagtggtggaacagtatggtgagatattgtagagtacatagtgagaatagtggctgagggataaaaggatgacacgacatcaacagtgataggagggtggttttgggaagcatggggaaaaaatacactcatcgaatatgacatcccttgaaatgtagactctaccagattggtccaaacatttatatcctttgtgatttagaatataaccaataaaaatgcatggggaagacctaaactgaagcttatgtttattgtaaggtcttatatttgggtaacaagaacagccgaaggttttgaagctggtgtaattcggagtgatattgaaaagagtttcaatgggatatttatgcatgaggacaggtgtaggcaatctattatggatgtatacagctatcctaatgttgggttttatgccctaaataaaactcattttaatataatcaactttatttattaatatagatcaaaaataacatttaatgt

SEQ ID NO: 331355 - DNA, 855 bp, Cannabis indica
aaaaaaaaaaaaacaaagaaatgggggattaattacatacttaaataatatgtagagaaaaatcaataataataataataattggaaaagaatgtatgtaccatgtcacagaatttggttttacaaatataaaccaataaaggttttggaatccctaaaatacccttgactataattttctcaactggtaaaaatataatatcgagatttcttttatattcatccagttgtgtccattgcttagcaacttcaatcatgaataatgatttttccccaaacttattattttccaatgaaggaatcacctgcatgcaccaaattaatttacaaataaataaataataatttaactaaatatatacatgatatatcaaaatattgaattatatattaattaagcttacatagtttgaaattctttgtatgacaatgctctcatatttttcataatattgatccacagcgaaagacgaaaaccttttacctctttcgagctgagaatgtcgtaaaccattctgtaaaagaaaaataattatatattaattataatgaaaatagtatttgaaaaatcaaaacgaaattatttacttacgtgtatatgttaattttttggtgcatattccaatatcaacatggttgttaggattcattttcacatttattttgtcaattgaatcatctatagcaaccattgattcacttatcattcttttaagcactccaagacagggattcttctcttgctcatcattattattcaccatgattaattcttgattttggttgtaactatagtacttcttgctaagaaaaacccaagatcatatacacaaaatcagatatatatatatatat

SEQ ID NO: 331356 - DNA, 935 bp, Cannabis indica
atctcggggagaaaacgagatttctagggagcctaaataaggccccagtgcgcaagttaacatggcactgggctttgcacccaggttaacatgcaacctggttcacatgtttctgttcctcaaacacgaattctcctccgagcattcttcttaaaattgtaaaaaatggggtaggagaccttgtttgtaatctcgaattccatagaagtattaaaacaagccctgagaagcacctagggcaaaggttgacacctggcttggtgtgctgggttctacttatcagaattcgattctgtttcaagcacttaactattttttcatagtaatagagagctataacttgtgacatgtcaaattcacatgttgatattttaccctttcaacaaggtgggatattggcgaaatcagggagtttcgagtcttcccaattttacaaaatagcaacatctccaagaactagtgaacaacttcatcaaagcattgaatctgatgtgtcaacacatcccttaagcataacaaaaatacaagtttggaacattttggcgtcacccagcatccaggttgacgtcaagatgtcaacctaggcgttgggtgtcaacctttgtgctggattgtcaacctggtcgcagggtgctaaataaccttcaatgaatcagtcataactcactcaatatgaattcgattgatgcaattcaacttgcattttgaagatatttcaaatttctataaagtcatgtctcacacctacattgtaattttgaagattcatatcttacacctacatcgtaattctgaagattttgggtccaaaaattgatgatttttaccaagcgttaattttcaccattggatcatcatgaatcatcattaatggccaagatcagcccaaaataattttttttttcattattttgtatttttaattattattttaa

SEQ ID NO: 331357 - DNA, 712 bp, Cannabis indica
aaataaaaatagataagtaaaaataatattaattaaatgagtattttagaaaacaaaaataaaaaaaaattgcgtaaaaaccatatggtcacgtcaaatcatcaaagtgtcattggatctatttcataaataaataaataaataaaagtggcaaaatatattaagattaatgctcaaaattaatgtgtcctcaaatttgtattgaatttatgtttaagtagcaaaaaagctatatcttatgttattcaatttaagtaaaaaaccaatattttgatgctaactaattttgatattaacttggagttgttattcagttttttattgttgttctttaattgttcagcaagagaaaaattatatatgtttaacttttcataagtgcatataattttgatttagtgtgtaagtgttttatagttattttaaagtttttttagatgttccaatgtattgatacctatttaatttgtatattaaaatagagttattacataattatttatttgtagttatttagttgtacaaatagttgaaaaataaaaatatgtttagccttttaaagtacatgctttaaaatttttttgtgtattgtattgacgtttctttaaggttattttcaacaatattcattgatgtttacttgatttggatatttaagtaatgtaattgtgtagttgtattttgagctgagatgcaaaatgactataaattt

SEQ ID NO: 331358 - DNA, 1559 bp, Cannabis indica
taacaaatcgtttaatctccgtataatattaaaacatcaaatttcgaagatgaaatctaaactcctttatagttttactcatttatggtaatctatcttaacactagtaaaaatctaatttgaagttcaataggtaataataagacaatagagtgaaaaaatagtacttaacttgtcccatctatgaatgagtactaatggtaaaatttggagggttaaaatcgaaagggtttttaatggaaagatgtgtgccttaagagaagttgagagaaactaattttcacctatatggactagaggtggtgttgcctcttatgaagattggacgctattctctagagagcccatgaaatggatgttgcaaatggccattaacggtgcacaagcgagacataatgaggtctctagtgaattctagcaaacatgtgtgtgttatcaccagtttgtattaaaagaatagttgtttaatgctacggcaactaaaatttcaataaactctttggtaactacactaaggtaaaatccaagtcgaaagacattttattttatgcatctaagtaagatctctataagagtgcttaatttattacaatgtaactacactaaggtaaaattcaagtcgaaagacattttactttatgcaaaaagtgcttaattaattcaatcaaagtggagaatatatgtaatatttaattgattaaataatgttacaatggtgtgtcacaagttttaaactagtggaggaatgttatattatattgttataatataagatagattaaaatattaaaatgtgacatattatatattaatatgaaattaatgtatataatgtgattgagagtatacatgtaatattcacataaaatgtaacataagaggtggagttacttacattttgtaacctccacatttattaccaatattaagtgtgtaaaatggtgttacacatcttaattttaaattcttaatgctataagagttatggtgtatgcatgagttacatttgagtccttattatctatgggaggttatgagtttgaatttcaaagtttgtgattataaacactataaatagatgtctaattggttcacttgtgaagacacattttttctgattttctatcaaaaaaaacaccttgctagtaactataagcttgataaatccagaaaacgattttcgtttctttcttccctaagtgcttgtggtaggaaaaataaacttttggacaaaggtgtaaaactttattcaggttttgtgattcctctacttgaaacttagtgttagtggtgttgagattattctcacatctatatttactactatttatattgtgcttttatttattatgtttttgtaattttctcttcattttcttttatatatttatgtgtatattttatcaagttaatattattgttcttgtattttttgtctttgagttgtattttggcattggtctttctattgaagcaccaataaatttccaacactaaggtggcatttggttggaggtagtgaaatggaaaggaaataatttcattccattcctttgttt

SEQ ID NO: 331359 - DNA, 898 bp, Cannabis indica
agagagagagagaaagacaaacaaaaatgaacgaagaccggagaggacctagttggtcttcgtttgagctaccagtgatgggaaagtcggggcttggctatgacgcatcgcataacagaaatgagagaacgttggccatgattatcgacgacgacggactgaccaaaacccatctggttgttgcatccacggaggcaagaggaagctgggtagccactttccaagagaaagaaagaagaggcgagaagaagagagagaggggaagaggcgacttaggcgagaagaagagggaaagttattagagtcttttaatgaaagagaaagaggggtttagaccccaatttattttttttatttttttttctttttatcaatgaatattttatatttttttggtaaacttttatggaaaaaaaagctttagggtttgaaaaaggaaaccgtgccaccttttaatttattatttttttttttcataattaggactgattattaattttttttttaaataaaagggtgtatggtgacacgctatgcgtgtgagcaaatgtgtttgccaacgcgttatgcgtgtcgctaaagccacgtggctttagcgacacgcataacgcgttggcaaatagatttgctcacacgtgtggcacgtctttataggccatgatttttttatttatataaaattataaattttgggttttagtatttagtgacacttcatatttttagtgaccctcattttgggtgataaacattgaatatttacagtctaatggtgtgtgtgttagaaatattttaccaggatctagatttactactttattatttttttgtcttactttctagaaaaaataattccagttcgaaataaaaaatatttcagtaacatatattgcgattt

SEQ ID NO: 331360 - DNA, 521 bp, Cannabis indica
ttaacatttcatattcaacagtgtttgaaataaaaaatattacaaaacaatgctcaacatgaaaataataaaagatatgatatgtaataatatggaatatttctcaatgaataatatccattgatggttataaaaaaaataacaataaatatcaattttagaaatttaaaattatttgattttgatcaaatgaccaataataaaacaaaaatttgaattgttttgcttgaaatttaatttagctacttaaataaaaaaaatatctctcattttatattataaaaaaaataaatttatgtaaaaaatatctaattcaaattcaatttttttatccctctaagcccaaaatcaattaatatgttcaaaatatttaaagtcctaaaattatacactggagttgcacatgctaactaattaatagaaatctacttatattagcaagtgttatgtttgttgaacgataaaaaaaagaggaataaataaatttattatcatttcattattggttttaaaataataat

SEQ ID NO: 331361 - DNA, 597 bp, Cannabis indica
ttaaaattttaaaatgataaaaattgtgttttattctcacttttaaaaacacaattttgaaaactgaaaataaagccaaaaaacctcaaagattttaaaattttaactaaagttaaagagttatataaaacataattatcttaaaatgaacgtggtcactatgcagagacattctcatttcaatttacacaagtgtgctaggtatgaaacatcctatttaatagtacgtgagctcaaagttgagacctcggctgcctgctggcttataaatcttagagataaacttgtttggcattatgaattgaggttagaattttgggctgtgtctcaaaattccagcaaaaataaaagaactttctcttaattggcttctaactaaagttaactttgacaatatgtaactgtgcttttaaaatttgtttcgacatttagaaagttttttagtgcaaatcgtgtgttataattttaagacatcctacgaaatttttagaaatttaaaataatttacaacatgaaaaaagtgtttaaacattttatttcacatgcttataaaataaaagagtcacgtatggaagagactgtttaaatcttgttttc

SEQ ID NO: 331362 - DNA, 485 bp, Cannabis indica
ataggggtttctatgtagaatttcgtaaaaatgcaaaaaaaaaaatatattttgaagtgtaaaaatgaaaaagcctatattaacaaatatatgctttaagtaaaacatttgatgattaatgtttacttgtttattaaaaatagagtttttcaaaattagaggcaataataaaaacaatattatcaatgtaaaaataaaaaacatatattattacaatacaaactattaaactactgcatgtagaaaatatataaatataaatacaactaagataaaataaacataatacaaatagattaatataaattaacataatatacattcatataaaaatactatacaaataaaacataacttgattaaggttgtatgtaagacctctcaaaaaggtattatatatatataataaataatataatttatatatagtaaaaaaaaaaattaaattataccataacagtacccccttcgtcctctctctctct

SEQ ID NO: 331363 - DNA, 516 bp, Cannabis indica
cttccaatttttttttaataaatttaaaacggagcctgtactgacaaaaatagtaaaaattacagttttataaacatttggtacttatgccactaaaaaaaatcattggatttatgcagcttacaaacctaaaactttgggtacttatgccgctatttaccctattaaataataaacatggcccccatattttctttttaataaataaaagttccacgaagttctttattgtttattttatatcactcttactgtctctcttgtatacttataatacaaaattaattggtcaagtttattttttattttctcaattgtgtcaaatgaccctgctgtaaattttctttgaaatatgcggagatggctaagttgttaatattaataatgattgttccacaagcaaatattcataaacatacagatagataagacttttacgaatattagaatatttttaattaaggaaataaaataatattattgattctgataaatgaatattttatattcattgaa

SEQ ID NO: 331364 - DNA, 618 bp, Cannabis indica
acttggggggcatctatacctgtacaagacatttgggaaaataacaaacacaaaaagaacaaaacgaacacagttgcacaacgatcataaacaaagaacaaaattcattaagcataacaaagcatttaaactcgggattaaaagttgctcggtcagccaattgtttgaaaaataaaaaatattccaagtttaaggacagctcggtcgatcatttagtttcaaaagaaggcctactagtcgaacaaacatatacaaaaaaaatgatacacagaagccaactaaacagcgggagtcccaagctcttggtatggatcaactaggtctgacggggccggaggatcatcggtctgaacggaaggagtatcaacattctagtcggtgggagaagtggaagtggtcaccttggggttctcattggccatttgagccatgcagtagtcgagaaatatgtctttagaagtgccaaggtattcaaaattccatttgggattggctttccaaaagtcataaaaaatctcgagactacctgtctctaaggcatccactttcttctcgagcttctccatcttagatttttggctcttaatgtaaagaccgcttagtttaatttagaaatta

SEQ ID NO: 331365 - DNA, 626 bp, Cannabis indica
tacttacgtgtctatatacatgatcagctaaagtttcttgaaagttgggattgtactacgtgtttgcttgtgtacaacctctagtttttgtccctattattcatccacacaattaattccacgtccttttcataagagaagagaaatgttaaaaggcatggccaaacttgtgttaattgccaaaaataatatgatttagtggtcaaggagttttaattgtatctaagatctgttagtaggagattttatttttgaataaattctcactttaattattttagagtatttgttactcttaggtttttaggtagtatgcatgagaaacaattttttataaatttttttatacattttaaaatttattttattccattctcattctttttactacgtttcattccttccaaccaaacgctaaaaggtaccgattatgtctaatagtactcccttcggtatcatattcctattagtatttaagtatcgagtctcgtataatttaaaaattaatttttaaaaaatattgttaaccaattataaaacgtcacttataaaatgtatcaagacattaatactcaataacaacactctttttataatgtttaaaattaaaacgtccacagtaggtc

SEQ ID NO: 331366 - DNA, 791 bp, Cannabis indica
  modified_base (4)..(4): a, c, t, g, unknown or other
tctntcttcttcttcttcttcgctgctaaaaaaaaacgagaataggaatcgtcggtttcacattcccaagcatgtttgactcggccatatcacacctcttcaaacaacaatcatacacacacccaaaaaaaaccatgtcaatacaactctaaccatgtcaagccctactttgtttcccctcttcttctccttcccaaaccctaaccctaaatcgacctaccaccaacccactcctcaaccgacttccccacaacctcaccccctacgtaaaccatggccaccgccttcccacaattcgatctgccatttcccagaccaagaaagaagaaactttcgacacagtcaacgaaaatctcgaaacctgtcagctacaaaggcttcaccgtcaaacaattccaagacctccgccgatctctaccggagaacacgaagctaatcgtagcgaagaatacgctggtctacaaaagcaatcgagggaaccaaatgggaggctcttaaaccctgtatgactggtatgaacgcttggcttttcgttcacactgaagaaataccagccgccattaaaccctaagtatttaaggaaataagtagctccaagacagaggtaatgttgggtgtaggtaaggtagtggccgccggggagggcatgagattgctctcgctggtttgaggaaatggagtcggaaggtcttctaggtcgtcgaccgttgtcgagggttttggcaatttcttgggtcttggtgggtctgatggtgatctgggtttgggggattcggggattctagggttat

SEQ ID NO: 331367 - DNA, 569 bp, Cannabis indica
aataataataataaaactgaaaattattgagagagaaaaaaaaatattgcatcgtgtgatttttttttttggtattcttttgttattttttaaaaagggtatatgctattattagggatattcttggttattgtaatttaatttacgatacaaatatttaagtttaatttccacctcctggttataaatttaatttttagcgttaataatacttaagttatatttctgaaagtttataggtattaagtagttatccacgtattatttttttattggtatatttaaattatttttttttaaaaaaataaaactttaatgacttggactaattagagattgccacgtgttaatttacttaacacttaacagtcaagtacttactgaagtttcaaattacttaagtattattaccgctaaaaagtaaacttagatatttatgctacaaattactcattcatttatcattctctcttttaattttttttatagattggccaataatgttacacattcattgactaagtttactttatctttttttttttttttttaaaaaattaaataattaa

SEQ ID NO: 331368 - DNA, 1205 bp, Cannabis indica
taaaaaaactaacaaaaaagaatacgaatgtgtgccttgcacgtagttgtcgtctagtgtatatatatatatatatatatcactatacaagagtgtgtaaaataatactaattatcaataaaaaaatatatttagtttgtaacttttatgaattttccaaagctaaaaataataaatgataacaagaaaatataaaaataaatatcaattagtaactaaataaattattagtaattatttacattcaataaataattttttatacactttctttatctaataacaaagaaaatacatatatattaattttatatataaaaaaaaagtatttcaattaaaataacatgagtataattaagtagagagagaaatcataaatatttgttatttatgttatttattattaaaaggtttttatcataaataattaattaatttctttattatgtttggaaatataaattttcttttttttagaagtaatattatattatgtttatgtaatttcatataacattattttaagaaataagaaaaaaaacaaacaacaatttataagaaaaagaaaatccattccctcaaaatgtttagttttcgttattttatgaaattatctttttaataaaaagaaaaattacataaacggttatttttaacaaatttattacacatttacgtttatattttcttttacatttttatgggatttataaaaataacacaaaaataacaagaaaataaaaacaataaaaaaataataaaaaatatataatataaatatacattaaaacactatatgcaaataaaattttaaaaattgtaaaaataattaaaattatttttgtaattttttctttgttgattgtttttttttttttaaaaaaaaagggataagggttgtattggggtaagttgaaatatacccgtttttttcatcagttaaccaaaggggattttttaatcatataccaaattaacaaattaatattatagttaccaaataaaataaatataccttatatatgtataatcgtaccgaaatttactaaaaatattcctaccgaaccaaaaaaaatgagatctcacaaatttcaatcaaccaccgtctcctcaaaacggtgcggatcttcctagtgccaaaccatgtataaccatttgagaacaaaaaaaaattaaaaagaaaccttcgactattcaaacctcca

SEQ ID NO: 331369 - DNA, 918 bp, Cannabis indica
ttgaataaaatagattacattgaaatggagttttatttagggcataaaacctaacactgtcttacctgatgtcccaagtacgtagagattccaaatccccggatgctcctgtacaagtgtcggtaatcctagtcacaattcccatgattcacaaatagggttaattcctaaatccactttcacataatcatataattggcattcaaatacaaataaacatacagacctcggaacaagcatttcaacgatattcggaacaccccaaacggagttcagatcaaaaagttatgaacaaccaaagttcaacatgtaatctgcccaaaactacccaggcaggccgcgacactcaccaagcatgtcgcggtttctaggtagaaaaacccaaaattcacgcgagcaggccgcggtacccccttgagcgtgccgcgacacgtgggttgaaaatccagaaatgccaattcagttcatatgaatttcaaggccaaaatacagcaaactcctaccaaatcatgctcaactcaaatagatattttccaattataaccatcaataacagaggctaagaaaaatagaatcaagcttaaattaacatcaatatatgcaatttaattcaagctcctcaagcaaaaaaactagcaacaactttaaaccaaaatcaacatcatccacccactgcacaagcttcaacacaaaacttttaggcaacataaaaacccagaaaaatatcgaagtatatattcaagaactaaatcacaattttaactccaaaaaattcacccaacaagtctagatgcatatcacaaaaatccacaagcctaagcaacatggtgataactctaagatttagaattattttgatatcttcaaacttgaattttaagctaaataatagagtaattagtgtctatattatgtaat

SEQ ID NO: 331370 - DNA, 623 bp, Cannabis indica
tagagatgagatgaacagagaaggagggtgtaagatcgggagagacagcaaagttcatgagaaagagagaggggagaactcgggggtgtcgctggggttgttgccgtcggagctgcggtgggctagggctgggatctttgggcagttggggctgggatcgccgagatggcacctggtttggcagatggaggagagagagaaagagagggaggagacgaacctggtttggctggagaggggggagacgaacctaatttggttgatttggtggactggatttttattgagattataggggaagagagaatgtaatggaagatttaagggaattatttatttaatgtttgttttttttggaaaccgattaaatgtttttgaagaatctttttattattttaaattagattatataaattttaattaaaaatgaggttggactaattatatatttacatgtgtcactctaataattacagtcagcatttaacagaattgtagtaatggaaatagatgaaaacttacatttggtatttaatccgttaaaaaaaagatgtggtatttaagtgtatgtgtaaagcccgcttagttaatttggaaattatcagttaattatgattaattat

SEQ ID NO: 331371 - DNA, 1104 bp, Cannabis indica
tccaagtcctagatttcggattctgggtcataggttcaggttcaggtcttggtccagaactagaaatgggacccgaaccagaaatggactgagacccaagactgagatctgggtcctaggtcctggtctgagtccaagatagggttcgagtctcagttggagtgcgagtcccggtatgtgttggggtccgggtcttgggtcgtggcttgtctcggtctgggtcctagtctatttctcgggttcgagtctcaggtccctggtttggatcccgattcgggtccaggtcccagtcccggtccgggtttgggtcatagttccaatccggttcatgtcccagtcccggtctcgattcggtcgtggtttgagtctagtttgtgtcaagagtcatgggtctcgagtttcgagttgtcggtcaaaggtccgagttcaagtctaggtttaagtcctggtcccgatctcgatccagtttgggtttgtgtctcatttgggtcaagagtcacgagtctcgagttccgagttctcagtcaaaggtccgagttcaggtctgggtttaggtccgggtctcggttcagatcctgatcgggacccaaacccgtaccgagaccgggatcgagacctggaccttgactggaactgggaccgacacctaaaccaaaacttagatcgggacttgaacttagaccgttactcgagacccaaaccaaaacctagacccggactgggacctaggacccagacctggatgggggacctaaacccaagaacatggccccagaacccacacccaaatcaaaacccgtgactcaaacccgaacccggacctaaaccttgacctggacccaggactcaaactcaaacccagaataggaccccaccccatacaaaaaataggactggaacctagacccagacacagactaggactgaactcggaccccaacctaaatttgataccaaaataagacccgaacccaagacacaaactcggacccagacccagaattggacccgaaaccagactcagacccaaacccagactgggatcaaaatccgagacttggacacggaccgttaggttttatgccctaaataaactctttacaa

SEQ ID NO: 331372 - DNA, 706 bp, Cannabis indica
atgtagctagggtttggttttatattaactagtcagttatatgcgttagtttaaaacggacacgtatactataggcgacacttttaaactgtcgcctatagtatacgtggcggttttaaaccgtcggatataaccgactattaaaaattgcgataaacccataaaactgttgtagattgccctcccgagtgttcaaaaatgttgggaaaaccaattttttttttttggcaatttaaaacagtcacttaatattattagcgacggtctccgaaaaaaaattatttttgagactgtcgtgaattctagcttttgtagtagtgataactgttataggataaaaataaagagtagttgggtagttattagatattattccatgtgcatataaaaaaaacgtgaggaatgtccacgtttcatgagcagttgtaagtgaatatatcccaataaaaataactgttaatctatacacatataaataggggtaaaatccatagaaaaatggacgacaaaaattgagagaaaatacattatttatctttattgagaagtagggaactaatccgcgcttcgcgcgggttcgacccaactttaataatattttaatttatttttgtaccacttgagttatataatttataatataatattttgatgtgtatattataaataaaatattaactttaaaattagaaacataatttgctat

SEQ ID NO: 331373 - DNA, 1603 bp, Cannabis indica
agttacagagtaatgaagatgaatgttaccaaaaagttaacaaccatcgctcggggaaagtggccatggcctggcagcgccaccgtgcaagagaaaataggagagagagagagagagaacgggagcgagagagagacaaggaagagggagaggggttggggttttcggggtgggggaaacttgttttctggttcgtttgaaccactagccccggcagtggccggatttgttgttgcacctccgcgctgcacaaagagaagacaaagagaggtcgggagagaatgaaagagaaatggggattagggttttcacttatcattttctatttatatctttcaaatttttcttacaaaattcattttatttatttcattttaataaataaaaatcagatataatttttttattagaaaaaatctgatataattaaatactgaaaatcttatataaaaataaaatgctcacaatttttaattaaagacctcaaattaattgtcaaatcactttttaattaaaaatagttgtctaatttccaataacttttttttttcaaataattttttttgaataactttcacaataaatttttaaatacaactaatttctaaaattattctctaattaaaaatatataaatttcaaatttcctaattttataatttctaaaaatattttttttattttttaaatatggaagttttttagtattttattttattaaatacaaatttcttttattaaacaaaagaaaattacaaattctttcgatttttttttttaaatctaaaacttatttttttagtatcttcttttattgaatacaatttttttttttattattaggcaaaaatctttctttattaaatctgaattttttttgtatattaaaaagaacattttccaacagtttataactgttgggaatactaagtatacccaacggttgtacacttagtattcccaacaattataaactgttggcattcaccgttttcttttaaaaaatttcatttactattgcccacggttctccaccattggcaatagtttttcccaacgattttttttacttcagttctaaaccgttgggaaaaaatctctgcttactttttccaacggttttcataattgaccccgttattaactgttgggaaaagccaattttgtagtagtgttgccttctagacaagattcacaaaacttgtaattcacctaaggtgacattttcaatagaccacttttggttaacctgtgaagtctattatagcctatatgaccaacacgtaagtgccatagatatgtttcgtcttcattatcgatcttttgctttttgtggtttctaggttaagctaccttaaacagtttgttattaagtgcagatggttcatgtggtcttagaacataaagcccctgttccatagatgcaacaaaaatttaaatgtcattagaaatgatagaacaagaactcgaaaaattcaatttgtattgttgcagctttaaacatgaaacataaatcaagtttctactaaaatttagaatgaataagacattgtctaaattcaaaattgtgtcgtgaaacttgagtttggcttttcctttagct

SEQ ID NO: 331374 - DNA, 694 bp, Cannabis indica
tttttaattttttgcagtaataatatataaattattatttttaaaactttcgtaagtacctagccgttaaatgacaagtcattatccatgtgttattttttattggtatatttaaactatttttttcttaaaaaaataatgacttaaaccaatcagggattgtcagatgacaatttacttaatatttaacagataggtacctacagaagttctaaaattataatttaagtattattatcactaaaaattaaacttgtttatttattagcgaccgaaagttaaacttactataaattactctaataactattatttaagtgtgctataagttcttaattaatagtggagatcttttaagtaagagtacttctattaggcattttaaggtatccaacgctataaaatgtgtaggacccgatattaaattgtatcaaccataataatatcatctcttatagtgcttatcacggtgcctcttatcatttatttttaagtaatatatttttgtttcattaattacttatgtcacatccttattataaaaaaaaaaaataaaagatttatatgtgacataactattcaagcttataatcgcccatttttaaggttataagaaaaaggggtaagttgaaaaatgtctcttttattaatcaattaatcaaatttgtctttaattttatatttatttgaaaca

SEQ ID NO: 331375 - DNA, 974 bp, Cannabis indica
agttgaatttatatgatgtagtgtgtgatttgactactattttatggtgatctattctcaacttgcaacgatatcatcacgagctatctaatataaatatataattatatttaattttatgggtttgtttgataattaatgaatgtgtgttgaatttcgaaaacatgaaatgtatgtcttttttttttgttttttttttttttttttaattaaaaaaatataatttattaagataaatccaatattataagagaatttaaaaattgtagacaagcatatgttcatatgtacttttctaaactattaatagatgctgccaatgtgtgggcaaccatttgatgatcgtaatatggtattgcaaaaatcactactaaaagctgctaataaagaattaatatttaataaaatagaccaaaaactaaaacttgagtgaaaattattaattcaagcgattgcaacaataaaatcactattaataatggagatactaagactaaattggtgcgtaagagtcatgtctagtgtaattgcaagcagttccgctacattaatagaaaattcacctaacacaccagacgaccaaaccagccgcaccacaccctcagcatcccataccattccccccaatttgacaaagcctctcttaaaaaccactgaagtatcagtcgcaagagaaaaggaataaggaggaggtggcacctgccgagtaggttgtttttcacctgggcttgcaaagcacaatcccaaatgaagaccccgctgaatatgctctttgaatttcgacaggtgattatgggctaaatctagagcaacatctaatcttgactgcttattagtagcaaaaaatactgagttcgatcatatcaaagcagccataaggtaatcatcatcaattcaaaagcctcacgaggtaacttttgaaagagaaagaggagatttttggcattggtccatatacacattgacagagcacc

SEQ ID NO: 331376 - DNA, 775 bp, Cannabis indica
gcgaccaactatacttgggagcctcaaatacatgttatcttctcctgcttcttgaatccgcatcaaagtacatatacgaactaactttcatcctccgctttattggtttgtcgacattgatccgaactcgaggaaatcacgccaaacacccacaaagttgttaggatctgattcaatgaatgtaccgatgaaattctcaagcgttgtaactacactcagggtcatgttacctgattgtaagttgtgcaattgaacccacatatccaactggttgatctcgacaagccgtgggttatcgcctgaacctaatgtgctaattttgtatctacttgtaatgtattttggtgtatatattttatgtgcacattctctaaaatgaatgtacatctactatggaagagtttttgtttctaaggctggttctttaaaatttgaagaattctttaaagtaaaacgcctagagctcaaatcgacataactttttggattttgtttatcaaatcaatcgacataatcccatctgatattacttatgaggtaaaaactgtccaacaacaaaatccctttgtaattaaaagagatattggcggctaaaccacttgaattttacgttttgtaacacttaaccacaaaatccaaaattttggcggcataactacctaaatcatggttccgttttgctctgcacacctccgtccaaaaatcacaattaagtgccacggtggactgtccacatgtacacacttgtatacgtggcaaatttttagtggtccac

SEQ ID NO: 331377 - DNA, 733 bp, Cannabis indica
aaaaattcttgattaactattgacatggttaaatttttagtagttttatttaattttattcaattttaatattttaataattatttatgtactaaatcatgatctcaaactttaatattaatcaaatcatacttctcgaacttttatttatgttaaatcatacttctgaaactttcatacatgttacaattttttattaaaattgaacaaaaattcttaaatataacaatctcaataattcaataaaaaaaattagtctaatttatacatcacgcctaaaattacacttttttttttacttttacagattttttttttcttttacatttctttttagggaaaacttgattttatttatacatgaaatataattgtgtttgttttgtgtttttatacagttcagttctatatttaagaaattttagagatagagtaattgattaagctaaaagacactctacctatataccagtactaaactaattgtttcaattcaaattttattgtttttattaaggttatttttcccagtctgatgttaagacgagttgagaaaatttaaagaacataatttacatgtaaaaattaaaaaaacctaaatatctcttaatgtatatatatatatggaacatttcttaatggtataataccattgataggaactaaaaaaaattaataaagtaacaatctaataaccttttatgtcaagtttctaacaattattttttaaaaa

SEQ ID NO: 331378 - DNA, 867 bp, Cannabis indica
gtatgctggtaaaactttgacctctttgccagtgcagtttgcgaaatgcgctggtaaaagttacttttaccagcacagtaacgaactgtgctaggtaaaagtgacatttcttgtagtgatatattatgagagaaatgtatgttaaggtgtatctagcatttatttttgaaaagtgtaatatcgttattattaatattattgatgtaatttaatatcgagtctcatttattttattttaataaaaattttaaaaaactaataatcaattataggacgtcactttatagttgtgttagacactttgataccccataactagggtcgagtttcaaatttagtgtaccataagaaaaaaaaaatatatatttttgtatttttcaaaattaataaaaaatatatatttttgaaagggatttttttagactcctagactaggtgagccctaggctgctcgtattatatttatatatatgattaaggaatcattcgaagtatattaatttgttgattaataattttttctatatttgtaataaaatgcagaacaattgatagtatggcagtgggatatgctaaaggaaaattgacatgttttctaggtgatttggagtccattgttgatgttgtaagtttctattttattacataggaaattatatttttatataaattaatatatttacatattttttttctttattaaggtgtttaattgtgtttgttagtttttattttcaaaatataatatcttaaaaaatttaatctagaaaataattgtgtagttagtttcgtaatactgaatatgaatttacacagattccagctgattacgtagtgaatgccatagttgtagctatggcagttcac

SEQ ID NO: 331379 - DNA, 1190 bp, Cannabis indica
gtttttttttagtttttttttgtactttatcgtagtttttttttttttttttgtgacttttatgaagagctagcttgctaggtatatatttccaatttaattatcttaattagaggtatatatatatatttaagaataataataatccacataaacatcaatagccatcaagtgggtattatatatttttttttttttcagttcccaaaagaaaaaaagtaaaaatataataagacccacttaagttgttgtgggactttaaagtgcatatgatattttgattagggtaaataaatattattttggactcttattttataaaatttatttattggattttttattttattaaataataaattaaattatgtattattttctaaaataatattaaatagtattctaaattaattaaattaattttttatcaaaataaaattttataataactcaatttagatgtattattacacaactggttaccttttttttacatctattcgtactaaaaattatatttaagttggttatattaaaaaaaataaaaattaaacttatagtcttatttgtactattttaaaaaatatatagtctattttatcatttaataaaataaataatttttataaaacatagggttcaaaataacattaatatttttgattaattaaagaaattaatagagttgtaaggtactagctagatctgttggtgttcaatattttttgcaattaaattattatcagcagcactctactgttgttttagaaaatagatatttttgttttttttggcaaattaatattatttcattagaagaattataagaaggaaaaatatgattgccattaccaagatatatataaataaataaagctttaataattaatattgtaaggtaggatattttgtgaaagtgagcgcatggttgttgaatgataaaaagtagtacttttttatgatactattttaatttaattgcaaaaaaagttttcaaattcgttattaatatttttttttaatatatgacttctatactaagaataaaaattataataaaccatacctaaattaacaattttttttagttgttagaaagttcctaatattcatgtctttatgtagttttgtagttcaaaagttaatatggtcaattcatgtacagaatataaaaaagttatttattttta

SEQ ID NO: 331380 - DNA, 743 bp, Cannabis indica
tttatcaattacaatgaaacatgctgatgctcaagattttaagcatatattaggttataattaattacaatgcgttgaataacagaaacgaattttggaagaattcttttctcattaactgtttaaaactatacaagtgtttatatacaaacttaatcaagctgaataacacagtatttaagataacagaaagaccaagagggaaactaatcttaacagaataagaatttgttacaactaaaaactaaaactttatcccttgtcagccccctttaaactaaatgtttgagaactcaacacacttagtttgtcttgaagaaagtgaaatgcctattggagataagcttagtgaaataatatacaagttgatgagtagcatgaacatgaaaaacattgattcctttgtttagaaccttgttccgatcaaagtataagtctatttcaatgtaattttcctagcatgtagaataggattagctgcaagcataactgaactttggttatcactttggacacccatcttagtgagcaaagactagatttgtacactactacaaaaaacactattcacgtcggttaacgcaactgttcattgcgttgaccgacgtgaatagtataccttgtatttattcgattgttttaaactgtcactaaaaaagtgttatttgtgactgtggtttataagacggcaataacgaaaccgacgtgaaatccaaaattttaaaaaattaaattggtgtttg

SEQ ID NO: 331381 - DNA, 799 bp, Cannabis indica
agtttctatttcaaaattaattaactatgagagagtaattcatagatcttacatatttatttatcttttttaaacattaattaacaatgtaaaactctctcaaaaactaattggccatgaacaatgattgagagttgaaattatactttcctatacaagaaatgctaaaaaagtattactggggcctaacaccctcctcggtattatataccattattagtataattaagtatcgagttataattaacttaaaaaaataacttttaaaaaatatatcgctacttaattgtaagacgtcacctataaaaagtgttgagcaccactactaaataacaatcatcttattcctatacacaataacgtataactaatatctgaacgatacaataatatatgttattaattcacaatgtaataaatttacacaactttttgtactctcgtagaaatttaatgtgtgatattaatattacagacatttacacctagctaattgccaccatagaataaattaacacgttttttttccaacataccaagctaacgtaataaatgatcccaatatattagtaaaagcattcaaaataattaaagccagcaatttgcagcaagaaattaaaggcaaaaatcagaatcttctatatgtactaattgaacaatagtgaaagaagaaataattaataattaaagaaaagccaaaaatcgaatttcaaagtaataagctttttgacagattaagttggtaattacactaaaaagcaacctatttatttataaataaattataaaaaatattatt

SEQ ID NO: 331382 - DNA, 1022 bp, Cannabis indica
ctctctctctaccttggccgaccactctctctctctctcttcttccttaatatttcgaaacacttagtgattagagtagttcccacacggagtttcaacattaaagattcagagaaagagatccaagttcatatcttgataatactctgggacaggaaggatacaagggttagagatctgaacggaaggagtcatttaattccgcttcacccaatgtaaggtttcctaaactttatatgtgtttagttcatcgttttagaaagttcatatttagggtgttaatcaacatacttgtgtgtagatctaagatcctggtaaaataattcctaacaaatacttctgtctgtttattgatatttaaaaaatagagattacattgaataaagtttgatttaaggcataaagcccaacagtttcatgcatcgaaaatatgtacagcaaagactttaaaatcaccaaaaaaaaaaaattggttcgaactgtattttctagaaaattttaagatttctttattttcaaaatgatttttcatgctaagaacgatatataatactatatgaatgtattaatgcatatagaaattgaaataaacatcgaaaagtgaaaactctaatcagagcaaatacggaccgaaaattaaactttcctgtttatatatatactcgtatataatgattatgctatataaaatatcataaatatatacaataaattataataatcgtaattctatgaaataaaatcagcgaatgaattagtataatatatatagagaaaatacatatacatgaataacatgaatgtgtatatataatatatatgaatatatatgcgcaaatataaaagtatatatataaatgggattatatgaatatgaatttatatattatatataaactttaaatcataaattaaaatccaacgaatgtatatatataaacgaactcaaaaaatataaataaagcagaaataataaccattttgataccaactgttagactataattgttgggttttatgcc

SEQ ID NO: 331383 - DNA, 793 bp, Cannabis indica
cctagatgttagaacaatatgggttgcatcgatgcaccattttctgaggagaaatgctaaaggacactcatggtgcctagcaccattatgaggtgtaatatcgctactggtgtaatttaatattgaatcttacttattttaatctaataaaaattatagagaagcgctaagacgctatgtcatagaggtgatagagacctgtatgccccatagcaatgctctttttgaagaggtgcaccataaaaactccctaaacttttaaataataagtttcactgaattataaaataaacttcaaccaaatttatttttatatttaaacacatatatatgtaaacaaataaaaaaaaaatctaatgaaatgtatattgtaaattattaagaattatgaacaattttaaaaacattcgaattaatttataatggtaaaaatatgaaagaggttattttgaagtttattttacacactcgtaaaataagttgttacgaagctagtttttaacattgtaagctatttagaatttcacaaaaattggtgtgacatcttaaataagtataatatatacttttatataaaaataatttatatgataatttatccaacgtcccaaattacactttccgacatatagttagacgacatctcatgaagttggatctagaagtccaacctattcaaaggtatcaaacgcgggttgttttccatgtttaaccctttcaaagattaaaggcacgcgatcaaagtgttgggttctgtgccctaaataaagtccatttcaatataatcagattt

SEQ ID NO: 331384 - DNA, 558 bp, Cannabis indica
atatatataatatttatatatatacttatcaattcattaacaagtggttgatgagagagagagagaattgcgtaaaggaagtaaactgttgttaacttcactccaataattaatttagataaaccctaataatatttggaacacaatataaattcaatgaaggttattgataaaaaaaaacatacatatatacatatctatatattattgaatatttacatttttaatgtaattatacaatagttacccggttttgagattggatagatcttaaaaatataaaaattatgagacttttattttttaaaaaaatcattgaaatatgtatatttttaaagaaaaaatattttttggtcctttaggttgggtgggccctaactaggcatggcctaattcaccttagcccatactcgggtttgatgcttatatctttttatgaccttctataacaggttactaactggtaaaatttttattattagactcaaaataattataattagttatatacttaaaataaattaattttttaattaaaatatttaataaaacattttt

SEQ ID NO: 331385 - DNA, 1129 bp, Cannabis indica
tagttaaatttgtttagtaaccattcatgggtaatacccattaagaaatgatccatatatatatatatgggtgcactcttaatgagtattactcatgaatgggtaatattagaaaaatttgagtttttatgattaatttttctatttaattaaaaaaatttctcatttttacattatatgggctgggattgtaccattaactgaaaaaaataacaaaaacaagtttttcaacaaaaaaatgattaattaaaaaaattgagtttgatttaaatattttttatataaacatatttttgatatagtgtgaaaagatgtattttttggatatttttttaattaagtagctaaattaagcataaaaatttaaatttctcttttattatcaaactaaatctaatggtttaatatttttaaaattaatatttatagttaaatttatttgatacctatcaatgcgtaatacttattgaaaagtgttccatatatacaatataaaggcacaactaaaatgttgtatcaaggccaagtcatgccctttgacataggtttcgtctctcttctttatagagtgtttgttcttcattttttagcgtttgttttgttgtgaatctccatggcttctagtagtggggttgttagtgaaatatctagaaacaaaatggttagatatttgcttggatgtggaggaggatcatgagactaactttttttataaatagcgtgataatacactaaatatcgagaaaacacaaaaaacaaaatttcaaaaaaactgcttctgggttactgccagcaaaaatggtagactgtttttcagaacacaccctgttgttttctgctacagttttgcaaagcatctcatttcaaaaacaaatctaccccaaatctcaaaccaagcttcagaagacctaattaaagtccaacaaatatacttcaagtgataataacagttataacacaaaattatgaaaacccaccattgttgagcaaagtttgagttcttgaactcaaacttgcttaacaccacaaccctgttgggtcttgtgccataaataaaactcatttcaatataatcagatttactaattaatataagatcagaaatcattattctatgttgcatggttca

SEQ ID NO: 331386 - DNA, 652 bp, Cannabis indica
gcaactttattacaatctctatttacaaatttaattcccgcacatccatccaagagattagtagaataaatttccaccaaaggcacaccccactcggctcgaggagccctttctttgacacaagttggtttgtcacaattagactatcagaactcacgaaaaagggccgggtcttcacttttttgcaccagttaccagccccaacttaactggctaacacttctgccataaaaagtgatctgtagccctctgtgaatattacttcagcagccacaaaattgcctttatcgatcgcggatgacagcagccattccactagcctactggtttttgccgaaagctgcatcacagttcaacttaaaagagccagcaggaggagtcgcccagtattttgccctttgcccttccttcattgcactgtttgtatgagtttgcagcagagtattgtcaataaaatctagagcccaaggaatccagcttctcaaatcagtgttcttcttctgaaaaatacgctggtttctttggctccaaaccagccaactcaaccccaaaaacgtgtcaaacttttgttttgagcaatttggttaacagttctagcttgtcttaagaattcgattaggtcatccatgaatctagtaatgatttacattaa

SEQ ID NO: 331387 - DNA, 1126 bp, Cannabis indica
ccaattttttattattttttaattgctatataatttaaatctaaccttgagagaaatcctatataaggaataagatggttctcattctgtcttacttaagtttacatagttttcattctttgtcagaacactagaaacttgagaacctctctctatagaatttggatctcctcctcttcttcttcattattttcgagccttatagtgaaagagtacatgtccacccatagcaagttaaatactcaatcatagtgtgtaagactatgaagaatcaaacacctgaaggagaattaggctcagatcttgaaaataatctgtgatgaaaaggaaaagggttagagatctgagttgaaggatacatattattccgctataatcaatgtaaaatttcgtgaactttatatgtgtttaaattctattattttagaagtattcatatttagggtgttaaataatatacatgttaataaatctagatcttggtaaaataatccccaacaactggtatcagagccaagttaatgatttactttcatgaaatatgaattaaaaacaatgattatgataatttggatgtgttcatggttgtttatttgattatttgatgatcgcttgtcaattacaattttacaataaaaactatttttagatttgtcctgaaagtattttttttctgaaagtagatgaaaattaatgaatttaggctcttacagaacttaatttgaatttttattgtattagttatgatttttaaaaatttgaaaataaaatatctaaggagacatccacacatgtgcgtgggacaagggttgcacctcggttgtgaccgagcttcagacagctcgtgatcgaggttactcggaaaagattttgtctgaagcaagcaggtgtcgagctccctcagttaagtaccctccattgcaacctcttcccttgcccatctcctccgcgcgtgcggggagtatgggtattcgcggtgcgggtgggacagtttttgaccatttctttaaaccaacccgcatatgtggtttctccaatttctcaaactgcatctgcatcgcgaaactaaaaaaccgcagaaattgcaccgcaaaaaatagtgcagtgtggtgcgatttttgtggtt

SEQ ID NO: 331388 - DNA, 1050 bp, Cannabis indica
tgcatggatatatatatatatatatatatatttatattattttttaaattttgttggcatagtttaattaatattgataataattaatatttatcatgagtcgttctcatacaaataactctagaaaaagtacttggataagcttcaattctttaggggtactttaacttctcgtccacattataataagttgcagcaatttatgttttacatgaggaaacaaattaaattaactaaactatgatttaattgctagtgcatttaaaagtcaaatgattttttatcttatatatttatttttaattaatgctaatttttagtcaagacctatatctatatctataaatatatatctccatataatttaataaactgtcgaattaggcaatttgggtccgctatgattaataatgataataagaaaatttaataaaacaattcaatcttttaatttaagattaatccaaaaaataaataacataaatgaaaaattattaaacaatatattctagtttatatatatactaggctaatattacgtagttatattcttagtttttattttaattatgtatatttttttttttatttttagtttatttatagtttgtatacttgtttatttcgccatttttattttatatttgtccatgtttgttaaattagcaggtctgggattacaaatttagtccctctgattttttacagatccaaatgtgtttgtactagaaatttctctgttattgataatataaagaatactttatctgtgaatttgttgtctatgtttcgtgacgcccaatttggtcattttctggatatacctgattttgttttccacccccaagttgtcaatagcctactgttgagggaagtgtaccagcctaatccaaaagaattttgggctaaggttgctggccgttgtatacggttcagtgtcgaggagttttatttgatcactggtattgattgttttggtgattgcaacaaattgttgttttcccaggaatcaaaccagttgattgaggtttatttccgtggtgtaaaaat

SEQ ID NO: 331389 - DNA, 1075 bp, Cannabis indica
ggattacattttccttctaaataaaaataaaatatacatttaattactaagttttaaaatatatttgtatcacgtgtattgaatttttaaatatataaatatgtgtgaattaaattgattacgtttatatatcaattaatgtctaatctgtataaatgtgaatttttagatttttttagtctaatataatccacacaaatacgaatatttgcactttgtagattaaatatgattgattggtttaaattgtatatttgatgaacactcctactagtttagaggttgtatattcacatatatttaggtggtgatcaaatcaattattagattagatgtggtcttcactcatttaactattttaattcacttaattagtatcattgtttctttggttcaattttgattaaggtaggaacaatatatgatgtgaaaaccattatatatgctatatttgtgtgttgatgtgtagtccacacatattgttatcaaagttatgttcaactagtcaaagtacacttgcctaattgtctacttgtcaataaaaggagcaagatatatccctaaaaaggaaataataagcaaaagcataatgaatctcattatagtgaaacatttattaaattgtatccccttccctatttctcaccctcaacactttagattatatgcattcattcattcaatgtaaatacattcaaattcattaattgcttttaaagaaactttccaatccataaatatggttttaagagtgaaaaaagaagaagcaaattctatatatatatatatttttctctactcttgttattttttttaacacattaagtaaaacaaaaaaaaaacaaatacatatatataaataaacaatgactacacatttaaattatacaatttcttataacatgtaattaattaaaccatataattaaaagtgatatgattgatatgttgggttttatgtcctaaataaaactccattttaatgtaatctattttattcaatatcaataaagaaacaaaagtatttttccattcatttgtatgttttggtttatcttatcaattgcttgtctat

SEQ ID NO: 331390 - DNA, 759 bp, Cannabis indica
ctctctctctctctctttttgtcaatcgaagcagcgcctctttctttctcttaatggagctactactctttttctccggtgacaagcaacaccctcactctctctccctcatcagtcctcaaagccccaatctctcttctcaagtcgactttttgttgcctaggacgaagccccgatctctcatcttctcagcgccgcaccacacttctcttccccctctttatttttcatcttgtggaacatctactctggccagatggccctgcttcggtgaccgaccacccaatccaccaaagattcagaatcccggccctcaaaaatccgaggtaccctctatgtgtgtttttttttttgagaaaattctctatgtgtgttgttttgtctcactttctcagatttattaataatataaaatagaataaaattaaatataacataatataatatatatagagttgggcttgtgcctgttcgtagatgcagtaggcacttcgagtagagctcaccagcctccgcagttagggtttttttgcttccattgtttctttctctctgtgcaggtggactgaggcgatttagggtttgttgccaaggatagtggattgggtttgtggccgccgtagttagcgtttgttgccaaggatagtggattgggtatgtggccgccgtagttagcgtttgttgccacattttgtatatagatctagattttcttgtatttgtgtaaaaccctaactagcataggcgtattacgtgatt

SEQ ID NO: 331391 - DNA, 1210 bp, Cannabis indica
ggtcgatccttggtagtggaaagcagtcctttagacacgccttgtttaaatctaaaaagtcaatacaagctctccaagttccatttggttctggcacaagggcaggattagatatccacgagggatagaatacttcgcgtataaagtcgttagtcaacaacttatccacttcctctttgagtgccccttgtctttcaaaatccaagggcgcactttgtgggattttttaggatctaataacgtccaatccattggttttagcaggtttttttcatctcgaactcgaggatctagatcctgatcctgtttcttgcctttctccattatgacaaccattaactgatggccaacatttttatgctgtagctctattcgatagcattctcgagccagtagttggtcacctcacactacacctatacctgccgatgtttgaattttaaagacaggtgtttgattgaactaactgcccatagtccaattagtgcaggacgacccaacaatatattataggccgatggtaagtcaacgactagaaaatcttgcatcaatgttatggatataggtggctcgcccagagttaatgggagcttaataattccttgactggtgacactgtccctagtgaatccgcataaattcaccatgcaaggtcttaacgttgcattttgtagtcccattttctttagtgtatcctcgtaaaggatatttattgaacttccattatcaaccaataccatttttattctcttgttggcgagctagattataatcacgagtgggttgagatgagggtacctcatatgttttgtgtcttcctctaaaaacataattaggggttcctcagtcttacctttctttgacggttctggagcgaaagttgaccggtcattcttgatttccttgacatatctctttcgggcattgctactttctccagcgagatgtggccctcccaagatgatctagatatcctttccttctacaggaggaggttgtaatctttggttgcctgggttattgggtggatttgtccattgcgttggttctttacatattgctgaaaataaccatgcaagataaggctctctatctcgtctttcaactgacgacattcgtccgttgtgtgccctatgtccttgtgaaatctatagaattttgttgcatcccgtttgtgcctcgcatgtctcatgggctcaggtttgcgaaa

SEQ ID NO: 331392 - DNA, 777 bp, Cannabis indica
aactcgggacctggacctagaccaagattaaaactcgggacctggacctagacccagacccaaacacggaactggacccagacccagacccgagacccaaacctagactcgaacccagtcgcagactgagattcggagctagacccagacctggacccaaactcagatcaggactcagaccctgacccagacctagaacagtacccaaacccggacacataatcggaactggaactaggataaggacccaaacccaaacttggacatagaccgggacctaggactcaaacttggatgggggacatagacccgacccctgagccaagacccgaatctgaacttgggactcaaaccatggattcgaacccaaacctggacccggaacatggttggaacccagaccctaactcggaccagactcagaccaagactcaaacatttattgagacctagacttggaccgatactcaggctggaacttggactcagatcgggactcaagatctcaacctaaacctaaacctagacctagatcgagacttagaacacaaacctggatgggggacctgggccttggaactataactgaggcctgggacctgaccccaaacccagacacagacctaggacctgcatatttggactcgcggcttggactcgacctgtagtcggtgtctaaatttgggacatagacctggactcgaacccaaacccgaacttcgacccaaacctagacccaaacccgaccccgtgacctaaaactggaagcaaaaccaa

SEQ ID NO: 331393 - DNA, 759 bp, Cannabis indica
gcaaatggtctgtattccccaccccaatcagactgaacacttttaataggcaaattaaattgtttctctaccatgcttttaaattttaaaaaaatatcaaaggcttgggatttgagagtcaaaggataaatccaagtgtacctagtgtgatcatctataaaatgcatataatattgatatccttctcgagatgagacatgagaagggccccataaatcagtgtgaattaattgaaggggttgagaagcatgactagaggacaaagagtagggttgcttgtgactcttgcctttttgacatgcaatacaaaattgtaaatctttgacactgccagaatgttgtatattttgtaaaattctgcttaaaatagcaggtgaaggatgccccaatttttgatgccaagtattgatatcttgtttaaaatttgtgaaagaaacagaaggggaaaattgagaagaatgctgagaatgagtttctttattgatatatgagtcattacaaggctgcactgtgtcaacagtgagtttattacaagaacaatgacaagatttacattctggtacagtgataggctgagaaaaattggtaagattacactgaagtgtgggagaatgttgacttgagtcaccaagcacatagaggccatccttaagtggtcctttgagaaaacagctccagtgagtttgtccttagacaaaactaacaatttttgtgaaattcaagatacacatgattgtcatgagtgagcttagacacact

SEQ ID NO: 331394 - DNA, 1044 bp, Cannabis indica
attagatttttttaccacaagagtagagctcatgagtatgtgatatcatgatcatcattagtcaatgagagaagatttgaagatgtcctagggcagaagactttggcttaagaagaatataccttatccacattagattggatgtaagtatcacttagattctctaagctttgatagagttttcctaaggtaccaaccatgccaatatcggtggacaagagccttatgatggtaccaactggcatggagagaagagagaagagaaaatcagtgaagtattttcctccttcagcaaataaaacccttttctcctttgtatcgattaacaacttgagtgtaataacattttgactattacttgtgtttgcaatggctgcttttcttgattttctctttctgtgacccaatctcattttgtttacacttttatttttttttatgattctagatggcttcattttgtttactctctatgtgagtcagagttgagactaatatatagggctatcaaatttgtggtttattataattatttatttgaatattggagatatatggttcatttggatcgactaattaattatttttctaaaaaaaataaagaaaccctaattaattagctttatgggaaatgatgtatacattaagcaaattaagtatctcgaaaaagtgaagagatcattcatatatatagagtctcacatatccacaaattaatattgaaaaacgaaacgacgtgcatacatgcatgcatgcatttgataattaattaatacgcgcgcgtgaattaagaattataattatagccgcttccttgtttccaatcaaaacaaatacttctcgaaactctaattagaaaatttcaaattcttacaattaatatgcatatatatagtaccatcacgaagtcacaataaggcctataattaataaaggaagaacagagaagaaataaacttttctaaaaaaatggcaaatttggtcaaagtgttataaactgaagcttctgatcgatacaagtagaagaagagtgtgtatggtgag

SEQ ID NO: 331395 - DNA, 514 bp, Cannabis indica
cttcttagccaacatattagcactttgaatatttgaaaatccatccctattaatgctcctaaacacctgcttaagggattttaattttgtcacaatcttgaatatttcagtaccattaacaggttgattccaagccttttccactagctgcttataatgtggatcagcctccacattttaaaatatttgaaaggcctttttccagtaataagtgtcgagtagacacttaaaatgtcaagggaatgatcgaaaagccctcactttatcagtcttagaacatattctatctacgccttgttgcttgttactccaagtatagtaattatccgtatacttaacatcctctacttggaaaaacgacacacattgctgaaattcaaagggtagatatctcaacctatcaccaatgctttcttccttctctagaatatcattgaagttccccgagattagcaatggatctttttgttgggttttatgccctaaataaaactcatttcaaaataatcagatt

SEQ ID NO: 331396 - DNA, 913 bp, Cannabis indica
aaaattaaaaaaaaattaccattgtaacacactctgaacttgcaaacggagaaatgacaaaagagaaaaacaataaaatatataattaggcatggaattaaatgacataaaattacaaaaaataaaatccaataaaaatagtgatgaagtagttgaggttaagagaataaaaaacaaaaatcaacttcaaagctctgttttttacttcaaattcctcctcttcttctcgagacagagtagatactgttgggattcaaatctctgtgtttcttgcccaatatttctttctccttgctaaagaaatggatcaggaagaaatggggagcaagattcaatctgtcgaaagcattattcgctctaaaaacggtagagaagtagagcactaaagaaattgggactgttttttttttagggatttaggttttttttaatatctaaaaccgggccaggccaggcccgacccaaaataatatgtactgggtcgggcatagagcccgataaaaacccgaaatgattgggccaaagtctccctgtcgggccaggggcctgacccggtttgcgaaaatggcccaaattgccattccttaactaggctttccaacttatacagttatgatttttcaagaaaacataggaagtggttgatttcctggtatctctatttgaggcgtagtccgcatccacgaaccctttcaacttcggtcagaccataatcccatgtgcccttcaaatatttcaataaccatttaagggccttccaatgttccatgcccggattggacatgaaccgacttaggatgcttaaagcgtgagctatgtccagtctcgtgctcacaatcaagtacattagacatcctagaacaattgcataaggtgttgggaattattttaccagaatcttagatctactcac

SEQ ID NO: 331397 - DNA, 1346 bp, Cannabis indica
  modified_base (1287)..(1287): a, c, t, g, unknown or other
ctggtgtcaatcgccacttcttctctgctgcctgggagtcgtaatacttccgtctcttcctcttccagaggaatggtttctttctctacctctaaaactctcccctcactgctactagatgccatcatgggactaaccaccagcagaaacaagacaaaacaacacaaacactcagaacaaactctcaaaaaccagagagacagccaaacgtatcaagagatacgacagatttcatcaatgttaaaattatatgtcccactttcattttaatttcattttgttgaggaaattagtgataatttctaactattttctacctgtgactcagtctacaagatacttatttagtttgtgataaacttaatatttttaattctttatatctattaatgatgttgattttgaaataataataaaacaaaccatttgcaaatactctactctactgtgggttatgctatttacaaaaaacttgacctacttttcttgaaatagcactttctaagattttgaataaataccattttggattttgtattttgcaaaagttattaattagattctctgttttgttaaataataaaatggatcccatattttctaaaatggtaaaaataagacaccgagctcaatttttaataattttattttttaaaattaaccaactttaagacactttttaacacgaacaaatacagaaaatgtaataagttttgttgattagattattattaagttttattttgacaaaaatcagttcagggtcttatttgtacaattttaaaaaaaaaaaataggatttattttgtcatttaacaaaatagagagtaaattagtaacttttacaaaagtccaaaatgatatttaccctaaaatttttaatggtccacatttctttttttctttttttttttttaaaaaaaaaatacttaatgtcttgaatcttttcctagacttatttttaagaatgaatataatgattttgatttttttttttattatttgtaaaattttcacccaagagaagtctgaaattttgattgcgctaatgaatctgattaaaggagagaaacacttgtttcatttcgacacgaagtctttcagtaactagagaattttaatcttggagttttacccaaacagataggtgcattcaaaacagatggtatctacaaaaatgttatttatatgtattctcctaagcttgtctaccgatcttgtggagtggctgtgaatttggaggcaaaactaaaaaagattccctatatgtgcttgtagtttttgtgngttgtcaagggtaagctagaccttaaattcttggaatcttctactatttcaggattatc

SEQ ID NO: 331398 - DNA, 670 bp, Cannabis indica
tctaaatattgccattttcaagcctttggcctcctattcctcgagaatcttgttcacaatcagctgcgaaccactatggcaaataagatttttgacattcaatgccttggctatctttaagccagcaatcaaggcttcatattcagcctcattgtttgatacgtcaaattgaaatctcaaagcataatgaaacttaaagccttctggtgagattaatattacccctgcacccgaatcgttttcgttagattcaccatccacgtacaacttctaagtttccgcgtctcggtgaacaggaagaatttcttctggagttataccttttgttaaaaagtctgccaaggcttggcccttgatggatgttcgagggtggtatgctatgacgaactgccctagttcaattgaccattttatcaatcttccgaaagcatcttgttttgataaaacctatcttaagggctgattggttaacacttttatggggtgtgcctagaagtacagtcgtagcttgcgagacacgtgataggcacaaaagttttcaagaggggatatctagattctacccctagtaactttctagttatatagtaaataggttgctggtgcttaccctcttctcgcactatagtcgtactaatcacatattttgagatagccagatagaggagta

SEQ ID NO: 331399 - DNA, 874 bp, Cannabis indica
ttttagttaaaaaaaaaaaaactggttaattacatgttacaataattgttacatgcatcaaggagcaaaatttgttacataacatgtgaaggagcaaccaagatagatattgagatcctagtccaatagcttacgaaaaattgatatttgtcatcatcaccataatgaaaagtaatgtttgaattaccttaccactaccaatttgaggggaagggaagattaccaacttttggggcactatatgagacaatctatagacccacaaatatggtatttttgaaagaaaaaaaaaatatcgtgtaggctagcccaaaaccgttggcacactacccaaacccatccgcacaaaactcgaattcaaacttgcttaaatttatgtggaaattgtattgtatacccactttattttatttgttttgatttttacctccatttctatattctttaagatatactcacttttatagatagtgtccatattaaataccttagattaatgttaatcatgtgctatactgaagtggaggacaatggtatattaggcaatctattcacaaaagcgggtagattttaatgaaatataatataagagtatttttgtttaatggatacaaaaatgaggtatttatcaacttgtccctaaatttatacctttttgggtgggttcagtacacacttctccacactccaaacttgcaaatcactaccaagaaagtctacctttactttagtgataatattttagtcataatataattttttgggaaatttacaaaaatactggaatttgggttaacttttacaaaaatactgtcacacggaatttttttcaaaaatactgtgttttataaacaccagtaaaacacaaagcagt

SEQ ID NO: 331400 - DNA, 870 bp, Cannabis indica
cctagaccggggaatccaagagactgaggccgacaggatacgatccagaccatccaacacccacgcaaacactcctgcaaccctccaatccagagtctttcgcgacttaattccatgcactaggggttgacaatccacaacaaatgtgacattgtgccatccaagagtgatacaccgttgcacagcgtgaagtagagccaaagcctcagcttctaggggcgaaaaagcctgaagctgaacagagaaggcttcaacaaactcggcaacagatttggttacaatgatacccgcaactgatctaagatctttgcaagcagcatcaacaaagaccacaaaatctccctgcagcaattcctacatatcattataagtagagttacccagagacatctcctgatgggtagttaacaccgaattaagctcagctaccaagctcttaatccgattaaaggtggtgaagaaggatggttggacatgatcatgatatgcttggttcctagctgtccaaagaatgaagcagagagaaattccaaatttcctgaactcctccacctcaatgtttccttgctgcatcaaagggataggctcaagcagccacttagtaaactgcaaaggactgctgaagttcaactcttcactccggaccccccacggacttgccaaccaaagagatttagcgagagggcaatgacaaaatagatgaaccgccgagtcttcttgttcatcacagatagcacacaccacttcgttgccaaagatacgttgaagtctttctccaaacggtaggatatcacgtccaagtttccaaaggaagagtttcattcgttccgatatcttaagtttccatattttaccccaaataggatcttt

SEQ ID NO: 331401 - DNA, 1485 bp, Cannabis indica
tgagtgcatgtggtattatggtcttttgtactacgaccaagatcatccgagacagagttttatatgttaaacatggtttacatgacttgatgataggtgtatgggcacctagttgcgggttggctatatgtttatgttgtatgtttatcttactcagtttgttgactaatagtttgttagaagttgttttactaagatctagagttactaacaagtatgtttgattatattctataatctaacaccctaaacatgaatttcctaaaataatgaattaaacatatatcaagttctagaaaactttacattggtggcagcagaatattatggccccttctattcagatctctaacccttgtacctttctgtctcagagtaataacaacatctgaacctggatctccttacagtgttgaaatttttcacaatctttcacactatgattgagtactgacttgatatgagtgggtaaggtactattatcattatatggacgaaagttagagagagaaggagagaactccaaaattagagaggagcctctcttttctattttttgacggaataaacttttgaagagttatcaggttatgagtttgtcatgttctatttatagcctttcatctagagttaagtttaaattatatggaattaaaaaaaaaaaaagataaaaatggcttaaaatcactcaagtggccggccactattgtggaccccactaaattttaattttggcatttatataataattcatctttttctttcataaatatcatattttaattttaaatctttaaatgtcaaatctatttatttaataattatacttaattatcaaataaaatttctatttaatttatttattaattagaccttacaaagtctcttaattaagaaataaacctaaaacctcttttcttctcaattaagttcatccttagtgaaaattcataaataagacaatctaatttagaattctaattggttaattaaaacttattaaatgagtctacaagccaatattatctcaactaatgtggggaccatgtgcctatataatcaagcttccagtagtagatctagaatttaccgagtaaattctctaacttattaattcctcctggctctactatagatttggaattgcactcttaattatatagaacgttgtatatatattctaagatatagatatgctattaattatctattgttataatccaaataattaaagatctcctatacatgatttacaccgagtagggacaaatttaccattctaaccctcaatctattttatccttaaaatacttagcttcttataagtgatattttaaaaaactaatatattactgatataatagctcctccatttatctctataagccaagctcgaagaaaatcatcatttcacttctatgtcaagtaaaagctatagattatgtatctatgattagtgctcccactcaattgtactataatgtt

SEQ ID NO: 331402 - DNA, 865 bp, Cannabis indica
gaagcccaaaaccatttctcttttatatagttatagataacatgctcttagtaatgttgctcgcatacatttgtatatattataattaaaaaataatattgatttcgaaaattgaatattacactgtgatgactgatgatcggtcgcttacattatctattgaaaataatgtcacattagaagtttgttaaattttttaaacaaggtctatttctattgttttaaatgcttcagaggaaattatgctacaccaaaaagtttgaaagcacaatttatgggagtcaaataaatagttatttgtccaatattggaaagatgctaagaagaatgaattttactgaaaatacctctcccatataacattctgttattgttataatttagtattgggtcatacatattttaatttagaatataatttatgagacctaatacttattgtaaatcaatatcaaaatggtatttgaaatgtactataagatgacgtttagttgaaatgaatgaaaatatagtaataataatgtgttaatgcaaaatgaaacaactaatgacttacgatatagtttacaatactaacaaacacgcaacacaatcaagaaactaaataaacagtgatctcaagaattcaagataataaattaagtagtaaaacaaaaaagaacattaggtttaacgagttcgagccatgggcaatgctctacgtttcggctagaatagcagcaaccattgagatgcaaaataaccttaaatttagaaaccaagttagtaaatgtgtctttttttttaaaaaaaaattaaataaatagtcaaatataataaagtagctaatcaaaatacatttactatatattaatttttttttttt

SEQ ID NO: 331403 - DNA, 1581 bp, Cannabis indica
tcaaagcacttggcgcaatgcttacaagagacgggggtcaggagctcatctcttttagccttcttcaaggcctggtctctgaagtccctcagctccttcaactccacggtcaggttggcattagactgtaagtctgcctggtgcaactcctctagggacatcaccttggcaaccatttcgtccatggcttccctggcctcctgaagcttgcgtctggccatagccacggcctcaccctccatcttgagcgcctcctggtgcctcgcctccacttcggcctccctctgcttggcctgctctcgaaggtttgcctccgctagagcccccctccgttgagcgtcctcctagaatgcccaccatttggtggacaagtctcgaaggatcctcatggcctcgtctatgcccccaaattcagacatgacgaagccatggtcaattaaagtcttggaaaggcggtcgatctcagtagtaatctgaaaaaagaaacaaggatgagatcagatgcctttgacgaaatatcaagggatggaataaattacaaagtactcaccgcggccatggcagagctaatgtcttggacatggtagatagagttcagagaggcgcacgcagcatatcttttaggcaggaattgcgtcaggtgggagacgaactggctagtcatctccgaggcaaagggagccaaggtgggcccgacaaagcggttgaaccagtccgtcagtggatccatgtttaggtcccacggattccggaaggcatcctagttaagagtgttccgctgctcctcccacaaaattctcttcaaggcctccacctaagcatgccccccgctgtactcgtcgagggcgtagttgtgcttggccacgcggagattttgcctctcctcatctgtaggaaccggggtcaacactctgccgtgtggcacagtgtattcctccgcctcggaaggaatcccggagtcgttgcttggcgccggagcgtcccccctatgggtccacttagaaggttccgcctccaccatcttgccctttcgcttacgctcaagggcggccgcgtccgccacttcaccttcttcaacttcttcctcctcgtccaccaagacgattgtgcctgaaagggcgttggaggaggacctcccgggagtaaccaactgggacgcagccggaggcggagaagcatcggggctgtaagcctcagcaagagtagccaagagattgtccatgggcctggcttctccaacaaagaaataagttaagtgttaggacattcatcagaacaacataatattagcaaaaaagcaataaaactagtcctaccctgacactctaattcggccctagcaaagtctcgaatcaggacgctggcttcatcatccccgagataactgttcgagggaagaaatcagctggaagatacgtagggtgaatgatccaaaggaataggctgtttggtttcatgccctaaataaaactctttacaatctgattagttatcaatataagaaaattgaagtgattgatgtttgcatgaattctacatgctaatggtttaaatatgtttattacatttacacacaaaatc

SEQ ID NO: 331404 - DNA, 964 bp, Cannabis indica
aaagagcaaaccacaaaagaacagcaataatcaacaatcacagtacacccttcaacactctccaatgaacaaatatatcaactctaatacaaactcaaaaacagagaaaagttcttaaaagtgtttctaaaacgttacattacaaaagaattgacacaacactgcacacataatattttcaactgtaaatgctaaggaatgcgtttcttctcttattcctattcaggagtctgtgaagactgtctggaaaaatgaattctatgttaggacaataaacatccattcactaaatttcatagaaaacaaaacgttcaaaaactttatttgaattgaaaaatctttattaaccatatctctgttaccaaacaaggtaacaattcagttagaatagacactaaactgaaacgataactcggagtacaaaatagcaactttaacaaagctataagctattacattaactgaccgcttaataattgtagcataagtattaagctcaacctaacaagaaatgattctagcaaagtactaaaatataaaatcaatgaatggttaatttagatttttatcttctgaactttaacatactaaatcaagtccttgaactttataagttgttaaaattctccttgaactattgagattgttggatttaagatttttatctaattttactaaagaaaatctgacgaggataaaaagtttgggagcacaatttagtatatgttaaagtttaggaagtatgatttggtaaatatcaaatcttagagttacaatttagtatatagacaatcattacattaggataaaaatccttaaatcttataatttcgataattttatgagaatatttaacgatctgaaaagatctgaaaaattcagaaagtgtgatggtaaaaaatcctaattaacctcaatgaattgatcaagattttaagctgctcataaaactgtttccactact

SEQ ID NO: 331405 - DNA, 1197 bp, Cannabis indica
ttttttttttctttggataatgaaggagaaggaaggaggggctgaaattaaaagctaaaaaaatgtgcatgtcagtatttttgtaattgttaaaatttaaaaaggtataaaagaaaaaatgagaaagtgtaaatgtaaaagttttttttctgctaatataattgtaaagtttaactaaattttggtgtgtggtgtaaaaagaccatttacaaataactatccaacttcaaattttggtgggaaaattttttaaagtactgttccgtttgtattttgaaggtgtcgtttgtccaacctcgttaactctctattttgcctacgtggcaatgacaaattatccagttattggccaatgtggccacatttagcaagtaatatataaaaataaaaaataaatacttaaaataaataaaaattataaattagatactcttctctaaaaatctaattaacataattcataaataaaacttaaaactaaaaaaatagaagtgaaaatcaaaatcacaaatcaaaatgaaataattagaagaaggagatgaacgaggaaaagaagaaggtttgggagatcagaagcaagaaaccaaagacgaagaagaagatagtcgagaccaagaggagaggaagagagaatgagggtcgaagcttgaaactagctggaagggggatgaaatggcatttcgaaggcggaacaaggatgatgtacctcatgattacagtaagtgttcatcttaactcctcctacttttgatttttagggttttctgttggagaataatgatcccttttatatgataatcttggttggtggtgggttagttgatcaagaataaaagtaggtgtggtccatcagtaggtgtttattaaagttaaaaaatttagggaatcttagcaagttgtcggcaagacccaagcttgtttaaacaagttcttcaacaaattctacgaacagtataagaacaaaataaacactaaaacctagttgaacactctaggttttcacaaaagaaactatctcctaacaaagatgaaaatatgaaaaatgaagctagaagatgtgagatttatttggctgctctctaggtcctatttatagaacatagaaaccctagacaaccacaaacgcaatttcccaattgtacaaaactttcctaaaaaattctctaatttgcagcatctaaatcgaactctgcatca

SEQ ID NO: 331406 - DNA, 1256 bp, Cannabis indica
aaataaaaaaatactctcagctaaataaaattacaaaaatactctttcggagttagcggatattacagttttctaaactttatatgtgtttatttcattggtttagaattcatattaggatgttaataaaacatacatagtagtaaatctagattctggtaaaatatttccaatagtatttctccttacggatcacgagactactgattgtcacacagataagcattagataagtttgtaattgattatctcgtttccaaataaaattttaatatttaagtataaaaacatactaaaatgtactcaccatttatataagacatacctgccatcataatacttgatattatataagatatgttttttataataaataacattaaatcaatacataatgagagcattatctttccaaaccatggtatactagaaactaaggagatcaaaattcagttgtacgatcaactacaaatttaagagtatgaaaaaggcaaaaaaaatgtataataaattaaaaagaaattaaactatataagaaatttaaatattttcataaaggggactattacagggattgggtaaaatacttattgatagggatagtaatttataacatttgatttaatctaatagttcaaattaacctttcaaaactacaccataattaatatatttatctatttataattaactttgaatattatgaattataaatttaactaacaaaactccaaacctaactccaaactataatgtttattaaaaatttaattttaattatatttttttcaattttaaatttataatattttaattaaatttattttaaaataataattatacttatagaaaactataacatgttcaacttataataatcaatataagtactcttaaaacaatcaaaacgtcaagagttcaatcctttaaaagtaatattatatttctttatttatatttaattaaaattttaattaatttaataatttcaatgtataattatttactttaattacattatttatataatcatgcataaaatattaattaattatttacttttcaaaattataatgttcaatgtataattatttactttaattacattatttatataatcatgcataaaatattaaataatacatattcataatattattttttgttcaacttagttcaatgtatttaaagtttttaaatattaaattaattattttttttaataacacttatatctatataaattatgcatgtac

SEQ ID NO: 331407 - DNA, 1450 bp, Cannabis indica
ctatcaatataatctaataggctccttaacatgcacaccaaacatgtaaatacatatgcatatcattatactaatcttacctcatttttgaattttggtgtatcttccaacctgaggggaacagatgctcgacgaattacaggccccttaatcacataattcataaaactagtcagtgacaagctaaatcactttttggggacttaaacttgaaacttaaagtttatctatcgatgaatatcatggcaataccctacatattgaaaaaagggaaaaactagggttcccaaaaatgccccaactggtagactggttccccaaccagaattccagttctgtggggtttcctggggaccaaccggtcgaccggttcctacaggtctacctgaaccagaatttcggttcagtgtaagaatcacacaaaaccccattacaacctcaaatcaaacccaaaccacaccaaaccttctagacctgcttaacataccccaaagaacataaaccaagcaacaaaacatcacaacaaaaaccaccattaaagagtaaagcttgagttcttaaactcaaagcttgctcaaacatcacaacaacccataaacctagatcaattcaacataattaaccttaattgaatttagaaaacataaacaaacaccactcaacaacacagaacccctactcctaacaaacatgcataaactgacataaagcttagaaaatcaaagagaggagagaactatgatgcttaaacttggatgggaacactaaagactttttggaaactccttgaattgagaaaaaaaagcacaaaccctagctggttttctaagcagctcgagagagaggaagagaaaggtatagttcttgacttttctatttaatacaaaatgattaattaactgacattcttgatctaatctaactaaagtaagggttaaaatcacattattaaatccaattaaactcactaaaagacaaaaaaaaaacccttagcaaaaagatcattttaccctcataactaccaaaactacacacctgtcacctatgggtattttggtcaattctaaaatctcgactattctcgacattctcaatgtctaactaaattgccccactactaaaaatattaaaatgtgatcttaatgtccaaacgccgcgttccgatgctgtcagacaaaaaaataaaaaaacataaaatttcatatatggcatataaaatgcatcctgaattcaaataaatctccataaaatgataaatcataactattattctaacttcataattaaaccctaattatccgctaatttctaaactacatttaagcggtctttacaattatcgcccccgataaaagcatttcgtcctcaaaatctaacctgaacaaatctggatactgagccctcatgtcggactctaacttccaggtggcttcctccaccttactgtttc

SEQ ID NO: 331408 - DNA, 1055 bp, Cannabis indica
aaaaatatatatttctcacatattaaaataatcattttaaaaattaatttgcaatgataaaactacttaaaaccaaaataattatttgtatagtacaaaataaatttttaagtagagagagagagagagagaaaaataagtatatgaagttagaaatttatttttaaaatttttaaataatacaaataaaataaaataagagaaatattttgatgttatgtcattaaaagaaaaactaacaaaataaataaatgaagtgaggactctcaagttgatgtttgaatgaaaaaagcttaagaaataaaatttaaaaaaaaaaaaaaaaaaaggaaaaggagtctcaatactctcactcttgttagctatagtaaaaagaaagaaaagttttttcatctataggtacacgcgtaccaattttattagaaaaattcggtattaacagcattaaattattaaaaggtatttaggtaaatattttagaaagtgcctattatgaggtaaatatttttattctttacattagaatgatttttcgttccattacaaaatagaattgtcattccatcaaaatagtaaaaagattatttggaatgacattttaatattttaaaatgcaaccaaataaaggaatggaaggaaatttgtttcatttccattccattctattttattacctctaactaaacattacccaatgtggcgttggttaggaggaataaaaatataggataggaattggaatgagaatagaaatatgagtgaaattgaataaattttaaaatacataaaaaaattgataaattttttttaaaagttttataggataggaattggaatgagaatagaaatatgagtgaaatagaataaaatttataatacataaaaaattgataaaatatttttaaaaattttctcaccacgcattggaatgattttttcatccatttcaaaataaaattgacattccaccaaaatagtgaaaaggtcgttcgattgtaatgacatttcaatacttttatatgcaaccaaacaaatgaatggaatgaagattattt

SEQ ID NO: 331409 - DNA, 694 bp, Cannabis indica
aaagattgtgactaatggctatatatagcctttggccttgagtcttgatcctgtcagtgacggttaggtaagttagttagagttagttgctaacttcttagccaaatatatagacctctattagtgaccaaactcaacaatttacttgtgtcaaattattatttcaatattatcacaataatttataataaatctattaaattagatgaactaatttaacatgatatggatagttaattcttgtttgtttaatgcactaattaaaatcacagaaggagattactgatatattgatgctggtgaaattgtattttctataataactataattaaaaacaaaatttactataattgaaaggaacatctatagatttctatatttatacagatatatatatatatatatatatatatttatatatgtgagtagttctattgtaacttgtaagatgtaaaaaattaatataaaaacaatcacacgcatgcatatacttatatatatttactagcaccaggccaaaatattaactatatattattaaatgatataaaaattaacaaactgtaaagtaattagttaaaacacaatcatatatcatatatacaatacatatctttatatattaaaagtgcctatctaacggcatttcttggtttaacagaatatacttaaaaataaaagaatattctgtta

SEQ ID NO: 331410 - DNA, 568 bp, Cannabis indica
tgtttctccttacggatcacgggactactgactgtcagagagggtgtccaaaatccaatataatatccaattgaactaattagtatttttatttagtttgaatcatgagtaattagattttgtattgttatacttaaaatatatttgtatatgtgaaaatgagaattaattaaatccgaacattggatgtagccgatttgatctaaaaaatattagattaattcgaaccagttcagtagatatacataaaatacattcaatggatagactatccaattcaatttcaatccaacatttcaatgaattggattgtttcgaatgattgaatttaatagaatcatattaattattaaaaagcatgcatttaatgtataatttgatcgaatttgtataataaacattgtatgtggtctaatgaacaccactagtcgaaatgagaattagtttaggtgtttggttcgatggaataggatggtaatatgtaacattcccgcttcaagcctccattgggtccttacacccacggaataaatggctcttatatacgagtacgccactctggctgctt

SEQ ID NO: 331411 - DNA, 612 bp, Cannabis indica
ttttttgttttttttttttgttttttttttttttacttaaaaggttatttatgaagaaaaataaaaaaaaaattagaaaaatatgaagaaaatcaaataagagtaattaagtaccctttgtttatttttttccctttctttaacttttttttttaaaaaaaaattctatatatatatatttagaatagtcatatttttacaaatttatactttaaaaactataaaaagccaaattttatctcttaaaatgttcaacatattatagggtacttatttataagttttgagtgatcttttaatataaatcaagtgggcataggtgggtgtgtgagtgttggaggtcttgggttcgagtcccaggtaaaacatgttgtaatatataaacgcttaaataaaaaacaaaaagtgatccttcaatatatgttgttgtcaaagtttatttaattacttttttctctgattttgttattacgagtatctctaatctatttataattagtaaaagtacttgcacgaagttatataataaagtaaatacaaattttagtcgtatattttaaaagtattctatttatttagtaaaattaaaatttaattattatatattacaaa

SEQ ID NO: 331412 - DNA, 1353 bp, Cannabis indica
tgatttattgactaatatacataactttcatgataataattaaactaataaaaaacatttaaataagttttcctatatattaagacaaatatttctttcatatcacatgaatgataagtttgaactacaaattaaaactagttaggattatggttttcgcaggaccatctcaaatttgtataagattttaggtaaaatttgaacaagtccttagacgaaaattaaattcgacatttttaataaaattattttaaaatttattaaaattttatttttcagactaattaattttaaattcttatttttcagttttttttattttttatattaatttcattttattcttcccatgttttattagtgatattttttttttctttcatgaatgaaattatatttatctataaaactcttttataaaaaataaattattagtagtaataaaaataagtataattataaaaagtttagatttgttttatatataaaatttcttattaaaaaatattgattattaattaaaaactctaaaagtttagatttgaaattaattgaattgtaatgttaacaattaatagttaatatatataaaacaaatttagtactttagagcatttctagtgagactttagagcatttctagtgaagtatcaaataggtggtgtattgttattttttagtacttttcaataaaaagtttctccaatagtgtgctataagttgtgacaaatttaacacacgtaaaaattaagtcaaatttagcataagatataacattgtatcaaatttaacacacataaatattacttttttaattatgcttttgctactaatcatttataacatgctttaatacatatattttaattacaatattatcattaataatttttaaatatatagtttattgtaatcattaatgatattttactttttagactaatatatgttatgttattatgtattgtaaaggttgtgtaaaatattaatttttttttttttgtttgctaaatttaacacaaaatttgtatcttgcagcattggagatgatataactacctaacatgacatctacaagggaatttaaatgaaacaaaaaccaaaaattataatttgaaacaatgtgaataacctttgatatgtttgaaaaatatacatatatatatatatatatattaggtggtagaaaacgtgctaaagaacttccgttaaaatgaatgaattaatcatatttcttatttttatcaattatatttaaataaaaatagataaaatatttaattaaattagcagattagatgtaaaaaaaattaaaattctaatcaaaatcactaaagatatgtacatatttat

SEQ ID NO: 331413 - DNA, 661 bp, Cannabis indica
tttttttttgtgtttttatgtatttgtgaaataatccctaaaaaaataaattaaatttttttaatatatgccaaaataaaaaaaaacacctcttaaaagggtgtactatatattgtttgaatagcttatataacacaaataatttattttacttttaaaaaatagggtaaagtttgaaagactaataattatagaattggttttggaaaaaaaaaacatcatcaattacagagcacatagaattttttttttcttaccatgttagcatacatgttccccctaaaagatgacttaatttcaaataaataaaagtaaaaacaaaatatatatttttttttacaacaaattattcacatcatgttaataaaccagttctaccaagtcactttagctactgttatagtttaattaattttgtctcatgtgaggagtgtcaaacctcaaatgaagtgagtttttacataaggccctcctacctgatacgggaagaaacaatacataaagctgtaaaaaaaatacgggcaaagattttattaattaatgggtatatactattttggactttgtgttttgcaaaagttaccaattagaccttctattttgttaaatgacaaaatgaatcctgtatttttcaaaaatagtaaaaataagactctgaact

SEQ ID NO: 331414 - DNA, 669 bp, Cannabis indica
aaacaaaagagtgttagatttggtttttaattgataatataaaatatgtttaaaatgaaatatccagcagtacttacaaatatgtttaataagaagatcaccaaattagtaatttattgttcccaaatataaatttattgtttggcaagcactaaatagtaatttgctctctcttgatttgcttagtcgctttttgagtttatgaactctggactatccgctttctcatttattctttgattgtgttttttcccaaagtatcatttaagaggtatatggatggtttggttacttaaattggcaaatgactttcaaggattggaaaaacttgtgttctaaaccaaaaaaagactttagtatttggattataaacgcagttgttactgaaattatccattttatttagtgcaatcagaatagatgcatttttttaggctacttgtggtttggacaaggctagtagcgagcagattaaatttgctcttaaggttaggatctagagatgtacatttttcttatgggaatggaatcctgtagggatggggatcatattttgtctctaaatgtcaaaaggggcgggaatagagatgattgggaaccgtttaataatttattttagggtaaatatcattttggaccctgtgttttgcaaaagttacagattggacc

SEQ ID NO: 331415 - DNA, 841 bp, Cannabis indica
agaacataaggttacgaaggttgtgcgattttttagaatttagaattgtgtttgattaattcatatgttaaccctactcatgtttgtttaccttaaaactaaatgggttttatagtttgggatgatttcaacataattgcatgatcattgttgagaagttaatgaaagatttcaagaatagaatgcgaaagtacatcataatgcccacattagaagaaaatgatttgcaatggttggatgataaccctcaaaatcattctgaaatcgacaaaaaagattggttgaaatttgttcaaagtcgcctaactactcctaaattttaggtaataattatatttgtactaagttatattttaaatacaagtattggtagctaatatattttcttttgcattgaaggaattcagtaaagtacaaagggaatggtcgacaaaaaaccaatcgagacatcaaagtgatcggagtggaatggtgaacgtaagagaagatgtggtaagtgattaatataatgaatttctagcaatgtgcatcaaaatgtaatagtactcatttaatttttgtaaaataatgcaaaaaatagaaccttgaggttcaagatcccccacacaaccgtgtttaggtaaaaccgaactaaaaaaacaaaacttgtcaaaggaaattactaataagatagtaagtatatattagtagttgattaagtattaatgagttaatgtatgtaaatcatatactaattgcttaaatatgcttattaggctcaactagaggagcaagttagtcagggacaagttcaggtccatggtaaaaatgacattctgacgcaggcgcttgcaaaagcaga

SEQ ID NO: 331416 - DNA, 1304 bp, Cannabis indica
aaagaaactattcaaataatgcatgctcatcacactaagttaaatttcggccacttttattttcgtgcatcttttagttttcaaataaagttgtcaaatggcaatagtagtgtctagtgatcatgcaaaaatagtaatgccatgatgattatatataaaaactcatcttcaaaacacagactaagctatattatatatacaatcatctatatatggtcccctcctatttagttttttattgtacatcaattttctatcatttttccttattatcatgaaccaatatattatatagtagtgataataattttttggatattaatattctcatttatggcgaatttgatcacaagaaaaactaccttattagtcaatagtaccccaaaaagggacattgctaaaacaaccacccatgtgctagcttgtgagagtaattgaatcacatggatgctgcatttagagctcttcaatatgtcaaaattgtgagagtaattgacatatatatatatatatataccaaattgtgaaaaaatgaactctcacagaagagaggtttgatatatttatcaaatataaggctagcacatgcgtggtgttttagtatatatataaagtgtttttatggtaatggtgtattttttactccattttaaaaacaacctatatatatatatatatattattttttttttatttaagatactgtaattatttgtaaattatttaaattactcttattaccttgttcatcgtcatagttaaaaaattaaggtttatatcaatgcatttgaccaaaatccataaataggttgttttgtaagttttgtttaatactcatgtaaagctagtaatattaaaattattttttaggcacaaaattatttaaaaatttcacaaaaaacttattagatagacctgaaaaaataaatatatgattaaacacgacatgacatgatggcacgacatgacactacaccaaaaaaaaagagcttaagcacgatcagacgtgacaagtccgaaagcacgacacgtaagtacgaataaaatagtctaaaaagttaaaaacacgacgtctttaaaattcatataattttataataataatacatatatatttattattaaatatttaaattctaattttttaattaatttcttatatgattatgtgtaaaatattattgaaaaattataaaaaaatacatataatttagagagaattgcaccaaaacacgttaattgtattttatttatagatatatgactacttatttaatttaggtatatacccaatatcatttctc

SEQ ID NO: 331417 - DNA, 588 bp, Cannabis indica
aaacaacatacttgtgagtagagctaagatcctggtaaaataagttccaacagagagagcatgtacaagccatctttctcccttcctttaagcaagactttccctgtgattttatccttaacacaacaacaagaagagtgaaattcaagaaagactttgttatctttagtaagcttggagacactaacaagattttttgttatattaaggattttcaagattgaattaagttctaaagaatgagaagaactagaagtaggtaagaatgaatcactgaggtgagtaatagagagtttcttaccattgccaatagctaatgtttcaaaacctgagtagggaattttagtttcaaaattttccattccttgagcaatatgattcatggcaccagtatcagcataccagtcatgatcaacaccaaaattagggattgtagtggaggagtgagcctgtggagtgccactttcttcaatcttagtaagaaatgctttggcttcacccattctggtgtaacaaatcttatcaaaacgataatggtagacagctactgtatgacccagtttgtgacatacttgacacaagggtctc

SEQ ID NO: 331418 - DNA, 628 bp, Cannabis indica
agtctattattactcaaggtcagctctggttctatcttaaaactaattggtgataaatagaatagtccgtatttttatatatgactcaatatttttaccatttatttcatgtgggacagtaatctacaatattttccctcaagaatgtggtaatttttgtttattaatcttgaaccgtattagatcagtggacaagatgactatgtatatatatgtgcggatcgggcagggtcacatgctcgctaggaatcgatatgtctctgataacatgttgagaatcacgaagttcttaaaattaattggtgacacgtgaaagtaactcatattcttatatatgactcaatattttatgtggaatagtgtcctaaaacggctttaagcataaacgagctaaaccgatacttagaacccacactttttgggggccataataaaaaataaaaaacctcattatttatcgaaaattatttttatgttctatataattcaaattaattacatatccttactcatatatatatgtgtactagatagatgttacgtgtcaagtcacgtatgttaattttaatttagtttttagttttttttaatatcataattttaaaattaataatattcaatatagtga

SEQ ID NO: 331419 - DNA, 2127 bp, Cannabis indica
tatttatattcaattttatctaccgctcagaagacacaatagtaaaaattgttccaacaagttcattcaacttcatagcttgagcactcaactattaaccaaggtacgtaactatactactaactaccttttcaatcgcagagaatttgttattctcaaccactaacaatgatttgatggcgagtcattaaaaaataaagaataaccaataacaaaactaaataaaatcatgtcacagaagagataagactaaaacactcaaaactgtgctacatagacaagactaatcgtaataaaaaaaaaaaaatcaaatacgcaatagcaaaacatacctcaaccaagctgcatttatgtctaaaaaaagacaacctcatgttgctataaatttaagaataaaaaacccttactttactctcctaattaattaccataaaaatgaaaacttttaatacaacttattgtttcattttactcagtaaataaattaacatttgaagtgtaaaatatatatatttgcacataccatttattatgtaagtgacatgagtaatataattttttttcttttttaaaggaaaaataagtataatgatattggaaaattttataatgtacctttcttaaaatgaaagtactatgcacttttatctgttttagcatctggaataattttttagctaaattttttttcatagtcatgtactttatagctatttaagacatcttgcaaaattttaagaaatttagaaaaatttaatacgctataaataaagttcaaaaagtatgttgcacgcgtgactattttattttataagtgtgtgaaatagattgtttaaacactgctttttatattgtaaattattctaaatttcttaaagttttgtaagatattttaaataattataacgtaaatgaatataaaaaaaattaaacttaaaagtttatctagatgtcaaaataaataaaagtgtattagtagactctttttaagaattacattgtaaaatcactaaataatattaacgtgatctataatacattaatacattaattttttttaaaaaaaaaatagcattgaagcaatgtctcacacacgcacttgcgttgcaagtgattgtaggaaggcttatcccttttcattcaaggataatattagttagttacattgggattaccaattgcaatggccataataaccacgtggatatgataattttcatttttattggtcagtcaacggaaattttttaagagaaagcctctgaacatgagttggccatttatgattggttaatgtataaccaaagtccagatcgtggtgtagataacatttttcccctcaaaacggtgtttgtgataagatgacactttggatttatttatttattatttttaaataaatgatactttatatatttgtaaagttttgtacgcattttgatgtgtgtgccgaaatttttgttttgccactatttgtttttttgagcattattattagagaattgttgaatggtacgtgtttagtatttttctatgtgtcagtattattattagtccaattaagtattgagttctatataatttaatataaaagtttttaaaagagtattgttagtcaattgcaatacaacaacatgtcgagaaggtgttaggcaccacatgtgcttaatagcaatgctctaacaattaggcactagtagtatctagcacttttttgatgtatcactttacgattagctagtgatactcccttaaagctattacaaacttcacaaataatacattaaaaataacaacccaaatactacataattgaaaatatattgcgaatacttaaaatctacaagttctacttcttagagaatttattctcctgacagtggtaaaagagtcatatttccctcttcagtaccattgaatgctttcttctttcgtttatcaggataatttgtagacaagtaccgtctgtgacccatataacacatcttgtgtccatttgtcaagcaacgagcccatgtgttagtgtaacaaattggacaactttcgtaatcttttgtgtttaagcctgataaattactgtaagctaaaaaatcactaacagtccacaataacactacttttagatta

SEQ ID NO: 331420 - DNA, 1325 bp, Cannabis indica
atacaactctgagagggacgcctctcttaaaggagtattgatttttgtagcattgaaaatgtactttaagtgcaacggatgcaatgtaaggggtcgagcgccacctaagggccacaagctcccttaataaatcttaaatcttaaaaaatattgaacgcaacgtaagggccacaaagctcccttatatccgataagtaactaagaggttgagactgcttaaaaagtctatactctgtccataatgaggttacaccaaaaagaggttgagaaagcctaagtggcaaaaaactccctaaaaaatgatagctcacacaagaagtcgagaaagctcaagtggcaaaaagctccctaaagacgtttctcattccttatgtcgcacgatctcaagacatccccgacgtaagagcaaatggacccgaccctagactcaattaattgtgcctcaaaagtgacagaaaagttttgtggggtcttgaatttgcgagctttgtgagctatgagttcaaaatccaagtcacctgatgaaaaagcaacagtgattgaaggtaaaaatattagcttcgctaggggaatattaactagacaaggcggttctaaccaagctgcttctcgcaagaaactcgcttaccctcaataacctcttgtaaaaattgttaagattttttgccctaaataaaatacattttaatataatcttatttgctatcaatagaatattagaagttatttaagtttacatatgatttttatgtttatggtttaatatacaatttctgataaatccaaaacatatagttcttcacaaattacagtgatgtcatcacagtagaaagtaattgtgattatatgtttcaaagtttagtcccatgatttattagtgcattgaatttacactgacatgataatcagtgataaaatttacttatacttggataagtggtatgtccgtattggtaaaatatactagtatcggatctatggagtatacatcagactggatcgatattgaacttggataagatatcataaacttattgttatatatttctaagtcaatgtcacttagttgatcttagatcaatagatcttaatcttgagattattaggttctggcttaactgtattatttgtgttctttgatatgttagttaaatatgaccaaatggatcggctcaatacttacatcttgggaacagagtgggagcgctaatcatagatatgaaatctatagctactataatgacatagaagtgaaataatgatttcttttgtagctaggcttaacagagataaatagaagatctcttatttcagtaataatatta

SEQ ID NO: 331421 - DNA, 835 bp, Cannabis indica
ttcccaggattcatcttgaggtaccttaggattctagtaacaacttccatgtgttattcagttggatcattcatgtactgcttaacactgatcgagaacccaatgtcaggttttgtatgagataatcagatcaagcatccaacaggctttgatctccctctgtccactgctgtcctgtctatttttgaaccaactttcttgctggaatccatcgaagttgaggccagtttgcatcctagcattcctgttttttttggtgagtctaaaacatacttatgttgtgagactaagatgaagtttttttttttgaaaaagagagaggcttttgtctaagactgacccctcccccgttatatatagataacctcacttgtggcggaggaataccatgattacaagtgctatatcagaagatatttaaaataaaagtcattccaaccattcataagacacatcaggacctattaaacaacattgcataacagtctccaatctctattcaaatctaagaatgaaaactgctcaaaattcttggttttgtaaacccaaacagctgtccagaatctgactttttcccataagtcttcagctgaagcttcaattccttcaaaaatcctgttattcctttcaagccaaataacccaaatgattgctagaacagctgtcctccatagacatgatctacccttactaccccccaccttgctcaccatcattagagggactgatccgggtattacccattggatctcaaaggcgttcagcaactttatccgaagtctttgcgcaagacacaccccaaaaacaaatgtatcacttcttcactacttttctt

SEQ ID NO: 331422 - DNA, 535 bp, Cannabis indica
tgttcagaacatttctctaaaagggaatttagagaaagtgaagtttgattatgaggttggtctttttgcaattttgcctgtttcagctgagtctgctggattgcttccgaatcgaaagggtaaatttcttttgcttactaataagcttaaactttattgttatcatctttgtccttgtggtttcaattttagcagagtccttttgctaagtgtaaatttcaactttggtatggagaaggataggacataatactttgaaatttctatagtatttcctccaatatctgctctagcctcattaagttataaatacattttggtttttgttttgaaacaatgacattgcttttgtctaccttttctgcttctgcttttagctctttatagagttattcaattcaaaaatttaaaagcctaaataaatagttagttaaatttagtatgaagtacacatgaattcatttcatcttgtatttatcttaattaaattttgtaatgctgtaaatttgttcattcagagaataatataaaagga

SEQ ID NO: 331423 - DNA, 700 bp, Cannabis indica
tggatttttggtggctctctttttttttcgctcactattcccgaatcgcaagtgacattttttgacgttttggctctaggatcagtttttttatggatttttcgatggctcttttttattttggctctactttgatcagttttttttttgggggtaactatccccaaaatcagacccagaccaagaatcacaccgacacccaaactaggaccttgtcctaaaccctcgccggaacctaagacccgcgagcaagacaaggatctagaccctgacaaggacccaaaccataactcggactaagattgggaccgagacctagacccaaacctagaccgggacatggactaataccaagactcaggacccgaacccgaacttggaccaagactaggacctaggaatcggacttggatgggggacctagacaagggacctaagctctggaacacacatctagatctaaatccgagactcgaacccgaacccgaaccaggacctgtcctagacccgggaatctgaattcacacgcaaacccggacccgaaacctaccccggacccaaacacggacaggattaggaccaggagaaggacccacacttagagcccgatccgaacctagaccgagatccagacccaaaacaaaactcagattaggactcgaaccccgaccgtactcaaacacaaactcgaactcggaat

SEQ ID NO: 331424 - DNA, 844 bp, Cannabis indica
tatgaagtgcattattagatagatgaattattatatcttcttttcttggacaattcaacttttatttatgatacattaataattaattaattggttcttagcataacagactaaactaagagacaaatacaatacatgacaatttgtattggagcatccaatttccctaatgatggaggaaatttcatcaaccacactcttatgtatatctatatatagcactatgtatctatatcactaagtggaaaatatttttgattaatatactttttaaagaaatattgttgatttttgatacatctctttctccattgttaagaatgtgaaagttggtggataaatatagaaataggtgaagtgtatagtgaacttaatgatgttttatcttaaaattaattcacaataaaaaaagtttcatgtattgtatatgtaatactttaaataagtgcgttataatatagtagctccttttttttgctcatcaagtgtaacaccctaactagcttaggtgtattacgtgatttttaaacatactgtgcagctaattgctaatcaacgaggtttatggaaatggtgattaattaaaatttttgttttttaattaaacttatataatattttatacaaaaatattcgggatcctgaatacaaaatactttacaaaagtttactgtctaatacaaaatacatgtcgcttagcgactagttacaaaagcattgttgtcccgaggatcgtacgctccagggctaaccgccccgacactgtacaatcttcatcggctcgtcctcatggtcttcagccttggccttgcccttaccacacataaacatagcactatgagtc

SEQ ID NO: 331425 - DNA, 1120 bp, Cannabis indica
atttagtaaacctactacaattaaggtaaattggcttttcagcatcttctaacatagtttaaaatgttttaggacgaacttgagattcaaactctgcttcgttaatcatctctgcgatgtgatcatcttcatactccacattattaacaatctttgcagaaaactccaaaaagaaatcaacaccttccctatattttaccgttaacctattcgcactcatccaatctctatccatttcgaaacttctaacaaaacaacaatttaattaacctaattaatacaataaaataattctatttcaacttaacctaattaattcaataaaatacagtacaacaaaaaaccctttccttaacataaaattataacttttttcaaaaagtattatgataagctaataaaatgggcatgttactaagagtgtattacaatctatgaaatatttggtaaattttataattactatttagtcactaagagtgtatagctatatttctctactctgttttataattgctttgtggattacatcaagttgaccacaaagaaactaatctataaagtaaagactttttttcttgtattactagcttcaggaaatagattagactttttttcttgtattagcaataacataagaacactttggactactaatttttcttaactaaatgtaggtatatactaaaggcacttgatttgaagtggagagagctacatgccaatttcaacaacttcagctatactatgtatcattacaggtatactacagattttcaaacataattatctttaattattttcaaatatgggataaggagctaaactattttttttttttgataatgcttatatgatcttgagaatgaattttacttgactttaatttatttatatatataaatatttgtataggttttggcatttagttgaagacttatatttcacttctacattatggtaatgtttgatgagaaagagttggattaaaaggacaattattctcatggatatttttatataaaatctaaaatttcattaagaaaatctaaaagggaaaataaagttttataattttttgttttggattatttgatctcaattaaatggacccaaattt

SEQ ID NO: 331426 - DNA, 1035 bp, Cannabis indica
ggaatcactcaatatatctttattttttttctattttaatggttagtgctcgaggtgaatattgctcgtggttgggttgttatgtttgggttttgggttgctaagtttaggttgctacgttagtttttatgtgtaattttaaataaaaaaaaaaaaaaataaaaaattaaatgtaaaaataaaaaaattcatacaaaaaatatggatatatatatatatataatttaattaaatttttgattggtgtgttaaaacttggatgatggaaaggacactatagggtgacctttggttggaggtaataaaatgaaatagaatggaaaggaaacaattttcattccattcttttgtttggttgtattttaaaatatttgaagtcattctaataaaatacaatttttaccatttttgtgtaatgactattttattttgaaatagaaggaaaatcattccaatgtaattacataaaaaaaaatttaataaatttttttattttatttcattctatttttattcttattttcattctaattcttatttttatggtttgattaatctcaactaaacgctacctagtgcccataataaactcttgacatctaatttattcatactggccaggcgaagggtgacggccgggaaaagcattttggggataaattttctttaaatttaaaataaagttttcgggttacgtgatatgattaatattatatagttgacatatgagagagatgtatagatgcccacttacattgaataattcgaaatcaagtccatcaaagtacatttgatacaaacgatattccaaagaatgcaaaagaagattacaatacttaattgtttttatttcttgaatcaaatttactacatatctgccatttccatccgtttcatattattggagagttgatctcaagcagccagctaactaaattggccgtgtcatgggtaacatgtgaagatagctaagaattgtttttgggtggtatatgcagtgtagttactctctctctctctctcctctcttctatt

SEQ ID NO: 331427 - DNA, 375 bp, Cannabis indica
ttgtcaaaatattttgataattggttgtgttaaagaccttgatgcctatataaatatatagtatcggtctttaagctcattacttattttgtaaacacagtaaatctatctaaagatagtagagagagtttggaagtacgattatccgcactaatcaattttctttcttttgcagatccaaagttcgtattagattaaagctcaaaaatcaataacttaaggtatttcaaattttaattccttattcatagtgtatatatatttaattaatttcacatttcatgatcatatatacttaatattatttatataaaatttctaacaagagtatatatatatgtagtattttagaattgtaatttttaaaaaaattat

SEQ ID NO: 331428 - DNA, 683 bp, Cannabis indica
agacaaagaagaccctttctttcttgagcacatttataatgatcaagcatgttctttgctaatgcaacaatatttgacacagcccaacttttcttttgccaacaaactcatttcgcgcacgccaaatagcccaactcaccacagccgcttcctccatctcacaaacacgcccattgctaaacaaaaacaccagccagctgctaaatgttacagacccgctgccaatatccatcaggctttagttccaggccgccttagcaaactcacactccaccaatgcgtggtacactacttctgcagcagtattgccagacgacattaacaggtacatgacgtctttgaagctgaaaacaagtaggaagaatacccaaagcaactctccataagaaattactaatctttggaaagaatttttaatgaccaaagggtcctccaaaaaccagtattgtcattaacactccaagcacctttagtttcctacaaaaacttataggcacttctgaccgagtactacccacaagtctcaaacttccaactccaaccatcactaacagccgattcactaagttgaatgatgtcaggaaagggccacgtcacctagaagtctgtctacttgatttgatgagttaggaatgaaaactttagctgtacgtaaaggagatggaatcaagaggatagggtgg

SEQ ID NO: 331429 - DNA, 968 bp, Cannabis indica
tgtcaatcaacatccaatccgctcaagtgcggtttttgttataaatatgtgtggattggattgaattggatcgactattttatgaacacccattgttaagaattatatgatttcatctcaaaactaattagataacgagtggaataactcatattcttctacatagcttaatatttttacatttaatttatgtgagacaatattatataatataattctattatctaccatgtcatgtcttatcaacctagtttatgaaaaatataacagtagtcacttttactaattgatatatatagttaatgggaattaagattcactgttaaaagatagtgttccatacagtgttaaactaatcaaagttttacacattaactaaatttatattaaatatgctaactactcttattgacttaattaaaggtttaattttttaagaaataaaaaattagttgacgtgttaaattttgattggtttaacacagtatgagacaccacttttaaatatgggatcttgatttagttaatagggtattttagcacctctaatattttagggttgttcgtagggttgcatatgcagtttttgcaattctcaaaccacaatcgcaatgcaagaccttaaaattgcaaaaactagacagcaaaaatacggtgcagtataaatgtgtaatgcagtttaagcgatttatactatcattattatcaaacattataaaaaattaaaaaattaatttaataaaatttcaacaatattaaaaaaaaatcttattaaacttttaacgtcatattatatacattaatcaatattgtaattgtaatcacatataatatactagcaaaaaactacgtgcgaggcacgtatactaaattttatgctaatttttttctatgttatttgaaagttatataattaaaaattaaagaaaaaatattattagttattaggtgagattattattatgtgt

SEQ ID NO: 331430 - DNA, 941 bp, Cannabis indica
aaataaaaaaataccatataaattggccaaacttaaatgtgccatatttatcataagaacttttaaaatcccatactaagtgtaatttcctcttaaaaaaagtccaacattttatatgtttcctaggcccatttgtttatattttggatatgcctacttttccattcaattgtttattttttggtatgggtgttaaaacatcattctctctagttatttgcgtacaaacacacgcatttctagcttgccaataaagtgacatgaataaatttttctcacaaacatttcccaaattcaaaaccaaactattctttttataaaaaaaaaaaaaataaaaataaaaaaggggatattattctaataggatgtttcccaaattcacggagtaacttaaatctatacttaacattacatatatacataagtaaataatatattagattttaaggtttaaatatttgacatttgcaaagacaatagaaaccacaattataaatctcactcaccaaatctcataatcaaatgtacaataattagactagactagactattttaagtcaaatacgataacacaattaaaggcttgcttatgactcaaattgacttacaaaatttaataaaggaataattatataaatcactattttttataaaaaaaaaaaacatttttacgtttacaaattttttattttataatttttaacggattccatagaaacaacacgaaaataacaagaaactatataaaaataacatcaaaacaacaacaataaataacatacatataaaaaaaaaaaaacaacaacaaattaacaagagtacaacataaaaagttcgtattttctgtaaataaaattaaaaaatcgtaaaaatatttaaaattccgtaaaatcgtatttttgtaatttttttttattgtttttatgtatttgtgaaataa

SEQ ID NO: 331431 - DNA, 547 bp, Cannabis indica
aaccatgcaacattaaatgttatttctgatctatattgataagtaaatctgattatattgaaatgagttttatttaggacataaaacccaacaagaggaagtataagacttgagctatatttttgaacaatctgggttcatacgatgaggttaggtgacctttgaacagtcttggtcgtctctctaaggtcagaatagatcatgttatggagggactgctgaccctcgagtccttgagcacagggactagctatcccgatggatatctccccctgtcctctattttcaccaagagacttgatgaaatcaaggtgggaggactagtaggagaagttcggtgtgacaggcccactagagaccagctagcaaatcgcctaacattcaagtggatggcctggtcagagcatcatattgagcaagggcagtgctacccctgcaccactacttttaaaacatagccatctactttaggttgtgtccaactcagatcactctgaagggtataaagtacctttcagcccatgtttgtcctgtatacagctgttga

SEQ ID NO: 331432 - DNA, 639 bp, Cannabis indica
tttagataattttaccccaaaaattaatttttataattaagtgttaaaaaatttaaatttcaactggtttactgctaatatctctaaatataattagtagttagattttactgtacatgctaccccacccaaaaagtataaaccaacccacctgcccctattgccaatagccatctcaatttggcaccattcgtatttttcaactgatcagtacgcattatagtcaaatatctacaaattaaattctcgtattgatctaccaaatcataccccctcagcaaataatatatgatatatacacatacatattatattatttatatacaaagtcataattcataattaatattctctcctgtgaacgaaccaagaaaagaaatatactttggaataaatagatagcggtctaagttattaataataatacatataattttggttaacaatacttcattaagataataatttggaatattagtttgccggaagattaggagtaattattattatagaataaaaagacataagctccataaagtccaaaagttaatcatcgtaagcatttttaaattataatatatacataatacattcctttacagaaaaagaaaataataataataataattaaaaattatt

SEQ ID NO: 331433 - DNA, 1380 bp, Cannabis indica
taaaaagcgctggacaaaaatgacttttcccagcgcgtaaatacactaataaaagttagatttttagccattgcaaatgtgcgctggttaaaactttttttatttgacttttttaccagcacagttacttttaccagcgcagtagcgaactgttttggtaaaagtgacacttcttgtagtgaataatgtatagaaactaaataccgtaagatgcatgaaactcctctcattgccaattggttttcagatagatcctcatttaaaattaggataagttgaggaatacctcttttttgtatctattaaataaaaataccattgtattatattttattaaaatgtactcacttttgtgagtgggttacccaatatactcaccctccacttaagtttaacacataatttacattaccttaaggggtataatgggaacatcatctataaaaatgagtatattttaaaaaatatgaaaataaaggtgtaaaaattaaaacatataaagtaaagtgggtatacaataaaattttctctttgaaactaaacatttttatttacatcaataataaaaaaatactagataaaataccatagatatttcaaaatcaacattaatgaagggagtaataatccataattttataaataatattattaaatttttatatgcacattaatttacagattatgtgcaaggtgctgcatcttttagggctcgtttggtacgccgtataagagttgtattgtattaaataataaataacattatatttaaataaagcaaggtattgtattaattattacgaccaaaatttttaatacaatatatattgtgttatttaatacataacaaatagtctgtattagcttatattataatatttacaaaggattcggggttaacaccaatctccaattcggacctaggacccggacccggactcaggaccaagacccagattaaataataatacaatacaacacaatctaacacaatacaatacaatacggcttaccaaacgagcccttaatcttttaatcactcattgtgattttgtccggtgctgagctcccttaaatctcgttgaaggttttggttgattcaggggtgtataccttttgttttgtttttcttttttttaggtagtttcataagaaacaaaaaaaaaaaaattaatattacaaaaatacagtttgcacagaatttttaatatttttatggatttttagattttatttatgtattttaatgttgtactcttattattttattgttgattttttgatatttgtatattgtttcttgtgttgttttgttgttgctttaatgttatttttatgtgattttttatttttttttgtatttttataaataccataaaa

SEQ ID NO: 331434 - DNA, 687 bp, Cannabis indica
tatatatatatatattcattcaggagcttattataaatatatattatatataatagttgaaaatttaatatttttcaattaacatgtactgtttaagataaaaaatcgtatttattaaatttttcaataataaaaaaaagtttaagataattcattaattaatataccgaaaacaacatacgatcttcatttattatgggcatgcatggcagctggacaagattaatttgcatataaagtgttcctaattaatattaatgtcttttacttttaaatattattcaaaagaagaaaaaatatcgtctcttacttcctcatgcatgaccaatatttatatatatataaaaatattatagtcaactaattaattaatcaaaatcatgaacgtctacgtcaaactaacccagtttcatttcatgatataattagtatatatctatatactagtaaaaagttacgtgcgaggcacgtatactaattttatgttaggtattttttactttatttaaaagatataattaacaattagattattattatgtatatctaaataatgtaatttataattttgacaattaaaaataaatactggatgtaatatattatagtgtttaagaaaacttgataatttaagtgtaatatgttcttaagataatccaaaaaataaactaaaaattcatgttcaaa

SEQ ID NO: 331435 - DNA, 708 bp, Cannabis indica
gaaaaatagcgacaatagtcctcaatgtcactattttttgtgagtctgtttagtcttaaatttgacggatccattagttattcaacatgccacgtgttgagtcatcattggtacaaaataataattttaataaaaaataattaaaaattaaaacatactttaaaatataattttttttctttttcttttcttatttttttctccttcgtcttctacctccagacgtccaccccacaaccccataatcattttcttcctccaaccacaccaccttaacttgtcttcttcctctagccacaccctaaccccgaccctcctctatctctagccacactccagtctctgagttaaccggagttccaccgcgcacggtgactgtctaccatcgaagacgaagcttgcaaaaactattgacgagatctaaaagatttttacaaatagaatatatttttgaaagtcattttactcaatggatctcggatacgactaggttagacccaaaaaattttactccagcaagcttttaacgacgaatgaacgctgaaaggagctatgggaaccttggagctcgtgatttgaaactcgacaaaggccatggtggccttgtctccaaagaacgacgtcgaggcccgtagtggcctccatttttgacagcaagacttcgtcgacagtgaaaaccatcgagccccgagagagagagagagagag

SEQ ID NO: 331436 - DNA, 934 bp, Cannabis indica
acaaaaatttcctgagttggctcttaagtttgacaaccacagggtactggcttatgctcataaaaatgaaggcatgtgtcttgctggtttagatgaagaaagtgaagaactttatttaggtttttcttttgtttattttggctcatggaaaaacatggtcaacgcctcttgttgtgctcataaatattaataataaatgataactaaaatgtttctaaacgtgtacccttaaatgttgaaggaacgcttaggaagtttagctggtaaagtagtatttccatgctatttgatatgcttacttggtcttaaacacataggtgattagtcacaaaattgtggtatgtgcactcttgattcctatggatatttagttttaatatgcaacaatttgtgtcactgagattttgtaagtaattacatgttttgaatggtatctgtgttaatcttcttacagttaattgtcttagaacaaaattatttttcatgaaggtatattcgcttagtgatgtcaaagatgcaaggcagtccagaagatatccagcggctccaccctaggtaacattgctgttgaagtatttttcctgcaagagtctgacaactgcatggttttcttgattataattgtggtatagataatagttgaaacttgaaagggtgtgtaaaggacaaaattctggtggaagtatcagactgggggatgaatatgataaataatccaatctatatcccataaatagattatattaaacttgatgtaaatgtaaatcaaaactccaatattaaagtctaaaggaaaaatcatgggtatggccaacaaatctaatccattataaaaggtttttcaagactcaaaactggacttgaatggttaccatacctcttccatattatcctcgacaagaaccttagtccattggaaaaattcatagtgaaa

SEQ ID NO: 331437 - DNA, 673 bp, Cannabis indica
cctagtgtgacacaagtattgcagtgctccaaatgtgcttctatacaaggttggattctgcatcagctcaaccatcagctagtgacatgggtttcccagcagtcataggtgtcgggcatgcctttagatttcccatgttaactctattcagcaagtcatcaatgtatttagtctgagtcaaataaagaccagtagcatccctgtaggcttcaatgccaagaaagaaatgtaaagctcccatatctttcaatgtaaattgtttatttagttcatcaatgaacctttgcaaactgttcttgccattccctgtaacaattatatcatcaacgtaaatccgcacaagtattatgactttccctgttttgtaaaagaatagggaagtattggcctttgagttgataaatttccactcaatcaatgtcttcttctgtaaagaccgcttagtttaatttggagattagaagttaatcatgtttaattatgaaaattatttataactatttaaataattatttatactgttattattgaattctgaaatgcattttatgtcatttagagattttcataagtttgcatttccggtgcccggtaacatgaaactcagtgtttggctcagtaaaatcacaacttagtatattagtagattgggacggtttattagacattggga

SEQ ID NO: 331438 - DNA, 944 bp, Cannabis indica
taaatatatataaaaaaaaaatgcaaaagagtttggatggtatcttaaatttttttcattgtatttataaaattttgtaatatttttatattttggttaaaaataaactattacaaaatttaggttacaaataacatttttattctgttactttcatgttcaataaatatttttctaaggatattgatttatgtattaattaacaatttttaaatttttatttaatatataaaattaaataatttataattcatattttgataaatgattgtatatctttaataattaagtagtttataaattatatataggcttttttttgtaaataatttttctttaacattaaaatacacatatatatataatacatattttttataatataataggaactataattaattcaatattttttatacatataaatatgttactatttctaatatattatttacacaattttttaaatttataaataaaaatattttaattaaaaaaaaaaagggtaatattgtttatatactcttttaggcgtataaataatatttttttaaaaatattactacacatacaaacttagagtcccacatggtttagaaatacttaaggtgttatccatgtagattataaataacacttttattatgctactttccatgtccaataaatatttttctaaaggcgttgattaatgtgttaccaaataagatttaaatttttatttaatatataaagtatatatctatatttctaaatttatataaatataatgaaaagcacaaaagagtctaggtgatatcttaaatttttcattgtaattttaaaattttgtgacattttcatatgtttttagaaataaactactacaaatacaaactttatgtaggttatcaataatacttatattatgctacgtccaataaatatttttcttttaggggtat

SEQ ID NO: 331439 - DNA, 760 bp, Cannabis indica
gaataaatgacattataattaatcaaccttttgaaaaattaattttcacaaattatatttaaatttttatttcacattcactcttttacaaaatacaattttataagcacaaaccaatcaaacctctaaaattaaaaagatatgtattaattaaaaaaaattaaaccttatttattaaaagaaaataaaaataccattaaaatattattaatataaaagagtaaattaaaaaattggtgtgtatgaaattcaatatcaagtcgcacaactatttctttttgtaaatcaaaaagagattaatcttaaataatttaaaaaatccacttcactaaaagatccataaattgccactagctacaataagctatttttcaatatatattacaaaattacatataaaaacaactttaaaatgatcgtccaattaatatttacacatatatataatttaaaataatttttttttttttatattttataattaactttttattcatgtataaaaataaaaacaaatataactttgaaagagaaacaacataataactttcaaataaaacaaacataacctcaaaataaaacaactatagtgtacatgacaattcccctttaaactttttattaaaacaactacaagcgaaatgctatatatttactatgtatgctattggtgcaattcaatattaaatataatgaataatattaaaaaatcactaattactctacgatatattattaggacaccttaatatacaaaata

SEQ ID NO: 331440 - DNA, 642 bp, Cannabis indica
aaaactttatttgtttttcttgtttctatgagaacgtgtcgggaaacatgaaagaatgtgaaaatattaatgtggccagaatctaagttttatttgcttaggcacttaaaaaggaaaaaaataaaactggtaaacttttgatttttttttgtttggtaaaagtacttccaaacataagcgaacctacgggtgttgagggagggctaaaacctaccttgagatttgaaaatatattagggtaaatagcagcagtacttaaaatttaagttttgtaagtgacataaacctaatgtttatttttagtggcataaataccaaatatttgtaagtagaatttttctctaatttttttagtacaatctctgtgttaatatactgctaaaaataaatattgactttatgccgcttacaaacttaaaattttaaatacttatatcataatttacccaatatattaatatacaactgttgctttcatatctattctatataaagtgtgtctatataacagaattttgggtttatgagaaattcatgagtgactttttatttatattaaaaataaaatggtttattaataaaaataaaatggtttatgagaaattcatgggtcactttttatttatatatgataaaataaat

SEQ ID NO: 331441 - DNA, 503 bp, Cannabis indica
aatatgaattggatactcactttattttttttggtaaatgatactcactttattctaccaacaaaaatgtctaacaaaattatgagggcattttgaacattctcctgagaaactgcgaaaaagcattgagttgtaaaatatccatatgcattaattgtgacaatatccccttaaatcatacctatgatcaagaactctgcaattacagtccttaccacacatagagaaaaaacaatattattcgcaaacaataacatatcaaaattgttgggttttgtgccataaataaaacccgtttcaatataataagatttactaattaataaagatcagaaatcgcattttatgttgcatggttcacatgatttatttcacgattatgtttaatgtataaattctattaagtccagaacatatatatatatatatttgttcatgattactgtgttgtcagcacagtggactataatcatgattatatgttcaaaagtttaattccctga

SEQ ID NO: 331442 - DNA, 880 bp, Cannabis indica
taataagctatatctatttgtatatggtattttctccctttgtgctctctctttaattataatgtccagtctatgattacatgaattttgagtacaataattaagtgtgtagatacttggggatatttcaagtggttgggtgtgtgagtgtgtgggagatgtatagcgggatgggttgaaatccccattataacatttgaataacaatgtgtatattataggtttatatacacaattatgacattcttaacaattagttatataaaacatatcgtttataaaataatttacaattagttagtgaatttttaaacaaaaaccactagagcttatataaaactaatatttatgtggctcgccacgtaactctcatctaataatataaataaatatatattgtgacttccataattatgtctattcgcatctatttgtaaccttgtgtcataacctcctgcctcctcagctcctaatgctttcatgctattatcaaaaaccgaacgtgtaattacaacactgaatgatttattcaattgtgtggtcgctccaaacaagatagaatttaaaaaataaaatatcataagctatgtacttataacaattttgggtaggaataaaaattgggtggttattaacgagtaatgtacttcttaatcccgttcgtattttctatttatgctcccatctctgccccgcccatgttcctgctttgcttaatcttgaatgagttcgggttaacactacaacaaacaccattaataggggcggaacagtccgctggtaataatgctgaaatccgccggtaaagctcattagcggcgggcatccgccggtaatagcccgtcgctattaatcattaatagcggcgggactgacacat

SEQ ID NO: 331443 - DNA, 593 bp, Cannabis indica
ttgtattaaaaaatttagtcgtaataattaatacaatacattaatttatctaaacatagtgttatttattatttaataaaatacgacccttatatggcgtaccaaacgagccctaaaagtttagaatataagcaagtgaattgaaatattctgatgaccatatagcttctttatctaagcctaaagcggacttagctaggtagtgcgcgactgtattggcctctcgagccacatagctaacagtagcttgaaggaaagaagataacaagctattaatatctgtaataaaaccttgtaaatgaatgtttgtaatggtaaattgtttgaggatgtctaccaaaaccttacaattagattcaagggcttttttcataaatgtacaacaaaaacaaaataattacaaaaaatgtgcaaattttttttttttaaaaaaaaacttatacattttgaaaatttattacataaaaccatacattttaatcattaaataatataaatcattaataattaaactaattaccctaaatagaaaactgtaattaatgtttctaatatattttgtaatattttatccttatatttattatattaat

SEQ ID NO: 331444 - DNA, 542 bp, Cannabis indica
ttttatgctattttgtaaaggagatatttgttctattcgggcggttaaagagattctagatgagtttagcgcaacgtcggggcttaccattaacacaggtaaatctcaactctacttcggaggagtgaaagaagaaggaaaacaggttatgctatcagaaatggctcttcctgaaggagagtttcctctcaaatatctaggggttcctctaagaccgacaaaatggaaagctgaggactgtggtgtgatcatcaagaagatcaaacaaaggcttcaaatttgggcaacaagacatctttttttttgtaagaagggctcaactcattcactcagtgcttcttggtcttcgaaactattggatgagtatcttcatactacctcatagtatcatcaaggagattgaaaaattatgcagaggtttcttacggggttggaatgggaatagaagcaagcttcatgtggcgtcttgggagaaagtttgccttccaaaggcttatggtgggttagtttaaagatggggtcaaatggaatcaagccattcc

SEQ ID NO: 331445 - DNA, 512 bp, Cannabis indica
catgagggacagaaaccatcaaacaaataaatttcatccaacaatgctaatttataaagtgacgttaaattcataacacaaatatttacaccatttgtgattctgtgaactgacccaaatgataggactgtgtctggcatcagttaattgcattaacaaacaaggaattcttttctattttcattttattttttaataattataagggtatctttaaattattttttaatgtgtatatactttacaaaatataaatataaataatagaatttcgcacctcatggcattttgttatgggggaaatctcctaaaatataattataccaactaaactaaagtttgaaattgctttataaaaaggtaatttatgattttatattttacaaatatatagtgttatttttttcttttcttttctttcttggactggaaattgggaatacatagtgtaagtcttctacacattaaaatatatataatgactttatagataaagactacttttcattatt

SEQ ID NO: 331446 - DNA, 825 bp, Cannabis indica
taactcctctgagctttaaagaatagagacaaagcttgctcttcatttatttgaacttgattttcacaatcaccaacgggctttgaagatgtgagaccaatttgcccaccattagcttggtccaaaagaactggcccaatattagtttgagtaggattagaaataatcgggtccacatgcccaacattagaaaaattatttaaatttgattcctccaaaacaggcccaccactcattaaaaacggcacaacctgttggaccggcccactgggatgggagatatcttgattcaaaattttaggcccacattccaactgctcttcagctggcccaagaagcttcaaacccggcccacacggagacggcccaccatccagagaagacaagtcaacggccacagcatttgaatttaaaattaaattcgtaccctccacgcatggtctcctcaaagaagaaattccaacatagtcttttccttgcatccgaaccccaataccaccactattacccgaagtagcaaaagagtccttaccacctgcagccgattgcttaggatgccacaccaatcgctggagctccccagacttagctgctgcacgatgggtcaccatcaaagagcgtctcggtcgacgaaacatcccagtgacacccatcggttcaccagcaaccggagccggagacgccattaatggacgatacgcaccacctttcttcaccacggccaaggaggagacagtactaggaccaccgaaggatggaccagacgaatacgtcgtggtacgcggaggacgttgagagccacggaccatacattgggaaaggtaa

SEQ ID NO: 331447 - DNA, 1694 bp, Cannabis indica
atataaagccttgtaaacactttaaaaatcagaatattttgggaataaaattttgagtggttttcttcataagttcttgagagaactattcgaacttatcaaggagtattccttgtggtgttcaacctgacgtatcaaacggatttccaccaccatttgtggtgtcttccttcataccgaggttcatgcttaactaagcattaggtcgcagttccacatccaaatttttagaattcttagaggttgccataattggtattgggtttcatcacaactgttggtgttgttcgtatcaattttacccctagttttgaaaatccctaggttataagtttaggggcattttagtaaattgtcacttaggtgatttggtggctgccttaggtgttgacacctagcctctttattcagcaagagattaattagataatctcttttcatttgaagaaaaataagaaaataggaaaatcaaagaaaaaccctttatctttctatgttctctctctctcttcaaactctctaggaaccaaaggatttgttacttgtttttggtgcttcgagcaagaaattgaggagatttagcaaaggtaaaccctagaaggttttgtttattcaattctataccttttacttggtttggttatgcaattttagaataagggctgttaggctttgattacgctaaggttcagtttttatgttcattttgagttgattctatgttctggtagttggtttttatgtattgtgttgtaatttcacaggtttgagctttgaaacccaagtttaggtctttaatggcatctttaattcagtgagtttttctaagtttaattggttgcaatatattgtttatgccccatctaggtactttgggaaggttggtggcaattggttgagttttgagaaagccttgggttttttgggggaactggtacaaagtggttaaccgctatgccagtacctgtaaaaccggttaacgagttttggcaggttccccaaatattgttttctcaattcttgcccatctcagtgccttagttaggtgtttcccctgtttcctaggatagtgtagtccctagtgattataacagaccatgagttgttgtcgggtttccaagattagggttttggacatgtgaattacccgggttttaatatgtgattagggcatccatctagcacaacactttccgttcaggtcagctaactcacttgaatctggaaaggaggtaagaactgtgtataatatgtgatgtatgtgctaatgtatatgcatgcttgttgtgattcatacactaccaacacttgtacggtagcggtatagactgcactggtaaagtgtatgatgtctgaagagtacatcacgatgttaccagcactagtacggaaggtacaaggtgtatgttgtacaacacttaataatactcggggtacagttcataccccacctacactattacaatggtggtactaagtgcatgtggtatagtggtgcatggtcgtttcatagttagaacgctcttactcatatgttaagccttgtaaataggtgtatgggcgcctagatacgtattatatgatatgttatatgcttttcttactgagtgtgtcaactcacagtcctgcttccatgtttaggtaaaggaaaggcgaaaggtgaaaaaagagtgagtctgtgcagggatgaggtt

SEQ ID NO: 331448 - DNA, 715 bp, Cannabis indica
agagagagagagttgaagaaagagagagtgtttcttttgaatttttattttgagataaatggaatatttgagtctatctaatactatttactaacttagttaagaataaatagatccatagtaaatcactaagggactaaagaacccaaatggcaaaagactatttttccctctcatacaccaaaaaaaaacatacctaccggtattttagtcaaaattaatacctcgaataatccgacattctcaatgtctaactatattgtcccgctataactaaaatactaaaccataaggaaatgtgattctatcggccaaacgttgcgttcaaatattgtcaggcataaaatatgaaaaatatgaaatttcatatataatgtaaataatacacctagaatttaaatatatcaccataaattcataaatcataattacaaatctaatttcataattaagccctaattatctactaatttatcatactaaaattaagaggcctttacaattatcccccagttaaaagaattttatccttaaaatctaacctgaacaactctggattttgagccctcgtgtcaaactccaaccccttggtggcttcctgcaccttactgtttctccaaaacacctttaccaaagctatggtcttaggccttcctgggatggtaaaggatttcacaatcatagtcctcatattcaaatctttttgtgtaaagaa

SEQ ID NO: 331449 - DNA, 622 bp, Cannabis indica
tcaacatacttgtgaatagatctaagatcctggtaaaataatttccaacatcaccaacgtccaagtgaaaactaccaaatccaataccaaaaggtgtcgatcctccattaaagaattccttcaaacaagcaatcaaccaccccccaccatggccactatcaaacccacaaacgggtcgacaagccatggtgccgaaagaggggaaaagaaacctcaattggcggcagactctcaaccctagagagaaacactagactccccttattattgtgtgtatataaattattttattatttacaaatttcatgcggtattttttcattatattttattttcaactcaaacttattttgtttgataaaagaaagaataaataaaatttttatttctaaactatgacactgatagagtttgttcccttaattatttattttttttttttagtaagatattccctttaaactatgaaaatagctttaaatttgctcatttggtggcatttttagtatttttgcgaatatttttctgatataagacttatctgagactaatacactataattcgagagtctaggtaaaaaaatattgggattttttctaataatatacttaaaataacaaa

SEQ ID NO: 331450 - DNA, 595 bp, Cannabis indica
aaaaaaaaaaaaagataagttgataaagaaaatgacaaaatcgaaacctatagggcaacatataggttcgaccaattaaggttcagttaagccattatttttttaaatttcatataatttatatctaaccctagatgaaatacaagaaaatataaaaagcctctctagaatttgatatactctctttttcttcttctaattttcaaaccctatagtgagttgagtgcttgtctacacatttcaagtcaatactcaaatatagtgtggaagattgtgaagaatttcatcacctgaaggagatccatgttcaaatattggtaatactctgcgacggaaaggaacaagagttagaaatctgaacgaaatgagctattatatttcaatgtcaccaatgtaaggttttaataattttatatgtatttattttattgttttaggaaattcatatttaagatgttagattataatcctataatcaacatacgcaaatctagatcatgttaaaataatttccaacagtgtcacccagatagatgtcatgtcattgtgctgaaattcaaataagaatattatattttattacaaatatatatat

SEQ ID NO: 331451 - DNA, 942 bp, Cannabis indica
tttaaaaaaaaaaaaatccataagatcatttttttgaaaacaaacactatatttttacaaacttatatcttaacctacaaaattttaaaaattcaaaataagttatcatacaaattttagagtttaaatggtttgttttgcacttgtataaaataaaagaggcttattcataaaaataataataataaataaataaaagaggctcccatgcaggatgtgtataaattgatccaattcaataataaccgatcgccaaacataggatatccaattatgatcaaatcaaattgaataatatttttgaatatccaatcaaattggatgtcagatgaggtattcaaaaatccaatacatccaacatccaatcgaactaattaatatttttatttagtttgaattagtaattagatttatgttgttatacgaaaaaaaaaaaaatatatgtatatatatataaattaacattaaaattttacttaaattttaatctatttaatggatctgatctgatccaataaatactaaatctcaaatattagataaacttaaattaaaccaataaatatacataaaatacatccaatgaatagaattaatctaatccaacatctattggatgttagatccattggataattgaaattaattgaatcgaatggtaagatatatcatccaatatataattagatcaaatcttaataggcctaaaaacattaaatgtgatccaataaacacctctaccctcatttaagagattgtttacttttattttcatctctattaattatttgaatttattaaaaatttcttacatatctttgatgtatattttcatataaaaaaaatagtattataactcgataacataacatgaatagagtgtattatattaaacatgatgaatgaattaagtttgggaagtaagaattttttttttttttt

SEQ ID NO: 331452 - DNA, 438 bp, Cannabis indica
aatttcatttaattttattattatatgtactaaaccatgctccctagactttgatatctatcaaatcatgtccctcaaactttgatatgtactaaatcatgccctttcaactttcatccatgttagaatttttttactataaagtctttaaatttaacaatcttaatagttcaagaggaatttttaacggcaaaaaaagttcagggaaaaaaattacaaattagtcgataatgaacatctagctcaataatgtacaagaataattagtaattttcgactaattttgatatttaaaatatatggtttattaaagaatttccttcagctattacactaatacacatacatatttttataaattagcctttttgctctttaaactttaacaactattaaatcgtaactcttaaaataaaaataagaaagattcaatatttt

SEQ ID NO: 331453 - DNA, 513 bp, Cannabis indica
atataaatattaaagaaattaacaaatttttaaatcttaccataatttaaaattaaaataatcaatttttaaatttaaacctcaaaatatcaaaaataataataatttattaaaaaataaatattattaatttaaaaaatgatatttaagtttaaatatataaaagataatattttattttaatttttggatttgaaaattggaaaaaaatcgaattttgggaaaaaaaatcccacaaaattcgcaaagttggtgttggctgcccagtaggctgcaggcgcagccatgagaggctgcaaaacaagccttacacgcgcggaagtgaggactctagtcgagaaaactcggcgttgcagcgtgtcctaagcgagctacagggtgcacacgggcgtgggacaagtctgaagggagtgggcagcatgtcttcagacacgaattgtcctaatccgcgtgtgcatcactacgtttgtccgagttcctggtgagattgagcaccatactcgacaccaattt

SEQ ID NO: 331454 - DNA, 643 bp, Cannabis indica
cgagaatcttgggttgcataagagcaagaagagtaaatactcaccaagaatattctctgtatttataagagtgaaacactcaccaaagacattctctgtattaaatacatccataaataatacagactcgtggactaaggctcattaacgccccaaccacgtaaaaatccttctctaattttcttacagttctcaaatcttataatattttattggttgccgaaaacctcggtcaacacaatcatattctctattttagttaatgtttaattattttaatagtattttatattttaaatttgttaaatttaaattaatttaataaaataataaaaaaataataatacttttgatttaaatactactaaaaaaatttagcaaaaaagtagagagctctgcatccattctagggatcgactttttgtatggttggagctcatttttttaaaactcgctccctattttaactaaagattgtgtttagagagcataattgaagatgctacaaacttaaaaaaaaaattacaaataatttagaatgcaaaatttataatttaaatacctcaattgttgtactcatatttatttcaatatttatagtcatgtaaaacatagaggttgtgtttgctaatacttttttaat

SEQ ID NO: 331455 - DNA, 590 bp, Cannabis indica
caagaacaatcttcaccttcaagtttagaagtgaaaatatacatatataattatataaatgtatgtacttctttaggaatcaatgaatgaaaagttagatgtgaaatatgtataaagattctgatataccaaccaaaattaaagtttagaaaagaaaatgaaaaaaaaaatactagtgaaaagccaattataagaaaaattacatgtaagtacctatgttttaaataattatatataacaatataggtaacaatcgcatttaacccttgtagctaaactctcccaattattattttacttacatttaaccctttagcacaaattttggtagtaaaactattcaaactattgaactcttaacaaatttaaggtgtcatatatttttcacagtaaactaccaacatggactgcttatatgtatacgtggcatatttatattggtaaacctaatatcattatttaaaagttatttcaaaatttataatattttttatttcaaaatactatatctcaactgtccaatagaaaagataaagaataaataaattttgaaataataatattaggtgtactaatataaacgtgtcatg

SEQ ID NO: 331456 - DNA, 1332 bp, Cannabis indica
atatatctcaacttttatatttctccttaaagataatcttagtttaattatttagatcatctccactaattatactacgagtagttaaagtttatgacttagtttaattattcaaatcatttccagtgataacattaagtttggtgtagaatcaaacactaatttgttgtagtatttttttaaatttagtgaaacaatttcaataattcacacaaaatatttcatcaaataaatatattttacttaaaaaatttcatattttatattatttacattaataaactcaaaatagcaaatttatattataattttatcattactattagtaagaatttaaattttaaaataatatatttaaataaaatatttattaaatcaattaaacataaaatatataaattctatagttatcctaatatacacgaccattttttttttaaaaaatgagcaaacaagttctatgtaaaaaaaagcttaccaatatcaagcattttaagaatattacgattctcaatgtaattcaagttcatccatatagtcaatatgttgatattcttcaaagttaagatccttaaatatcaatttgactatagaattattattttacttaatatttatttttatttgtgggttatttcagttttataatttagtgttatgttatttaattttatttaaaatttagtgcttttgttattgatactctgtagttttaaatatgttaatattttaaattaattattattttttattataaattttaatttaataactaaaatataaaattatttcttaaaataaaataaaataagtatagaatgaaaaaaaaaatagtataaatttaaaatttaatactattaatgataaagatattagtgcataatttagtatactattaagataaaataataccacgaatctacactaatttaataaaataatataccattatagatattcttatactaaacattttaaataatatttaatacgatgtaaacactaaaattagaaaataaataaacacaaaattgctcatgctcattaaactaaattacactccttcaacttaaattttgaatgccgccggtaaccaaaataaaaaaagagagagatgaatggatagaagaaagaaaaaaaaaaatttaaacaaatacataaaaataacaaaaatacggtttatggaattttaaattttttacgattttatttacaaaaaattacgggcattttatgttgtactcatattaatttgttgttgattttttgttatctgtttgttattttttgttgttatttaaatattatttttatgtatttttttattatttt

SEQ ID NO: 331457 - DNA, 485 bp, Cannabis indica
tttttgaaaatgaaaaaaaaaaaactttattaatcaaatagcttctccataacaatagatatttgtattactcttgttgaacttatgaatagaataaaaacaaaaatcacgagcaatactagtaaacaatttcgtttatagaacgtttattaaataaatactcaacagattttaataaggtaataacaactttcaaacacacaaattaatattacacataattaaacttgactttcgtagtgctaaattattcttcacaagtgagaccttattaataacaatttttaatatatattgtttctattgccaattagccagctaataaataagaaatacaatgacaatataagacattaaccataagacatatatatatatatatatatatataaatatatatatttatggaagaggtttcaatggttacatttttattgtaaccatcatggttatatttttttaagctattggattactattaaatg

SEQ ID NO: 331458 - DNA, 609 bp, Cannabis indica
agagaaatgttatcagtctttttttattttcattgtgaacaccagatgatcaatatttgtttatatgatttttttttcttatttgtcatcttcatttcacgtatgttttttttttattattatttttttaattgtaaataaacaggcatgcatcatgtatttctttttgttgatagcaatttttttcttttttcttttttcttttttctaagagaattatgttaactgcagagtatatcttatatacagatgaattcattttcaagagttattggaaagtagtccattttgtgggtagtaggtttcataaaaatatatattttaaaaaaagaaacaatcagccaaagtttttattgttatacgatttgtatattaattactgtttaaaaaaaaagtttttttattcgtacacttttttttttatttttacagaattttataaaaaaattcctattgcaatttgcaactagcaggcaacttaaatcataatcaaaagtcatagagcaacccacatataaactaccggaaatacttctttaaaaactcaaaccgcaaatttaaaaaaaaattgaaaaaataatatattgagtaattccaaaaaaaaaaaaa

SEQ ID NO: 331459 - DNA, 1258 bp, Cannabis indica
tgaacaaagaaggagggacgctgataagctattagagcttgaggtggatcttgaaactggcaaagtagttgggactgaagccagcgcttacgttggatttatgggccagcaagtttccattttttgtccaggtcatcattataatgtttctgatgtaccccaataatttaaggatcaagtgcttaatcgaataagggtgagtgattttccattatttatggtataattattttatatccttagttataaattaatataaattttaaattattttattacatagtattatttttatattgacgggattccccatcaagacctacttatggggactttatatacgaagatggcggagaggtaaagtgagcgaaagaccaacagacacatgcattttaaacaacattacactaaaccagaagattgggagaaacttcttcaattgccccctgactacttgaatgtcgagagttggaagtctatttgcgaaatgttcaccagccagcaaaaactttttggaccgttcaagtaaaaacaaagagaataggcaatagatgaaatatccaacgacgcaaggcacaaatatttattattaaaattaaaattttatattaattatagattctaataatttttatttaaataggaggaactagtaaaggagcttgataggaaacgacttggacaacaatcccaaagtgatacatttggtactgaatttgatgctggttattagtacgacgttctggaaatagttcttggcgaaagatctgactatcaaagaggcgtcggtaaaaggatcaaaggcaaaggaaagaagtcatttactcaaagtcagtcgacggtgcctcctccaccatctactgaaatgatgagcactatggcagaaatattctcaactatgcgtgacacaggggggggggggtgctttgacgcctaaacaatgtgctcatctaaataacctgcggtttgagaactttattcaaacgtatagtcaatcacagtcgcctagtggttcatcttctcaaagttatgtcgctcctccataacatcaacaacaacctcctcgcaacaacaatttcgaccttcttcgcagcaacaattccaaaaaatatcgcatgcaacaaccccaatcttttctcaacagcaataacagtctggtccgtcgttggaaatcagttcttatatagaactccatcagagtctctctgctcggctcaaattttgatgatttttgaattatttgggagttcgtcgcagg

SEQ ID NO: 331460 - DNA, 883 bp, Cannabis indica
agatgagtataatggagatggattgttattcaagttgtaaagtcaagaagactcgagacacaaggagtgtcagttgaatctcaatcttttctgaaaaaggagaagatgcttggaagagttctcgaaaaacatcataacatcattgaaatcgacctaggttgacaaaatgtcaacctgggctgggcagccccaactatcaacctgggtgctaggccttgtttttggtacctaggaagtgttgtttcttttttgttagaggagtctatatcccccatttttatgaagataaagaagatacaaaagtcagattattgatctgatacttaaaaggtgcctagattgacaaattgtcaaacttgggccctggggtgctcggggccctgatgctcaaaaataaactagctccaattatgattctaatgccttaaatatgttcgtggtatatctagttgatgtcccaatacaagttttgacccatttgcgctaagacagtcccaaaaactaaaatcctagttgtgaatgtcaacatgggtgaaaccctaggtgcccaagttagctcccaggttgcaggttcgtgtaatttttgaatgtttgggtttagggttcggatttgggtttagggtccatgttcgggtctagtgtcggtgtttggggtcggggctggtgttcaatgtctagggttcgggttcggggttcgggtctgagttcaagtttaggttcgagttcagggtccaagtctcgattctagtccaaagtttgggttcaggtccaggattcgagtccaaaatccgggtttgagtctagggtccaaggttgcagttcgggtgtgaatccgagtcatggtcgtgatcggagttagggtcgagtttattgtaaagaattt

SEQ ID NO: 331461 - DNA, 901 bp, Cannabis indica
atataaatgtaatttttttattgtcacttgtgaaaaggagaaataaaaaattggcattctttttttttccttattgtataatctttgtgtttagtggaaatacacgattaattttttgttgagataattttttactataattaagtttgaagtttaaaaatttagttgagagtattagttagtgttaaatttagaaaggtacatagcaaattttagagaaaattacacttgatactcactttttgtttcatattttaatttttaccttcatttaactactctttaatttatacccacttttataagttatgttcccattatgtgcattaggaagtctaatttttataagttttgtggggttatatttagtactttgattataaaaaagggcatttatcaattaaaattattttaaaattatatttaattaatatgtaataaaaagggatagttttcaacttatccccaaattttatatatgagattttattttctaaacattaccaatataaaaccaactctaataatttaatccatattataaaatataaaactaaaaaaaaattaaacaaaacaacaagaatattataactagaaaaatcatggaaatatataaattattttttttatttaagcgtttatatattacaaggagacactactcttttatggtcacttgagctaagctcaagtagttaaatacaaataattagtattttttttttaaaaaaaataaaattgtacaaaaaatatttaaaattttatgcaactatatttctttcgtaatcttttgacttttttttagttaaatataaaataatcattttatgttgtatgcgcgaatgtattatcactacaaaaaattgctacaacataatatttttgtgactaaatgtgactt

SEQ ID NO: 331462 - DNA, 611 bp, Cannabis indica
gcgaccacaacaaatgatggaaaggcagccatgaagtttcttcataaaaatattttttgtgttttggtattccaaggccattcttagtgatgaggagactcagttttgcaacaaaattctaaaagctctcttgagaaagtatggagtgagacataaagtggcattggcgtatcatccacagtctaatgggcaagctgagatattaacagttagctacagtgtgacccagttgagcacaatcaacacatctagaaggcagccactcatatttaacctgtttctccacaagttgttttctctcgttaaaataggctatggtttttggaggatcatctgaaatttcaacatcgaccaacactctagaaaatttgatcattgatctttctagtgttactttgtccaccattattcgcttgcctaatagttactcactaaagcactcaatttattcttccccccaatattggagacctgatccattcagcctaacacaaaatcgagacaaacctcactaattgtgtaacgtcctgtaatgaccattttagtaatttggattagtaaaggtaattaggactaatttctgttaatttataattatttatgaattaatt

SEQ ID NO: 331463 - DNA, 832 bp, Cannabis indica
ataatttatttgactatttataccacgtcctgtcattttagattaattaatttaaacaaattcatgggaaagtaagttgaaagtttgttatcaagttaattgaaaaaaatcatattaaagctgacgattggtaatagagtgcatttccaaatgtaatgtatatacatattttattttattttcatacaagtaaattttaatggtagtttataaaatgatttaaattgaataaatgttaaaatttgtgttaaatttagcacaaaatataacatgaattaaattttataccatattaaatattatttttatatttatttttttgacacttattaatgcaattattaattatttttatatttaataattttttttgtagacttttaataaaattttaatgtttttatttgatttttttattcatttttatcaaagaaaggtaaatttcacttttagtgtgttggagtactattgtaaaatttagactaaatgtaacattaatttatttttagccaaatttaattcaaattatataatattcattggagatggtgcaattcaaattgggaaagaaacatttttgtactaaatactataaagtaatgtagttttccttcttgagagattttaatcttgctatgcttggaaagcaagggtggagactcttattccgacatgattctcttgtgagtaaagttttcaaggctagatactatccacagggtgattatttatctgctgagttggggtctaatcctagcttcatttggagtagcatatttgccgcgaaggacatagttaagctcggtttaaggaagggaataggatcgggatt

SEQ ID NO: 331464 - DNA, 899 bp, Cannabis indica
ttcttgtaatccaattccaacacaactattatacttaatttataaaattgatcaatacatcaataacaatacaagcctgcaaactgtatttttctccattatatgcaataatagataagatatatgaattaaagtaaataagggtatatatcaattcattgcttacatctaaaatttgatatttcaggcatggataagccttggcagagctcatttaaactttggagaacctgcagcgctatgtaaagctttgataaagcattagcaatgaagatggtgcttctaatactttcattcattatcaaaaattgctttatatctttacaacatcccatacccaaagtcaaatataaacaaaattaaaaaaaaaaattattaatatctaataaaaatttcagaatgtacataaataatttgtgagtacacatgaaaattaacaaaattataaacttgaaaaggctgacctaagaggacaacgagatataatctgtaagcaatcccttgagcctgcaattgcaagcaacgctcgattcctgaatagcgatttggggccgaagagatatattgataaccactacaggtagcccagaagtactgaaacttaatgaagataagggcccctgagctcaacgttgatgagatcatcgtcaaggtcaaagccaaaagcgctcagtgtggatacccttcaaagggctagtatccccatcaaatcgtcgaaggcctcgaggtacctaagtcgcaaagctagccgaacgccgaagtcgcagagctaaccggggacgaagactgttttgaagtaagaaatgaaaaaaactcctaaaattaatcataacgttattattttgggaaatttacacagtttactgtgttttcccattttctttcttttatactgttac

SEQ ID NO: 331465 - DNA, 590 bp, Cannabis indica
ttgcacagcttacccggtatttccccttacggatcacgggactattgactgtcacagaaaatgatgataaatttgcaaatcgtgtggtggagagtacggacagtgaagaaggactaacacctttgcacttcttgtctcggaagcccccttacttgttctcatctcctaaaagtaatatatactagatcattattatataataattaagctttttattcttatatatttcaacttcataattttgataatttaatcatcatgactaataatctatagccagaaaaagaagattaatcaagatctccagttaaaaagttgtgtgttatactgtattaaactaatttaaatttgacacgttaattaatttttcatttactaaaaaattaaccatctatatatacaattttttttttcttaaaatgctcaaattaattaatgtggcacaatgaaatttgtttaatacactataaaatataatttttcaacaaatcttgattcagtaatttgttcattacactacaaatttctttacttttagtttacatttagttccgaaatattagtcacatataattttaaaaaaaaaatta

SEQ ID NO: 331466 - DNA, 655 bp, Cannabis indica
cttgcagctttagttctcgagtattaatcactatggtggaggactaacactggcaagagaatcaaagttaagaaaccaatttaattaaataaaaaaattaagaaaccaacatgtaaaattatatatgacacttattttgtatattgtattgttgtttgaagcaagtataattgaataataacttctcccatttatgacacttattttgttttcccctttgtagtgaaatatttggcaaataatacctaaacagtaataatcacaatacatctatatgcacgaacttctattatattacaaacttatgatgataatgataacattcagaatttacaaccattgtagtttggtcacaaagttgttttgagtttatcttctttctattatcccccttgtctttaatatgtttttcattttgtctttggaataattatgattgctgtgaaaattttacaacaaaaggtctctcttttccctatatccatattgaaatgaatcatcatcccttttctactttttataattttactcatgatcatgtattttccacttcaattattctcctcacactattatatttacatacagggccggggtataagcgggctaggtccgtgcttagagcctacactttttgggacccaaaataaaaaaa

SEQ ID NO: 331467 - DNA, 1132 bp, Cannabis indica
aaaaaaaaaaaacaaacaaatacatgttaaaaaatatataaaaaaataatgacacaaaatttaaatacatgttgcaaaaatataaacaaaaaaaaaattaaaaacaaaattaagtggaggcatcgggccatgcatcgggaccctatcggacccatcggaccccttaaaaatataaacttttttaaaaaaaaaacaattgaccatcgggcccatcgggccatcatatgaaataattgtgaaaatttaatattgtaaaggcaacgggccaggcatcgggccctatcgggcccatcggacttagtcatccaaagtatgcatcaggcccctatcgggcccagacatttacgaaattgaaaggcatgcatcgggctcaaaatcgggcccctatcgggccctatcgggcccatgcatttttcaaaattcaaaaggcatgcatcgggcccctatcgggccaggcactttaccaaattcaaaaggcatgcatcgggcccctatcgggccttcatcttcaacacattatcatcatattcatcccgatgcatcggacctacatcggacctgcatcgggatgcatcgggccaacctggaaaatttggaatcttacccaaattcatcacagaacctagatccacatgttctaaccctagatctaatcatatcacaccctaaacctataaataaacaacattttaaccctaaacaataacataaaaaattaaaaaatgaaagggggaatttaccttgctcgcgtattctgggttcgggcaatggggtcttgggttcggttggggtggcgagtttcctccgtggggtggcgagctccctccgtgcggtggtggattcatcgttcgagtgggtggtgcgatttggtggtgcgatttggtttgggggagcttcggtggtgcgagtgggttgagagaacaggggacgaagagagagagagtgacttttgaaatgaggggggtaaaattgggttttatgaaaatatatcccactttacaaatattgtatagtatgagattaggggtcaaattttaagtattattaagtatatatattcaaatttccttaattaaatctaatttaaaaaaataattatatatgcaatgcccgtaacattaacctaatatat

SEQ ID NO: 331468 - DNA, 553 bp, Cannabis indica
gttacggttatgcataatcttatatatgcatatatgcatatacgcatatatccaacaacaacaacaacgatataataataataataataataataataataataaattgtgttgaatatacactttagcactataataattttggtaaatattattatactaaaaataataatcacaatcataattattattattcctactaataataatatgtaccaaaaatcaaagcaaaattgcatattcatttaataatatccagatatatatatttattaggcattacgcacatgccaagaaaaatcaaatattatatcatcacaaaacctcatacatatttaaacccataaatatgtaaaataataaaaatactctatgctaaaaaattacaaaaataccctttatgaggagttagcaggtattacaattctcactcatagaaatcgtgactttttatctttatatttaagtgattaatctaattaaatatgtaatttcgatatttttgttggtcacttactttacatttgttccaatttatttatttatttttaaa

SEQ ID NO: 331469 - DNA, 7780 bp, Cannabis indica
tttttcatgaaaattagtctccacacgtttttttatatgtccaaccaccctgcaaaatttcatggaaaaactccaagtatttcttatacttccttcacatatgtctacagagaaaaaatcatctatgttcctggcagagccttaaaacctcatattgctctttaggggggtgagctgggatgggcaggcaaggtcaccatggggagggcgctgggcaggccctctaacccccctccatggtgcgcaggctaggcaaattgggcgtggcaaagggtgattaagggtgtttcaaagccatcgtgaccgacttcgagtccggacgagcgatggtggcgactcatctgaaattttccagcgtcacaaggctccgctagcccgcagtgggtgcccacgccgcatgattttaaacgagtgattttaatctctcgtttaaaatcatgcggcgttgacgttgggtgattgaggatgtttgaaagccatctggaccgacttcattgtccgaaggatgggggacactcgtctaaaattatgcggcgtcacaaccatcaactgggcggttacgttggttgattttaaatgtttgaaagctagtggaagcggacattcatttaaaatcattccgcgtcgtcaccctctgatggtattttggggtgttcacgttgggcgattgaggatgtttgaaagccatctgcaccgacttcattgtccgaaggatgggggacactcgtctgatatcatgcggcgtcacaaccatcagctgggtggttccgttggttgattttaaatatttgaaagctagttgaagcggacattcatttaaaatcatccattgccaccctccgatgggatttcgggaggcgttcacgttgggtgattgaggatgtttgaaagccatctgaaccgacttcattgtctgaatgatggaggacactcgtctaaaatcatgcggcgtcacaaccatcaatttcggtgggcggttactttcacacctagcggtgcggtcatggggtttttaagggcgtttgtaagctttgtctttcgactttattgtctgggcaaggtacgcaatcgtttgaaattatcttgtggctagcgtacgtgatagtgtatgagtggttttttggttgattgtgttggtaggctccgtgctcgtgcatcgaactaccaatcctccaaccttcttcagggttgctacaagagcgctgctcatttgagcgcaatgcggtttcctgtgtttgctacctcggacggaatgattcatttggttgcctctttcctcctttgtggctgtaatggctgcaagggggacctcgtagcagtcctcgtgtcccgaacgtgcccttcgttattgattgtgtcgtttcggtcctcgagtgcctgcttgatctctcggatgcggaatgctacgcgagtgtgggggtctgtgaccttcgaacactcaaattttccatttaaacggatgacgttcgtggggtgtactgatcgtatgatctgcatcttgcggcgtccccgaatgagtgctacctggttgatcctgccagtagtcatatgcttgtctcaaagattaagccatgcatgtgtaagtatgaactaattcagactgtgaaactgcgaatggctcattaaatcagttatagtttgtttgatggtatctgctactcggataaccgtagtaattctagagctaatacgtgcaacaaaccccgacttctggaagggatgcatttattagataaaaggtcgacgcgggctctgcccgttgctctgatgattcatgataactcgacggatcgcacggccttcgtgccggcgacgcatcattcaaatttctgccctatcaactttcgatggtaggatagtggcctactatggtggtgacgggtgacggagaattagggttcgattccggagagggagcctgagaaacggctaccacatccaaggaaggcagcaggcgcgcaaattacccaatcctgacacggggaggtagtgacaataaataacaataccgggctctacgagtctggtaattggaatgagtacaatctaaatcccttaacgaggatccattggagggcaagtctggtgccagcagccgcggtaattccagctccaatagcgtatatttaagttgttgcagttaaaaagctcgtagttggaccttgggttgggtcgatcggtccgcctccggtgtgcaccggtcggctcgtcccttctaccggcgatgcgctcctggccttaattggccgggtcgtgcctccggtgctgttactttgaagaaattagagtgctcaaagcaagcctacgctctgtatacattagcatgggataacatcataggatttcggtcctattctgttggccttcgggatcggagtaatgattaacagggacagtcgggggcattcgtatttcatagtcagaggtgaaattcttggatttatgaaagacgaacaactgcgaaagcatttgccaaggatgttttcattaatcaagaacgaaagttgggggctcgaagacgatcagataccgtcctagtctcaaccataaacgatgccgaccagggattggcggatgttgcttttaggactccgccagcaccttatgagaaatcaaagtttttgggttccggggggagtatggtcgcaaggctgaaacttaaaggaattgacggaagggcaccaccaggagtggagcctgcggcttaatttgactcaacacggggaaacttaccaggtccagacatagtaaggattgacagattgagagctctttcttgattctatgggtggtggtgcatggccgttcttagttggtggagcgatttgtctggttaattccgttaacgaacgagacctcagcctgctaactagctatgcggaggattccctccgcggccagcttcttagagggactatggccgcttaggccaaggaagtttgaggcaataacaggtctgtgatgcccttagatgttctgggccgcacgcgcgctacactgatgtattcaacgagtctatagccttggccgacaggcccgggtaatctttgaaatttcatcgtgatggggatagatcattgcaattgttgtcttcaacgaggaattcctagtaagcgcgagtcatcagctcgcgttgactacgtccctgccctttgtacacaccgcccgtcgctcctaccgattgaatggtccggtgaagtgttcggatcgaggcgacgtgggcggttcgctgcccgcgacgtagcgagaagtccactgaaccttatcatttagaggaaggagaagtcgtaacaaggtttccgtaggtgaacctgcggaaggatcattgtcgaaacctgcaacagcagaacgacccgtgaacacgttttaaacagcttgggcgggcgagaggagcttgctccttggacccgcccgcacctgctgggagaaatctcggcgggctaacgaaccccggcgcaatctgcgccaaggaacaataaaagattatcgcgtggctcgtgcggtggcccggagacggtgtccgccaatcgagatgcgtgtttatcgaaatgtctaaacgactctcggcaacggatatctcggctctcgcatcgatgaagaacgtagcgaaatgcgatacttggtgtgaattgcagaatcccgtgaaccatcgagtctttgaacgcaagttgcgcccgaagccactaggccgagggcacgtctgcctgggcgtcacacgccgttgcccccatgtgcactgccaaaagcgtgttcaggaggggcggagactggcttcccatgagcattgccttgtggttggcctaaattcgagtcgtcggccgcaatcgcctcgacattcggtggttttcgattatatcggtgccccgtcgtgcgcgaatccgtgaccgactagacccgtacgaccccaatgtgctgcgaacgcagtgccttcaacgcgaccccaggtcaggcgggatcacccgctgaatttaagcatatcaataagcggaggaaaagaaacttacaaggattcccctagtaacggcgagcgaaccgggaacagcccaggttgagaatcggacgcccacggcgttcgaattgtagtctgaagaagcgtcctcagcggcggaccgggcccaagtcccctggaaaggggcgccggagagggtgagagccccgtcgtgcccggaccctgtcgcaccacgaggcgctgtcggcgagtcgggttgtttgggaatgcagccccaatcgggcggtaaattccgtccaaggctaaatacgggcgagagaccgatagcaaacaagtaccgcgagggaaagatgaaaaggactttgaaaagagagtcaaagagtgcttgaaattgtcgggagggaagcggatgggggccggcgatgcgctccggtcggatgcggaacggtgagagccggtctgccgatcgactcggagcgcggaccgatgcggattgggggggcggcccaagcccgggctgttgatatgcccgtggagatgtcgtcccctcgattgtggaacacagcgcgcgccgtctcggcgtgcttcggcatctgcgcgctccaggcatcggcctgcgggctccccattcggcccgtcttgaaacacggaccaaggagtctgacatgtgtgcgagtcaacgggctagtaaacccgtaaggcgcaaggaagctgactggcgggatccccttgtgggttgcaccgccgaccgaccttgatcttctgagaagggttcgagtgagagcatgcctgtcgggacccgaaagatggtgaactatgcctgagcggggcgaagccagaggaaactctggtggaggcccgcagcgatactgacgtgcaaatcgttcgtctgacttgggtataggggcgaaagactaatcgaaccatctagtagctggttccctccgaagtttccctcaggatagctggagctcgtaaacgagttctatcaggtaaagccaatgattagaggcatcgggggcgcaacgccctcgacctattctcaaactttaaataggtaggacggggcggctgctttgttgagccgctccacggaatcgagagctccaagtgggccatttttggtaagcagaactggcgatgcgggatgaaccggaagccgggttacggtgcccaactgcgcgctaacctagaacccacaaagggtgttggtcgattaagacagcaggacggtggtcatggaagtcgaaatccgctaaggagtgtgtaacaactcacctgccgaatcaactagccccgaaaatggatggcgctgaagcgcgcgacctacacccggccgtcggggcaagtactaggccccgatgagtaggagggcgcggcggtcgctgcaaaacctagggcgtgagcccgggcggagcggccgtcggtgcagatcttggtggtagtagcaaatattcaaatgagaactttgaaggccgaagaggggaaaggttccatgtgaacggcacttgcacatgggttagtcgatcctaagagacgggggaaacccgtctgatagcgctgcgagcgcgagcttcgaaagggaatcgggttaaaattcctgaaccgggacgtggcggctgacggcaacgttagggagtccggagacgtcggcgggggcctcgggaagagttatcttttctgtttaacagcctgcccaccctggaaacggctcagccggaggtagggtccagcggctggaagagcaccgcacgtcgcgtggtgtccggtgcgcccccggcggcccttgaaaatccggaggaccgagtgcctctcacgcccggtcgtactcataaccgcatcaggtctccaaggtgaacagcctctggtcgatggaacaatgtaggcaagggaagtcggcaaaatggatccgtaacttcgggaaaaggattggctctgagggctgggcacgggggtcccagtcccgaacccgtcggctgtcggcggactgctcgagctgcttccgcggcgagagcgggtcgctgcgtgccggccgggggacggactgggaacggccccttcgggggccttccccgggcgtcgaacagtcaactcagaactggtacggacaaggggaatccgactgtttaattaaaacaaagcattgcgatggtccctgcggatgctaacgcaatgtgatttctgcccagtgctctgaatgtcaaagtgaagaaattcaaccaagcgcgggtaaacggcgggagtaactatgactctcttaaggtagccaaatgcctcgtcatctaattagtgacgcgcatgaatggattaacgagattcccactgtccctgtctactatccagcgaaaccacagccaagggaacgggcttggcagaatcagcggggaaagaagaccctgttgagcttgactctagtccgactttgtgaaatgacttgagaggtgtagtataagtgggagccggaaacggcgaaagtgaaataccactacttttaacgttattttacttattccgtgaatcggaagcggggcactgcccctctttttggacccaaggtccgcttcggcgggccgatccgggcggaagacattgtcaggtggggagtttggctggggcggcacatctgttaaaagataacgcaggtgtcctaagatgagctcaacgagaacagaaatctcgtgtggaacaaaagggtaaaagctcgtttgattctgatttccagtacgaatacgaaccgtgaaagcgtggcctatcgatcctttagaccttcggaatttgaagctagaggtgtcagaaaagttaccacagggataactggcttgtggcagccaagcgttcatagcgacgttgctttttgatccttcgatgtcggctcttcctatcattgtgaagcagaattcaccaagtgttggattgttcacccaccaatagggaacgtgagctgggtttagaccgtcgtgagacaggttagttttaccctactgatgacagtgtcgcaatagtaattcaacctagtacgagaggaaccgttgattcgcacaattggtcatcgcgcttggttgaaaagccagtggcgcgaagctaccgtgcgctggattatgactgaacgcctctaagtcagaatccgggctagaaacgacgcatgcgcccgccgtccgtttgccgacctgcagtaggggcttcggcccccaaaggcacgtgtcgttggtgaagctcgcacagcggacaagttgtgcgggccgccttgaagtacaattcctaccgaacggcgggtagaatcctttgcagacgacttaagtacgcgacggggtattgtaagtggcagagtggccttgctgccacgatccactgagattcagccctgtgtcgctcagattcgtccctcccccttttttataacaacacactttcaaggcctgaggttatcaaggtgtttgtggtgcttccatcaacacaagttgcggccgtagcaataacatatgagctctttccctttgggacttgatatgcaagccaaagtgttggtcgggttcaacaaaagacttagtccgaaaaataattttttcctgtgttgttcaataatatgtgtcctctttccctttgggacttgatatgagcctcaaaagtgttggtcgggaacaacaaaagacttagaccgaaaaataatttttttctgtgctgttgatataggtgtccatgtacccagtttggcattggtgcaccaaagtatgtgggctttcatgcctaagttcaccacactcccattcactgccttggcgcaccacgcttgaatgaacacgcatcagaaaaaggttatcacgcccattacgg

SEQ ID NO: 331470 - DNA, 883 bp, Cannabis indica
aactctcttcctctctctttcggttgagacgaataatcaggggaaaggccagctttttctccccaattttctagaattaagataaggattcaagtggtcttggagttaaggtaaccctagaacctatggttgtgtgttttaaagcttttactttggttcatgttatgaattttgggaaatggggcctgttagggttaggtttgtttaaggtttgattttctaggttaatttgagttgagtatagccttgagtagctggttttgatgtttggaatttgttttgtgcaattttaagctttgagttcaaagctttgatctctaatggcataatttgtttcaatgagtttttctgtgaattactggctagaatatgttgtgtataccctaattaagtactctggatggtttggttgcgtttggtggaagattgagcaagaaacgaaaaatttggggtgaactggtgcaaaccgactagccagttttactagacctctaaacccggctagccggttttggcagggtccccaaatgcttcgttttctcaatttttcgtccatttcagtgtcgtggttgggtgtttccctaatttcagagtttgagtaacctctagggggtataacagaacctaggattgtgggttcgggtttctcgggattagggttttgagcatgtgacttacctggtttcatattttgattagggcatccagtacacttgaattcataaagaaggtaagagctgtatataatgtgtgataacaatatctgagtgtatgtgtatgttatgtgtatatgcatgcttaaagtgttagttgcactaccaacacttgtacagttaaggtatagagtgcattggtatagtgaatattatctgagagtacagtg

SEQ ID NO: 331471 - DNA, 1215 bp, Cannabis indica
tatttcgacccggacgttttcgggatgcccctaataaccaacgaatggcaagtgcttttccttgtgtggatcctatttcaatgggaacctgatgagtcgatccgcctacacgtcttgtttttactgctatatcgggagttactccacgtattgcttgacgtaaaacagatagtggatttgtttctgtcttttgttgaatctttttcatggctcgatagataatttgataagctaatgatttttttccgtgtttcagaatacggttaaccaacatgttaactaatcgattacgataaattggatcggattttgcagttttttcttctgcagtacctcgacgtgacatgagcgtgaaaggggttcaataatcagttttctttttataagggctaaaataatttattttggctttttgaccccatattgtagggtggatctcgaaagatatgaaagatctccctccaagccgtacatacgactttcatcgaatacggctttccacagaattctctatgtatctatgagatcgggtatggaattctgtttactcactttaaattgagtatccgtttccctccttttcctgctaggattggaaatcctgtattttacatatccatacgattgagtccttgggtttccgaaatagtgtaaaaaagaagtgcttcaaatcattgctatttgactcggacctgttctaaaaaagtcgaggcatttcgaattgtttgttgacacggacaaagtcaaggaaaacctctgaaattatttcaatattggaccttggacatataatagttccgaatagaatctctttagaaagaaaatcttttgtctcatggtagcctgctccggttcccttacgaaactttcgttattgggttagccatacacttcacatgtttctagcgattcacatggcatcatcaaatgatacaagtcttggataagaatctacaacgcactagaacgcccttgttgacgatcctttactccgacagcatctagggttcctcgaacaatgtgatatctcacaccgggtaaatccttaacccttccccctcttactaagactacagaatgttcttgtaaattatggccaataccaggtatataagcagtgatttcaaatccagaggttaagcgtactctggcaactttacgtaaggcagagtttggttttttgggggtgatagtggaaaagttgacagataagcc

SEQ ID NO: 331472 - DNA, 1102 bp, Cannabis indica
aatgaaaacctccaagttttagaatggtgggaactcatttattgaatcaatatatgtaggaactggatctaaaaccgtaccaagtactgataatggcacatcttctggaagttccaccaagatttcaactccactgtttttctttgctcttcttgtggctgcatatacttcagcctttgcaacacactgattctttccagtttagtctgtacttcagagttcccagaactcttatacatagatgttgtgattgtattcttcatttgttctgatctagatttagagaggtgtgcagtgttatttattttgaaaccctacttagggtttatcattgttttgtatttactgaagagaccagttgatgcatactctcttctatatttaataaaagtgttgtggtttgcgacttacattggctgctgaaatattatatagtacattaaaaaaataaatataataagcattcagtaatgaaccaacaaatctaaaagttaaataagggtgataaaccttaaagaggcactactttagaattgaagtatctcattccgataatatgaggacaccccagaaacttggaaaatgctctgggatacaatgagagctacaattggggaaaacttggtaatcagaacaaacaaatggttgattgaagagtccatcgagtgatcatgtactctgcaacttgactcactcgtatgtggctttcttcaagtgccaacttgcctgaagcagtcaaagcttaaaacggaccaaacaatctatgagatcaattacttgttttttttttccaaacaaagaaaagcgtttttcgttctaagaaagaaaaaaatatgtcctgtcactcaacccttggctaagccactctactatggcccttgtcccagtatcatgtacggtggatacaatctcatcaaccatggcacaactgatttcattgccctggaatagtatgaaacatattactcactgtccctgattagtaaacaaaatgcatgagtaatgttcagtcttctcgcctaaacttggtgcacatcaagaatgagaacgtgatcgcacaaactcttcgagtctatcccacacctctaatgctgcagctcta

SEQ ID NO: 331473 - DNA, 1670 bp, Cannabis indica
gggatagggctaagcggagcgaaaaaggttttccatgagatgggaaatgaaaactattagccccacaggaggtttgtgaataagtgattgtctgataatgagaaaggaatatccgtctttctgctaaacaggatgtattgaactcataattcattagagactttttatgaatgtcaactaagtatcgtaagtaaattgctcccggttgttcaatcatttgataaccagagtcattctttgataaatgatcactatgagtcagactcaatagaatttgatcaatccttttttctgtcgttaaggcggagaactgaaccaagagctctctttctttatcatcaatccaatcactgttcgagacccaggattctattttatcatcaatccaatcactgttcaccttttttctttttcttatcaatgaataggtctctttacttgtatgacttagatgtctcgtatttatcgaaaaagagattcgattgatgggatttggtatgatacttatgaaatcgatgatatcgatgagattgatattcaaatatttcttcttagaacgtattgatttgaccccataagtgggaccgccaccccatagcatgttgccgccagaagcagaaccctgtatttcttctagagaatctcctaattgttcccgagcaactagaaagagattctttaaccagaaagaattcagttcagatgtaggatacctatccagaagttttcgcaactcaatcatgtatgatggaatcatcaaagatttgaccctttcgaactctgtctgtaactcactataggctcgagaaacaaaaagaagatgtgtacgaacgagatatccagcaacaagaagaaggaaaaggattgaatagaggaactcccgaacccgaacatttggcgatctcagatgtgtcgatatcaatggtgactcattatttcgatgaatcatttctttggacagaagaagattatgtaaacacttactcgaaatctcacttatcagattccattgtggaagacagaattttttctgaagaattcgccatgatatatctaatccatgcataatatcatgaaaaatggatacaaattttgggctgctacttagtatcggcaataggtctgaaaaagtatctaaaaatatcaaatttagatatttgtatcctgtcgaagtaaggaaccatggcatatatgtttggaatatattccattttgagagagttgaaaaagcactatctcgttgaaaggttctatacatctgccctttctcaaggcatttctttagacaaagaccccgttttttcctcttttcggatggtaaatatttctcagaacatggagtgtgaatcaaacccatgtttgaattgaaattgagatactgatgcaagttcttctcttctgaatcagacagattaatatctgaaagaggttgacaataagttctttcaaaattgactatttgtccccctgttagaagtattccagaaatgtctgcgatcgagtaaatagctctacgaacgaatggatcggatcgaattggaaaatggaaagatttgtacaagttatacctttcgtcaccattttgtggaaaatcgttaggtatgaatatgttagacacctgtaactcgattggtgaaatagtatctctctccaaaaaagcatattttttt

SEQ ID NO: 331474 - DNA, 1024 bp, Cannabis indica
tccaaccctaaaatcaattttcaacagtcacagaaataaattatatgaaaatatgtttggaacgtatttcaatgtacgtcagaagctggatctcccatatctcaataagttcaagtttgaaaataacgtacatcaatatacgtgcagagtaccttaaatcgaaaatacagtacggtgcaattatgtttactcaatatttgaatttaatgagataataagattttttttcaaatgtaaactataatttcgaacatatttattcgtacattacttattttaatacattttgaaccatttcctatttaggaccacgtttttaagttgttgggaattatttaaaaattgtccaaatattgtaatcttcttaaccaagtatggactatttcctctttaatttgtagatactaactaaaaaaatcaatagttgtcttatcaatatttaattttctgtgtacgtcccacagtgtactcactgacgttaaatggagtatttcctacactttaaataacgtacgtcagcgatttcacagtgtaacatcaaatcaaactgactacattctgacatgcagatctcatgggattccctgatttgagttaattaatatactatttcaaaacacgaaacctaccagtaattacttaaggagatttaatatttgttgggctctaatatactaatatgacatttttcttattaaaatttggacaaatcaattaggtcagatttaataaattatgatagtagtaccaacaacgattatgatgtcaaattttaataaattattcacgactgaaatgagtagatgtcacatcacctttttaaatttcaccatttaaaccatgtacttattattaccataacatttaaatatttaggtgacaaagtattcattaaataattactccttctgtgggatccgaccaaaatattaaaaaaaaaagtcatacatgtcacgtgaattcttcgagtattgtgccaaatattataaaaaaaaacttgtttttattatttattataattgta

SEQ ID NO: 331475 - DNA, 1220 bp, Cannabis indica
aacaggtgagaattaattcagaaggacaaaaaaaaaaataaaattgctatttgataaagttctaaacgatcctaacaataaagcaattcgaaacgaatctattggactaaaagaaatacgcaaaaaagttcctcgttggtcatacaaattaataaatagttttgaacacgccgacggcccaattgaagaaatgttaggaagaactcctgaaattcgttcaagaaaatgcaaacgtgtagtgatttttaatcatgacctaagaaataccaatatttctagtaatacatctaataatccacaagagattactaaaaatattaaaaataacgacgattatgaagaaccaaaggtaatttctttaatacgtttttcacaacaatcagattttcgtcgagacataatcataggctcgatgcgcgcccaaaggcgtaaaacgcttatttggaaatcctttcaagcgaatagtcattcccccctttttttggacagaatagacaaagatttttttttttctttttccgcgccggtgaaaaaaaaaattcaaaattggttatggaaaaacaaagaatttccagtttcagattatagagaaaaaagagaaaacgaaaggattaaaaaaaacgaagagaaaaaaaaagaagaagaacgtatagaaagagccgaagcctgggatagcattgtagttgttcaaataataagaagtcttgtgttagtaatccaatcaattctgagaaaatatattatattaccctcattgataatagttaaaaatatgggtcgtatactattgtttcaatctcccgaatggtctgaggatttaaaagattggaagagagaaacgcatgttaaatgcacttataacggcattcaattagcagaaaatgaattcccaaaaaactggttaatagacggtattcagataaagatcctatttccctttcgtctgaaaccttggcacaaagctaagcttaagcgacaagaaacttctaataatccgatcaaaaagaaagaacaaacaaatgatttttcttttttaacagttttggggatggaaactgaacttccttttggttctccccgaaaacaaatttcattttttgaacctatttttaaagaaatcaaaagaaaattaataaaattgaaaaagaaatgttttagagttgtcaaagaaagaaaagaaagaacaaactcaaaagaaacaaaagaaggggttattcaaa

SEQ ID NO: 331476 - DNA, 584 bp, Cannabis indica
acaacacaggcatactatataataatatagttctattaagcacatacttaaattaatttcatcattttacccttctcgagtcacaattactaaaatgcccctggttcaccaacggggtcttaacatgttaaaattcatattaattcacatatactgaactatataataatataattcatcaattattcataattatctaattaaggttgattgggagagtgatccttgagcatcaataattgtcttatgaaaaacttaaatttcatacttattaattagaacacattatgagagtatatatatacgaaaccttaacttgaatctagagatctaaaattattaaatgatataccttagcttcaaataaaatccaatctaagcactaaaatatgaatgtgaaatgatggaattatggtggtggtgatgttgatataatgaatactatgcatatatataactaagatttaacaagtataagggcaaataatgtatctgttgggttttgtgccctaaataaaacccatctcaatataatcagatttactaattaataaagatcagaaattattctatgttgcatggtt

SEQ ID NO: 331477 - DNA, 5928 bp, Cannabis indica
gatcttgaatttgaatgaactaatttttgttttgctttcagtaattcatgaaagaatgattcgaggaaaaacctatgaatataccagctacaagaaaagacctcatgatagtaaatatgggtccccaacacccatcaatgcacggcgttcttcgactcatcgttactctcgacggtgaagatgttattgactgtgaaccaatactaggctatttacaccgaggaatggaaaaaattgcggaaaaccgaacaattatacaatatctcccttatgtaacgcgttgggattatttagctactatgttcaccgaagcaataaccgtaaatggaccggagttgttgggaaatatccaagtacctaaaagagctagctatatcagagcaattatgttggagttgagtcgtatagcttctcacctgttatggctcggtccttttatggcagatattggagcacagactccttttttctatattttcagagaaagagaattagtatatgatctatttgaagctgccaccggtatgagaatgatgcataattattttcgtatcggaggagtagcggctgatttacctcatggctggatagataaatgtttagatttttgcgattattttttaacaggagttactgaatatcaaaaacttattacacgaaatcctatttttttagaacgagttgaaggagtaggcattattgggagagaggacgtaataaattggggtttatcaggcccaatgctgcgagcttctggaatacaatgggatcttcgtaaagttgatcattatgaatgttacgatgaatttgattgggaagtacagtggcaaaaagaaggcgattcgttagctcggtatctagtccgaattggtgaaatgacagaatccataaaaattattcagcaggctttagaaggaattccaggggggccatatgagaatttagaaatccgagacgttgatagagaaaggaagccagaatggaatgattttgactatcgatttattagtaaaaaaccttctcctacatttgaattgccaaaacaagaactctatgtgagagtcgaagccccaaagggagaattgggaatttttctgataggggatcagagtggttttccttggagatggaaaatccgcccgccgggttttatcaatttgcaaattcttcctcagttagttaaaagaatgaaattggctgatattatgacaatactaggtagcatagatatcattatgggagaggttgatcgttgaaatgataattgatacaacagaaatacaagatatcaattctttttctagattggaatttttaaaagagacctctggaattatatggatacttattcctacttttactcttgtattgggaatcactataggtgtactggtaattgtatggttagaaagagaaatatcggcagggatacaacaacgtattggacctgaatatgccggaccttggggggttcttcaagctttagcagatggggcaaaactccttttcaaagaaaatctatttccatctagaggagatactcgtttattcagtattggcccatccatagcagtcatatccattttattaagctattcagtagttccttttggatctcaccttgttttagcggatctgaatatcggtgtttttttatggattgccatttcaagtattgctcccataggccttcttatgtcaggatacgggtcaaataataaatattcttttttaggtggtctacgagctgctgctcaatcgattagttatgaaataccattaactttatgtgtgttatcaatatctctacgtgcgattcgttaagacataaattgttctctatttcttcctcgttatttctttctttctaggaaaggggtggactgaatggagaaaatatcttcatttttttattcattattcgaatagatgaactaaatcagatagttatatgagtgaaagaaaactgcttatatatataacgcagtaaaaaaattgagtctcattttctatgtataagagttagaaagttcagcggaaataaacaaaagcagaagaaagcgtttaccccaagattaggcgattagttatcctaacttgaagcgggctcaaaagatcaaccatattgcgttttcactctcgtttatatgtattatcatacatgtattaccttaacacaaacaaatgattgaacaaaaacgagtggatgattagaaacaccaagatacacaaaggatttgtaatggagattatgtaaaagaatatttctgcataatatacaaagaatatgaattggggctttaagttggtagaaatgatcaagcagtactccccacgattccgatccagagtatgctcctatccatcgattaaatagatgactgttggaaacgaaataatcctttatctttattttgtaagtcccctttttcttttctcagaagaaagaagaatagaaacgaaaaaaaaaagagaaaggaatataattacagtagaaaaaggatttttttttagtctttctttctattctacttttattctttcctttctctatccatattcatatatggagaattcatattcatatagatagaattcatatcatacgttatgaattaatatagaattttcgtaagtgaaaaagccgggttattgagatttttacaatgagtatttgattgaagaattaaattattactcaacaaagacaaattcaaatgattgttgaaatttttaaagaagggatgagatcaattcagaagtactaaattttttttattattttttgaaattaatagaaataattattaaagcaaaacagacagaattcaattggtctaatttgggatcgtaagagaaattttgaccttatccatcttaaaaagatatcaagataaaaaacaaatactctaaaataaaaaatactctaaaataatagggatccggtccttagatttatttatggtcctcaaggagccgtatgaggtgaaaatctcatgtacggttctggaatagcgatgggaacagtgatggtatcatcgactataattatctaatagttcaagtacagttgatatagttgaggcccaatcaaaatatggtttttggggatggaatttgtggcgtcaacctatagggtttatcatttttataatttcttcgctagcagaatgtgaaagattaccttttgatttaccagaagcagaagaagaattagtagcaggttatcaaaccgaatactcggggatcaaatttggtttattttacgttgcttcctatctcaacttattagtttcttcattatttgtaacagttctttacttgggcggttggaatatctctattccatacatatttgtttctgagttttttgaaataaataaaacatatggtgtttttgaaccaacaataggtatctttattacattagctaaaacttatttgttcttgttcattcctatcacaacaagatggactttaccgagactaagaatggaccaactattgaatcttgggtggaaatttcttttacctatttctctcggtaatctattattaacaacgtcttctcaactcttttcactgtaaacggatattatatcctatattcccaacttggatgaaacaagagaaataaacaaacagaaaattattcatatatattcacgatatgttccctatggtcaccgggttcatgaattatggccaacaaacagtacgagctgcaaggtacattggtcaaagtttcatgattaccttatcgcacgtaaatcgtttacctataactattcaatatccttatgaaaaggcaattgccgtggaacgtttccgcggtcgaatccattttgaatttgataaatgtattgcttgtgaagtctgtgttcgtgtatgtcctatagatctccccgtcattgattggaaatttgaaaccgatattcgtaagaaacgattacttaattacagcattgatttcggaatctgtatattttgtggtaactgtgttgagtattgtccaacaaattgtttatcaatgactgaagaatacgaactttccacttatgatcgtcacgaattgaattataatcaaattgccctgggtcgtttaccaatatcagtacttgacgattatacaattcgaacaatttttaattcgccccaaattaaaaaaagtaaatcccttgattaatgattaaagaaaaattttgaagtcctatagaaattttttatgaattatcaaccattttttctggtctggtctcaatagggtcatgaaaaacatttcgattttttctcttattttacatagaatggatttgcctggaccaatacatgattttcttttagtctttctgggcttaggtcttatcttaggaagtataggagtagtattatttaccaacccaatttattctgccttttcgttgggatttgttcttgtttgtatatcattattttatattctattaaattcgtattttgtagctgctgcacaactccttatttacgtgggggctataaatgttttaattctatttgctgtgatgttcatgaatggttcagaatattacaaagattttcatcttttgacccttggggatggggttactttgctggtttgtacaagtatttttggtttactaatgactactattacagatacgtcatggtacgggattatttggactacaagatcaaaccagattatagagcacgatttgctaagtaatagtcaacaaattggaattcatttatcaacagatttttttcttccgtttgaattcatttcgataattcttttagttgctttgataggggcaattgccgtggcgcgccagtaaaaaatctctaaaattagcaacagcaatcaaaataaaacggaattctctgttatcacatttatttgttatcccattcagttttttccttcaatatgtctaaaatagaaatttttatttgatctattaccaatatatttctttgttccgtactttttctattctagtcaatcgaatcccttgcattcttggtcatagtctattgaaatgaattaaaattgataaggagttggtcaatgatgctcgaacatgtacttgttttgagtgcctacttattttctatcggtatctatggattgatcaccagccgaaatatggttagagctcttatgtgtcttgaacttatactgaatgcggttaatatgaatttcgtaacattttcggatttttttgatagtcgccaattaaaaggaaatattttctccatttttgttatagccattgcagcggctgaagcagctattggaccagctattgtttcgtcaatttatcgtaacagaaaatcaactcgtatcaaccaatcgaatttgttgaataagtagtatcactgatccgtagtattaaccatagaaattagaatattcctaaattctaattagtgtgtattatacataatgtatgatcatgtttgcgaaaatataagaaatcaaaggatcttagctctatcacatgactcggtctggaagtagattgattagaataattctggtaaatgtaaatcattgattcatctggtatctaaatatatgattcatttcaaaaaaagaaatttactagatcgaaaatttctgattaaaaacaattataaatccaatgtcacattcagtaaagatttatgatacgtgtatagggtgtactcaatgtgtccgagcctgccccacagatgtattagaaatgataccttgggacgggtgtaaagctaagcaaattgcttctgctccaagaacagaggactgtgtgggttgtaagagatgtgaatccgcctgcccgacggatttcttgagtgttcgagtttatttgtggcatgaaacaactcgaagcatgggtctagcttattaatacgttcaaaaaagccctactggcttgaatacaa

SEQ ID NO: 331478 - DNA, 511 bp, Cannabis indica
atatgaaattgtactctttgacaatatgaaattatatttatagaattcttacttgtagtcaattaatataatcaatataagtacctctctctaattattacttcataattagatttggttaaaatacaattttacccttctaattatctcttgattctttatgtaccattagttcaatacgaacagttaatctataacttattatagatttggatcaaactgttagcactcccagaattaacattataagggaactaatattcgattcgttaggaaagtttgaattccactatagtataacatgttcccagccactcatgttattaagctccaaaatcagaagttgtaagaatcatattctttgagaataactttaataagtgaatcaaaaaactcaatgaacacaaacaggagttcatgtatactcaggattcaggctgatttactattgattatcattgtgatatgataaattcttttgatagtatatgacaagtttgatgaaagatgt

SEQ ID NO: 331479 - DNA, 1593 bp, Cannabis indica
tatatcatttcgggatggaatgttagcaatagtcatctgcgccactcaatttcatagaagaaaatagaatgacatcataagcatatgatttataagccatctatccaatgtgttataaccgaaattcaaccagcacatcagaggaggacacgtgtcaaactaaagagaatatggatcaatgcatgaaacagtaattatatttgaaaatgaaataactcattaaatgcagaagtgacagagtatagttacaacttgcggactataaggtcttacgtaagataacgatatacaaactgttgcctcgtgtattaacgagaaaccatacagcattagatacgagaggcgagacctcaacctcgttatgtatgagtagacgtaagtgagatataatgactgtgaaaacacttagcgtataatatacaatatacaaactaagtataattaactgcctgactatgtaattataaataaaggcaagttagattgcaaaaggacgaggcaagttagactgaaaaagggacgaaatttcataaaagaaaaagcccaagaatagtattagaaatctaataagattgactcgtagactatgtagaattttaattgcaaaaccacgtaaaaaaccttcgtgttcgccattttctttttatctctttactgtttttatttttctatgcaagtttatcactatttaggctcaaatttggttaacaaaaatctacgttaacactttggtgctttcattgagagcctttgtataaaagctcagaaaaaaccctccttacatataaaaaatcatgcccttcatggctgaaaacatagagaatgttagcacgccacatgaagaaactcatcactgtcttggaaaggagcccatgggctccaaaaggccttccaactcacagtctaaatggaccactctatctagaaggacccaacctgagggtggccctaacactcagaccactcgttccaggaggacccaacctgaggttggtcccagtacacgaacgacacgttcaaggaggactcagcatgggaatggccggaatcccagagtgagagatgaagggccccatcgtggaggtgtacagcccacgggtgagggtacttatgaaatggaaaactgccatcttaggtgccgcctggagatggcaacccaacgaaacattgaattagagcgtgatgcagctgcaactagggtgacacaggggaataatactcaaaatcaatttgaacacctggagtgagaagacaacaatgcccacctcgtggctcacgaaccaagagacaggaaaatactcaggaagaacaacttggggaaaatgagattccccttgaaaatacgaatgattagccagaaccctctcatagaaatgagaatgggaggcaaccagaaactaacgaacaagaaattcctcatggaaacgaggaagatcatgggacacaacccggggaacgtaggtcatcggcgaggaatcaccagcattcttctcgaacccatagagagaaggctcgtacaaaccccagtggagaaaatacgacaaaccacgctcaggggggaagaacacgacatgaagaagtaagtgtgacctc

SEQ ID NO: 331480 - DNA, 687 bp, Cannabis indica
aaacatacaatacatatttgacctataattaggcgcccatgcacccaattaccataagtctactacctacgtccaacgcgtataattgagtctcgaacatttttaactatagtacagctaatcataataccagtctatactcagcactctagtcgtactgatgtgttagcatcagttaatactattagtataattaaccatagtatcaaattgtacccagtactctagtcatactagtgttagtagcgttaattagtacttttctatattgccaaatagatatattattgatattcaggtacaattctatgtacactaataccgctactactgatatgttatttatgtggcaatcagaatacatgtatactaaacatgtccatatgtgccaatcaacctgagtggaaaattgctcgatgatagaaggatctaagtcgcattagcagtaaactagtaagtgtctattttgaaacatgataactctaagatttagagttattttcatatctttaagcttgaatttaatgtgaattgtggagcaattagtgtctaacctatgtaattgtgtttagtttgttgtgtctttgtaataaatggaagtgtgtgtgtattagtaagtgttaaatagacttatgttattgtttttatgtgttttaagcagaaaaaatacaagaataggtatttgga

SEQ ID NO: 331481 - DNA, 6081 bp, Cannabis indica
aaaagaaaactgattattgaacccctttcacgctcatgtcacgtcgaggtactgcagaagaaaaaactgcaaaatccgatccaatttatcgtaatcgattagttaacatgttggttaaccgtattctgaaacacggaaaaaaatcattagcttatcaaattatctatcgagccatgaaaaagattcaacaaaagacagaaacaaatccactatctgttttacgtcaagcaatacgtggagtaactcccgatatagcagtaaaaacaagacgtgtaggcggatcgactcatcaggttcccattgaaataggatccacacaaggaaaagcacttgccattcgttggttattaggggcatcccgaaaacgtccgggtcgaaatatggttttcaaattaagttccgaattagtggatgctgccaaagggagtggcgatgccatacgcaaaaaggaagagactcatagaatggcagaggcaaatagagcttttgcacattttcgttaatccatgaacaggatctatatagacacatagacccatggaaccatacatctcgatcggaaaagaatcaatagaaaaataaagaatcggaattgatcgatatatttctcgaaataaacgaaaaagaaacgaaagacgaaacataaatcatggatcaactaagccctctcggggacttttttaagaataagaaagaggaatctcatgtaaatatcatggaataaggtttgatcctattcatggggattccgtaaaaattccattccaaaaagagaaagttcgaaacaattgggattttttggagattggatgcagttactaattcatgatctggcatgtacagaatgaaaacttcattctcgattctacgagaatttttatgaaagcctttcatttgcttctcttcaatggaagttttattttaccagaatgtatcctaatttttggcctaattcttcttctgatgatcgattcaacctctgatcaaaaagatataccttggttatatttcatctcttcaacaagtttagtaatgagcataacggccctattgttccgatggagagaagaacctatgattagcttttcgggaaatttccaaacgaacaatttcaacgaaatctttcaatttcttattttactatgttcaactttatgtattcctctatccgtagagtacattgaatgtacagaaatggctataacggagtttctgttattcgtattaacagctactctaggaggaatgtttttatgcggtgctaacgatttaataactatctttgtagctccagaatgtttcagtttatgctcctacctattatctggatataccaagaaagatgtacggtctaatgaggctactatgaaatatttactcatgggtggggcaagctcttctattctggttcatggtttctcttggctatatggttcatccgggggagagatcgagcttcaagaaatagtgaatggtcttatcaatacacaaatgtataactccccaggaatttcaattgcgcttatattcatcactgtaggaattgggttcaagctttccccagccccttctcatcaatggactcctgacgtatacgaaggagtgcggttcgttcgataaattcctacctctctatctatctctgagatgtttggatttttcaaaactccatggacatgcagaagagaaatgctatccccactcggaccaagacataacttttacttgttcaaataacaattaaggtgaagcagggtcaggaacaacgaatctctttatcataaagagattcattttgcaagttcgttattacgggtagttcctacaaagcaaaggatcggactaatgacgtatacaatacttgaattctcgatgtagatgctacatagttggttctcatccttcagagactacgagtgtaataggagcatccgtcgacaaaaggatcaccctaagatgatcatctcatgtctattgagaacgaatcaaatcagatggttctatttctcaatctttctgacttgctcctacggaaccaaggtcgaaaagattgagaaaaatcagtcattcacaaccactgatgaaggattcctcgaaaagttaaggattagtaatcctttttagaaatcgaatggattcggtcttatacatacgcgaggaaggtaatcaaaaaagaaagaagataagttcttctttcttttatcacttaggagccgtgcgagatgaaagtctcatgcacggttttgaatgagagaaagaagtgaggaatcctcttttcgactctgactctcccactccagttgttgcttttctttctgttacttcgaaagtagctgcttcagcttcagccactcgaattttcgatattcctttttatttctcatcaaacgaatggcatcttcttctggaaatcctagctattcttagcatgatattggggaatctcattgctattactcaaacaagcatgaaacgtatgcttgcgtattcgtccataggtcaaattggatatgtaattattggaataattgttggagactcaaatggtggatatgcaagcatgataacttatatgctgttctatatctccatgaatctaggaacttttgcttgcattgtattatttggtctacgtaccggaactgataacattcgagattatgcaggattatacacgaaagatccttttttggctctctctttagccctctgtctcttatccttaggaggtcttcctccactagcaggttttttcggaaaacttcatttattctggtgtggatggcaggcaggcctatatttcttggtttcaataggactccttacgagcgttgtttctatctactattatctaaaaataatcaagttattaatgactggacgaaaccaagaaataacccctcacgtgcaaaattatagaagatcccctttaagatcaaacaattccatcgaattgagtatgattgtatgtgtgatagcatctactataccaggaatatcaatgaacccgattattgaaattgctcaggatacccttttttagcttctagaacctatttcttagttcaagatccctcttactaactggaatcaaagaattagtagatctgttccgcccaaaaggggaatgggctagggttatgaacttataatcgataatctgatgatcgagtcgattccatgattataagttcattccataccggaccagaccggaatagggttatatacattctaattatgagaaggggtcattcgagcgtatctaaatagatactatgtttacatatggatccctacgtcgttacattccatttaggattaggaataggcgtaatcggacctgctttctacatatctctcgttatttgggaccctattcacctctttgggcttctattgaatcgagaaataggtttgattgtccatctttttgatataatatatataaatataaggcatcctccggataattcaaatcgaagcaattggatgtccgactcgggcctatatgacatgaccgatcaatagaaatactctaacactccgcctttgtcatatattccatacatcacactggatagatatcatattcatggaatacgattcactttcaagatgccttggtggtgaaatggtagacacgcgagactcaaaatctcgtgctaaagagcgtggaggttcgagtcctcttcaaggcataatattgaatattgagaatgctcattgaattggaataagttcggcagcggatcacgaaatcttggtgatcttctctatctaatgaatggggagtccgctttgaaatcgtccgccctgcacccaccccccgagtatatgcttcaacaggaatcacacaagggtagatcgatacaatagaaacctctggtaaaatgcccaacccagcagataaagtacattacatagtccgttttagggattggcgacttacccattcagtgactttggcgctggacgttcccaaaatgggtactatcgggtcgggtgaattcaataatagacgcctgttggcattccagcttcccttctcctttcagggcctatccgaaagagattcttggtcgtgaatatctgaataggacgaaccgctccgtggatatctttgcttcggaacaaaacaattagaattagtcggtcaactggaatgtgtattatccatataggggatctttcaattgagaagatccgtcgacctgagacgaagagaaatgtctatctattttatttagttattcagttaaaccaatgattcgttattgtagcagatagcaacaaccatttcatccgggaaaagccatctttttctcaacaatgtctttgtcatttgatccaatagcgttccgttagataggaacagctttgataaatactgataactctcagatggagtattagaacggaaaaatccattagataatgaactattggttctaagccatctctggcgataaatcaacaattcgaagtacttttcttgcgtattcttgataaaccagcgtttatatatagatgtaggaagatctgtttgggaagtaagaagcccctttgacatctcttcatctgcaaagaattctcgatgtgaaaacacagagacaaagggctgatctttgaataggaaaaagagtggatctgcagggtcccaaatgaattggcttattcgaaaaaagccttgttctttggaagatctatctcgtgtctggtactgcatggttccactctgcaagaactccgaatcattctgttgaagcccatcctcttcatcataaatgatccgcttgccccgaaatgacctggcccaatagggaaatcccaattcgttggggctttctatttgattgtatcgaaaaccccaagggcgccatattctaggagcccaaactatgtgattgaataaatcctcctctatccgttgcgggtcgaggactccttctccttctccttccccttcttcaaactccgatttgtattgttcatagagaaatctctgatcaacgatagaacaagatccattttgcatcatatctaagggattccttggttcgggccgaagaagcaatgtcactcgatcattatcaaactggctgcaacctttttctgtctgtgaggatcccaccagagtgccttctacttctaataggccatgaactagatcagaatcattctcaacgagtccataagaagtgatcccatttttttcatcgagttcgggtagagaccaaaggtcttgagcgaccgatccggcagaacaactcaaaagataaagaagtatcgttaatttcttcatgctcgttccaagttctaagtaccatttgtacaaataagaatccccttcgttacatgatttcttcttcatatagatagatataggatctagggagcaattacttagaagtacattttgtgcaacagcccttcctatctgatagaaaaggatcccatgatcctgaaccgatcttacctgggatcgcaaatcccaagtttgtctatgaagagcagatctaattatattagtgtctataattgatttcttctgtgtaatactaattgatagggcctcattggtaagtgctacaagatctcgtacattggaacccatggttatggacccgaatccattagtatggaacattttcttttccaagtggaatcccctagtatatgaaagagtgaaaaagtgctttcgttgttgtggaataagaagccttcgtatcttaatgcatgtatttaatttattcggagctattagagcgggatccactttttggggaatatgagtcgaagcaataacaagaatatttctagtggaacatctttcacaatccctggagagatagttcaataatagaccgagggataagtaattcgactcattcacatccagatcatgaatgtttggaatccatattatgcaaggagacattgcttttgctaattcgaattgaagggtgatataaaaccggtctatttccggcatcatatccatagttagcgcattcatcatagttagaagctccagctccgtatcaaagtcacggtcgatatcgtcactatcatcaatat

SEQ ID NO: 331482 - DNA, 3749 bp, Cannabis indica
gaaaatatagcattccccttttttttactactcatggcttcgatgcgtttcgaaatcgagaaatttctactggagcgggtgctatcagagaacaactagccgatctggatttgggaattattatcgattattcgttagcagaatggaaagaattaggggaagaagggcccacgggtaatgaatgggaagatcgaaaagttggaagaagaaaggattttttggttagacgcatagaattagctaagcattttattcgaacaaatatagaaccagaatggatggttttatgtctattaccggttcttcctcccgagttgagaccaatcattcaaatagatggcggtaaactaatgagttcggatattaatgaactctatagaagagttatctatcggaacaatactcttatcgatttattaacaacaagtagatctacgccaggggaattagtaatgtgtcaggagaaattggtacaagaagctgtggatacccttcttgataatggaatccgcggacaaccaatgcgagacggtcataataaggtttacaagtcgttttcggatgtaattgaaggcaaagagggaagatttcgtgagactctacttggtaaacgagttgattattcggggcgttctgtcattgtcgtaggtccttcactttcattacatcgatgtggattgccgcgcgagatagcaatagaacttttccagacatttgtaattcgtggtttaattagacaacattttgcttcgaacataggagttgctaagagtaaaattcgagaaaaagagccggttgtatgggaaatacttcaggaagttatgcaagggcatcccgtattgctgaatagggcgcccactctacatagattaggcatacaggccttccaacccattttagtagaaggacatgctatttgtttacatccattagtttgtaagggattcaatgcagactttgatggggatcaaatggctgttcatgtacctttatctttagaagctcaagcagaggctcgtttacttatgttttctcatacaaatctgttgtctccagctattggggatcccatttccgtaccaactcaagatatgcttattgggctctatgtattaacgagcggtaatcgccgaggtatttgtgcaaataggtataatccctctaatcacagaaattatcaaaatgaaagaattggcgataatacctataaatatataaaagaacccttttttggtaattcctacgctgcaattggagcttatcggcagaaaagaatccatttagatagtcctttgtggctccggtggcgactcgatcaacgcgttcttacttcaagagaagctcccatcgaagttcactatgaatctttaggtacctatcatgagatttatggacatttactaatagtaagaagtataaaaaaagaaattctttgtatatatgttcgaactactgttggtcatatttctctttatcgcgaaatcgaagaagctatacaagggttttgccgggcctgctcatacggtacctaatcatatggtatccaagctaagtagttctctgaatccagtgtgaattcgagtccctccggttcaacaaagaacataattcctgaatttctactcgaatcaagatcgagaaaaggaagttttccaatcattgactcaaacccattgtcaaaccccactcatcagaatatggaggtacttatggcagaacgggccggtctggtctttcacaataaagtgatagatggaactgccattaaacgacttattagtagattaatagatcatttcggaatggcatatacatcccacatcctggatcaagtaaagactctggggttccggcaagcgactgctacatctatttcattaggaattgatgatcttttaacaataccttctaagggatggctagttcaagatgctgaacaacaaagtttgattttggaaaaacaccatcattatggaaatgtacatgcggtcgaaaaattacgacaatctattgagatatggtatgctacaagtgaatatttgcgacaagaaatgaatcctaattttcggatgactgatccttttaatccagttcatatgatgtccttttcgggagctagaggaaatgcatctcaagtacaccaattagtaggtatgagaggattaatgtcggatccacaaggacaaatgattgatttacctattcaaagcaatttacgagaaggactgtctttaacagaatatatcatttcttgttacggagcccgcaaaggagttgtggatactgctgtacgaacatcggatgctggatatcttacacgcagacttgttgaagtagttcaacacattgttgtacgtagaacagactgtggcaacatccgagggatttctgtgagttctcgaaatgggatgatgtcggaaagaatttttatccaaacattgattggccgtgtattagcggacgatatatatataggaccacggtgcattgccgttcgaaatcaagatattggtattggacttgtcaatcgattcataacttttcaaacacaacccatctctatccgaactccctttacgtgtaaaagtacgtcttggatctgccgattatgttatggtcggagccctactcatggcgacctcgtcgaattgggagaagctgtaggtattattgcgggtcaatctattggggaaccgggcactcaactaacattaagaacttttcataccggtggagtattcaccggaggtactgccgaacatgtacgagccccttctaatggaaaaatcaaattcaatgaggatttggctcatcccacacgtacacgtcatgggcatcccgcttttctatgttctatagacttggatgtaattattgagagtgaagatattatccacaacgtgactattccaccaaaaagtttgattttagttcaaaacgatcaatatgtagaatcagaacaagtgattgctgagattcgcgcaagaacatccacttttaattttaaagagaaggttcgaaaacatatttattctgactccgagggagagatgcactggagtaccgatgtatatcatgcaccagattttacgtatagtaatgtgcatcttttaccaaaaacaagtcatttatggatattatcaggaagctcgtaccgatccagtgtagtccctttttcaatccataaagatcaagatcaaacgaatgtttattttctttcggccgaaggaaaaaatatttctagccgttcagtaaatacagtaaataatgatcaagggaaagggaaattctttagttcagatttttctggtaaaaaagaaagcactattcctgattattcagaatttaatcgaattatagatagggatcattggaatttaatattcccctctattctccataaaaattatgatttatttttattggcaaagaggagaagaaatagattcatcattccattccaatggattcaagaacgagagaacgaactaatgctccgttccagtatttcgattgaaataccgataaatggtgtttttcggaaaaatagtattcttgcttattttgatgatcctcaatacagaagaaagagttccggaattactaaatatggggctataggtttgcattcaatcttcaaaaaagaggatttaattgagtatgtaggaatcaaagaacttaagccaaaataccaaacgaaagtagatcgattttttttcattcccgaggaagtgcatattttacccgaa

SEQ ID NO: 331483 - DNA, 883 bp, Cannabis indica
cagaatttggttcaggtagtattggtaaaccaaaaggtggacgtcctggatcatgtgcttttggatttggctttttcaatgtgattgatgatgtgcaagctaaatcttttgatcagtggtttaagattgggtttaatgataaaaacaaagtgaagaagtttaaagaatgtcataggaagcttaaggttccattggattttgtggtttgtcaaattgatgataagatgtggttctatgatttgcttactgttgggaagaacttgtcatgctcggtattatatatttttttttgtttattgtatactttttctgtatatttgtttataactttggattgttttatgtttattgcagcatattgatgtttgtttctactatttgagaaagaagttaaagtatgaccagtctgtgaaaatttctggtaatactactgattgcttctttgcttctcaaatttttgaattatataatgagtttgttgcaagtggtgaaaatgttgattcgattaagaaggattctaaggcagctgcatacatagcgggtttttatatgttatgcaataaaccctgggctgagcttgatttcgtactaatgcctgttaacgtgattgttcttgctcattggatattgtgtattcttgacattaagatgagatgcttaaaagtgttgaattctatgaggtttgggaggtacaagaacaactcagagagttttgttcgtgcatttgctgtaataattcctatcttactgtcacatgttaatttctatgaggggagaaaagatattgacaggagtagtaagcactggcaaggtaaaaaagatactgatgcgtttgatattgtcgtggttgataatttgccacaacaagaggataggtaactat

SEQ ID NO: 331484 - DNA, 1703 bp, Cannabis indica
tatttccttaccatagttgatgataagtcaaggttcacttggcttttcatgcttaagaacaaatcggacgttcaacacataattccaaatttcttaaatatgatatgtacacaattctctttgtctattaaagcaattcgctcggacaatgccaaagaattgaacttacaatctttatatgcctcaaaaggcattatccattaccactcttgtgtggaaagaccacaacaaaactccgttgtggaacgaaaacatcaacacatactaaacatagcccgagcactaggatttcaatccaacttacccttggtatattggtcctacttagtccaaacggctacatacctaatgaatagaacaccctccaaattattcaacggtataacttcgtaccaaattcttcatggtacagccccaaaatatgaacacttacgcagttttgggtgcctagcttatggctccaccctcccttccacaagaaataaattcacacctagaagtcgggcttctctcttcattggttaccctcatggcatgaaagcctataccttactagacattgaaactaaacaaatttatgtttcaagagatgttgtcttccatgaaaatatttttcccatggtttcatcaacatccacatctgaaattcataaattgtttactgatattgtgcttccaacatctcaacctattcaccaaaacgcacaccacagtaaacttacccaaaattcacattctcaaactggtttcacaccagtacccgaatgcatcaattctcctggttccaaaccagtcattgatcctaccacaccatctggtgtcacaccagatgacactgctcatactgatcattcacctcatttggttcttaaaccgcaccttcatccagtggataaatccccacctggtcgcaactcagcaccagttaaacccatccctgccgccaccacaaatacagcagctcctgctgccattatttccaacaataaaccagtaccactggttccacaagctgaacatcatccagcttccatctctgaaccaagcaccattggttctcccactcaatctgccatctcaggagctcccaaaactactaaagctggcaggattctacataaacctacccatttaaatgactatgtttgtcatgccaactctacatctcatccaattgagccattcttgtcatacatcaagttacacccccaatttcgagccgctgtattagcagcctactctgaaattgaacctaaaagctatgctgaagcggctcaatttcgacattggcttctcgccatggataaagaaaccaccgcccttgaaaaaaataacacatggatcattaccaaactcccacccggccataaagccgttggttgtaaatgggtatataaggtcaaatataacgaaagtggggctgttgagagattcaaagctcgtttagtagccaaaggcttcactcaacgacatggaattgattattctgaaacctatgctcccgtagctaaattcaacactctcaaaatttttttggccttagctgccatgaacaattggaatgtccatcaattagacatcaataatgcctttctccatggagatcttcatgaagaagtctacatgaaaatccctccgggttaccaagcacctccaaactcggtatgcaaacttaacaaaagcatttatggcctcaaacaagc

SEQ ID NO: 331485 - DNA, 685 bp, Cannabis indica
agaagctgtttaagaaggaatgcaacgacatcacctttatagagagtgatgcgagatgggtccatcacccgcattccgatgcactagttatcgtcgccaatattggcggggataatgtccaccgcatactcgttgataatggaagttcagtaaatctgttgaacttccaagccttcaaacaaatgggattgcaggaggacctacggcctgtgacgtcgagcatctatggctttactggcgacgtcatagtattaaaaggaatgatcaaactcctaatcgaccagtattctgcatacaatgtcgtgattggtcgatcgatcctgaaagagatgaagaccataacctcgatctatcatctcacaatgaaattccctactcccgctggagtaggttctgtacgaggagtccaagcagatttgcgagaatgctataacacagcagtcaagctcgcggagaaaaggacagtaaatgctatctacctgttggaggtaccacctcctcgccaggagatcctcagaattgaggaggtgtcgcacatagacgaacctgatttggatccaagaatcctcgatcatgccaccgtagcccaagccggggaagacaccattgaggtacctatagatcctgtagatgatagcaaagttttaaaaattggttctaagttaaattttcagcagcgagaaca

SEQ ID NO: 331486 - DNA, 912 bp, Cannabis indica
aatttaatatataactttgaatattttgtgttgatgaagacgaaatttgtgtagatagtaatcccatttcccactcccagccatcatagctttggacttttctcctttttatttttgtgatacccacagatttgtattgtattttggatcaaattagttgaatattctttcctatatagccaagccatgccaatatcgccaaccttatttaacgggtcatgcgttaagaattcacaccaaaacatggatcacatgatacgacatcgttttggcatattctatatgtattaaaacaaaaagaagggtatattagtcttttcattgttgaagagaattacttaagaaataactatcgaacagttcacgtgtttaccacctctcgatatttacttctccaacgggtctactacaaaacacaacacaagtcaaagtcaaagactcaaacggtagttttgacatataaataaatagtgaactgagttttgcaaaaataaaagaaacagtgaactgagatagtatatatagtaataaagttttaacacaattttcatattctaacagttaatgtacggcggagagagttgtcagaatttaatgttattaaatgaggttgatatatatgaaaacctaaatatatccaaatccaaaagagagacatgggcaagcgagacataaaattaagcgacaattatttatttttatcgacacatatgtctaattttaggaggtgagatattaatattagtgtatttttatattgaaatttatttatattatttataataataattataaaaattcactaattatttataaagtgtcactcttttgataacactaacttgttgtttggtaatatttttattttttaatgttttaattacaaaataaaagtaaaatttttgttttaaa

SEQ ID NO: 331487 - DNA, 1628 bp, Cannabis indica
attttgggggaattctcaaacagaaagggacgtatttgttgttttaagaaaaaactaatgaatatctattaaatcattgtacatttcaagttgtatattccaatttgtcttagggattctgcgtagaaatacaagtgtcagtcattaactacatatacgcatctgtttctatatgtattagcattatgtattacaaattgtattaaaattacaataacgaataaaaagaaggaggattttaaatgcgagatctaaaaacatatctttccgtggcaccggtagtaagtactatatggtttgggtctttagcaggattattgatagagatcaatcgtttatttccggatgcgttgatattcccctttttttaatgatagtaattgggaaggggtgacgaaaattaaattagagatacaatcaaaaatttgtgactaatccctccccttctcttcttatcttaatttttagaattcaaaataaattcgaaaaagaataaaagcggattgacccgcgtgaaactaagaacttgggtttccaggctaaaaatttaattaatatttaattaataatagaatgagaaagaaaatggactagctgtggcaacaatatcatacaaaaaacttcaatattgtacagcgattataaattctaaatactaaattaaatatttaagtagaaatttttatattacttattattactatattgattgcaacgaaatctttaataattggatttcaagttagcaacttctatttttttccttcctttcttcttcttcgcttcggattggaaaatagaaaaatagaagagttgaatcaatcaaaaacccaaaggaggttcatggctaggggtaaagatgcccgagtaacgattattttggaatgtaccagttgtgttcgaaaccgcgtgaataaggaatcaataggcatttcccgatatattactcaaaaaaatcgacataatacgcctagtcgattggaattgcgaaaattctgtccttcttgttacaaacatacgattcacggggagataaagaaatagatcgaaccgatcgctcgcgtgtccgccttacattccaaggaagacgaaaaagacatattctataataacaataattacatattatatataacaacaattatatcatatccaacggatcctatatttatttaaatataaacaaaaaaattctatttcttaatttgaaatcatttttgatccgatcaaaatagaattaatattttcgggacaaggaataaaaaaatcatggataaatccaagcgaatcttttttaaatccaagcgatcttttcgtaggcgtttgccctcgatacaatcgggggatcgaattgattatagaaacatgagtttaattagtcgatttattagtgaacagggaaagatattatctagacgggtgaatagattgaccttaaaacaacaacgattaattactattgctataaaacaagctcgtattttatcttcgttaccttttcttaataatgagaaacaatttgaaagaagcgagtcgactcctagacctaccggtcttagaactaaaaataaataggctttctcttcaatttcaattgaatcaaaaaaaaaccaatccgaactcaaatg

SEQ ID NO: 331488 - DNA, 521 bp, Cannabis indica
acaaacgcactctgaaacgatgagatcagcggagataacgtacctttcaatctcaaagccacagccttcgccacaatcttatacatgacactacatagactaataggccgatactccttgacaaacgaaggctttgtgattttcgaaatcaacacaacattggactgttaaacttcctaaccgattggcgaccatttaatattgcaagacaaacagctgaaaccctaggaccaataatatcccaatatttctggaagaaaatagcatgaaattcatccggccccggggccttcgtagcaccaatagctcgaaccgcacacaacacatcatcatctgtaaaaggagcttcaagcatggcgcattccttaagagttattctggcatcaatattggtaatcccattctccacttgttgcactgtaggagaagccaatgaaaaaattgcgccaaaatattgttcaatcttacatacaatatcctcttccgtactcaatttttggccatcctctgtcataatctcc

SEQ ID NO: 331489 - DNA, 515 bp, Cannabis indica
ttcattaaaaagaactttttaaggggtaataattattatacccaaagttcgcctgacacttcagaggacacgtgtcaacttgggagaatacgaataaacaaacataacagtaattatattagaaaatatcaaaatggaataacttattaaatgcagagctgatagagtatatctatcactcgttgactgtaaagtcttgagcgagacacaaatgtacgaactactaattcacatattgatgagaaaccattttgtatatgaaggcacgatcataaggacgacatcaataacataaagcgaggcatcaatctcgctacgtatgaagagacatagatgagacgtgatgactattaaaacacttagcatataatataccttatacaaactaagcctaatagttggatgaatctgaacaacgaatagcgaggcacccatctccctataggaacacacactcatggtacctttactaatcagctttagatatctttcaatgagatccactactccgtcga

SEQ ID NO: 331490 - DNA, 1054 bp, Cannabis indica
ccaagtctcagtctggttctggggtcctgaggccccgatgtccaggttcgggtccgagtaccgtgtttcgatttttgtctgggtttcgtggcttaagtccaggtcccccatccaggtttaaatcataggatccggtttgggtcctagtcccagtttcaatgtcgattcagtgtctgggttcgagtttcggtctgggtctgggttgaggtctgattcctggtccgagtctaagtctgagtctgggtccaggtatggatcccgatctgggtctgggttaaggtccaagttcaagttcgagtccaggtctgggtctatgtcagggtctcgttccagatctaggttccgagtttcgatcctggtctggatctgggttttggtcgaagtctcagtcttggtctgggtacacgatgtgtcagggcccgacttcaggttacggtttgggtctggggatatgttcgagttcggttctagggtgggtccacgtcctactgacggtcctagtcttgttcgagggtcgcggtgttgcggttcttattcaggttctagttttgggtcaggggtcgggtttgggtcctggtttgagtcccaaatctagttccggaccgagattggggttcggctctaggtccaacccccaattgtgtgtcccaattgtgcttccatgtttgggtctgagttcgggtccaggttcggcatcgagtctatgtctgggttgggatccaggtccgggtttcggttcgggtctacgtttgggttggagttcgggtcctagtttagttacggttctgagtctaggtccaggtctaattaggtttccaggtccaggtccacgtccacgtccaagtccttgtttctaacctcgttctgggtcccggtctacttccagtttcggttctaatttcggctcacaaggtacgtgttcgggtccaggttgcgatttgggactgggttcaagtctgggtctagtttcgggtactgttctaggttcgagttaagggctaggtccaagatccaaacaccgactacgggttcagtccaagccccaagtccagat

SEQ ID NO: 331491 - DNA, 871 bp, Cannabis indica
cgtatggggagggagtttattaagtggcttgactttaaatatgagaggcctcctgacttttgtttctattgtggttgtcttgatcataccaaaagatattgccatgtttttatccagaaatgtgatgaaactcactctgagcctctctgtccttttactatcttattgaggggaaaagaaaaaacatctgataagagtgcacctttccaatacccacactcaccaaccatgacattgcttaacatccctactgttgatcttagcatccctgctagggattcttcggagccaaccattcgattcccctcattcctcatttatcatgtcacttttggtttcacttttacccattcccaacaatctgcagctattatgatccctacacctattaatcccaatattagaggaatgtcaccatcttttagtaggtttggtcttggttcctcctccaataattctgctttcacatctttctctactgactctgttttggtagctgcttccacaaatatggcttgttcagaatctatgatggaagccttccatgctcaaactcatatccctgtcaccagctataaagatctagctcttgatactcataccatggagctggaagctgatgctcttacaggccagccggatcctgttgtacgtggtaagggattggtttcaacttctggggttaaacgcccctcttttcaagctcaccaagctgtcgttggtggctccttgagatctactctcaagcgagctcgtgctgggacagtggtgatggttcctctgctacaaattctgattcagaacaggcgggtgatgcggagcacacccgcccagaaaaatgagtttattgtgctggaatgcacgtggttta

SEQ ID NO: 331492 - DNA, 884 bp, Cannabis indica
gaaatctcctcagctgcgaattgcttctcttcgcctttatagttaacgacaatcattggcttgtctccagggccgggaatgaccttaaaaggccagtgcctcatgtcggcctgaaccgaagcatcagagaaccttcgcccaatcaacctcttggcatcaaagactgtattttgagggttcatagcaacttggttcttcgccgcatcaccgattaacctctctgtatcagtaaaagcaacatatgaaggtgttgttctgttaccttgatcgttggctatgatctcaacacggtcgttttgccacacaccaacacaactgtatgttgtgcccaagtcgataccaattgccttgccttcggatttggaagccattgattgaatttattccgaagaaaaagtatcagaaaaaaaattatcgtttttaaaaaaacagagtacgaaaaatgaagttgggtttttggagattgtttgtgtttgtggtttgaagtgattatcgtatgaattgttgagaaatatggttagggctttgagttgggatttatttatataaggtgggttgatcttgaattggatgaaaagaattggtttggagaagaagatggtcgaagaggctaggaatatcggtaaccttcgtgaacagagaacgaagaacagaacagaggattctcgatccttcatgtgtgttcggtcaatgaattggactggactgggccgaaatgttaaatgggcctattttattgaattgacttacgtaccactatttccatggcgatttgacatacgattaataataatattatgaggaaattacactctataccctttttatattgtcctcttttatttttaccttcttttttaaaatctatcatttttacctctttt

SEQ ID NO: 331493 - DNA, 1249 bp, Cannabis indica
tccagtgcccctttaggcccaatagtcttgatagatgaggaaggggaagtcgaggaggaggagggcgagattacgacttcccttgagcgtaaacgaaagggtaagatggttgaggtcgagtcttccaagaggcccaagaggagggacactccggctgttagcactgactcagggatcccttccgaagcagaggagtacaacgtgccgcatggcattgttctcaccccggtccccacagacgaagagaggcaaatgctccgaattgccaaacataactatgccctggacgagttcagctggggacatgttgaggtggaagccctgaagaagatcttgcgggaggagcaacagaacaccttgcgtgaggacacctttagaaatccctaggacctgaacatggatcccctgacggactagttcaaccgcttcgtcggtcctacactcgcccccttcgcctctgagatgaccaaccaatttgtctcccatctgactcaattcccagctaagagatacgcaccctgttcctcagtgaactctgtttaccaggttcaggacatcagcgctgccctggctgcggtgagttcttgattcattcctctctttctgcttatattttgtcttgaggcatctgatctcattcttgctctttcttttagattactacagagaccggccgcctctccaagaccctaattaaccacgggtacgtcatgtccaaatttgggggcatggacgaggctgtgaggtgtctgcgggacttgtcagctgagaggagagcgttccgggaggaggcccagcagagggaggctcaggcggaggcgaggcaccaagaggagctgaaggctgagggcgaggttgcggccaaggccaaacgcgagttacgggaagccagggaggctatggatgagatggccgctaagttaagatccttggaggagctgcaccaggcggacttgctgtcgacggccaacctgaccgtggaggtgaaggagctgagggactttaaggagcaagccttgaaaaaggccaaaaaagatgagctcctgacccccgttgtctgtaagcactgcgtcaagcgcttcgacgatgtcgtttacatggcctggcagtcaaatggcagaaaatcaagctcgacttttatcccaaacctgaggaagctcttgttcgctttcaggagaagaagaagaggcttgacgccttgcttgaggagcacagggggcctcgtcttccaccctgtattgattaagcc

SEQ ID NO: 331494 - DNA, 503 bp, Cannabis indica
aatcaacccaaagagaaataaatcttctctctccaatcaagcccctctttatttatcaatatatattcggtcaaagaggaaatgagtcaaacaagactcatcatttcctttcaacaatttcggcccagcccaactaaatgtataaccctaatatcctaatataaaaggtatattattaggtaaagctctcaaaccctaaaacactactacggcagcagctctcttttcctctctaaaaatattcaaagctttttcaaacacttcttttctttctctttctctctaacggcagagacacaaaatagggttagggtttctaatcttttctcttcttcttcttttctcaagaacaaggttgtgttctaggctttctaagatttcttcctctccttattttcttctacagccgcatctactactagagatttcttcaagctttcttctttttctttactaatggcagctgttggaaattatatgttctaaccaacacactttaagaa

SEQ ID NO: 331495 - DNA, 1897 bp, Cannabis indica
actaagatgtgattctactaagccatacaccgcgttccaatgttgtcgggcactgaacatgcaaaattatgaaatttctatatatgacatataaatgcattctgaattcaaataaaatatcataaattaataatttagaattaataaataatttatgtaattaaaccctaattatcggctaattcccaaatttaagctaagcggtctttacattctggtagcttgcatagtttccccaaaaatctaatttttgtggattttttccatgaattttgaattttctaatttcaaaccctaaaaatctaaataaaaatgtcaaattttaaattaacaatatttaatttatttaatagagtattattaattttgatattttaaggtttaaattttttaaaaaattaattattttatttttaaatattatggtcagattttaaaaatttattaatatgtcaatatttatatatttttcaattataagattagatattttaatattagatatattttaaattaaaagataacattatctttttaatttgaaatattatattaaaattaacttataagatgaattaaataattaataaatttaaaattaacttagatatttttatagacatcctaaccataatattttcaaattcaaaaataggttattttgtgaaatatttaattgtctataaattataagttagaaaaatgatattatgtcattttatttattagaaatttataaatagtattttaaatatttcagtaacctagatatttttgtagaaatttgaaaaaggtttaatttgagatattttgacatataatttggataattattatttttttattattttatccttaaaataataattgcctaaccacatcttttaaaattggtttattttgttattttaattttattaaattataagattaaaaaatgatattgaaaaatatctgtttggttattttcaaatcatttattttattagatatttaatttaatttaataaaataattctattaaacttcgatattttaaaattagtttaaattttaaatttgaagagatatttaaggttgtttttaacaaccataatttttcaaaatttatttggttagttaaaataataatttaattatataaatattttaaaattagtttaaattttaaatttaaagagatatttaaggttgtttaagaacccatggatgatccctctgttgattcctctgataaatccgtgtctctccattctgaaaaagagattcctgaagacatcggagcctcctcagacagtgaggaaattgaactctaactagagcctcctttgaccaaatctgctccaacgacttctcgtggatcttcagcagccaaggcttctgctgctgccaaaggcaagcacccatgaaggaatcatctcctggtaatatccctacatctcactcctacagttctcgcttttactttcgtgataatgagtgtgattggaatttgtatgctacccgaaattttgaaagtgaaaggaattatgatttgcatgctcatagggtatatggtattgttaagttcattcaataccatcaatgggagaacactctcactggtttcgaagggtatattgaaaacattgtcaaagaattctatgctaacttatctgataattttctttatgagaattctagactctttcaaaaagtgtttgttagaggacattcgttttccttttctaaaaaagacatttcccaagccttgcaactgccagaaaatgtaccaaatgctataatgtctatggaacgccacttgatgctcactgaactcactggtgcacgagctaaattgaaatctggggagagtcttcgaattacacatcttacctttgctcatgcatctctcatg

SEQ ID NO: 331496 - DNA, 658 bp, Cannabis indica
ctttgtaactggttttgctatttaattttttatttggcatgttttatagtattgaaacttgtgttttttaacgggtcattgtagatgattttcgtcttactgatgctgagagatgtaatcgtcttttgaagaattttaagtttcaacccgtgtatcttcctaagagtgtggatgatgaaaaggtaagaaaccaggttttaaacatttttttcttacaaattgttttgctaatatttcatattctctttttttaatattttttgtgtcttttgtaggatttcgaggagaagtttgagaatatttgcaaaagtttatcatttattaaagattctcaagtatgcatttgtaatgagatggcaatctttagagatgagttttctagggatttggctaagttgagtgggatgattgaaaagatgaactctaaaaaccatgaaaagatggacacagcctatttgtttggtgcttctgatagagaggtaaatcgtttattattgtttatattaacgaaattattagtttcttttaattttcatatgtaattattctttattataattgattatcacattgaagttgggtttttttaaaaaaaaaagttgttactattttctaattaatttttctttttgtattgtattttttctttatgtttttt

SEQ ID NO: 331497 - DNA, 685 bp, Cannabis indica
tttaatttttaattgtatcacttttaaataaaataaaaaatacctagcataaaattttttttgctagtatatatatattaatactatgtggccctttatacgatagtaccagtgttttgtttttgaatattggattgcaccaattattttagctaattgttaatttattcaacaaaaaaaaaaagataagtgcatttataataaattaaaaatatatttaattaaacaaattattttgaaaataagttatctcctataatattgaatttttcttttttgttggttaaagagatcggtagtgtgattcctaaaattaattctttaggtttaatattacgtttgggtgggttcaccatgggagacaataacgatgatggtgctgatttttacctctatgacgatgacgatagtggtgatgatttcgatgaatctaattatgagctccaattattcgaagacactacctcagtctcaaatattgaaactcgactaaataactttcgaacgcgaatcacaagaagaaaacgacattatacaaaccaattatataatcaaaacttacctatatattactctcgaataaagaaggaaagagggttgtggctctcgaataattagcatcaaatatcagttcaaatattaatgggatttgtcgacactaccatattcaatttatcaacgaaaa

SEQ ID NO: 331498 - DNA, 754 bp, Cannabis indica
aaatataaaagatcctattttttcaatttagaagccttagaagacttgctttgcttctcatcctcgctatcaatgctttcatcaattttcctttggccatatgagaagaaaagtgcagcaagccgagtacgataaacttcgatatcaaagtccgcagggacatcctttccgtggataaagaactcggcaaatgcagcaacatatgctccgcaatcactataaaaacagaaaaaatataaacagtttagcaactaaaaaacaacataaaataaacttaaaagaaacactcactttttctgctgagacggcagaccactaatctccacgattcttaaaggagctgtagggtcagaacctaaagcaggagcatgtgacctattcttccagaaaccaagtaaatcaaaaaacaaaggcagcaacacagaataagccttcatggcattcctagctgcagcattcattttcgcagtcctcaaagaattatacagaaacagaatcccttcattcaagtcaagacgaccaaacacccaatgactttcccttcttagattgatgatgaataacacatgatcggcttcataccaaggcttggaacagggaatgcgcaaacctcggatgtaatgcgctattgggtgggcagcgtgaatgtgtgacatcttagtcttcattgacttggctttgttatatttgtggtacaaagcttggatggaatcatcaaagagacaatcagttgttgcaaaattcaacgtcacag

SEQ ID NO: 331499 - DNA, 6651 bp, Cannabis indica
agctcgtctgagagctagatttgcctcaattgtttgtctcttgccttcagctttactcaagttaacttccgctatttcaagagtttgctgagcttcttgtggatcaatgtcactacccttctccgcatcatttactaaaacagtgatctcattattccctattctagcaaaaccacccatcagagccatcgttaaccattggtcttgaaggcgtattctcaaaataccgatatctacagctgtggcaataggcgcgtgatttggtaatatgccaatttgtccactattagtcgataaaattatttctttcacttctgaatcccaaacaattcgatttggggtcagtacacaaagatttaaggtcatttcttcaatttgttctccatttctaagttcgtagccttcgcagtagcttcatcaatgttaccgaccaaataaaaagcctgttcaggaagaccatctaattctccagaaagaatcaatttaaaccctttaattgtttctgctagaccaacatatttccccggggaacctgtaaatacttctgctacgaaaaaaggttgtgacaagaaacgctcaatttttcgtgctcttgctacggttaagcggtcttcttcggataattcgtccaacccaagaatagctataatgtcctgaagttctttgtaacgttgtaaagtttgtttaactctttgcgcagtttcataatgttcttcaccaacaatccgaggttggagcatagttgacgttgaatctaaaggatctactgctggatagatgcctttggcggccaatcctcttgatagtacggtagtcgcatctaaatgtgcaaatgtcgtggccggagctggatcagtcaaatcgtccgcgggtacataaactgcttgaatagaagttatggacccctctttggtagaagtaattctttcttgtaaagaacccatttcagtactaagagtgggttgataacctacagcggaaggcattctgcctaataaggcggatacttcggatcctgcttggacaaaacgaaagatattgtcaataaatagaagtacgtcttgttcattaacatctcggaaatactccgccatagttagagcagttaaaccaactctcatacgagcccctggtggttcattcatctgaccatagactagagccacttttgattcggcaatattttgttcattaattacgccagattctttcatttccatgtaaagatcatttccttcacgggtacgttcacctactccgccaaatacggatacgcccccatgagctttggcaatgttgttgatcaattccataatgagtactgttttacctactccagcacccccgaagagtcctatttttcctccacggcgataaggggctaaaagatctactactttaattcctgtttcaaaaatcgataattttgtatctaattgtataaaggcaggtgcagatctatgaataggagatgttgtgcgagtatctaccggacctaaattatcaatgggctccccaagtacgttgaaaattcgtcctagtgtcgctccgccgactggaacacttaaaggagctcctgtgtcaatcacatccattcctctcattagaccatctgtagcactcatagctacagctctaactcgattatttcctaataattgctgtacttcacaagtcacattaatttgttgatcaacagtatctcgacccttaactatcaaagcattgtaaatattaggcattttccccggtggaaaagctacatccagtaccggaccaatgatttgagaaatacgccccaggtttttgttttcaagcgcgggaaccccaggactagaagtagtaggatttattctcataaaaaagaaaaatatgtcaaaattttttgtgaaattgaaatcaaaaataaaggttcgagagcaaagcaagttaagttgatcggttaattcaattaagagatgggcgttagcacttgatttcgttgttaacaaatattcaaccgatgtttagttattttttttttattcaatttcaatgagtgaattttcaagttcaaccaaaatccattaaactccagtttcaaattcaaaataaaatatcaagcggatgaataaaaattttgagaaagccgtggaattcgaacccgaactccatttacgcttcatttttctatctcattggctcttatttcctatttcaacatatcgatgtaggcttagcctatatattattttagaatattttattttttatatctataccccttctttcttttcatggacaaatttcgcctgtttttacatctaatctaggatttacatatacaacatatattactgtcaagggcgaatttcttatatattttgattcaaaaaaaaaggatacgagattagaaacttgaaaaaacaagattgggttgcgctatatatatgaaagagtatacaataatgatgtatttgacgaatcaaataccacggtctaataacgaaccgttcgttatgatcagttgataatattagttgataattttgtgaaagattcctgcgataaggtttcattaactcctaattcatgtcgagtagaccttgttattgcgagaattcttaattcatgagttgtagggagggacttatgtcaccacaaacagagactaaagcaagtgttggattcaaagctggtgttaaagattataaattgacttattacactccggaatatcaaaccaaagatactgatatcttggcagcatttcgagtaactcctcaacctggagttccccctgaagaagcaggggctgcggtagctgctgaatcttctactggtacatggacaactgtatggactgatgggcttaccagccttgatcgctacaaaggtcgatgctaccacatcgagcccgttgctggagaagaaaatcaatttattgcttatgtagcttatcccttagacctttttgaagaaggttctgttactaacatgtttacttccattgtgggtaatgtatttgggttcaaggccctgcgcgctctacgtctggaagatttgagaatccctacttcttatactaaaactttccaaggtccgcctcatgggatccaagttgagagagataaattgaacaagtatggtcgcccactattgggatgtactattaaacctaaattggggttatccgctaagaattacggtagagcagtttatgaatgtcttcgcggtggacttgattttaccaaagatgatgagaacgtaaattcccaaccatttatgcgttggagagaccgtttcttattttgtgcagaagcaatttataaatcacagtctgaaacaggggaaatcaaaggacattacttgaatgctactgcaggtacatgtgaagaaatgatgaaaagggctgtatttgccagagaattgggagttcctatcgtaatgcatgattacttaacaggaggattcactgcaaatactagtctggctcattattgtcgagataatggtctacttcttcacatccaccgtgcaatgcatgcggttattgatagacaaaagaatcatggtatacacttccgtgtactagctaaagcgttacgtatgtctggtggagatcatatccattcaggtactgtagtaggtaaacttgaaggggaaagagaaatcactttaggctttgttgatttactacgtgatgattttattgaaaaagatcgaagccgtggtatttatttcactcaagattgggtctctctaccaggtgttctgcctgtggcttcagggggtattcacgtttggcatatgcctgctttgaccgagatctttggagatgattccgtactacaatttggtggaggaactttaggacatccttggggaaatgcacccggtgctgtcgctaatcgagtagctctagaagcatgtgtacaagctcgtaatgagggacgtgatcttgctcgtgagggtaatgaaattattcgtgaggcttgtaaatggagtcctgaactagctgctgcttgtgaagtttggaaggaaatcaaatttgaatttgaagcaatggatacgttgtaatccagcaattactttctgttccttgttcttattcttaaattgaattttgaattgaaattaaactcggcccaatcttttactaaaaagattgagccgaatacaaggatactattggatacatttttgatagatccatacttaatatacaagatcttaaatacaaaaaaagagaagacgaaaccacttaaatctttctattgtttgttggattcacaattaattctgaatccttaagatttgggtattcttttttattttatttatattatttctatgtatatcctgcggtttcggatcatggatcgagtcgaatatcacaacttcttctacccatcttatatattgtccttttcgttttttgttataatagaaactgtttagtaggcgagattttacgaaaaagttcttcagatttattggagagaaccattatttctttttttcaatgcgaatttgacacagcatggggaacctactatttcacattaattatttataattgaaaagtgggtttcatcctattttagcatatatagcaaaacgatactacgggttctcaaaaaagaaaaaaaaaattttcagtaccccacttcatcaaatgactattcatctattgtattttcatgtaaataggggcaagaaagttctatgaacaagcgacgatttgattcaatgttgtttagcagggtattagaatacaggtgtgggctaagtaaatcaataaatagtcttggtgatcctattgaaaataccagtgtaaatgaagatcaaattcgaaatgatatggataaagacatccctagtgggaatgatagtgacaattctaattacagtaatgttgatcatttaatcggcgtcaggtacatgcggaatttcatacctgatgacacttttttagttagggatagtaatagggatagttactctatatattttgatattgaaaatcaaatttttgagattgacaacgacccttcttttctaagtgaaccagaaaattctttttatagttatcagaattctagttatctgaataatgtatcgaagactgatgatcctcgctatgatcattacgtatatgatacaaaatatagttggaataatcacattactagttgcattgacaattatcttcgttatcaaatatgtattgatagttacattttaactagtagtgacaattacaatgacagttacatttatagttatatttgtggcgaaagaggaaatagtaatgaaagcgggagttcctctataagaactagtacggataagagtgatttaactagaagagaaagttctaatgatttagatgtaactcaaaaatatagacatttgtgggttcaatgtgaaaattgttatggattaaattataagaaatctttgaaatcaaaaatgaatatttgtgaacattgtggatgtcatttgaaaatgaatagttcagatagaatagaacttttaattgatccaggtacttgggatcctatggatgaagacatggtctctctggatcctattgaatttcattcggaggaggaaccttataaagagcgtgttgattcttatcaaagaaagacaggattaactgaggctgttcaaacaggtacaggtcaactaaatggtattcccgtagcaattggggttatggattttcagtttatgggaggtagtatgggatctgtagtgggcgagaaaataacacgtttgatcgagtatgctaccaatcaaaatttaccgctcattctagtgtgtgcttccggaggagcgcgcatgcaagaaggaagtttgagcttaatgcaaatggctaaaatatcttctgctttatatgattatcaatcaaataaaaagttattttatgtagcaatccttacgtctcctactacgggtggggtgacagctagttttggtatgttgggagatatcattattgcggaacccaatgcctacattgcatttgcgggtaaaagagtaattgaacaaacattgaataagacagtaccggagggttcacaagtgtctgaatatttattccataagggcttattcgatctaattgtaccacgtaatcttttaaaaggcgttctgggtgagttatttcagctccatgctttctctcctttgaatcaaaattcaatcaagtagaaatttataagccttaatttaataaactctacatttttttttgtttgatggtgaaaaatagtgatttcgcttcatagtataggaatcaaagtcaaaacacgaagaatggatttctcttttgtaacataagatttaattcgagaaagaatcatgcgtatatatctttttttattgatattcctgatcttgattcctgattaggaatcaagaactctccatcaaacaaaataaacagagtgaattctttctccctttgccgtgaaattaggcaagaaagtcctgcgtctttctatatccccccagaaccctggttttactaaaaatcccttgtgttggatcatattataacgaattattcgttaatttagaagaagctttttctttaattttattaaatgaaaatatcattctaaagaaaaaaaaaaatgaaattttgaatagcctaataaa

SEQ ID NO: 331500 - DNA, 826 bp, Cannabis indica
gttgttaatccaacatacttgttagtaaatctagatcctgataaaatatttccaacactatctaccgtccaaatagacgtatattctccgaccagatactgttgacaccttgcccgtaggctgtccaaatcctactgttgtaggtacacccatagcaacattcgcggtaaccatcgccagacataccaaccaggtttcatctaagactaggatgatggcacaaactaaacaaaccgtgcgaaagtcttctatctgaccacacgtagctcgactcaccataatgccaagtgtagaacaagcccgacctgctgctgaggaagaagacattgatggggaggttgaagtccaagagatggaggattaggtcgaggtctgtcctgatactccttctgaagctgaggaggaaggtgcagctcggaggttgccctttggtggttttaatgaggatggacaacctgtgtctaaggccggggaggtcttggaggccggtgaagactatgtcactgagcaatacatcgaggtcgttcctctgagaagagaaggcgtactaagagctcggtgggtttctcctccatccgttggaaccagggggaagatgaagaatctacagaagcatggttatttagggaatgcttccttccctcccccaacgagttggcgaccagtccatgggagggttactgtgcttggtcgggcgcactcattaagcagagtgctatgttacccttgcttccgtacttcaggagaattgtggattagtaccacctctgtctgacccaattcactcctaagggatcaagtgttggaatttattttaccaggatct

SEQ ID NO: 331501 - DNA, 2636 bp, Cannabis indica
tttttatgatatttttagaaaattaacttaaattacttgattcagaacatctgttcctcgatagtatccgtccatactttatttatggaataaatctaaaagaagggttatgataaacctagaaaaaaatagaaactacgagacgaataggaatctttaacgaacgggatcaagaatgattattatttcgacacaagaaagggttgtggaaaattccttttcttgtgtcaaagattaggaatacaactaatcccttttcgaattagaatgctttcttcctctcattcatttttttgatactttggtttctattttctgcttatttatcttatggttagtgttgagttaaattgagttaaatagcattctatatctattagaatagaaaactattgattcattcgatggaattttaaatggcatggcattgaaatcggacaatagtgacataatcataccgcttcggttttgattgaaaaaacaaagaaataaataagtaaagtcaaatagtcttcttcacagtatacatactataactagtaatgcgttacaagtaattctcaaaaaatgtaatgtatgatataagatagaaaactaaaataaaaaagcctaaagacttttcagaatttttttgatagaattccataacaaattttccaacaaaaatcggggttctttttagagcttggtattgaaaatctgtggatctagaaattcatttcggacaattgaaccttttcaaactgtttctttttaagaaccaaaaagatttgtgccaaaataaccgatgccaagaagagcaaaaggccttgtacacgtaatggatcttgaagtactatttccgcatccccttgaccaaatccacccacattaggattactcgttaatggttgatccagtttgatggattcgccctctgaaacaagaagttcggggcctggaggaataatatcaaccacttgacgtccatcagatgcctccactatggttatttcgtatccccctttttcttttcgtatgattttgcttactatacccgccgctgtagcgttataaacattattgttactcttgctcccgtcgggataaatctgaccccttcctctgttcccgcctacatatatgggatattttaagaaatgaacgtctttcttagtagtggggtccggggaaagaataggaaaggtgatttcactatatttttgaccaggaacgggacctatcacaagaatattttttttagtggggcgatagctctgaaaagacagatttcccatcttttctttaatctcgggcgaaatacggtcgggaggggctaattcaaacccctcaggtaaaataagaacagcacccacattcaagcctccttttttaccattagcaagaacttgtttcagttgcagatcataaggaattcgaacaactgcttcaaatacagtatcaggcagtaccgcttgtggaacctcgatatctacgggcttgttagctaaatgacaattggcacatacaatacggcctgtcgcttctcgtggattttcataaccctgttgggcaaaaatgggatatgcatttgaaatgggtgccctggttattatatatattaatagtgatacggaaatgaatcgaataatctcttcctttatccaagaaaaggtatttctagtttgcatagtccaatcatttatcccgaaaatttctacaataaaattagataagtcactagtatagtttcctatctatgattctgctatttagatttactgaaataatgttactggaatattgaaggaatctcccgggtgggtagaaagaataagtacaattttgactgttttgctaatgtacaaagtaacaaacattatatataatttgatcggtcgatcctttttcaatcattcattgaatgataaatcactacaagtgacggagatacgcgatttaaataacgaaagatccaatatttaaaaattgtatctaaaataactggaaaagtagaaacaagaccggatataatttgttcattatgagcaaatccaaaatctttgtagatagagccaatcattagttcccaaccatggggcgaatggaatcctatacataaatcagttaataaaagaatagaaaaaacttttattgtgtcacttaaattatataggaattcttgaagacaagagttaagaaaaataagttcttcattacctagaatagaataaacacttagaataagtaaagaaattagatttgttgagaaatgtaaaatcgtatggatacgatcttcattgtccatcttgatcaattggatcatttctttgtagactccgacgtgaaacttttgtaactgcctttccgggtattcctttatcatttcgtcgaagaaggagagttcttttaattctatgaattttttgagaatattcttttcttgaatatcattcaaaaaaatttcggagggcctagtattccaccacttattaacccaagattccagacatttattaaatgtaaatgagagagagatccaccaaggcaaaaatactatagatgcaagatatagaagggaaataaatgcttttttttttgccatttgctcttgctcgtctgtgaatttttaaatgaactcacttcattcgtcgact

SEQ ID NO: 331502 - DNA, 517 bp, Cannabis indica
caattttctaatttatttttttttgttcaaattctaaataatttataataagaaagagactatgaattttatttatccaacttctttctatgtccttttttttggaaatttcattttggattgaaagtgaaaacaattttttaatttgtccacggtaggctccatttaaaaaaggatcatatattttcggtaaatatgttttttttgtattttcattatacaatctagttcttttttcgagtccatccagaataagggatttactatttaaagttttgtctagagccttgactctttttataaatttgttgcttaggttttttcttttttcttcattattatagctccaatgattatataattcgttggaagagggtttctctgtagtgaacagagacacttttctttgtatcatttctaacaaggttgacaaactaggtggatacgtaaaagatattctttctttgccatcactttgacatgtatgaaaaaaatattgtgacatttcttttcttac

SEQ ID NO: 331503 - DNA, 534 bp, Cannabis indica
tcttcttccgtgaaagtaattgaccatcagtcggggcctttgagccagaagctgagcgacatcccacacctcatcgtgtttaacggccccagcatagcgctttagttcctttcgagtggtccctccaataaggggcccaccacagatcatagccactcttccgttgggtcttggtagcaggccaggggtctgctgaggtcctcctaagggtgcagctggtgctagcgctccgggtgcaccccttggcgtcccctgggtcaaaggaccccctgccggaactgggttgagatggggtagccggttcttgatccagtcatagaggtggcccaaccgaatcaaattttcgatctcaacttttaggtttctgcattcattagtactgtgtccaatgccattgtggtactcgcatcttttgttggaatcccttcgagaactatctctgtacaggggaggcagtctctggtagtgcgtattttatcttgtggcgaaatacacacgctcttgtgagtttgtcagctctgtgtactaggtgta

SEQ ID NO: 331504 - DNA, 858 bp, Cannabis indica
aaataccacccttatcgactaacatatagttcctcttcttgatcttaagatttatttgatagtcttccaatattcctttcctggattaatatatatgatacctactcattacttccactcaacatcaagtgtctagtctaatgcatagcaaagcatatctgagacctctcactgttgatcctaaggaattctttccttggcctttatgttttttggaatagttgaaactttttcttaggtaaataaaatctatgtctagaagtcaaaaagcttctatagattgctattagaaaaatgcaccagcaacttactaaagtacgttgcttgcactagagtaattaaatcaccagacataccacaagccacaggttcagataaactgaaacctataatactaggagcaggaagttttgttaagtccattgaatagacttattttaaaaaaatttcttcttgtccttgtaatagaaaacttattggttactccatatgaatggttttaactaaagttctcttggcttttttctgagttccttattctgactatccattacttgtttaaactaacaatagatttcatcacaagtgtcttccaagtcataacagggtgagttcctagaaaccctcccactaagagaaggtactgtgactttctgtctaagaacataagtggtattatcctcttcagttttgtcaattcaacagaggcagtgggaccatcttatattgaataagattatagaacactttggaatcaagaaaaaaaaaaatatctcctctactttgctactttgttttcagacttagtcattttcttataaaagtagtattggttgaaacaaacactttttttatctt

SEQ ID NO: 331505 - DNA, 7399 bp, Cannabis indica
ttttttcgttcaatatttctaacttcgaattttcttgattccgatccacatccagataataagtttcataaacgggtttatttttatattgtgtctctttaacttggaattcatcttttgttttttcctttccattcactcgtatctcttccgtttcatcgattttgtccggatcctccttttcttccgaaaaaagggaaggagaaggatcttcttcggtggatcccccttgttcctgtttagtccccttcgtttctgaagttgtttctatttctacatctgtttcttccgtttctaaggttgctttcagtttcttagtaacaatgggtgacggtattctgcctaaatagtagatacaggtaataaataagagaatactaaagattcgagccataaaatttctcaattctgccacaaggtacttattagatctaataagtacattagatctaatagaattattttgctgtatccagactaataccaatccaacccatttcatgaataaaatgtgaccaattaaccaaccaacaaaactacttgttacaaataacatcttgttgttgcatcgaaacatataaatgttgactaatctgactaacattgaacttggtaaaatgaaatggttgaataattgaaaaatgagattattcaggaatacacattgaatgctaagattacgcattgaatttctgttagtagatccataatcaaaaaagtgtttgtgattgttccagaagaaatgaaacaaaagatagggtagagctaggacagttattgtatgaggtctacccaatgctagatgcagaggcacataatagatcgatatgaacatcatgagctgtcccgtaataaaaccggttgttgctgatactttcttctcggttccttcttctccttcttccagaacgcgagctcggagaaggaagagataagagggccctatggagaatgtggtcagaaatccataatagagtccgaccacaacgaccgaatttattatcttcatgcataaggatactagattacctagtataaaagattgaaaaatcatcccaaacctccccttgttcttttctatttccatttctggattattatatgatgatttttgaactttccatatatagaaagagataaactagaaacgacatctcttatctcaatgacaccaaagggatcttaaatgaatggaattgggatgtggatggaatataatgaaatagagccactttgaggttccctatgaaatgaggcatggaacggagccacgaagaagaagttccgagagttacaaaggaaacttcgagctcatatgggtcatgtgttgagaacgggaattgaactttatgagatctaacctcctgttgttcctcagtagctcagtggtagagcggtcggctgttaaccgattggtcgtaggttcgaatcctacttggggagatttgattcattccgaattctttaattcggaatgaaaggattcactttgaccgttaagagagtaggtaacccgttccctgtgtctttgtttctattgcattctatctcatcgtatcacattctgttctgcgatatttgagaatcgccgtcaatccctcggcgtaggtccgggataatcctttgttccacagtctggggctatttacaactatccaattaagaattctcagatgtactagtactagcaagtgcatcaaagatgcagtcatcgattcgcccgagaggccacaattacggcgagcaaacatattaatgacgaggaacgcatttttgctatgctactaatacttgtacttgctccgctattctgcccccgcctggctgaggaagaattacggggcgtaaaacaaaaaaatatgctgattcgggtcgggcatactctattttcattttcaacctttaaagattaaagaaagaaaaagaaagagtaaggccattccatttcgacaaaagacccacgcccaaattccatagctttgggtccgcaatcccgatcatgattttcctacccccaaagggaagggtccttccctttttggccagttgtgggcgaggagggattcgaacccccgacaccgtggttcgtagccacgtgctctaatcctctgagctacaggccccaccccgtctccactggatctgttcccgggagtaccctaaaaaagggaacctttcctctccccagccgtttcggtttaagaagatgtgaaagcgcctctctctatataagaacggtgcgttccgaggtgtgaagtgggagagaagggatttcataattggggttttgaataagacgaccctttcatttttcatttttttctttttcatagttaaaaaagaaagtaataagaatgagaggtgttaacctttttatcatcctggcgtcgagctatttttccgcaggacctcccctacagtatcgtcaccgcagtagagtttaaccaccaagttcgggatggattggtgtggttcctctacgcctaggacaccagaatatcgaaccatgaacgaagaaaggcatgagagaaaagcatatcggctagtgattgtgaggccccaccccaattctggactggaggggacaccaaaggcctctgcccttccatcccttggatagatagagagggagggccgagcttttggttttttcatgttgtcaaagagttgaacaatggtttttttttcgtgttgtcaaagagtggaacaatgaaaatagatggcgagtgcctgatcgaattgatcgggtcatgtaggaacaaggttcaagtctaccggtctgttaggatgcctcagctgcatacatcactgcacttccacttgacacctatcgtaatgataaacggctcgtctcgccgtgaccttctcttgaattctcaaaacttctgtcgctccacccccgcaggggcagaaaacccatcgctgtcttggctgtgctaccgaagactctggggaagtcggaataggagagcactcatcttggggtgggcttactacttagatgctttcagcagttatccgctccgcacttggctacccagcgtttaccgtgggcacgataactggtacaccagaggtgcgtccttcccggtcctctcgtactagggaaaggtcctctcaatgctctaacgcccacaccggatatggaccgaactgtctcacgacgttctgaacccagctcacgtaccgctttaatgggcgaacagcccaacccttggaacatactacagccccaggtggcgaagagccgacatcgaggtgccaaaccttcccgtcgatgtgagctcttggggaagatcagcctgttatccctagagtaacttttatccgttgagcgacggcccttccactcggcaccgtcggatcactaaggccgactttcgtccctgctcgacgggtgggtcttgcagtcaagctcccttctgcctttgcactcgagggccaatctccgtctggcccgaggaaacctttgcacgcctccgttaccttttgggaggcctacgccccatagaaactgtctacctgagactgtcccttggcccgtaggtcctgacacaaggttagaattctagctcttccagagtggtatctcactgatggctcgggcccccccggaaggaggccttcttcgccttccacctaagctgcgcaggaaaagcccaaagccaatcccagggaacagtgaagcttcatagggtctttctgtccaggtgcaggtagtccgcatcttcacagacatgtctatttcaccgagcctctctccgagacagtgcccagatcgttacgcctttcgtgcgggtcggaacttacccgacaaggaatttcgctaccttaggaccgttatagttacggccgccgttcaccggggcttcggtcgccggctcccctgtcatcaggtcaccaacttccttgaccttccggcactgggcaggcgtcagcccccatacatggtcttacgactttgcggagacctgtgtttttggtaaacagtcgcccgggcctggtcactgcgaccccctttgtgaggaggcaccccttctcccgaagttacggggctattttgccgagttccttagagagagttgtctcgcgcccctaggtattctctacctacctacctgtgtcggtttcgggtacaggtacccttttgttgaaggtcgttcgagcttttcctgggagtatggcatgggttacttcagcgccgtagcgccttggtactcgaacattggctcgaggcattttctctaccccttcttaccctgaaaaaacaggggcaccttgcgtccttgaaccgataaccatctttcggctaacctagcctcctccgtccctcgggaccaacaaggggtagtacaggaatattcacctgttgtccatcgactacgcctttcggcctgatcttaggccctgactcaccctccgtggacgaaccttgcagaggaacccttaggttttcggggcattggattctcaccaatgtttgcgttactcaagccgacattctcgcttccgcttcgtctaccactgctcgcgcaggtgcttccctctaggcggaacgctcccctaccgatgcatttttacatcccacagcttcggcagatcgcttagccccgttcatcttcggcgcaagagcgctcgatcagtgagctattacgcactctttcaagggtggctgcttctaggcaaacctcctggctgtctctgcacccctacctcctttatcactgagcggtcatttaggggccttagctggtgatccgggctgtttccctctcgacgatgaagcttatcccccaccgtctcactggccgaccttgacccctgttattttgaggtcatatctagtattcagagtttgcctcgatttggtaccgctctcgcggcccgcaccgaaacagtgctttacccctagatgtccagtcaactgctgcgcctcaacgcatttcggggagaaccagctagctctgggttcgagtggcatttcacccctaaccacaactcatccgctgattcttcaacatcagtcggttcggacctccacttagtttcacccaagcttcatcctggtcatggatagatcacccaggttcgggtccataagcagtgacaattgccctatgaagactcgctttcgctacggctccggtgggttcccttaaccaagccactgcctatgagtcgccggctcattcttcaacaggcacgcggtcagagccctgggctcctcccactgcttgggagcttacggtttcatgttctatttcactccccgatgggggttcttttcacccttccctcacggtactacttcactatcggtcacccaggagtatttagccttgcaaggtggtccttgctgattcacacgggattccacgtgtcccatgctactcgggtcagagcataagctagtgatactttcggctactggactctcgccatctagggtgcagcactccaccgcttcgcctagcagcacgacgcttgtattgctctcccacaaccccgttttcgcggtttaggctgctcccatttcgctcgccgctactacgggaatcgcttttgctttcttttcctctggctactaagatgtttcagttcgccaggttgtctcttgcctgcccatggattcagcagcagttcgaaaggttaacctattcgggaatctccggatctccgcttattttcaactccccgaagcatttcgtcgcttattacgcccttcctcgtctctgggtgcctaggtatccaccgtaagcctttcctcgtttgaacctcgcctttaactttaaggctatgccatcccctaaggtgctactaaatggaaggatcttatcttatcaacgtccatgaatgataaatctagcatagatcgaactgccgaatcggaaaaatagggtgctatcatatagctttgtatcggctaagttcacgagttggagataagcggactcgaaccgctgacatccgccacagggtaaaccactgcctctcaggcccccgactgattctaccatagaggccaacgatagacaataactcccccccgaacacagcttacaactttcatcgtactgtgctctccaaagagcaactcttctcaaaatctcaaaaggtgctgagttggaatcccattctaactaaggattcttgtggttccggaggatctagctacaggataaccaggaacggagagctttcccccccttttccacccgactctttggtcttaagaatgctggttttaagaatgagtgattgcccttctccgacccttactgcccaacctgaaagcggacagctaaagcgttccacttattgaacagggttctatggtcggtccgcgacccctggatgccgaaggcgtccttggggtgatctcgtagttcctacggggtggagacgatggggtcggtccatggattttccttccttttgccgcatttcgctcaaagggttgaagggagatagtgcatcaagctgttcgcaagggccaacttgatcctcttccccagggatcccagatgagggaaccctaagagagccgccgactccaactaccgtccatgtacgatccatactagatctgaccaactgcccatcctacctcctctacgttcttgacagcccatctttgtctcagtagagtttttcagtggcatgtttcggtcctcttccccattacttagaaaaagtgagccaccggttcaggtacaagatactatcattaccgcctggacaattagacacccaacccgtaatcgcaacgacccaattgcaagagcggagctctaccaactgagctatatccccccgagccaagtggagcatgcatgaaggagtcaaatgcttcttctattcttttccttggcgcagctgggccatcctggacttgaaccagagacctcgcccgtgaagtaaatcatcgcacctacggtccaaccaattgggagagaatcaatagattccttttctggagcgattcatccttcccgaacgcagcatacaactctccgttgtactgcgctctccaagtgtgcttgttcctcccttcttccctaccatggcaagtttttgtgaaataactccgatgagaagaaaaaagaaggcgttaagagaccctcctggcccaaccctagacactctaagatcctttttcaaacctgctcccatttcgagtcaagagatagataaatagacacatcccattgcactgatcgggggcgctcgtagtgactgagggggtcgaagaccaagaagtgagttatttatcagccaagcattcttcttacggctagatccaatctcctggtccctgcggaaaggaaaaagaatttcacgttcttcctttcggaaagggaggttttttttcctattgattgcaactttctccagacct

SEQ ID NO: 331506 - DNA, 827 bp, Cannabis indica
tcatctttgtaaattttaattttttttaaaatattttacagtactgaaaataagtttaaaattttaggaacacgggtagtaaagtggaatattaaaaactttattttcggtaccgtaaactattaaaatttttttaaaaaaatttagcaaggatgatattataactaaacaaatactgctcttaaaaaaatgaaaaaaaaatattttgacatgtaatttcaagcatagaagttgactaaaaaaatataataggatgttgtaattaacactcttccatagtgttggataaattcccatactatctgtcacataaataagttacaaggaaaataaataagaccttttacaaagcccaacagaccattataactcatagagttgtcggttctgttttcataggtttaggtctttttatttctttacaatataaagaagcaagcaatatatatcaagactctaacaaaccctcagctattcaaggaaaaaatatctcaacagaatatagctatttctcagctcaaaacaaacacagccagcaacaaacaacattataaatattgaggttcaaccttctctttggtacatcaagagaagctttcggccagcatttaaaaagggcagcacatccttttttttccttttgtaatccacctcagaaacaagagagaaaatagagagagttagtgagagatattgtaatgtaaaccagaaaaataaagtgaagaaaagagataaagaatagagattacctactgaactttgtggctaggaatctccaaatccttgtaatcggtttggacatggatagtggagaatcaagcgtcttt

SEQ ID NO: 331507 - DNA, 495 bp, Cannabis indica
ctaggattaggtacctagtagcttttctcctcatttttcttgccttgtttttgtttttaggcaaggctctagtttggagatatgctgcaatgggtgtcatctagaatggactgtcatccaacatgtcaacctccttccagaatggcaatgcttggttctcttaagaattgtatgggcacgaaatttgcgttatcagttatggtgttgcttactagataggcaagtgcattgaatatttcattttcttccaataagcagatcaagaatttactacttaaattcactgacttattaattcttcattacgcatagaacttagaattgtactctcagttatgtagaacgctctatatgttccaccatatagacacatcattagttatccattgttataaagctaagtgaaatgagtactccaccatttatcttcgtttggttaagctcgaaggaaatcatcctttgcttactattctctagatagaagctatagattcc

SEQ ID NO: 331508 - DNA, 852 bp, Cannabis indica
aagtttggctaatgtatgggcaatgctagcggagtttgcagtgcgggtggtgcatgttgtaaaaaaaatttcaaaccaaactgcataagatttttgtaatttctcataccgtaactgcatcacgagatcttaaaattacagaaaccacaccgcaaaaatacagtatggtgtggtgcagtttgagcagtttacactatcatcattattaaacattataattaaaatatgaaaatcaatctaataaagttttgacaattgtatatataaaaaaatcttattaaaattttaatatcataacatatatatactaatcatcaagtcattatattaaattatctcttgttaacgcatattttcgttaactaaatatgagcctaatagtgacaaacttgctcagaaaaactaaagacaataaagaaaaaagtatgaacacaaatgatttttttacgtggttttgcagttaaaattttgcatagttcacgagtcaacccttttagatttctgatattgttctagggccttttctcttataaatttttcgtcccttttttagtctaacttgcctctatttataattacatagtcaggcagttaattacaaagttggttgtaatctttacaacaattatcctctgaaatagtgggatttgattacatatcacgtaatataaatgcggttattatttgaatatcacacagctgtgattaatctgcatttaccgggtcaagataatcgtgtattaaacatgttttaaatcacaacgttctaggatgtctcgacaggaactcaataccaatgaccttgatagcaagctgaagctttttctcttatctctccgaggttgataatgt

SEQ ID NO: 331509 - DNA, 778 bp, Cannabis indica
gatggatgttaaaacagcgtttctcaatggagacattgatgagacaatttatatggagcaaccagaaaactttgtggttggtgacccaaagaaaatggtttgcaaattaaaaaaatccatctatggactcaagcaagcttcccgtcaatggtaccacaaatttcatcaagtggttctcttatttggttttgagatgaatgctgttgatgattgtgtgtatcataagtttagtgggagtaagtgtatatttctggttctatatgtcgatgacatattgcttgccactaatgatataggcttattgcacgaaaccaagagatttctatcgaagcattttgagatgaaagatcttggtgacgcctcttttgttttaggaattcaaatacatcgagaccgttctcggggtattcttggattatcacaaaagagctatatcgataaagtactcaaacggtttggcatgcaagattgtagaccaggtgatacccctgtcgttaaaggagacaaattttgtcttaaacaatgccctaaaggaagccttgaaattcaagaaatgcaaaagattccctacgcttcagctgttgggagtctaatgtatgctcaagtttgtacgcgtccggatatagcgtacattgttggagtgttaggtagatacttcagcaatctaggaattgatcactggaaagcagccaaaaaggttatgagatatttgaagagaacaagagattacatgctcacatataggaggtcagatcactttgagatcattggatattct

SEQ ID NO: 331510 - DNA, 4101 bp, Cannabis indica
aaccataaattcttgaacaatgcatttttatgttacggcttaaatagttttgtcaagtcatatccatatccgtcaaaaaccgctagcaaaagacttggtttttagttagttaaatgagtctgcgtttcctaatctcaatctcattaagtcctcttggtaccgctctaattttcatgattcttttttgatcctattttttaattacacctgagttgcttgttcgacaaaaagtccctttatatataataatgggattgtagcgggtatagtttagtggtaaaagtgtgattcgttctattaaacccttatatagttaaggggtccctcggtttgatgaatattccattccgatcaaaaactttatctcgtaaaaaggatttaacccttttcctctcaatgaaaaattcgaggaaaaatatacattctcgtgatttgtatccaagagtcaattacaaattgaaaaattggattgtggaattacgaaacataattttaaaaaattggatcaatacttccaattgaatgagtatgagtaaggaatccatggataaagagagaaagtttatttctaaccgtaactaaatcttccatttttttttgttatagggaaaattgaagcaaaatagctattaaacaatgactttggtttactagagacatcgacaaattttttagctcggtagaaacaaaatgcttttcctaaggattctttaaaatagaaatagagaacgaagtaactagaaaaagtgttagaatcctcttcttttctataaggatcatctagaaagcaggtcgttttgaatgcattcatacagaaaagctgacgtagatgttataggttgaatttttttaatttcattcatatcttacatttggaaatttattcatattccataaaggagccgaatgaaatcaaagtttcacgttcggttttgaattagagacgttaaattaaaactgatgaatcaacgtcgactataacccctagccttccaagctaacgatgcgggttcgattcccgctacccgcttgtgcttacttgatttcttatctctattcattattcctaacaatctctctatttttatattagaaaaatttttctatttttaaactaaatattaaatacaaattcaaataatattgaattttttcatttgaataaaaatattcaaattaaagtataataaatactatttaggtataataaatactattagaaataaaatttttagaaaatattctaaaatttagaaaataatcgaatttaataattcgaatataattaatgtaattcattattaaaatgcaaattgaatacccaattcccgaccctgtcctatattcgttttttacgaacaagaaaaaaaaacaaaaaaagaaaaaataaaaattgaaatgaaaagcgtccattgtctaatggataggacagaggtcttctaaacctttagtataggttcaaatcctattggacgcaatttatttccatatgtattttatttgatatttctatatcaagaaagatgttttgaatggcttaaataaaagatccgcttcttatatacacttcttacttaatatagacagatttacggatttaaagagatccagttatttagacttgttcttgaagtagaaaacgctccatttgttcttgaatcgcttgtttcaaaagggcttctgcttcttcagtaaatgtcttggtagaagatatgatttcttggaattgaggtttattcgtttttaaataattccgtaactcaagcagaaatttccttacctggccaatttctaatgaatcaagataaccgttcgttccggtataaatagtgattatctgttcttccaccgaaagaggggctgattgagattgtttgagtaattcacgtaatcgttgacctcttgccaattgattctgagtagctttatcgagatcagaggcaaattgtgcaaaggcttctaattctgcgaattgtgccaattctaattttaatttgccggctacttgtttcatggctttaatttgagccgcggatcctactctggaaaccgaaatgcccacattaatagcagggcggattccagcattgaacagatcggcggataagaatatttgtccatctgtaatcgaaattacattagtaggaatataagctgaaacatctcccgattgggtctcaactattggtaaagcagtcatacttccttcacctaaactagaacttgatttagcagctctttccaaaaggcgtgaatgcaaataaaaaacatctccgggataagcttcgcggcccggtggtcttcgtaataaaagagacatttggcgataagcctgtgcttgtttggaggggtcgtcataaatgattgaagtgtgttgttcacggtacataaaaaattcagcaagagctgctcctgtgtaaggagcgaggtattgtaatgtggccggagaatccgccgtttcagctaccacaatagtgtattccatagctcccctttcctgtaaagcagtcaccacctgagccacagaagatgctttttgaccaatagctacataaacgcatattacattttgcccttgttggttgagaatcgtatctgtagctactgctgttttcccagtctgtctgtccccaataattaattctcgctgaccacgtcctataggtatcatagaatcaatagcaataagtcctgtttgaagaggctcatatacggaacgtctcgaaataatacccggagcgggagattcaattaaacgagattcagaagttgaaatttcacctcgaccatcaataggtttagccagcgcatttacaacacgacccaaaaaagcctcacttaccggtatctgagcaattcgtcctgttgcttttacagaactcccttcttgtatcagcaaaccgtcacccattaatacaacaccgacattgcttgattccaaattcagagcaatgcctatggtaccctcttcaaattctactaattcacctgccattacttcatcaagaccataaatacgagcaataccatcgcctacttgaagtacggtaccggtatttaaaatctttacttctctattatattgttcaatacgttcacggataatattactaatttcatcggctcggatggttaccatgaatatttcttaattcttttttttctttcaaacaaaaaaaaataatccttgcagtagaaggactaatccgttatttctttcatcattccaaacatgtcaatattagtactgatggtacgtaaatgtaactcgttgttcaaacaactattcagagttcctagagctccttgtaaggcttgttggaaaacctgttgtcgaacttggttaatcgctctttgttgttcaaaacgaatggtttcatttttgtaattttttaattgttccaaagtcttagaagttgaattaatcaaattcaatttttctcgttctatctcagaatatccattcactcgaaacagatccgcttccttttctacttttagtaagcgggtccgggctttttccagttgttctagggccctcccgcgtagttcttctgaatttcgaatagtcttcaagatcttctgttttcgattatctaataaatcacttaatgaaagtagattatctttccattcatttcaaaacttccacgatcccttcccgaaccaaacatgaatctttcgattcatttggctctcacgctcaattacttctgatacttatcagaattcccaatatcttttttttaatgtaatgagcctgtcctctcttctctagtcatattcgaatataaaaatattgaaactgctcactaatccaataaaaaaaatattcggaggactcttctgaccaaacaaataattgtcagcaaagttgtttcttttttttcctcaaatccaaagaattcctcttactttatacataggtcatccacttagcattggataaaaaagataaaaaaagggtgttgaaatacacatttttttatttcattttttcaatcaaacaaaagaaaaggtttaaatccgttttttatcgacatgagtgttttatatcgaaaaaaattccaactcttcattttgaaaccatttctggattaa

SEQ ID NO: 331511 - DNA, 688 bp, Cannabis indica
acttggacattgacccaaacctacacttagatcggggtgcaaaccttgacattaacccggacacagactcgaaacctaactcaaacccacacccagaatcagacccaatgctagacccggacgcggacccaaacttgaacctagaccaggatcagaaccaaggacttagacccagaacttaatccagagtcaaatcgggattggaacaatagactcggacccaacctagaccaagaccaaggacacaaacccacacccggagcctgatatggacttgaactcaaaccaggaatctaactccgacctgaactcaaacccaaactcaaacccgaacccagataaaaacccagacagagacctaatcccgaacagagactaggactcagacccgaacctagatcaggacccaaacccacacaatatccgggacctggacccagaatcaggatcgcgacctagtaactgacccagacccgaacttgaacctaagacaaagctcgtgacccagcacaaaaaatggaaccagactggaacccgatattgggatccggatctggacccagcgctttgacaaaacctctagtcggtgtctggatttgggacccagccctagacccgaaccgtaacaaggaccaaaacccacacccggacttcaacccagtcccaaacccaaaagtggacccgaacc

SEQ ID NO: 331512 - DNA, 529 bp, Cannabis indica
gggttcagggttaagcacgttcaacaatggaggttacaagttattaaaaaaaaaactgaaaagaaatgaaaaatcaaaggaaaaaaaaagaaaaaaaagagagggaagtgattaatggttgattgatgagagatgggggaaatgcacgtgtctgatgcatgggggagagtgtgcatgtggtatatatgtaataaaataaagagagaaggtaaaaatattgaggtaaccgtgtagtggtatttaggtaataaagttgaaagaggtatttttttttagtattttcaattattaatctatttgtatttaatcttccaagcttaaattttggtggtaaaataaaaccctccaaatgattgaactatatattagtaaatttaaggtgtcatctatattttacagctaactgccaacatagactacttatgtctacactcttgtacaggtaacacatttatattggtacatctaatattattatttaaaaattatttcaaaatttataatattaatttttaaatattttattttt

SEQ ID NO: 331513 - DNA, 3062 bp, Cannabis indica
aaaaaaaaaaaaaaaagaatcaatgtgattatattttagttttttttttttttcatagcaggccctgtcgaatttgtaataaaagagctctttttctttcattttgtaaaaaagatgagttttggtctgtttctgtttatttttctatttcttttctataaatagaaaaataaacaaaaaaactcactaaacttataaacaaacttattgaactaccttctcattgatgtattgtttcatcggaatccaaatcacgatgtaattttcttgttcctgaatggtcttcttgaattcttttaggtttatgctctactccgagtaaagatctgcccgatttggatttgcctatataggacaaatggacaaatactatgtctttttgctacgacttcttttttttttttcaatttatcaatttatttcatatctcctaccaaatattctatttgaaatcacgtctattcatattagaaattagaaatcgaatataatagaaaatatgatataaaatatgatcatctaagtagaaatcctagatatattaccaattgttttgtttctaaacggagcctggatacttcattttattggtcgaaccaagccaaccataaattatttgaattgctaatattaatttgtatacccccctaaaaaatatatttaagtgcacttcattgcatttcacgctccaaatttttgataattcaatcaatctttcttgggcgaaagggaggatatctcgatcggggaagagaacggggaaataccatatgacccaatatatctgacaagtcgcactatacgtcaacccacgatgcatcttcgtctccaggacttcgaaaaggtacttttggaacaccaataggcattaaatgaaaaaaaatttaagtactatatctcactttgatgtgaaagcgtaaataggtttattgtcttaataatattgtatcttttagcattttttatacatagcatagattgaataagtttagttcatattataaaaaaggcaaattcttacaaatgggtcctttgaatgatgaacaaataaagaggcagttactcagataaaatgcgatcaacgtccgaccattgcgtcttggtacttatcgggtgtagaataaatctgcttcttgttcctacgagcaaaattgttccattattactaaactaaaaaacattcttactaaaagaatagaacaaatatgaatcctttccccgagataatccactaaaaaagaaaggtccctagtatagtttttttaaagtgcaataaagttacatagtgtctatttttcattgatataaggggtatttttatgggtttgccttggtatcgtgttcatacggtcgtattgaatgatcccggccgtttgatttctgtccatataatgcatacagctctggttgctggttgggccggttcgatggctctatacgaattagcagtttttgatccctctgaccctgttcttgatccaatgtggagacaaggtatgttcgttatacctttcatgactcgtttaggaataaccaattcgtggggtggttggagtatcacagggggaactataacgaacccgggtatttggagttacgaaggtgtagctggtgcacatattgtgttttctggcttgtgctttttagcagctatctggcattgggtgtattgggatctagaaatattttctgatgaacgtacaggaaaaccctccttggatttgcccaagatctttggaattcatttatttctctcaggggtggcttgctttggttttggcgcatttcatgtaacaggattgtatggtcctggaatatgggtatccgatccttatggactaacgggaagggtacaagctgtaaatccagcatggggcgtggaaggttttgatccttttgttccgggaggaatagcttctcatcatattgcagcgggaaccctgggcatattggcgggtctattccatcttagtgtccgtccgccccaacgtctatacaaaggattacgtatgggaaatattgaaaccgtcctttccagtagtatcgctgcggtcttttttgcagcttttgtagttgctggaactatgtggtatggttcggcaactaccccgattgaattatttgggcccactcgttatcaatgggatcaaggatactttcaacaagaaatctatcgacgagttagtgctgggctagccgaaaatcaaagtttagctgaagcttggtctaaaattcccgaaaaattagccttttatgattacatcggcaataatccggcaaaagggggattattcagagcgggctcaatggacaacggggatgggatagctgttggttggttaggacaccctatctttaaagataaagaaggtcgtgaactttttgtacgtcgtatgcctacgttttttgaaacatttccggttgttttggtagatggagacggaattgttagagccgatgttccttttcgaagggcagaatcaaaatatagtgttgaacaagtaggtgtaactgttgagttctatggcggtgaactcaatggaatcagttatagtgatcctgctactgtgaaaaaatacgctagacgtgcgcaattaggtgaaatttttgaattagatcgtgctactttgaaatccgatggtgtttttcgtagcagtccgaggggttggtttacttttggacatgcttcgtttgctctgctcttcttcttcgggcacatttggcatggtgctagaactttgttcagggatgtttttgctggtattgacccagatttggatgctcaagtagaatttggagcattccaaaaacttggagatccaactacaaaaagacaagcagtctgatagaatattgttttggtattttttgtctttagttttgggatttgattttgattatagaataccaggtcttttcttttactcttgttttgttcttatccggaagacgatctcaactcaaataactaggtatggaagctataattgtaaaccacgatcgaatctatggaagcattggtttatacattccttttagtctcaactctaggaattattttt

SEQ ID NO: 331514 - DNA, 574 bp, Cannabis indica
ctttgcccgaatctccagctatgggcgagcctccaatgatgacttccagatgtccataaaccggtggaggtagcaagtcttggttattatcaactctctgattttgatcagccttgacatacttctgtacatgccggttatttttccttatcaagaattcaatttctcgctttagattgttgcattcattggtgtcgtggccttagtgtccaagaaactgacaaaacttggccatgtttctcttggtgacatcttttctcatgggcgcgggcttcttgtacggggctagtgactgagtccccatgtaaacactttctatatcctcagtcaagatggtaaatgcagtgtactctgcttgattctcccggggagcttgttcgattttaccagcgaactttcccttcttcccattcccttgtctattgttgttgttggaacgtttaccatttgagcttgaattacttgggtaatgggggagttgggtggacattccagtggacggagctttagccttgcgaggttttggctcaccttctgctcgctgaatagcctcttcaagtttgatgaagccttc

SEQ ID NO: 331515 - DNA, 768 bp, Cannabis indica
cattgaccacctgcccgatgcaagcatgccccctaagacatctgggggcagccgaggcacgaggcaacaaggtcagttacaaagcttctaacaatgaagctgaacatgaagctccgaatgctggccctaggctagcataaaagcatagactaaccacgactctgagctagtcgtaagttatgtcctaggtgaatgtatagcttaatacaagaagatgatggcctatcagagccattaagacagctcaaaggctatactaaaaggcaagcccctaaagacggcacaacaaccgatgcacttgctcaactagccagttgtgctttgacagcgaaggaaaacttggtatctgctcaattcttcaaagaactaagtccttctatttcaaaaggaatagacatgctagacaacaaacatgcatacacctacaacatgtgtaacaccctaactagcataggcgtattatgtgatttttaaacgtattgtgcagctcgttgctaatcaacgaggtttatggaaatcgtgattaattaaaatttttgctttttaattaaacttatataatattcataaaaaatactttgtgatcccatttacaaaatactttacaaaaagtttactgtctattacaaaatacttgtcgcccagcgactaactacaaaagcactgttgtcccgaggatcgtacgctccaggcctaaccgcctcgacatgtaaaatcttcatcggctcgtcctcacagttcctcagccttggccttgcccttacctac

SEQ ID NO: 331516 - DNA, 571 bp, Cannabis indica
agtttgatcattccttttaatgctatgacgtcgccagtaaaaccatagatgctcgacgtcacaggccgcaggtccttctcctgcaatcccatttgtttgaaggcttggaagttcaaaagattcactgaacttccattgtcgacaagtatgcggtggacattatccccgccaatattggcgatgataactagtgcatcggaatgcgggtgatggacccatctcgcatcactctccataaaggtgatgtcgtcgcattccttcttaaatagtttctcgggccgctcactaagattgttgacattggtgaacggcttttctttggcttccctggcataccgctcttgtgacttgcgagagtctcctgcaatatggggtcctccaatgatagttaagatgttgcgaggcgttctggaaccactcgcattttggttttctcctttgtcatccgctcggggatgactttcctcgccattcttatacttgtcaaactttcctctccgaatcagctcctcgatttcatcctgcaagacccaacattctaaggtagtatgaccaatgtctttgtggtact

SEQ ID NO: 331517 - DNA, 795 bp, Cannabis indica
tttttgtttttgttggcgagttcatatccaagatggcttggattttttctggatcggcttcaattcctcaggcattgacgatgaagcctagaaactttcccgagctcactcaaaggagcattttaagggatttagtttaatgttgtatttcttgaggactttgaaacattcgtccaagtcgtctatgtgcccccagcctttctggatttgacgagcatgtcatccacgtacacttacatatttctgccgatctggtctttaacatcttatttaccaatctttggtacgtagctctagcaattttttagatcaaacggcatgactttgtagcagtagagacccaaatctgttcggaaacttgtatgttcttggtctggcggatgccttttgatctgattttagcctgaataagcatccatgaagcttaaaatttcgtgcccggttgttgcatctacgagctgatcgatccttggaagtggaaaacagtctttagggcatgctttgttgaggtctgtgaaatcaatacagactcgccatttctttttcggcttggccacgagtacggggttcgcgacccaagccgagtaaaaagcttctattataaagttgttgttgcgcagcttttcaacttcatctttcaaggctactgctccatctttatccaacaatcttcatttttgctgaattggtcggatgttaggatcgatatttaggatgtgtgaaataatagaagggtcgattccgaccatatccgcatgtgactaggcaaaaacatctaggtttgctctcaaaaat

SEQ ID NO: 331518 - DNA, 1198 bp, Cannabis indica
taggatgtgcttttcctattggagatttcaacttgaccactagtttgaggatgatatggtgtagtgactttgtgtgtaatgccataatttttcatgagatgtgcaaatggcttattacaaaaatgtgtacctccatcactaatgatagcacgtggtgtgccaaaacgggaaaaaatattttctttcaagaaacgaaccaccactttgtggtcgtttgtgtgacatgcaacagcttcgacccattttgaaacataatcaactccaacaagaatatacaaatttccaaacgagttaggaaaaggtcccataaaatcaataccccaaacatcaaatacatcaataataagaatagggtttaaaggcatcatgtttcttctagacagacttcctaacttttgacaacgttcacaggctttacagtatgcatatgtatcacgaaaaattgtgggccaataaaaaccacattgtaaaatttttgcagcagtctttttactactgaaatggcctccacaggcatgatcatgacaaaaagatatgattttagtttgatcacaattcgggatacatctacgtactatctgatcaggacaatatttaaacaagtatggatcatcccagataaaatttttcacctcagaataaaatttatttttatcttgtttagaccagtgagatggtatttcaccagtaacaagataattcacaatgtcagcataccaaggcagagaagaaacatgcatcaattgttcatcaggaaaagtttcggtgataggggtaggctctttactagtttcaataactagcctagataagtgatcagcaacaacattttcagacccctttttatcacgaatttctagatcaaactcttgtaaaagaagtatccaacggattaaacgtgattttgcatctttctttgacaaaagatatcttaaagcagcatgatcagaataaacaattattttagatcctaacagataagacctaaacttttctaaggcaaagactacagcaagcaattctttctcagttgtggaataatttaattgagcatcatttagagttttgctagagtaggaaataacatgtggtattttatcaattctttgccctaagacagctcctatagcataatcagaagcatcacacattatttcaaaaggaaggttccaatcaggaggttgaataatgggtgcag

SEQ ID NO: 331519 - DNA, 1489 bp, Cannabis indica
gattcctcttgaccgtgagagacaagaagaatcatcaatgaccccaaacttgtgcaatctatctcttgttctcaatctttgttggatggcaatccacattataaagctatgctttggagtattaaaacgcccccaaacctcattactccaattaactctactatttgaaggacaaagtaattgatagcctaaagagatttgatatttaccttgtgtgaattgttgtgcgtccatcaggctttggatctgattttcggcagccactacttgtttccagtaccagctcctttgtggtgaagcttcatagctccaccaatcgccctgtttgagatagacactatggacccatttcatccataagttctcctctttgtttgcaatagcccaaacatatttaaacattgcttggttccatacagatatccttttaatccctaatccaccatctgcttttgactgacaaataaattaaatcccaagcaatcggggtgcctccttgtgagctgtaatgtcctctccacaagtaggctctacatattgcttcaatttcttgtatgatttttttaggcagtatcattatttggctttaataagagtgaatggccatcaacacagaattaactaacactgctcttccagcaaaagacaagtttcgtgagctccatgtcttgactttggctatcattttctcagctaggattttacaatcctttgctgaaattctctttgcacaaattggaactcccagatatctaaaaggaacttcttgctttgagaaacctgagacatcaaggatacgctgtatttcaccatcctgcattccactgcaataaattgctgattttgttgggttaggatgaagacccgaggtacatgagaatagtttcagccctttgaggagatagtatacacttttgaaatctcatttgcaaaacagtagtacatcatcagcaaagcttaagtgattaagcttaatttctccacatctgtcatgaaactaaaagtcttgtaaggactcaattttcttcaaaattctagatagatactccatcccaaggacaaagagcaaaggggacatggggtccccttgcctcaaccctctctttgattcaaagaatccataacatgagccattaagaataagagagaatttaggtgtcctgatacaagtcatgatcaaattaatgaactgcttaggaaaatagaaagccatcattacctattcaatgaattcccactcaatcatacagtttggctttgtcatcttccttccataatgtctaataagatcctgacaaatcatgatgttatgagcaatgtatctatccttgacaaaccctccttggttctgtgctatcaaatctgggagaacatgcttcagtttggaacaaatcactttcgttgcttctttatagataacattgcagcatgctattggtatgaagtctttaacagtgttagggcattttaccttaggaatcaaggttaa

SEQ ID NO: 331520 - DNA, 975 bp, Cannabis indica
aaaataaagtcaatctttatttcccttttttcaatacacggttttggttaatttttaaattgaggatacatatgtagctttaccatactgaaacgactgccattattggtatcaaaccaataccgattcatacaagcgaaatcttctaatcgataattaggccaaagaaagaactttaatttaattagcgtttttttatctcttttgcttgtattcaaaacttttttctttatcttattttcattgcaaaatgctgtatttctcggcatacctttttgatttctagaattaaaacaaattagaattctcaattctatacgacgtctaggggctaaaatcgtttcaggaacaaacaaatcataatggtttttgtctctattttcagccatcttttgatgttttgaaatgacttcatcaaaatttttcttatcaaccggttccttttctcggtacctttgattaatcgtgtgtgtactcttatgacgcaccgaaatacctatagtttgatatacaataaactgcccttcattttttatagatagacgaacaggttcaataagtaatattccccttttaaccaattctgtaagatttacatttttctgaatcattaaaatatccagactcatttctcccctttgaatagaggctattgtaatgtctcttgggtttattaatctaagtagtagacaatatactttgatgttagcaatcatttttgtatttaaagaattatcccatctcaattgaaaaagcaaatatctttttagtaagaaatcaaatcccgcttccatattgttcttgtattgttttttattttttttcatctttgatagtgcataattttcttcaatatctttttcttggtttgacagagttaagtccaaattttcttgaactgtgaattctttttctctttgattttggttttctaattcaagatattttttttcatttgaaaatattgatagaaaa

SEQ ID NO: 331521 - DNA, 645 bp, Cannabis indica
ttaatataaataaaaagtcacccatgaatttctcaaatcgaagaattctgttatatagacacactttatatagaatagactagaaggcaactacgtcgttggattttttttttttgttaattttttaaatttaaaaactttgatttaataatatgatgtttatacaaaaatattacttataacttttactacatatttgataatataggaggtttaatcaataaaaatattacaccataagataagtttgttactttgttttttaaaatattagttatatgtaatttataatttaagatgaagatttagcaacttcctcttattttgcttcttttaatatagtacacattgaaattcttgtacttttgagtcttcattttcttttaatcagtgtaaatttgtagtgtctagtacttagcttacaataatttattgaaaatattttcaatacatttagtcttttcttaaaaaataaattttaaaagttgatatagcgaagaaggtcgagctatacatattcgtatgatttagtcaatcttattttgtttgcacaaatgccagaaggtgtgagattcgattgaaaccttatatagattaaagttatttgtaggttatgtagactaaactctagtgatattgttttat

SEQ ID NO: 331522 - DNA, 1116 bp, Cannabis indica
tcgatgaaatatcaataggatattgatatatttttttatgtctgtttgtttgtttaaacaatgttatcgatgctatatagataggttatcgatataatgttgaccaaacatgaaagtagtttgactattagaattgtttgtgttgttaatctatatcgataggatgtcgtatgtgtgtcgataggatgtgaacacactaattaagttgattaaatttattttttgacctaaaatgtcgaccatttttcgacggtatgtcgatatgttgtccacattgtgatgtagttgctttctgtgatagctaagtttgataatgtcgacagatatcgacatgatgtcgacattgtgttgacaattttgattagctagtaaatgtgatccattttcttggaatatcgatagcatgtcgacagtatgtcgatatgttgtcgacagtatgtcgatatgttgtcgacaatgatattttattgcttcttgtgattgctaagtgtgataatatcgaccgaatgtcgacatgtgtcgacaattttgtcttactgaataggtgtgatgatattattggaatatcgataggttgtcgacaggatgtcgatattttgtcgacaaaattatgtaattgtttactgtttgataatgttgacaaaatatcgacatgatgtcgaccattttataattttttgatagtaatattgctttgttatttattttttcagatggctcccaaactcataattccagcatccgagcattttactgtccgcgtaacatatagacgcactggaaattttgcaaaaatcaagtcttggtttgaggagtacaatttgaataacacggcaaaagaaagccgttttggcaacttttggaatgttgtacccctgacattctcctcggtgttattttaccaactcatgttggacaagatgaaggttgatgttcaggaggagttgaaaatgcagttttacattggtcagaaggagctcaaattcagagtggttgagtttgccctcattacaggcctggacttctcctcagggccaacagaagaggagaaggctacgcaggttgctcgctcagagtcagaccgattgatcaacaaatatttcaaccagtctgata

SEQ ID NO: 331523 - DNA, 567 bp, Cannabis indica
accaagctgacgtgccaatgcttatatcatgccccattccatattgtctgaatagtctccctcgtcgcccaaggactcccatacatccatggaccaatcctcaaggcaccaagcctccacgcatgttggcaggcccttgagacataccacgaaactagttacatgtattagacctttgtctctttccagtatggtgcatcagtcccatgtgtgcatacaaaatagcccacgaatgactacctgtgtcatctcgtgttgagactcgtggccaaggcgcaccacgatgtctcttggaggtttaggccacaactcgtgcaagcgacatactggcaagccaatgaaaacatacttgttaacctcttgcaacattcttagacgcactattacgttgacctgataatgtccatgagtattataactcatgaagacgtctgagtctcctcgtggtcctcatatgcccgctctactaggccaactaattagtagtagctcacttagcaccaaggtgccagggggtggtggagagctgacaccaagcactcccccttaaagagcattctaagcttt

SEQ ID NO: 331524 - DNA, 1483 bp, Cannabis indica
gttggtttagatcgatcctaaccggatgattatgaatcatttttttattaatagattcatcaaatacaatatttattttattgttattatattaaacctggtaaaaagagaaaatgaaaatatcaaattgcatatttgcggaaatccctgttcttctttattcaaccgctacaagatcaacaagtccatgagcttgggcttctgttgctgacataaaaacatctctttccatgtcttcggaaacaacccataaagatttgcccgttctttgtccataaacccttgtgatggtttcgcgcagcttcagtagttcttccgcttccaggataaattcccctgtcggtgcctcataaaaagaactagcaggttgatggatcattaccctgatgatataacataattttaaattcttttatctcgcataatgaaatgaaaggtgaaaaagactaataagataataaaaaaaaagatagaattgaacaaccgtacaggcatcttttgtatattgcatacggctctataatggaattcacttgtcccttttttttttaccttacatcgaagaaatcgaaaataaattaaataattatagggtctatcctattcacataggtcaatgatccaataaccacccttcctttttgagtagttaaaaaaatactatgatggttccgttgctttatatatatatttcgtctgttagttattagttagcaatcccaaagttttttgcaatcccaaagtttttttatttgaaaaaaaaaatatatatatataaatatatatatcaaaaatatatatctaagtaaaaaacgaaattctattttcgtattcattcataatataaatatatattgttaaaagtttttcggtgtgaaaaaagtttgtgacgctgaaatgggtctcctgatatatcagctaaaataggaaatacccttatatctcatactactctttcgatacataatgtaacaattttgaaaacaaaaaaattctcatatcgaattcgaaatgccatgctattattacttaatcatatttcttatatcgcgaaggcatagtctttttttctctcaaatcaaataaaaaataaaaactcattggcgccaagcgtgagggaatgctagacgtttggtaatttctcctccgaccagaataaaagatcccattgaagcggctaatcccatgcatattgtttgtacgtctggttgaacaaattgcatagtatcataaatagccaatccaggaattacccacccgccgggagagtttataaacaaatacagatccttggtatcatcctctatactgagatataccataagaccaataagttgatttgagatctcgctatcaacctcttggcctaaaaaaagtaatctttctcgataaagtcggttgattgggataaaattgtatccctttggaaccgtacatgcatcttttgatgcatacggttcaacccaaattgcgaaaaaaaaaa

SEQ ID NO: 331525 - DNA, 827 bp, Cannabis indica
cgaacccaatgtaacagagtcttttgcaaaatttactccaaaaggggccataacccgaagcaatttttcaactttgtcaccaggaattggacaggaagatttcccgtggaaacttctacttatgattttgatatttatatggttacttttggctgccaaggcgatcttctcaaggtcctctccaaagagccctggcattttcagaaccaacacctggttctttgccttccaagtgttctacaaaatgcctctttagagtctttcactattactcccttttgggttcaggtttaccgattaccttttctaagtaaatcggaaaatcttgctcagaatattggtggattgattggtaattatattgatgttcatgaggattcacttaatgagggatggggcccattcttaaggattcgagttggggtcgatgtctcaaaaccgcttcttcatggtcaaatggtagcatttccttggatcaaagatgaactatcgctagagttccgttatgaacgactacctgatttctgttatgagtgtggtataattggtcatgtttttgacaaatgtcaagtgtacttggagaaaatggatgacggtaaagaacccgatcttccttatggaccttggatggaaggttcttctctacccaaatcaccttatgatcgttatcggcaagacttctcaaaggcaggtccttggccttttgttactcgtcttgttagaaacacaataactcatatcatcaagcactcaaggcagcctcctgcactccctcctaatgttacggatcacgaaaaaggaaaagcagtcatgttaccaaagtcgac

SEQ ID NO: 331526 - DNA, 728 bp, Cannabis indica
taacgggggcttggtgaaaccggtagggaggatgtggagccaaagaagcgggattggctatatgaggccgcagtcgggtgcgggagcaggcaatataaaaaggattggatgtaatccgaattttggctcctagggattgatcatagtgaagcagaggaggagctgaggaagaatcacacttagcaagaaactcatggcaatgattcacaatgtggctaagtcgaccacagtaatgacaaaaatcaggtaagttttcaaaacggaattcaagccaaaccggggcagccataccatgaaaatggaagcccgttccacgcgggagtggctgagttacatccatttcaattcggactcggagataaggaacccaagtctctttgagggatgcaatatcgacttcgataaatcgccccaggatttcaccgagtctttgtgcaagagcacgggaccgttttaagaattcctgaaacttgaatccaaaatggggtggtagtgagagcttcagcagtgaccgtagaaccggcttccaatggggtcatgactatgagtttatagtcaaaatgccaaggttggccaatgagaactctgcgtctatccccgaagcagccaaattcgacagtatagaagttgggctctttttcaagaacattaatggaaaatctttcaggccacatctgcttgaggcggttcttgaaagcttcggaattgaagtggcgagtggtcaagag

SEQ ID NO: 331527 - DNA, 620 bp, Cannabis indica
acagtctccgaatcatcccacttgaccttccccaagcggtgtgggattgcacaacttacccggtatttccccttacagatcacgggactactgactgtcacaaaatcttagctttttggactaaaaaagagaggtaatttttatgaattcttccatatttctcattggcctctatttctttttcaatcaatcttctattactcgggtctttatgtagctcttcttgacacattttaacttcctcacttgccttcacctccaatgcatgaatgtctccaattcaatgttgattaaaaactataagtcccttttcaagcatttgagtttactaaaccaattgatacataggaaaacatgaaactagttacttccatcttccaatgctcttttaataactccttgaaaccagttgattttcgccaaaatctgaaaaatcttaactctttaccagtattgagctcaaggtagacagaaagaacaagagggcgatgatcaaattgaccttctgttaaaaaaattagcttcaacatttgtaaaccttatgaatcttttagtcacaacatgaatttttttgtgattaaatgtgatttttaatcacaacaaaatgttacttgtgacta

SEQ ID NO: 331528 - DNA, 516 bp, Cannabis indica
aaaagggaagtgtcgaaaagaaaagactaaccctggtaagctccttcaagactccggcaccaacacatccagatatgagttgtcagcaccagccagttactcactgaccttaggaaccaaccggttcatgtagtgagccatcacctccttgcccttcttggcctcaggcagcacgggcatgggtggagtcggtgcctgcacccgctcaggaatccacctgaccacttcggacccatatgttggtggcccagactccttagacttggcagatttgggagtggaaagatttgcagtagtcagctcctcagaaaggtcaatgaccttttcagaaggcctcttctctgaagacccctctccgcccttagacttcttggccggaggggaggtgctagagcttccactcatcctcttccttaaagcatcgatcatctgccgagacatgtttgcacagaacaaaaacagcgtggttagcaaaaaccagcaaaaaatcaaagcatgaaagtcaagaagctgaaa

SEQ ID NO: 331529 - DNA, 606 bp, Cannabis indica
tttgagttttgaaagaaaaatacacattaggattcaaaacttaccttcgccgacctaggagggcttgcttgagacctagccagccctaaagctttatcatgggagttggccagctttaaggttttaccctataaagctttcccattcatgccttcgtttggtgaccctagccagagtcatgggaccttggccaaccctttcaaggcttgtgaaccttggctggcatggactttggttccaagtgtgtagctagttttctgtcctcttgtgacttcagcaagaatttggctctgtaggtatatacaaccttagcctcatatgtggtttccttagaaactctatatgaagcttagtggtgagtcttttatagtgaaatgttcaacttaagactcaacatggcttggatcctataaggaactctacgctagctttggcctggtatgtggcccttataggaactctgtccaagtttttttctagctatacagttctagcagggccttggcctcatgcattcaaacaaatctcatatctgaccttaaggctttcatgttcttgctttggcctataggttctatgtttatgaacactactattatttagcct

SEQ ID NO: 331530 - DNA, 756 bp, Cannabis indica
agggaaccatctttctttttcttagacagaaccagagctccccaggccgatacacttggtcggataaaccctagatcaaacatcccctgaagttgtacttttagctccttgagttctgctagggccattctatactcaaggttccaagtcaatcacaaaatctatttttccttatggtggtaatcccagcaactcctcaagaaatacgtcgagaaattctttaagaaccctaactactttagacccaaatgtttcaggtctgctggactcaatcaaaaccgctaaaaatcctacacatctattgtgtagtaaatctctagcccttaaaattgaaataatcgggatccaagacccctgaaaagatcaaccatagataaatggatcttcaccctctggctaaaaagttaccattttccgcttacaatcaatgctggctgaatactcggacaggaaatccattccaagtataatatcaaattctgctaattccagctctaataggtcagcactcaactccctatcttcgatcctaactagcatagacctaatttgcctattggagataaccaactccccgctaggcaatatgctttcaaaccctctttcgataaaatcactaggcctgcccaataaattaattacccctatttccgcatatgagtgtgtagctcccgagtcaaataacacagtaaaataggagttgttgacaagaagctgacctataacgacagaaggactggctgcagcatcagcttg

SEQ ID NO: 331531 - DNA, 824 bp, Cannabis indica
aggactggctgcagcatcagcttgagtcatggcgaacacccgagcaggtacaggttttgcctctatcttttattcttctttctttgtctgagggaaatctttcttgaaatgccccaccatgcctcactgaaatcatgtcttgcggttgcactctcccgcatgatgtttcttacaacgtgggcactcagggtaagaataaccctcgtgtccacgtcggccttggttcccacctaaccgcttgctctgacacgaaccaccagatgtcgggttagcgtttcttttctaattagtggtggaatcaccaccatccctaccataaacaagactaggaagagtgggcgtcccaccaacacttggagtcactcggggctcctgaggaaacttaaccgcacctttggctcgtagagccttctcaaccatctctgcatatgacgttgcttcattcgtagtaatcactaggtcatgtctaattttcacatttagacctcccaaatatttcttctttttactaaaatccataggcacaatacccaaggccaacttggctaggcaataaaattttgtcgtatattcagttactgacataccctcactctacaccaattaagtaaattctttccgcttaggactgcagactgcctcattgtaatacttgacgttgaacaaatctcgaaactcttcccaggtcataacagtgacatctcagctgagggacaccaattgtgacagtcagtagtcccgtgatctgtaaggggaaataccgagtaagctgtgcagtcccacaccgtctggggaaggtcaagtgggatgattctgaaactgtg

SEQ ID NO: 331532 - DNA, 560 bp, Cannabis indica
ccaaggaagaatcgtagagtgccaaggttcttaagtttgaatttttgatctaaggattcggtgaacatgagaatgttggaagcattgttgctggcaacaatgatgtcatcgacataaatcaatatagccaaaaaatgaggggaattatgtttgataaacaaggagttatcagacatggattgggtgaatccctctttgagaagagtggtacttaatttcgagtaccattgtcttgaagcttgtttaaggccataaatgctcttttgtagtttgcacaccgtgttgggaggagctttatatccagggggaagttgcatgtagacttcctcaagaagatccccatgaagaaaagcattgttaatgtccaattggtgaacatgccaattgtacatggcagccaatgctaagaagattttaagggtattgaacttggccacgggggcaaaagtttgggaaaaatcgatgccttgtctttgattgaagcctttggcaacaagacgggctttgaatcgttcaacatcaccatgttcattgtatttaactttataaacccatttgca

SEQ ID NO: 331533 - DNA, 578 bp, Cannabis indica
tatagtcaacgagttttgaatatcatctatcaaatatttatttaataataacaagttatccaatttacatttaatgatataacattattatatcattagagttgattcatattctctctgttagacacgtgtcagcttctggagtatagttgaatttcaggtataacataaacaattaaatatttcacaaaataactaatttatgattttgtatttttttttttaaattttgtgagaaaatatcgcaaaaaatcaattttggggtgaaaataccttggttgcccaaaagaggttgcatgcagtctttcgcgcgcgtagggtgaagcgtgcagggtgtttaggtcaagattctttggcacctgcagtatccacgtgcgagcttcaccgtgtctgaactgagctgacccaccgcttcaaacaggaaatgtctaaggcagcgcacgagcatctccttgtccaagtgctcatgtgcgtgcgattgagccatctcgacaccatgtgcacccggatttcaaaccttcatatcatatttaattttcatcggaatcgagttccgtaaaaaccaaaattgcttaatt

SEQ ID NO: 331534 - DNA, 860 bp, Cannabis indica
tctcattccttcagagaaaaactgaaagcctcctcttaaaactggtcgccgccttctctcactctttctctgttctgaaaaccgaaccgtatagtgagtgattcagtgcccacacacatcaggtggtacttcaatcatagtgtggaagattctgaagaatccaaattcaagagaaggacattggagctcagatcttggtgatactctgcgacagaaaggatacaagggttagagatctgagtggaaggagacattatattccgctgcaaccactgtaagctttcttatactttatatgtgtttatttcatatcgttttagaagttcatatttaggatgttaaataacatacttgttagtaaatctaagatcctggtaaaataattccaacaaatctccccctttttaatgatatcaaatatttgattattgtgaaaagggaaaggaaaaatttaaacaaagtgttatacccgaaattcggcgggctcttcagaggatgatacatgtcaaccttggaaaatacgaatcaacaaatatattgaaaatcatattaaaggatattaaaatagaatgactcattaaatgtagagttaatagagcatatctataactcgctgactatatagtcttaagcgagacaaggatgtacgaactattgattcacgcattgacgagaaaccatttttcataagaagatacaatcataaggatgacatcaataatgctagtgaggcaccaacctcgctacgtataaaaggtaatgatgagacatgtgttgggttttgtgccctaaataaaactcattacaatataatcaaatttactaactaataaagatcagaaatcacattttatgttgca

SEQ ID NO: 331535 - DNA, 981 bp, Cannabis indica
aaagaaaatgttaatacttcatagaccaaaaaaggtaaatttttgggttgaaagacttaaaagtctggtctaggggagttgaagggtgggaatagccaagattcatctcagaaatagtctaaatagaatttaatcccctttcatttatttctatttttttttactattctaattcttcatttcgtcctatgtgactttccggagtccacctaaatgatgtgcgcggtacatagttcggcattatgaactcgtttagtttcatcctattgactcgattcatccccaataaaggatcttcaaaataggaaattcgtaatgaatctctctaattgtctttttgttttatttagcttatccatactatgtgaatgagacttcatctctttgaatatctagactagagttggagttgttggaaaagtgaaggttagtttctgattattcaatgagcatcttgtatttcataaaaattaggggcaatataatccttacgtaaaggccatcctatccaactttcgggcattaagatacgtttcagacgtggatgattatcataatagattcccaacatatcataagattctctttcttgaaaatccgcgcttttccaaacccagaacacagacggaattctaggattccgccttggaacaaatacttttatgcatacttcttccggttgatctatagcatactctattctcgtaagatgatatacactagctaacagtccgcccggtgctacatcataggcacattgggaacgtagataattgtaaccatatacatataaaatgacagcaatggaatgccaatcctcgggctttatttgtaaagtctctattccttggtaatcgaaacccaaagatctatgaactagcccatgtttgattaaccaaacagacaaacgaccctgcatcttttttctctctcccgcatttttttgtttttttttatatacgtattataagtaataagtat

SEQ ID NO: 331536 - DNA, 602 bp, Cannabis indica
caagtgtttgtattcaaaaacctgtaaaagttatgtgataattatgtgcctatgtgtggatgacatgttaatccttagtgataacatgaaagcaatagaagaaactaagaggtttctttcttcaacctttaaagtgaaagtccttcgagaagtggatactattttcggtatcaatgttacaaggcatagtgggggttttgctatagggatgaaagcacactacattgagaaagtgttgaataagtttagctatctaaaggctaaagaggccaacacaccattcgatcatagaaaccactagttaaaaatagtggtagagcggtggctcagtttgagtatgcaagtgctatagggagctttatgtacgttgcccaatgtacaaggctcgatatatcatttgcggtgagagaacttagtactaactagtaatccaagactggatcattggaaggcaatagggagagttttgggttatctaacgaaaacaaaaaatctgtgtcttcactactctgaatttccttcaatttttgaaggatatactaacgcaagttggatatatagccaaccttggggataatttatccacaacgggttgagtattt

SEQ ID NO: 331537 - DNA, 721 bp, Cannabis indica
ataaagtaagaaaaaaggaaccacctttgcattattttctccattttagaaagtctgaataaactcttaagcttcttcatcaaggatcacaattaagtttgtccgaggacttgtaggccatttctgtccttgacctttttcctgagagtttcctccgacttcatcctctcaaagcgatccttgcttcattctaagatttttagacggagtaaccagtcattgccccaagccctaactttaaacattaagtttctttcttctttctcatgtttgttacattgtttggatttgttaattagtttgtttgtatcattctcatctcatctggttttggtagtttttagggtttaaactgtatctaggttcatactagggttcacgcaatatgtaggttgttttgagatctccaactcattaccttcagatttgataaaattctctccagggattgggactgctttttgcttgcagcaatgtcccactctaattcaggaatttatcatctagaagttttatagtttgagtttcctacagaatcagccatcccgtataaacccaacccttcaaaacccacgtccaaattagagttgaacgatgctagggttagggaacacgtagtgagaaaccaacaggaaggtattggtagtcgctacaggcatttcttgcaagaaatctccgaaggtaaacgccgattcttacgagaagcagcctggccggaacc

SEQ ID NO: 331538 - DNA, 537 bp, Cannabis indica
tatacattaaacataatcatgaaataaatcatgtgaaccatacagcataaaggtgatttctgatcttatattaattagtaaatactaattatattgaaatgtattttatttagggcacaaaaccaaacaaactagagcttcagggtttggcattctagctttggagtgaaaattttctctattcgaatgctcaaaaatcgtgtttatggagatccctcaagatgtctcttcatctaaaaagacgagtaattaacccagcagttagcccccatatcaagtcctaaataagaaatgcaatgggggttctgttgggttgtctaccctaaataaaactcatttaattataattagatttactaattaataaaagattaaaaatcagtctatgttgcacggttcacatgctttatttcatgattatatctaatgcataaattctattaagtccaaaacatatatttattcatgattatagtgtcgtcaacacagtcgaatataatcctgattatatgttcaaaagtttaattctcatgattt

SEQ ID NO: 331539 - DNA, 3542 bp, Cannabis indica
tatggattctcgagaagagaggagccgtggtggtccctcccggaccgcccggatcccactagtgaatagaaagttggatctacattggatctcacctgaatcgccccatctatcctcctgaggagaagtttggtttcaaaccccggttcgaacaggagaagtacgccatgctaatgtgccttggatgatccacatctcagggtcaggcgctgatgagcacattgaactatccatgtggcttagagccctcacagcccaggcacaacgacgcaattatcaggggcgcgctctaccactgagctaatagcccgtcgtgcgggcctcccgctgggggcccactatgccaaaagcgagagaaaccccatccctctctttccttttttacgcccccacgtcgccacacgggagggacatggggacgtaaaaaaggggatcctatcaacttgttccgacctaggataataagctcatgagcttagtcttacttcaccgtcgagaaacgaaagaagacttccatatccaagtttaactcagacgtagctcgcttctttttgggtgtgaagcagtgtcaaaccaaaatacccaacaagcattagctctccctgaaaaggaggtgatccagccgcaccttccagtacggctaccttgttacgacttcactccagtcactagccctgccttcggcatccccctccttgcggttaaggtaacgacttcgggcatggccagctcccatagtgtgacgggcggtgtgtacaaggcccgggaacgaattcaccgccgtatggctgaccggcgattactagcgattccggcttcatgtaggcgagttgcagcctacaatccgaactgaggacgggtttttggagttagcgcaccctcgcgggatcgcgaccctttgtcccggccattgtagcacgtgtgtcgcccagggcataaggggcatgatgacttgacgtcatcctcaccttcctccggcttatcaccggcagtctgttcagggttccaaactcaatggtggcaactaaacacgagggttgcgctcgttgcgggacttaacccaacaccttacggcacgagctgacgacagccatgcaccacctgtgtccgcgttcccgaaggcacccctctctttcaagaggattcgcggcatgtcaagccctggtaaggttcttcgctttgcatcgaattaaaccacatgctccaccgcttgtgcgggcccccgtcaattcctttgagtttcattcttgcgaacgtactccccaggcgggatacttaacgcgttagctacagcactgcacgggtcgatacgcacagcgcctagtatccatcgtttacggctaggactactggggtatctaatcccattcgctcccctagctttcgtctctcagtgtcagtgtcggcccagcagagtgctttcgccgttggtgttctttccgatctctacgcatttcaccgctccaccggaaattccctctgcccctaccgtactccagcttggtagtttccaccgcctgtccagggttgagccctgggatttgacggcggacttaaaaagccacctacagacgctttacgcccaatcattccggataacgcttgcatcctctgtattaccgcggctgctggcacagagttagccgatgcttattccccagataccgtcattgcttcttctccgggaaaagaagttcatgacccgtaggccttctacctccacgcggcattgctccgtcaggctttcgcccattgcggaaaattccccactgctgcctcccgtaggagtctgggccgtgtctcagtcccagtgtggctgatcatcctctcggaccagctactgatcatcgccttggtaagctattgcctcaccaactagctaatcagacgcgagcccctcctcgggcggattcctccttttgctcctcagcttacggggtattagcagccgtttccagctgttgttcccctcccaagggcaggttcttacgcgttactcacccgtccgccactggaaacaccacttcccgtccgacttgcatgtgttaagcatgccgccagcgttcatcctgagccaggatcgaactctccatgagattcatagttgcattacgtatagcttccttgttcgtagacaaagcggattcggaattgtctttcattccaaggcataacttgtatccatgcgcttcatattcgcctggagttcgctcccagaaatatagccatccctaccccctcacgtcaatcccacgagcctcttatccattctcattcgatcacggcgggggagcaagtaaaaatagaaaaactcacattgggtttagggataatcaggctcgaactgatgacttccaccacgtcaaggtgacactctaccgctgagttatatcccttcccttgtcccccatcgagaaatagaactgactaatcctaaggcaaagggtcgagaaactcaacgccactattcttgaacaacttggagtcgggccttcttttcgcactattacggatacgaaaataatgggaaaaattggattcaattgtcaactgttcctatcggaaataggatcgactacggattcgagccatagcacatggtttcataaaaccgtacgattttcccgatctaaataaagcaggttttacatgaagaagatttggctcagcatgttctattcgatacgggtaagagaagagcccgactcggtattcttaaaaaaaaaatagagaaattcagaaccaagtcaagatgatacggatcaactccttcttcttgcgccaaagatcttaccatttccgaaggaactggagttacatctctttttcatttccattcaagagttcttatgtgtttccacgccccttcgagaccccgaaaaatggacaaattccttttcttttcttaggaacacatacaagattcgtcactacaaaaaggataatggtaaccccaccattaactacttcatttatgaatttcatagtaatagaaatacatgtcctaatgtaggactggtgccaacagttcatcacggaagaaaggactcactgagccgagatcactaactaatactaatataatagaaaatgctaatataatagaaaagaactgtcttttctgtatactttccgcggttccgttgctaccgcgggctttacgcaatcgatcgaatcatatcggatcatatagatatcccttcaacacaacataggtcatcgaaaggatctcggagacccaccaaagcacgaaagccaggatctttcagaaaatggattcctattcgaagagtgcataaccgcatggataagctcacactaacccgtcaatttgggatccgattcgggattttccttgggaggtatcgggaaggaattggaatggaataatatcgatttatacagatacgtttatacagatacagaagaaaaggttctctattgattcaaacgctgtacctacgggatagggatagagaaagaggaaaaaaccgaagatttcaaatagtacttttttttgatcgaaaaatcaatctgattta

SEQ ID NO: 331540 - DNA, 540 bp, Cannabis indica
cgccattgttggaaggacggattcggatcaccattgactaagactcggggaggagacagatcagtgagcaagatttcatcaagctcatgaccgattacagtaggcagaacttgatacttccatgccaggaagttgtttcgatcaagcttgatcgtgagagaggacgtcagagaatgagagaaggggttccaagatggagtagcagaagcagaaggtgcaggatcggtgatacttgcaggtgacgagttgtcgcccgacgaagccattgacaaaggtcaaaggctctgataccatgaaacaaactgaacagagaagaacaggggagaagagaaagtttgaaaggcaaaacttatcccattcagggattttactaaagtatatatagctcaacagagctaagagttacaaacaaaaccgttacaacaatcagttaaagaaactgtttttaacagaaaataacagaccaaaacaacttaactaactagtcttggttttggttatcacactgtgacacctaactgtgatttttggacggaggag

SEQ ID NO: 331541 - DNA, 1374 bp, Cannabis indica
catctatcatctgatacaatatggtatttgagcaacctatcctttgttttaagtctattcagcaaagcaatccacaccacaaaacaatgcttgggaatattgagtctattccaagcatgtttgctccaatggtaatgattttcagcctgattgtacattttgtaacctgcagcaatcatatatttattattgataaagatagcaggatctattcggtttttgagctcattcttgagctcaactaacttcctccaataccagctgctttggagaggggctttgtatccccaccagtcttcatttttgatgtagacactatggacccatttgacccacaagttgtctttttttgttgcaattgaccagatgttcttgattaaagcagctttgttccaatcagctatactcaagaaaccgatccctcctgctgactttggcttacagatcttagcccaagcaatgtttcctgacccaaccatttgacttgtacctttccataagtaacttctacatataccctctatttcatgaactacctttgttggaagaagcaatatttgactccagtaagtatgtatggtcataagaacagaactaatcaacacacttctccctgcaaaggaaaaattccgagaactccatgttttaattcttccagtcatattttcaacaagaatcttgcactctgctgctgaaattttcttggcacatataggaatgccaagatacctaaaaggtacctcttgcttagtgaaacccgagacattaactactctttgaatctctttctcctccatgccacaacaatagatttacgatttgctattcttaggaagcaaaccagaagtctgagaaaacagcttcaaaccctgtagcatgagatgaatactgataaagtcacccttacaaaataataataatacgtcatctgcaaaaattaaatgtgttagcttcatggatctgcatctttcatgataatcaaattccttcttctttcccactactcccattattctgctcaaatactccattccaagtacaaataggagaggagacatgggatctccctgccttagcctcctcttggcttcgaaaaaaaccatgaagagagccattgaaaaggagggagaacctcgcggtagacacacattgcatgatcaattgtataaacttcttaggaaactggatagaaattagcatctcctcaagaaatccacactcaagtgtatcatatgctttctgaaggtctaatttaatcatacagttgggccttgaatgtttccttccataatgccttagcaaatcttggcatatcattgtattatgggcgatatatctaccttgaacgaaacctccttggttctgagcaaccaa

SEQ ID NO: 331542 - DNA, 859 bp, Cannabis indica
tacccctgaacctgaaccttgtcgttggatgcgccatccacgtataacttcagaggttcccgcatctcgctgatcaggtgggatttctcctggagttattccttctatcaaaagtcagctaaagcttggcccttgatggatgttcgaggatggtatgtgatgtcgaactgccccaggtcaatcgaccattttatcaatcttctagaagcatatggttttgataaaacatgtctcaagggctgatcggttaacactattatggggtaagcctggaagtatggccgtaatttgcgagaagcatggactaggcataacgcgagtttttcaagaaggggatacctggattctgcccctagtaaccttttacttacatagtaaataggttgctggtgcttaccctcttctcgcactatagccgcactaatcgcatcttccaagatggctaaataaagagataacgtctctctagttattggatttgccaaaactggaggcgttgcgagatgcccttttatgctctgaaaggcttctttacactcttttgtccactcgaactttttgttgcctcgcaatatgttgaagaagggtacacacttatcagttgacttcgaaatgaatctattaagtgatgctattcttcgtgtcaggccctgtacttccttaggctttttcggtgatggcatgtctattaatgccttaatttttttaggatttgcgtcaatacccctcgcgttaactatggatcccgaaaactttcccgaggcaactccgaaggaacatttctttgggtttagtttcatgttacacttttttaatattttaaagcattccgcgaagtctgaggtatgatccttactct

SEQ ID NO: 331543 - DNA, 935 bp, Cannabis indica
tttaaaggataaaattgtcattacaaatttaatattaaaaaataaaataaaaataaataaaagtcattacccttaatgacattccttagaaaattagtgggagaagttctccttttcttttctcccttatttaatcaaattatctttttcctaaatttaataaattaaataaacaaatataaggaaatgactcccttactaatattaaaagtatcatgacatatcttaatttaataactattataatattattaataaattgcaacacatcaccttatgatgctaatgggtaacaattgtacccaatttcaatattcaaatttaattatgagcattgttataagataccaataatatttatcatcacctatatgtgacacattataaatggttagtgatacttcataatagttattaagttgaataatctgagacctaatatttagttgctgtaataatgatatgacgccataagtaacattaaataccattagtaccttttaacatttctctttaaatataaatatatttaactttcattatgagctaaatttatgtttttattatatattatatatataatataatattatatattatagaaaatttatagtagatgccctttaaggattattttggtagattttttttttatttattttagcatctaagagagcgttttagtctatttttttttcataattgcatacgttgtagttatttaagaccatctgtaaatttttagaaaattctgaataatttatcgtgacaaaaataaggtttaaacagttacttattacacatataagaaaatcaatcgtgtgtgcaataaatatgtaaatcttattttgtcattgtaaactactcgaaattttttgaaaatttataagtaatcttaaattgttataaatattaataattatgtggatgtccaa

SEQ ID NO: 331544 - DNA, 453 bp, Cannabis indica
ttttttccttttcctctggctcgacttatgccggtcatgtccccttggcaccacgagaaaacatccgtggctgcccttagtgctttaattattttttccttttcctctggctctagattttttcccagccggaggaccttggcggtgttaagttcacatactgatatttcctcgacgtcctccattggttctacgatattttcggatcccaaacgaggatccaactcatcttcttctgccattcctggcccaataacttcacggaccatcaatattggtagttgggcagcaaaattataacactgttggaaattattttaccaggatcttagatctactcacaagtatgttgattaacactctaaatatgaacttctaaaacgaatatgaaataaacacatataaagtatgagaaacattacattgggtgcaacggaattaaatgtctccttc

SEQ ID NO: 331545 - DNA, 1472 bp, Cannabis indica
gagggagaagaagaggcaaaaattggaacaaaaatatcattcgattcggggatcctcaaaaaaagaaataagaaaagttccgtcgttgagtgagaaatggcaaattcatggaaagttacaatccctaccacgtaatagtgcacctacacgacttcatcgacgttgttttttgactggaagaccaagagctaactatcgagactttgggctatccggacacatacttcgtgaaatggttcatgcatgtttgttgcccggagcaacaagatccagttggtaaggatttaaatatcccttaattttcatttttctatttatttctatgatcatctatcatagagggcccctttaccattctgtacaaatgggctattctatttgtacataagggtaaagtggcccattcaatccttgtttgccccctagttcccatttcttctcttcagcgcggggtagagcagcttggtagctcgcaaggctcataaccttgaggtcacgggttcaaatcccgtctccgcaaaatttttttgacaaaaaaatggagtttgattctgttaattaattaattaatgttttcccttttgggtgggaggaaagaaccaatatactatcctaatcaactatatttaatcctttatcctattaaattaaatacattaaccccattatccagggcggatagcgggaatcgaacccgcgtcttctccttggcaaagagaaattttaccattcaactatatccgcacttgtttttgttcgtgatacccaagtatggatcatattttggcagagcgaagccaaatactctctatttattatttctatttataatttctatatatttgtatgtacaactttagtttagtacatttttttattccatttcaacgatttctataattaatataatgtattataatacataatgcatagtattataatacataatgcatagtattataatacataatacttatttattacatatataaattacatgtataaattttgaatttgcaaaatttgacaaaataaagacacaaatcaaataagtttgacccctcccgttaatttttagaatttttttttgttatttgcattttgggaacttctaacttatcttatattgtattgaatttgaacgtgtctcataacctgaaagaattcggggaggggtcgtttttggacctagaacgaccaggttcaagagataagagaattaaggatacctaccagaaagactaatccaatccataatgatgtaccggaaaatacaacatttttattacccgaccaaccatcaggagaagcaaatacaacgggtacactaatcagtaagattgatgaagtagcaattaatgcaaaaacagccaattggaaagcaatagtcatgtttctaatcctccaatttaccaataaaagaattatataccatttgatctctttatcagccaaaaaattgtcaaaaaaaa

SEQ ID NO: 331546 - DNA, 3845 bp, Cannabis indica
taaactaaattacaataaaaataaaaaaaaaataataatcaaatcgcaccatctcgataataggcgaatgcctctttctcgcccgaagttgtcggaattattcgtaataagatattggctacaattgaaaaggtcttatcaataaaatttccatttattcgagatctagacataggcagaaattcattctatactttcttttaattacctttcgtgagaaaataaaaaatcccacaaacaagggcattttacaatacgaaataacataaaaacagactcattaaaatgaaacttctactcaaatagattcctgtcaaaaggaatcaataaaaactaagaaatatttgaagccgattagatttcatccaaatgaaaatagaataaccgcccgttttgtattgtgtgtataacggtatacgttagacaattaaatctaaaaattcttggggcctttcatgaatttcgaataaatctatggggtaagggtttcttgttgaaagatctaaaattgtataaaaagtgatttaattcgatataaatattcaaaaaaaagtcgggaatgccgttttcgtagacatgaatagatacctttatttattgttttgaacagtttttcacaaaaaaatgatcccccccaacctcgactaaagttttggcaaagtttatctctttttatagtaaaaatggagtgtatacacctacccaataataagaatgaatcactatttactcgatttataaaccataatcattatgtaggagagatggccgagtggttcaaggcgtagcattggaactgctatgtaggcttttgtttaccgagggttcgaatccctctctttccgtatccttcacccaattcaccgatgttattgaccgcaatatatcaaatcaaataccaatggacgccactattccaacaccaacagttagaccgttcgttgatatggattctcgagtcctaatccaaatttctgtgatatggaaaatactggaaagtaatggacaaggaatgaaaatccccctagttagtttagttaggtttaagtctgacgagaataatattcgacaactagcaattcatttattttcaaaccgacccatttactatctattatttgattgactgatccttgatattggaatgggttaagagtcaaatgttttggcaattcctcacggatcgatgaatcaagataattttgaaccaaagacttagattttttttgttcatctctcactgtaataatatctcggggtttgcagcgataacttggtatatctaccatacgattattaactaaaatatgtctatggttaaccaattggcgggcttgaggaatagtcgaagccatacctaatctaaaaaggatgttatctaaccgcatttcaagtaattgtagtaaaacctgacctgttgacccttttgcttttccggcgatacggacgtatttaagtaattgttcttctgtaagaccataatgaaagcgcaatttttgtttttcttccaaacgaatacgatattgagattttttaccggggcgtaattggtttcgaagatcgctcccagctctaggctttttactagttagtcccggtaaagcccccagacgacgtatttttttgaaacgaggccctctgtaacgcgacataaagactccttataaaatttcataaacctatatgtactacaaagaataattcgaaagaataattggatgaattgtaatcaatatcccggccgtaacttaatattctatattattatctatatataatatagaatttaaaaaatagaatttagaaaatctataaaaataaaaaatgaaagttcttttcttgattgatttggtctacataaatcgcactcctcctattattttaaattaatagatgagtaccttttttgaaaaggggaataagccttttcaatttctttgatttcacattaccaactatgtaaagtaaaaagtatgtaaaaaagaaaaatcaaagatatggagaaaagccagctatcggagtcgaaccgatgaccatcgcattacaaatgcgatgctctaacctctgagctaagcgggctcgcataacataattggaatacacataggactttagtaaactcctgggatcttagctattaactgttcattcttaactcttctaatataatatttagatagtgattttttttattcaaatgacatttgaaattcaaacttctttttttgtactagttgattttcctaagtataacttattaaattctaattttcttaatagaataattgaatattaatacatattattaatacataataataaagataagagctaatacgaaaacaaaagaataaagactcgaccgttcaagtattcaaaattgcatgacaaaaatgctagaaatagtgaaatatgtgtctaagtataatataggtgtaataatactatcttatataaaatactattatatgtataatataatgtataagatagtattatatatactatatatatgtgtatatatgtggtatggatacagacagaatagaatcttttcttattgaatcaaatctgaggttacaagagagatgaaagaagatagacaagaaaacagttttcactatacgaaccactatctaatgaattcaagcgttctttcataatctaaatgaaagaaaaaggaaaacggtatcgtaattagatacgaatcacaaaccaaaaaggggatatggcgaaattggtagacgctacggacttaattggattgagccttggtatggaaacctaccaagtgataactttcaaattcagagaaacccaggaattcaaaaaaagggcaatcctgagccaaatccggttttctgaaaacaaacaaggattcagaaagcaataataaaaaagaataggataggtgcagagactcaatggaagctgttctaacaaatggagttggctgcgttaatccggatttctttgatttttcatgaaaaatcaaagaattgttgtgaatcaattctaagttgaaaaatgaattgaatattcattaatcaaatcatttactccatcaaaatctgatagattttttgaagacttgataaatcggacgagaataaagatagagtcccattccacatgtcaatatcgacaacaatgaaatttatagtaagaggaaaatccgtcgactttaaaaatcgtgagggttcaagtccctctatccccaaaaaggccaaatgattccctaattatttatcctctcattccgttagtggtttctaatttgttatgtttctcgttcattctaactttacaaccggacctgaatgacccttttttttattatcacaagccttgtgatatatatgaaagacctacaaatgaacataaggaatcccaatgtgcaattggaataattaacaatgtaatccccctttcgtctttttaattgacatagtccaagtcctctagtaaaatgatgatgatgtatcatgaatggtcggggtagctcagttggtagagcagaggactgaaaatcctcgtgtcaccagttcaaatctggttcctggcacatgaaaaatttgtatgattatctattctagaaattattaattaatatgaatccacatacagattctatacatagtatagatcatgatacatatttatccatcttaagtatcgggagatgtaccttttttttagaatagtaaaagatgagtaaaaagtatattttataatatataaaatgtatggtatataaagtataatatgtaaacgaaaagaaaatgttaatacttcatagaccaaaaaggtaatttttgggttgaaagacttaaaagtctggtcta

SEQ ID NO: 331547 - DNA, 1129 bp, Cannabis indica
taaaatctgaactggaatggtctattgaagatgataaactttctgcctacaatagcaaagccttgcatgctatctttaatggtgtaggtgagggttacattaaacttatatcatcttgtgtttctgctaaggaagcttgggagatccttcaaactcagtttgaaggaacttctgatgttaagcgctctagaattattatgcttcaaactaaatttgatgagcttaggatgtcagataatgaaaccctaactgaattctatgaaaaactatctgatattgctaatgaatattttgctcttgtgagaaaaattgttagagttcttctagagaggtccgatactaaacttttagcaatggaggaggctaaagactttagcacaataaaggtggaagaattaatgggttccttgcgtacttttgaaatgaatcaacaaattaaacaaaaggacaaacccaaacccattgcggataaaggtaaaagtatcgctttaaaagttactcataatgaaatttctgatagtgaatgtgatgatgaaattgctttattaaccaaaaattttcagaaatatatgaaaaagattggtaataaaaagaataattcgaaggagtgtgcttttgttccctttcagtttcaacccattcttcctcaaataaatcttacattggtcaactttcaacttcaatgaagttaaaattgattttctacccaaaatccatcaatggagttcgaaaaagcggaggaaaatttctttggaactacgacccaatctgactccgaggacccgagttacaacattatggaagaaactcagaccaaattttccaagctttcactcaagaagagagtctagacacaaacctagcctttgttttcttcttgagtgaaagcttggaaattttggtccaagtttcttccataatgttgtaacttgggtcctcaaagtcggatagtcacgacagatgtttaatctaattttttatataatttttgtatgaaaaattaggtgtgtacaaatggaccgatccaattcgtatataccaaattctattattataatggaagtcagacacgacttgtataacattatgttaggcttgacccctcgaattgttataagaattaattaat

SEQ ID NO: 331548 - DNA, 1667 bp, Cannabis indica
aagacttgaaatgaaactttccaaaatggaccacgatcatgaatatggacttcaaatctgccaaatatattgtgtttaatctgatcttatcaagacacaactaaaaacattaaagagaaagaggaaagtcaaagtttccaaacatagacaactttccataaaagaactcattctcttaaaaaaattcctaaacaaaaaagagacggctaaaaagtaatctttccttagaagaaaatgagcaataaagacacgaaatcaatgtaatcaaatcagtttaattgtacaagaaaattacatattaaataaaaaaaatattttgacacctaatttgccaaaaaaggactttagaatctcccactttagcacttaagataatcaaaatatttttaactaatatgtacctgcaaaacaaagttagcaaaatcatacaattaaactccccctaagaaacacatcattaaacttaaatagaattttaactttaaaccaacgtttaacacaaacaccaacctcaactccccctaaaaaagggtccagagttgagtatacaaaacaaaaaaataaaaccagtactccccctttttgtttatctataaagaccaaagacaagaagaaattaaaacaagtccaacaaataaacaccaaataagttaaagtaaaggaaagagaacataaaacttaagccccataaagcttgatcaaggtggacaattgtaaagactgcttatgattaacactttggatcattaaataactagggtttattcatgagatttattttagttaatatatatttattatgctatttatgtaaatttctcatttatcggcgattgtgtttggtagcaatagaaagagacgttgggccgttagagagtcacgttttgtatggtatgaaattattttaatagcgaggtgtcattgttaggcattagcggtatcgagaattttcggggaaacttaatgactaatttacccttgggagctattaatccttgaattatttaaggaggggcaaaaaggtcttttgtcaaagggggattctttgtcttatttgggcaataaattctgaaaatagatttatacaaataaataaaacttgttgactttggttacaggaaaaaagtgagaaaaacctagaaattacttcatctttctctccctccttctctcgaattgacaagaacccaccaagctggaattttctcaactcaaccagtaggtattagcaagaattggtgctttacttcaaggtatggaaccctagtttcttctttttatattatttttagttaaagaagggttttgatgcatgattttaggaattttgatgtgtggtaataattggtgattgaattagaattctggaacttgcttaaggttgtttagggtggattctaattgtctttttgggttgtgttaaggttttggcaaggttgagtttaagaactcaaaccttgacctctaatggtgatttcatattttgagctgtttgttgtgtttcaatgcttgaattgagtttagtatgatgaatacaggtactctagagaaaattgtgaagtttggggttaaattgcattgtagggttcattttttgggttcccaacacagaatcggtcgaccggttctgggagacccataaaaccggtcgaccggttggtgcccag

SEQ ID NO: 331549 - DNA, 525 bp, Cannabis indica
tatccagagtttttactaaagttctcttctgtggtgctgtgtagatgaacatgattaaagtgtctaatatcatgggaattgacccaaaaccatttgatcctaagacatatgtggaggaagacacatttgtcacagatgaatctggatcaaagaaacggatacgcttggagaacaatattgtacgctggcgatctgttaaacatcctgatggctcggtatcggtaagtaactttgttagtagattctctttttggtacagaagttaaattatatggacttcaatcataaatatgtattctgcaggcattattttttaggatttgcttggtaagttcattctttcattttttttttctttgcaaacgatactattagctgatgttttcttcaacattctagaagatcatgaacctaatcactgtctctatttttttttcccttttacctaagcaagtcttttacttatcacccgcaggggttaggattcagatatactgaattagggtaggccataaaaattttgtg

SEQ ID NO: 331550 - DNA, 986 bp, Cannabis indica
aaaaaaaaaaacatgcataataaatagataaaaagtttttcactaaaaaaagatctgaataatctcgattacggttgatctcattcaaattggataactttggataactatgagatgttttagacgtactgaatgatcgaattgctacccttatattttaagattaaaatttgcatattttggcctgtatgacgtgcaatcaaaattgtaacatgtagtaagacaggttattatcataagaccgtatctcgtcggcatattaagattgtacagagaggtattttccttgagggcgagttatcatctggtcgatagagagacaacaacctgataaagaagcttgttggatgcttatatgtttgaccaatatatatatattgacaaagtaaatagttcagcgcgagacagttgtttctttgcttcccacaaccctaaagatgacatgctcaattcatattcactgttagttaaagatcccacaagattcaatttttataatattcatttcagttttgagatgagttttaattaactattttaaatttttatgatagtatattaattgaacttgtaattatgataaaactcttataatttttttttgaaattttgtaatacaagtaatcttctcaagatattttattttaaagagggttgttagcgcctaagtatactttaagtaatacttctcgcatccttccataagtgttggacgaagcaaatgaaagacaccatcacagtatgacaattatgagatgaatcatgttgggaatgtgacccttagtctcttagcatactcatgattatgtgagtcagtgagttgcaagctatgtaaataatttgttaattccatttttagcatatttaattgacaaaaatattttattattctttgtatatttcggctggcatatattgatatggtttccctatttgtgtatatctaaacttggaaggaaagttgactagctttcctatttatggaa

SEQ ID NO: 331551 - DNA, 663 bp, Cannabis indica
ataaaaatatgtccaacaaaaacataaaaataaaagagaacttatgccccatatagcttgatcaataatgacagctgcttggacatctcctgttgaacctcctccatggcagcaagacgattgttcacctgttaaacctcatgcttgacctcctggacatttacaggagcagaaattcgagcttgcaccagcagcagcagtaccagctttaggacacttgggaaaagttccatcaaaatactccaagggttggaagatggtgccagtaagaggaggctcaagtgtttcatgagagtaggccacatctttctgagaggacaaaattttatagattaagttaggaaacacaagcttatgagtatgctttttacctctccgaaatgaagcaatctggtccaagattgaagaagccagattaatggatgcccccgaggtgatacgaaagagaaaagatgccaaatcttgagataccacggttttgttggaattgggaagccaattgctaagtgaaaacctcatgagtgatgcatgagcataagtgagatgtgtaattcgaagactctgcctagatttccattcaacccgtgcacgagtgagttcagtgagcatcaaatggcaatccatagacatgatagcatttgacacaccttcgggtagttgcaa

SEQ ID NO: 331552 - DNA, 710 bp, Cannabis indica
tttaaagcttgatatggctaaagcttttgatcgtgttgaatggaattttttggagagtatcatgtcccattttaagtttcccattagttttgttactctgattatgaaatgtatttctactactactgtctcatttcttgtcaatggtgttgttaaaggttctcttaagccttctaggggtctcaggcaaggggatcctttatccccttaacttttaattctctgtgctgaaggattgtcatgcctccttagagttcagcaaggtgcgttcagcaaggtgctcaactcgttaaaggaatctctatttctaggcatgctccttccatatctcatttgttttttgtaggtgacaaccttcatttttgctttgctgacagaagttcttgtttagcgctttagaggtgtttcatatctattatagggcttcaggtcaagctattaatttctccaaatcctcaatcctcttttctctgaatactgtgcaggagattcgtaatatgttttttaacacttttcatttagaagataggctttttggttgtaagtatttaggtctccctcaatgtctttctcggtctaaatatcactcttttacttttctttgtgataaagttgttgggttttataccctaaataaaactcaatttcaatgtaatctttattatttaaatatcaataaagaaacagaagtattttcatcacttattgtg

SEQ ID NO: 331553 - DNA, 637 bp, Cannabis indica
ttttagatgaggaaacaccagcagaagtgatgttgctgtgattgaagggagagttgaattgaagaggctggtcaaacttgtaaagccctttgtcaaccttcccaaccaataaagtcctcatagtagcctgatctttcacaaaacaaaagtaagggtgaaactcaaaatacacagcattatcttttgcaaattgagagacactcataagattttttgtgatatcaggtacatgaagaagattttgtaaaatcaagggttgggaagtgaaaggagaagtgaaagtgttataaccagtatgagagatttgcaaacctgagccatttcccatgtgaatttggtctaatcctggaaattcttgaggagccatcaggttgtgcagatctggtgtcaagtgatttgtggcacctgaatcaggataccaggactgatcactaacagtatcaggtgtagcaattgcagcatgcatctctgcagtggcagcagtgccattgaaggactgaaatgattcagggcctgtgagcgatttgtcaaaccgatagaagcattgtttgactgtatgtccttgtttgtgacacagctgacactgtattttagaattagaagagcctctgcctgaacctgtgtaaccaccacgaaa

SEQ ID NO: 331554 - DNA, 2712 bp, Cannabis indica
cgaaataataaaaggagcaatactaaacttcttgatagaagtttggtattgctcctttagctttattttcaataactactcatatagactaataccgaagttttatccatttgtagatggaacttctagagcagctaagtctagagggaagttgtgagcattacgttcatgcataacttccataccaagattagcacggttaatgatatcagcccaagtattaattacacgaccttgactatcaactacagattggttgaaattgaaaccatttaagttgaaagccatagtgctaatacctaaagcggtaaaccaaatacctactacaggccaagcagctaagaagaagtgtaaagaacgagaattgttgaaactagcatattggaagatcaatcggccaaaataaccatgagcggctacaatattgtaggtttcttcctcttgaccgaatctgtaaccttcattagcagattcattttctgtggtttccctgatcaaactagaggttaccaaggaaccatgcatagcactgaatagggaaccgccgaatacaccagctacgcctaacatgtgaaatgggtgcataaggatgttgtgctcagcttggaatacaatcatgaaattgaaagtaccagagattcctaaaggcataccatcagaaaagcttccttgaccaattgggtagatcaagaaaacagcagtagcagctgcaacaggagctgaatatgcaacagcaatccaaggacgcatacccagacggaaactaagttcccactcacgacccatataacaagctacaccaagtaagaagtgtagaacaattagctcataaggaccaccattgtataaccattcatcaacagaagccgcttcccatattgggtaaaagtgcaaacctatagctgcagaagtaggaataatggcaccagaaataatattgtttccgtaaagtagagatccagaaacaggttcacgaataccatcaatatctaccggaggggcagcaatgaaagcgataataaatacagaagttgcggtcaataaggtagggatcatcaaaacaccaaaccatccaatgtaaagacggttttcggtgctggttatccagttacagaaacgaccccataggctttcgctttcgcgtctctctaaaattgcagtcatggtaaaatcttggtttatttaatcattaatcatcagggactcccaagcacatgaattctctataaatagagatagagaattgagggcttgttattcaatagtataacatgacttatatacgcatgtcaaccagtctcaacatccaaaaatatatctagacccttatttatatatctctatttatccattttttttgtttgaataaatgaaatgagttaacaagttcatatttatagacataggatttcaaaatattaagtataatgggttgcccgggactcgaacccggaactagtcggatggagtagattatttttagaaaatataaaaaaatatataataaaaaactatataatagatatcattaacaatctctccccaagccgtgcttgcatttttcattgcacacggctttccctatgtatacatctaaaattcagatccttccctagacaggactttgaatactcagttgatcaacccttactgcataaacatttcataatagcaaaaaattgcatttttgctatctcttccttcatcatttaaggataatttcaatttccacggtcgaataaccaatcattcataattgaccagatcgttgatgcaaaaaatatccaaataccaaattcgccctttatataacctccgcaaagtggaataagttcttggaaaaatcaaagaaagaacctcttcttcctccgtaaagaattcgtccaataattctgaacccaatctttttaaaaaagtgcgtacagtacttttatgtttacgagccaaagttttaacacaggaaagtcgaagtatatattttactcgatacaaactcttttttttggaagctccgctgtaataatgaaaaagatttctgcatatacgcgcaaatcgatcgataatatcaaaatctgataaatcggcccaagtcgacttactaaggggctgccctactacgttacaaaatttcattttagccaacgatccaatcagaggactaattgaaattaatgtatcgatcttcttcatagcattatccattagaaatgaattttctagcatttgactccgtactactgaaagatttattcgcatacttgaaagatagcccaaaaagccaaaggcatgcttggataattggtttatcgaaatacttcctgcttgagaccatacataaaaatggcattgccataaatggacaagataaaatttccatttattcatcaaaagaggcatatcctttgatgctagaattgattttccttgatatctaacataatgtatcacgagatcctgaaagaaccataggttagtcggaaaatcatcagcaaatacttcttttacgggatgtttcatttttccatagaaatatattcgctcaaaaaagccttcagaggatgttaatcgtaaatgagaagattggttacggagaaaaagtaagatggattcatattcacaaacataagaattatacaggaacaaaaagaatcttggattactttttgaaaaaaacgaaatagatttttttggaatacgaatacgaaatctatt

SEQ ID NO: 331555 - DNA, 550 bp, Cannabis indica
ttgtgaaactagttttgtttttaatttatatttcagtgttttaagaactgatttcgtctttgtttttaattgtaatcagtttgagttattgcgtgttacttgtttgtattcattatgttatataactggttctattttagttataatcagtttgagttctttcgtgttatttatttttattcattataacactgttatagaaccaattctattttaattataactggtttgaattattttatgttattgatatttatttattatgttatagaaccggttatatttaaattataacaggtttgagttattagtttttattcatataaccaattatattcttagttatatctaagacatttacttctagtgactttttcagtgatttttccggcgacgttgacttttccattgacttttctggcgacgatgacttttccaatgaatttttcggcgacaatgatttttccggtgccagtgacttttccggcaaaacttattgttgttttacaattatggaatttctactttttttttttttacaaaaatttgg

SEQ ID NO: 331556 - DNA, 1833 bp, Cannabis indica
gatgttaatgaaacatacatggtagtaaatctagatcctagtaaaatatttccaacaatagcatctctccaattattggtttcgccaaaactggaggcctcggtagatgactttttatgttctaaaaggcctcttcgcattcttttgtccactcaaactgctacttgcctcgtagtacattgaagaacggcacacacttattagttgactttaaaatgaatctgttaggtgcagccattctttctgtcagggcttgtacttccttaggctttgtcggtgatggcatgtctatttatgccttgattttttccggattcgcttcgatacccctcgcgttaactatcaatcccaaaaactttcttgaagagagtccaaaggaacacttttttgggtttaacttcatgttatacttctttaatattttgaagcgttctgcgaggtctgtggtatgatccccacttttaattgatttcacaaacatatcatcaacgtaaacttccatgttccgcccgatctgatttgcgaatatttcatttccaaacaatagagtcccatgttggttacgaagcttccatgctcttgatctaggacatgcatttttatctggttctatcaagaatatgcatccataaatgacataagctagtgtctagcagttgcatccactaactggtcgatcccgggtagtgggaaacaatcttttgggcacgccttatgcaaatccaaaaaatcaatgcaagtcctccacgttctgttagtctttgggacgaggacaggattagctatccatgagggataaaacacctcgagtataaagtcattgactaacaacatgcccttctcctgttttagtaccccttgcctctcggaatccaagggtctccttttttgtctcttcgctgggtagtttggatcaacatttaaatgatggcagataatgttagggtcgatccctatcatatctccctggctccaggcaaattgatcttggttcacctgtaagaaacttattagctgctattttagctgttcatccaagttcttcccaatgtacacacactttgtgggatttccttggtcgagaataacgtcttccaattcttcaatttgtttcaataagtttctttcatcttaaactcgggggtcaagatcttcgtccttcccttcactttcttttgccaaaattgccattacttggggaccgactttcctatgttgcaactctatgcgatagcaatcgcgagccagcatctgatcgcctcgcaccactcctacaccttctggtgcttggaacatcaaggataggtgcttgatcgaacttattgcccctagtctgattaatgctggacgaccaaaaaatatgttgtaagtcgatggaaagtcgacaactaggaagtcttgcataacaatggcagatagggatgcctcgcccaaggttaatgcgagctcaattatgccaagactggcaatactccctctagtgaagtcgtaaagatttaccatacaaggcctcaatttagttttttcgagccccgtcttccttagtgtttccttataaaggatatttactgagcttatcttgtctattaacaccctctttatccttttattggcgacgttaatggcaatcaccaatgggtcgacatgaggatatctcacgtttttctcaacttcctccgtaaatatctaggctatttaaatatttaaaatactatttataaacttctgataagtaaaatgatataaaatatcatttttctaacttttgatttattaacaataaaataacaaattttgaatttaaaaaaaaaatatggttagaatatctataaa

SEQ ID NO: 331557 - DNA, 625 bp, Cannabis indica
gtgatagtatcactactgcgagtttacatcggcactactaagtagaaccctatttcggtatcggttagtgatttcgtgacgaaaatgttgacttcgatacactacacctaacttgattacatactttgtgtcacaggacccctaaacatctacagtgatagtgtcactactgcgagtgtacatcgacaccactaagtagaaccctatttcggtatcggttagttatttcgttacgaaactagtgactccgatacactacacctaacttgattacatactttgtgtcacgggacccctaaacatctaaagtgatagcatcactacgtcgagtgtacattggcgccactaagtagaaccctatttttgtatcggttagtgctttcgttacgaaacttgtcactctggtacactacacctaaattaattacataatttgtggcacgggacccctaaacatctaacataatagtgtaactactgcgagtgtacatcgacaccattctctagaatcctatttcggtagaagtcagtgatttttttacgaaactggtgaatccgatacaatacgcctaaattgatcacatactttctgtaacgggacccgtaaacatctacagtgatagtg

SEQ ID NO: 331558 - DNA, 5135 bp, Cannabis indica
aaattcaaatggatacataactaatttttttctgtcaataaaaaaatatttctcaatttgaattataacagcaattatgggtatatgtaaaccccataacataacttattacacaaatattatctaatccggtatcttatctgtatatgagtctataggtaattttcagtaaattctcgcgcttcacttcaatttttacaatttttctggaatagattgaatatataaacgagaaattttgataaagcctggcaggtgctgttccgaataaagctgtaatagaaaagagggggcttatatatagtatagatagctatagttatatctgcttttttgacttacacattatttatacatttcatatcttctacgaattcgactaaaaaaaatgtgaaaaaatgtttctcttctctgtaaattcttttttgaacaattgaagaaaacgttaagtgctaaaaaaagaaattctatgttgtttctgattattatgtctttatcttattatctcattgaacagatcaaatcctgaatacatttctggtattcaattggaatttggaatacggaatatcataataatggtagaaattgaatcactttttgttttgattgatattctatacaaaactccctaagtctaagtggaatttatcaccccctttccgtttgtatctgttgcaaattccgatttgagaataaaattctctttattcctccgttcatacgtattgctccatctatttatattatatggagttaagtaaaatttcatgtgattcagtaataaacagaatagaaattccatcattgctatatcgatctatcttatttgatgaagaatgggaaaataatgggatttttttctataaatataaacgggaaataaaaaaaaatgcttggggatggaaatgggaaaatgtctacaatacccggatttaatcagatacaatttgaagggttttgtaggttcattgatcagggcttaacagaagaactttataagtttccaaaaatggaagatacagatcaagaaattgaattccaattatttgtggaaacatatcaattggcagaaccgttgataaaagaaagagatgctgtatatgaatcactcacatattcttctgaattatatgtatctgccggattaatttggaaaaccagtagggatatgcaagaacaaactatttttattggaaacattcctctaatgaattccctgggaacttctatagtaaatggaatatacagaattgtgatcaatcaaatattgcaaagccctggtatctattaccggtcagaattggaccataacggaatttcggtctataccggcaccataatatcagattggggaggaagattagaattagagattgatagaaaagcaaggatatgggctcgtgtgagtaggaaacagaaaatatctattctagttctatcatcggctatgggctcaaatctaagagaaattctagagaatgtttgttaccctgaaattttcttgtctttcctgaatgataaggagaaaaaaaaaattaagtcaaaagaaaatgccattttggagttttatcaacaatttgcttgtgtaggcggagatccggtattttctgaatccttatgtaaggaattacaaaagaaattctttcaacaaagatgtgaattaggaagaattggtcgacgaaatatgaaccgtagactgaatcttgatatacctcagaacaatacatttttgttaccacgagatatattggcagcagcggatcatttgattggaatgaaattcggaatgggtatacttgacgatatgaatcatttgaaaaataaacgtattcgttctgtagcggatcttttacaagatcaattcggattggccctggttcgtttagaaaatatggttagaggaactatgagtggggcaattaggcataaattgataccgacccctcagaatttggtaacttcaactacattaacaacaacttttgaatcttttttcggattacacccattatctcaagttttggatcgaactaatccattgacacaaatagttcatgggagaaaattgagttatctgggccctggaggattgacaggacgaactgctagttttcggatacgcgatatccaccctagtcactacggacgcatttgtcctattgatacgtccgaaggaattaatgttggacttattggatccttatcaattcatgcgaggattggtccttggggatctctagaaagtccgttttatgaaatctctgagagatcaaaaaaagtacggatgctttatttatcaccaagtcgagatgaatactatatggtagcggcaggaaattctttggcactgaatcgaggtagtcaggaagaacaggttgttccggctcgataccgtcaagaattcctgactattgaatgggaacaggttcatcttcgaaatatttttcccttccaatatttttctattggagcttccctcattccttttatcgagcataatgatgcgaatcgtgctttaatgagttctaatatgcaacgtcaagcagttcctctttctcgatcggaaaagtgcattgttggaactgggttggaatcccaggtggctctagattcaggagttcccgctatagccgaacatgagggaaagatcgtttataccgatactgacaagatcattttatcgggcaatggagatactttaagcattccattagttagatatcaacgttccaacaaaaatacttgtatgcatcaaaaaccccaagttgcgcgaggtaaatgtattaaaaaggggcagattttagcagacggtgctgcgacagttggcggcgaactatctttgggaaaaaatgtattagtagcttatatgccatgggaggggtacaattttgaggatgcagtactcattaatgagcgtttggtatatggggatatttatacttcttttcatatacggaaatatgaaattcaaactcatgtgacaagccacgggcctgaaagaatcactaatgaaataccacatctagaagctcatttactccgaaatttagacaaaaaaggcgttgtgatgttggggtcttgggtggagacgggcgatattttagtaggtaaattaacgcctcagatggcgaaagaatcatcgtatgctccggaagatagattattacgagccatacttggcattcagatatccacttcaaaggaaacttgtctaaaactacctataggtagtagaggtcgagttattgatgtgagatggatccagaaaaaagggggttctagttataatccagaaacgattcgtgtatatatttcacaaaaacgtgaaatcaaagtgggtgataaagtagctggaagacatggaaataaaggtatcgtttcaaaaattttacccagacaagatatgccttatttgcaagatggaagacctgttgatatggtcttcaacccattaggagtcccttcacgaatgaatgtaggacagatatttgaatgctcgctcgggttagcgggggagttgctagatagacattatcgaatagcaccctttgatgagagatatgaacaagaggcttcgagaaaactagtcttttctgaattatatgaagccagtaagcaaacagcgaatccatgggtatttgaacccgagtatccgggcaaaagtagaatatttgatggaagaacgggggatccttttgagcaacctgttataataggaaaaccatatatcttgaaattaattcatcaagttgatgataaaatacatggacgttgcagtggacattatgcacttgttacacaacaaccccttagaggaagggccaagcaagggggacaacgggtaggagaaatggaagtttgggctctagaaggatttggtgttgctcatattttacaagagatgcttacttataaatcggatcatattagagctcgccaagaagtacttggtactacgatcatcggaggaccaatacctaaacccgaggatgctccagaatcttttcgattacttgttcgagaactacgatccttggctctggaattgaatcatttccttgtatctgagaagaacttccagattaataggaaggacgcttaatcggaaggaatcagaatttttcttctatgatcgatcggtataaacatcaacaacttcgaattggatcagtttctcctcaacaaataagtgcttgggccaaaaaaatcctacctaatggagaaataattggagaggtgacaaaaccctacacttttcattacaaaaccaataaacctgaaaaagatggcttattttgtgaaagaatttttgggcctataaaaagtgggatttgtgcttgtggaaattatcgagtaattggaaatgacaaagaagacccgaaattttgtgaacaatgcggagtcgagtttgttgattctcgaatacgaagatatcaaatgggttacatcaaattggcatgcccagtaacccatgtgtggtatttgaaacgtcttcctagttatatcgcaaatcttttagataagccgcttaaagaattagaaggcctggtatactgcgatgtgtgatttgataaaaattatgttacaaatgcagaatgagaaactgtcatcccattcaatcgaattaggatgtcccatatttgacatgtctcttgttaaaagtaacatgaaactcagaattataggtgtgttcaatactcctaagtaaaaagggaaataggtctatggtcaattaagtaacaaataaatcaattttatagttatacctcgtgaaaaaaaagacttatttctttatgttatgtgtaattaaccattccttttcgtttagaaagaaatgaaattatgtttctgtccaaataagcaaatatgtcatggttgtcggagtttattcatcgcatataggctttaaggacgtcgtgacataaccgtcgaggcgaagtagggacctaaaagattgaatggaaagatacatagacaagtaaatctcttatgaattgaattgaattctaaggcatttctttactttaattaagtttaaaaaaagttaaggaggggattcatcattcgaagggaagtagactactcaagaatttcacatttcatttctttttttattgaatgagtaattcaat

SEQ ID NO: 331559 - DNA, 1171 bp, Cannabis indica
tttgggggaaatcgaagcgtctgggaattttgaaatgattaccccttttcaccagtttgcctataaataaagttggaacttcttcagaaatcactttcaccattttctccacgaatcaaactcatagcaaaaaggaattttcttcaagtctgtcgcgagatttttagcaaaggcatccgagcagcttcgtcgggacaacgtttaggcttcaaacagtgagtaagttttcaatctttttttcttttaactttgtatctttaatctctggttttccattgtagaaagtgcaattgttcttgacttgttgtagaagatacatataaaatctaggctcaaaaatttgtagtttttctgcaatagttcgtacaactttgtggtttatgacattctgactttaatctcccaatgttcgattttcagcttgctcattcaaagctttgtgatatttaacccttaacccaaaaatttaaaactcttgggttatgactttatttttgtgttgttttttctctttttaatctgttgagtagtcttggtcggtatatttgcctgtttattgtttgatatcccggccaaacactcatctcgtgtgttgtcttttgtagatgaactctggtgagttttggggagacgaacaccgaattgaccaggatcttcttcaacttctgtatgaggatcaacctcatcttcacgctagtccgtcctcttcgagtgacggactttctaactcgagctttgaagattgggaagtgagtagtgatcattctcctactccagaactcgatgtgcaacaccactattactccaagcagatcacaagagaaggatacggtcgcttcatttgggagctaaagaagggttagagacgttatctttcgtccaactagacgtatattgtctaaccaggtgttgctaatactctttccgttggccgtccaagttctggcaacttcggcatcccaatagctatccctaccgttactactgcacgacatacacatcagtatccgtctaagagaaggatgatcgcacaaagcagacgatgcggaaagtcaatgcgtctgatcctcatgtggcccagcttaccacgttgccaagcgccgagcaggatctgcccgtcgtggaggaggaggatcacgagggggacattaaggtctaggagatagaggaa

SEQ ID NO: 331560 - DNA, 545 bp, Cannabis indica
cagtcataatctttgaccagttcaaaccatcgtcgttacctcatatttaagtccttctgtgtgaaaaattatttgaggcttttatgatcggtgtagatcttgcacctttcgccataaagataatgacaccaaactttcaatgtaaaaacaactgctgctagttcaatatcatgagtaggataccgctgctcatactatttcagttgcttagatgcataagcaatcacttttccagactgcataagaacacaacctaacccctatttggatgcatcacaataaatcacaaaattttcatcacttaccggtaaggttaacacaggagcggtaattaatcattgtttcagaacctggaaactgctttcacacttatcagtctaaacaaacttgcagttctttcgagtcaattttgttaagggcgtagaaatcttagcgaagccctcaacaaatcttctacaatatcttgccaatcctaggaaacttctaacttcaactactgacttaggtcgaggccagtctcgtaccgcttcaatctttaccagatc

SEQ ID NO: 331561 - DNA, 1384 bp, Cannabis indica
tataatatgatatgtttttattaaaaagcaaaattttaattattcatgtttttcgagtaacctctttgattagcaacgagatgcacagtacgttaaaaatcacgttaacatgcctatactagttagggtgttacaatttagtattagagccgccatgttgtcttccgcagatcgtcacgacgtgtacaatcattatcagcagtcagctcgttccacagtttagtaagcttttattgctttagtagttttcttttataatatgatctaagaaaagcctgttaggaagcatgttattagcctgatagtagaataggcgcatgtttttagtttccaaataagcggcattagtaagttctctatgatcatgatctgaccagactagctcttggttacacaggctatttagattagtatggacgccaggcgaaacaccaggagccagggcaactcggttggatcaaatgaaggtcaaggtgctcaaattcccccaaatattcagggctgaggtcgagatcccagggccatggcacgtggtcggaatgatgctaacccgacacaggttgcccaggctgcccaagctgctcaggattcctagaattgggaaaataggtttgcagaaatgcaaactagaatcaatgaacaagaagaagtgattcgacagttgagacagtagggtgctcctgcagtgcttgttccagaaataccagtggcacctgcccctactgtgcaagccgaactggtggttgcaacgaaccagatggaacctctatatgaaaggttccgtaagcaggcacctccagttttcctaggaggtccagatgttaagaaagctaagcaatggctaattataatcaccaggatattgaattttatgggcgtcactggaaatgatagagtggtatgtgccacttttcaatttcaagaagatgctttagtttggtgggacatggtgtccatgatacatgacgttactacaatgacctgggagaaattccaggaggtttttaatgccaagtattataatgaggcagtcagaagtgccaagagaaaataatttacccatttgactcagaaggaaaacatgagtgttactgagtatacgacccagtttgatcgcttggcgaggttggcctcgagaattgtgccaaccgatttcagtaaaaaagaaaaatacttggatgggttaaatgcgaagattcgacatgatttgatgattactactgatgacagaaccacctatgctgaaatggtggataaggcactgcgagctgagggtgcagtgggatgcatgatagagtctggtggaactccaactgttggcaggggctcctacccctcctacatcagcgtttatcaggggaggtagtggttcgaccatggacca

SEQ ID NO: 331562 - DNA, 834 bp, Cannabis indica
tgggtccgcccctgtatatatatgtcaagaagtttattaatatcactttataatagctaaaatcagtgcatgggagcaacttagattcatgtggggtacatgacttcactcacatttcactaattacaatttttatataagtataattacatataatactaattttataaaaaattatatttttacgtttatctttttatatatttttacagtactttataaaaacaaaagaaaacaacaaaaaaattacataaaagtaacaagaaaacaatatcaaaataataacaaaacaacaaaaaataatatacaaataacaaagaatttgttgattacagttacatgttttgttatctgggattcgaagctgtgaatccgaagagcatatactgaaagcttagtgtggatctggaaagtcttgtgcgaaaagtcttgtagaatctaaaagttacttccaaataagtttgtaccgtttatggaatgtctctccagaataactagcttgctactaatccggaagtacactcctggacagcttactatcaatgttgaaggtccatccgggaaggaagccatgtacgtattcgaagagcttgtgagtttataaagcttctagattatctgtactaaaagtgcattttttaaaatgatgtggattattgttactggtgatgagctagatcatttaaggtggtgtaaatatgccacaatgattaggagatatttttaaggtggtgcaaatctatataattgtaaatctttgtaacttgtgtgagaatctcagaccaaatttactagagttaaatttgtgatagtgtaaggttgagagagagagag

SEQ ID NO: 331563 - DNA, 678 bp, Cannabis indica
tacgtggaaccactcgcctgccaacaaacgtgcaccgagccacttgacaagcagaagacattattccacttcagcatttatttaggagaaatgccaatggtgcctagcaccctcctacgtgtcaatatcgctattggtctaactaagtatcgggtcccatataatttaatataatagtttttagggcgtatcgctatcaaatcgcaacgcgacatgtcgagatggtgctaggcaccactggtgcctaatagcaatgctctttatttagccatttcaccactaagtataacacgagaatattagtttttgagtaattttggctctataaatatgacaatttagaatgcaagaacatcagattttcttagtagtgttattataccaaagttttatctttttctttctttcctctttattttactttattaattttggtgtaaagacaatgccttttttaggctaattttgttggcaagactcaagtgtaagttcatgcaattttttttttctaatatattgattttcttcgttcttcattttcacacttgttatattaaatttctctttttctaaattgcactttaaattatttagtagtaccttttatattcgttgagtcatgctttttttttatgtaagttaggctattaattattagggtgtttattatattatatg

SEQ ID NO: 331564 - DNA, 1017 bp, Cannabis indica
aagcttaccgcctgctctcaggcttgtacattttctatgttgccaggggctgggctccgcctagcccggctgaaattctttatttttatgaactgtcatctgtccccaagaagggagacaaacttaaagacgatttttccaaactttaggcccatcctgccatcaagggcccggttcttcataatttttcagaaaattttaagagtatcgccatcaatttttcttctcctccggcttcaaggccattgagtgcccggagctgctcactgaatgggtcagggttccccctatgcaccgtagcgcgcctactcaacttttccttcagcacgccaaggtcttttctacctatcataaggacagactgaatgtgggggacttggttacgactgcacattgcaggagggccaagttaatttcagagagccagtcaatggatgactttaacctgtctaaggttctctgccccaacatttgcagccccgaatcggagaaggcgctccgggatgacatcatcgcctctgctaaggaccagtacaagtagtacctctttaagagggaacaggagtaggcctacattaaggcccagacagccgcggggagagcccttcgaattgaggctagaaaggagcagacgacctcctggcccaagcttcccttcccggtccctaacactggggctctaaacgccaggacttccggagctggtaagtcccactaactgttcatcatgtcccttccgttcaggattattctggctgtaggccagtagagtttgatgaacgacttcataggtttaggatgcccccttttcgatggggtgatcatgccaagagtttttatttttccaaccttggtcacttcttaggccagtctcggatggggtccggtcctcccgcacctatccctttggatcattctgcctaattatcttccagttggttcctctcctttgacaactttctaggggacgacgacaccagccttttaatgcatacttttgctagggcagaattagat

SEQ ID NO: 331565 - DNA, 524 bp, Cannabis indica
caatgcatacaatcaaacttcccaacattcctggaaaacctcgacgttcaccaatgtggagtagtcttgcaacatcatgagcgttgggtgatcggagatagtgggctccaaacacctcaacaacagcacgacaaaatcgcttcaagctttctaaagttgtagattctcctattttgatgtattcatcggtagcatctgccggcataccatatgctagcatacgaaatacagctgtaactttttgcaagcctgataacccgagttttcccattctatcccttcgctggagaaagtaattgtcatgtctttgtatagcatccaaaatacgaaggaataaaggacgacccattcgaaatcttcggcgaaacatcaaatcggtaaatcgaggattctctgcaaaatagtcgttgaaaagattacgatcagcattttcccggtcacggttaataactatatgaccaggaatcgagcctcgacgtgagctttgattttgttggtgttgagcgatacaaaaattattgtta

SEQ ID NO: 331566 - DNA, 716 bp, Cannabis indica
aaaattgataaaaaaaaatgtgtaattttaaaaggggataaattttttttgggcccctgagctaggtgggccctaggcacaggcctagcccgcctatgctcagggccgaccctggatatacacccctagtattatctcaactagtgaggggaccatgggcctatataaccgagcttttaataagtagatctagaatttatcaagtaaaattcctaacttattaattcctccttgtgatactatagattcagaattacactttcaattatatagaatactctatatgtactaagatatggatacgttatgattatccattgttacaatccaaatagtcaaagatcctctattgatgatctacatcgaataggcacaaatttaccgttctacccttcaatgtattttatctttaaaatgcttagctacttataaatgatatttcaataaattaatataattgctgaaattaggcatcaatcatttatctttattaatccaaactcaaaagaattcatcgtttcatttctaaatacttatagaagttataaattctatatctatgattagcgctcccacttacttgcactatcatgttcccaagatgtaagtgttcacctgacaagattttaacgaaaaactttaagaacataaataatacagttgagctgaacctaaccatatcaggattaagatccatagacctaagatcaaccaat

SEQ ID NO: 331567 - DNA, 673 bp, Cannabis indica
aaaagaaaatttcagtgatgtcttgtgattgaaaaaaaaaaagtagaaaaatctcaatcatggttagttgtgggaacacttcgggaaattttaaaattatgagaagcttgtgggttcttttgtgcttatgatatctttagccaaaattgtctttcattttccaaatatctaagccataaattcttacctaaaagtccttttgattccgaaaagaatgttgtctgcattagtggagagagttacgcatgcaagcatattggctattagtttgtggactgatttgatggagtgaaacaattatgacattatttcaatattgaagttagtttgtatctatacattgtgtgataagatgagcatcctaattaattgttagagtttttataattaaaaatctagtttagttaatggaaggaaatttcacatgagccagcagtaatataattatctgatagcttagttaatcgagtttttagtattagtcttagtcttaatcgagggcgagtaagaatctagtttgggggaatttgttaggctatttttagcctatgttttgggtcactttttatagttgttttccttctttataattatatttggaatagaattatgcttgttttctttggtttcaggttttcacacttggaatctataaattgatcaaatttcggaa

SEQ ID NO: 331568 - DNA, 819 bp, Cannabis indica
ttttttctcttttatgtattttcctgttttttttcccaattttatatcaccacattctactttttaaggggatcgttttaacatataggaagcatatatttcattaccgttgttagaaaaaaataattaaaatcagaagtaatattttagtttctttactagcaaattaaatttttaaatatcaactaatttctaaaataacttaaaagaaaccaaatttgtaaacatgacgtattctctgatgtatagaaagtgttggtgttacttatttaaattaaatttagatagtaaaaattttttaaatatgaaatattataatatttattgtagtaacccataaaattagatggtatacttattttatttaaatataatattttagttacttctttgtaagaaagggattggttacttttatcttgttcatcattttctatatcagaaaaaatatatgtactgtttcccacatctcaaaatatactttaaaatttctagaaaaaataggtaacctcaaggtatcctgaataataaaataacatataatatagtctaaaaaaatcatagttttaaagttatttgatcaaaataatttttttgaattaaaaagtaactaattgataatatttacatcaaaagcaaccaaaatgttactatttttaaaacctgcaaaacactcaaatttctagaagcgataattttcaagttttttctatttttgctaataattttgaattttggtatttatgctgacgtggcacattggtatatgtgcaaatgaatttgttgaaggtatttttgtaaataaaatcaattttaggt

SEQ ID NO: 331569 - DNA, 1218 bp, Cannabis indica
aaaacaagattgattaggagttgtgaaacaataaaagttaaagtgtgtggataaatgaaaagatgagagaaagagagaaaaaactaccaatgatatagaattccaatatgtaaggtctatgattcattttcataaaggaaaatgtaataaagcattaatactgaattgatccctaattaaacaaaattgttttattaagaacaaataagaacaaaaaaatcacgagccctgagtcaataaaaactgagaagattgactcaagatcaaatttcatttaagagctccgttgtagaattcagacctaaccattaatcgcgaaacggtgggaacgacagaacccgtgagtgcataagattctattgaaaacgaatcctaatgattcattgggtaggatggcggaacgaaccaggaaccaattcatttattctgaaaagtcatggcataaactaatcttataaaattgaattaaaagagtaaatattcgcccgcgaaattttttatttttaagaaaacaaaattttctataaatagaaatcaaatacatgtttacttctatatcaaataaagatatccaaattgataatagcttatcaaaatcaaagactctcaggcttcaatatatttaatcaatatattattgattaaatatatgtatattattttataatcatttccttcgcgaggagctggatgagaagaaactctcatgtccggttctgtagtagagatggaattaataaaaaaccctcaactataaccccaaaagaacccgattccgtaaacaccatagaggaagaatgaaaggaatatcttatcgaggtaatcgtatttgcttcggtagatatgctcttcaagcacttgaacccgcttggatcacatctagacaaatagaagcagggcgacgagcaatgacacgaaacgcccgccgcggcggaaaaatatgggtacgtatatttccagacaaaccagttacagtaagacctacagaaacacgtatgggttcgggaaaaggatctcccgaatattgggtagctgtcgttaaaccgggtagaatcctttatgaaatgagtggggtagccgaaaatatagccagaaaggctatttcaatagcggcttccaaaatgcctatacgaactcaattcattatttcaggatagagatgtagaaccaaaagaaaaaggtttttggatgaaaaaaaacaattgcaggtttcttttt

SEQ ID NO: 331570 - DNA, 820 bp, Cannabis indica
catagtgtgtaagactgtgaagaattgaaactactgaaggagtattgggctcagatcttgattatactctgcgacaaaaaggaacaagggttagagatcttagtggaagaagtcatataattctgcaacaaccactgtaaggtttctcatactttatatgtttttaagtttcattattttagaaattcatatttaggatgttaaaaacatacttgttggtaaatctaggtcctggtaaaatatattccaacagggcctaactgcctgtgatccctcgattaattggtgcagccggtgtactgataggggtagattgcaccaattgttggaattaggtggatctagataattgaagtgattagaatcacttttcaagttgttattttgtgtgtttccacctattcctggccctaatttgttgaaaattggccagccagaggagcaccaccaaagggatgaccgaccaagggttggccaatgggagagttattgagcttgagatccctagctggctctctaaaccactggtttctaatatctggctattctcaccatcaaaccttagtcggaaggcttatcctcctttgggtaggggaaggtttttcctggctcctaaagaacctggttggacaatttgttggtagaccctccccgatctatcgactagtctccctaagagaggatctctgatgagatcctgacctctcctagtagttctttcattgaactgccttattaggtccttggcttctttgttgtagcagtcgaactctcttagtgagataggaggatattgttggaatttattttaccaggatct

SEQ ID NO: 331571 - DNA, 634 bp, Cannabis indica
gtaaccatgttacgtaccatgaaggtaagactaagaaaataatctcgagtatgtgattaaattttaattttttccttttataatttttcagatttttttccttacagaccgttgtgttcacacattattttaaaaataattattgtttttcacattgcaaaaatatatataacattgcgataatatgaaattaacatgtaaataacacacaatcatgaaaatataaataaaaaaagtttgtaaaaatagaaaaaaggggaaaaaaaattatttttaagtataatgggtaaattaaaaaaaaaaaaaccctactggatagatgcttttaaaatacaataataccatagttttcaagcataatttgaaaataccatccatcttttaatgaagtcatttgaaacttagaaaatatattttgacattaaaattaatggcacgtttactatacagtaattagaatcggaataaattaaaggagaaatgtaacggaataaatgaaaaataatcggaatcaatatttgtaatatgttgtttactaaaattttttagaaatggaatagttgtgatttatcttgtttactttattaggaaacgtaatcggaatgcttaaattgactaaattgcccttttgagt

SEQ ID NO: 331572 - DNA, 2909 bp, Cannabis indica
tttttcatcatgtgggaattagaattaattccagtttatctacttctatctatgtggggaggaaagaaacgtttgtattcagctacaaaatttattttgtatactgcaggaagttccgcttttttattaatgggaattctaggtgtttgtttatatggttctaatgaaccaacattaaattttgaaacatcagctaatcaatcgtatcctgtagcactcgaaatgctattctatattggattttttattgcttttgctgtcaaattgccgattatacccttacatacatggttaccggacactcatggagaggcacattacagtacttgtatgcttctagctggaatcttattaaagatgggggcgtatggattggttcgattcaatatggaattattaccccacgcccattctatattttctccttggttaatcatagtcggcacaattcaaataatctatgcagctttaacatccccagggcagcgtaatttaaaaaaaagaatagcttattcctctgtatctcatatgggtttcataattatcggacttagttctataagcgatgcaggactcaacggagccattttacaaataatatctcacggctttattggcgccgcgctttttttcttggcaggaacgagttatgatagaatacgtcttgtttatctcgatgaaatgggcggaatggctatcacaattccaaaaatatttacaactttcagtatcttatcaatggcttctcttgcattaccgggcatgagcggttttattgcagaatttatagtatttttaggaatacttactagccaaaaatttcttttaatgacaaaaatattcattacttttgtaatggcaattggaatcatattaactcctatttattcattatctatgttacgacagatgttctatggatataggctttttaatgcaccaaactcttattttgttgattctggaccgcgagaattatttgtttcgatctgtattttattacctataatagctattggtatttatccggatttcgttttttcactatccgtcgataaagtcgaagctcttttatctaattatttttatccatagttttttttgaaaatttaaaaaagtttgttggttttgtacactttaaaataagttctttattcttcgcttaagtttgaataaaataaatagaaattctattctaatcaggtatgtaatccagcgcgaactctttgaattacttcatttccattaaagggttcgggttcgcactggattacaccaagttttcgtatatacacttattccgtcctatgtttattttgtatttgtcaagtcctttcttcagttaggaaataaaccataactatgcaaccctattcctaataaattaaccccaaaataacatacccaaattataagaaaacctattgaggctacaattgcggaatttacactttcaaaatttttatttgttctagtatgtaaataaattgcaaatacggtccaagtaataaatgcccaagtctcctttggatcccaattccaataggatccccatgcttcattagcccatactgcgcctgaaagaatacctatggttaaaaagataaaccctagactaataatacgataactccaaagatccaattgttgaaccaattgaaacctgtaataattcctagaagaaagaaaagaagtcttttgtaaaatattttttttttctctcacgtattcaatctcgctccaagaaaaagactcatttactaaattattactttgactaagaattcttatgaattttcgaaatgtaatgactagaagagctagtgataataatgatccgcataaaagagctgcatagctcaataccatcatacttacgtgcatcattaaccaatgggattgaagagcgggtactaatatttcggattgattcatttcatttaaaagacccgaagtagcaaaaccttgggtaaaattaacactcggcgcggttattacgtttaaattgaaatagtttttatattttttaaaaagcggaaccatataaataatggagaaactccatgaaagaaagattaatgattcatataaattacttaatggtaaatgtccccaataaatccaacgagtaactaataatcctgttatacagcaaaaagtagctatcatccctttttcggaggaatcatatagtcctatgatttcatcgactaacaaggttatcaattgaattgtaattacaattgaaacgaccgaaaaggatatatgaagtaatatatgctcgaaagttgaaaatatcataaaaaagtttctcaattataggataataatagaaatcgggaattgaattcagtataggatttccttttgtactttttagaaaatgccatgccgctactcggactcgaaccgagatgctctagcactgcttcctaagagcagcgtgtctaccgatttcaccatagcggcttgttcgaaatcataataacctaacaacctatttttattcaatcgtccacttggtatattttttctttgagggtccttttatttaatttaacaatggtgtttttaaaaatttcttattttatacttgaatagaatctaattgttataatttacttgatagttatgactttaattcatagatagcatcaaaaacgttctttattaatgagtttcaacgacctattagttttgactacaaattatatatatatgctcttctatactctaatttctatgttagtctaagaaatatttaaaatttaaatagtataaaataatagaaaaataatataaataaaagagaaatcatttttatttttattatcgaattgatggggattcttattttccccatcctaaaaatgagaaagcatattcaaaagagtagacaaaggaattct

SEQ ID NO: 331573 - DNA, 578 bp, Cannabis indica
aaaaaaataaacaagtaaaaaaataaataatcatatttacatccttcactgccaaatcaacattaacaccatctttcaaaccagattcctgcattaaaacaaatattaataaacatacaaacgaataatagtaagacaactaaacaattaacaaatggataaacactcacatcatcactatcaccaccactatcatcacggatatccacgacactctgagaagcttttaaatcatcaaacttttctttcaagtcattaaatttcaaatccaagtaaaattgcaaactttcatcaatcttagaatctatgtgggaaatcatattgagttccaactccttgaatctacacttaatatctgatgtaaaaccctcaaaagacccatcaaaatgtaattgcttttgaattacttttttaacgtccctccttaactcatttaaaatagaagattgtaaaccaatcgcaccaactcgatcaacatcaacatctgaatcttccttctcaataaactcaagaccagatagattaagcattgatctctcttcatctgtaggaaatatatattcacctttcagctatca

SEQ ID NO: 331574 - DNA, 1002 bp, Cannabis indica
atatataataaataaaaaagtatataaataaataaatatatttataccgagctcagagagagagaaaaagagagaaggagacggacgggagctggtggtggtccgacgtatgagacggagatgagagagacaccgacgggaggtggtggtggtctgacgtatgcgacagaaatgagagggaaaccgacgggaggagggtgggtggagatcgatggacgagagagatgagaagaaagggagatcgagagggggaggaagacggcggagaggagggcgatggtgcggaggcgtgggtggggttttggagagttaagatttttgttttagggtgtggaaaatgaagaagaaatatgtgagaagaaataagtgggcatgtgggaaatagaaaataagtaggtaggaacatgggaaatgtggcgagaagtaggtgacggatttttaatgggcccttatatggtataaggctctccttaaaatttgtattttattaaaaaatgtcgcctattttgtttgccacgattttaaaccgttggggatactaaatttttcccgacgattttaaatagttgcttaattttttagcgacggtccccaaaaaaaattatttttaggaccgtcgcgaattttgatatttatagtagtgattagaaatgtgagattttcactattttgattaaaatgattgttagtgcttgaaaactaattttcactcaacgtgtctaatagaaaagtgatgcacaatggtcttggtttcatccctgttaaacaaaaagaacttgttaaaatttacccagaatagaagaacattttcaatttttgaattagggggtcattttaaacaaatttaatgtgaaaccaatcttcacattcacgtcttagtagtatgaattcgaagtgaatagtgggaaaaatattccgagatgggtctgggccacatttcacaaaggggaaccactattagaaatgtgagatttttacaatttcgattaaaatgattgttag

SEQ ID NO: 331575 - DNA, 2442 bp, Cannabis indica
ctaaccactgagttaagtaggtcttttatcctcacaaaagaaaaacaaaaggggacctatcccatggatggattataaattgaatattacttataagcaataccaatcaaagagatcaaagagctatcttgacaagaaattatctacatgataaaatatgtatcacaagcataagggctgtagctcagttggtagagcacctcgtttacacgcgcgccaatgtttttcagaggaggtaatcaaaagatttgatcttattgatcaatggatgtcttactctatgcttttggggaacaaaagaagagaacaatagcctgacaaatggtttggtccgatttgggcgcctaaacggatgccaaaatagaatctatcattgatttgcgatactgataaggtgaatattctatttattcaatgctaagcctaatgagtataaggacctcaacaaaattatcttttcgttctatcttatgaactttaaggtgtataaagtttcatatttgagtcaagcagagcgatagaaactccatttaacttaagttgatctaggccaaaagcagacctacgtcaggataatccttctttgaaacactttggtagtgctcctggattcgaatgcacataatgaatcagagcacgtggagccatctttttatttttctatcaaaaaaaaatatggcagactaaccgatatttatatcggttaacgaaaaagcccaatgcgaaaaaaagcatgttgggtctttgaaacagttcaaatcattttgataataaaaagtttggtctgttttaccgagaaggtctacggttcgagtccgtatagccctataaaatagaatatttgtaatatatacaattattttatctcgagataatcttgaatctattctatcttatctaaataagctaaaaattagcaaaaaaaataaatttgtaaatcctttaattctttagagataatctgaaaagcaacgaatttgtataatatacttcgatttattctatttattttcttttgattttttatcaatataaaatcaaaagaaaatcgaagtaaatggaatagaaatgaaattctagtggatatagagaatcttgaaacaaaacatataccgcaacaaacaaacgaaattaagcgattcgatcaaaatgaatggttattttgactaaacagttatggatgacttgacaattaagtccaatttggattgactaatccggtatattttccacattaatgggagtacgtctatgtttctgctttacgaatatgatattttctgggcatttctgataatatcaagtgttattcctattctggcatttctaatttccggagttttagccccgattagaaaaggaccagaaaaactttctagttatgaatcaggaatagaaccaatgggggatgcttggttacaatttcgaatctgttattatatgtttgctctagtttttgttgtttttgatgttgaaacggtttttctttatccctgggcaatgagtttcgatgtattgggggtatccgtatttatagaagctttaattttcgtacttatcctaattgttggttcaatttatgcatggcgaaaaggagcattggaatggtcttagctcttgaatattcatatgacaataaaaaaaaataagattgagacatttatgaattccattattgagtttcccttagttgatcgaacaacccaaaattcagtcatttcaactacatcaagcgacctttcaaattggtcaagactctccagtttatggccgcttctctatggtaccagttgttgctttattgaatttgcttcattaataggttcacgatttgactttgatcgttatggactggtaccaagatcgagtcctagacaggcagacctaattttaacagcgggtacagtaacaatgaaaatggctccttctttagtgagattatatgaacaaatgccggaaccaaaatatgttattgctatgggagcctgtacaataacaggggggatgttcagtaccgattcgtatagtactgttcggggggttgataagctaattcctgtggatgtttatttacccggatgtcctcctaaaccggaggcagttatagatgctataacaaaacttcggaagaaaatatctcgagaaatctatgaagatcgaattcgatctcaacaggagaatcggtgttttactaccagccacaagtttcgtgttaaacgcagtactcatactggaagttataatcaaggattactgtatcaaccaccatctacttcagagatcccgactgaaagatttttcaaatacaaaagttcagtatctttcgacgaattagtgaattaacgaagatccttttgtacagaataataaacagcgaatcaatcttaagaaattttatcgtaaatgtgaaatacttattacttataatacgtatataaaaaa

SEQ ID NO: 331576 - DNA, 646 bp, Cannabis indica
taatcatagatacggaatttataacttctatctggacatagaagtgaaatgatgatttccttcgagcttgacttaatagagataaatggaggagctcttattttagtaattatattagtttgttgaaatatcatttataggaagctaagtgttttaaggataaaatacattaaggggtagaacgataaatttatccctacttgatgtaaattatctatagaggatctttcattatttagattagaacaatggataattcatagcatattgttaacgcagattttcgttaacgattatgagcctattttcttaatagatttggcacagaaattatcaaagatctaagaaagaataacagaaacataaattacaaaccgaaataacccaaaaaaaattacaacccgcccaatctattaattgggcgggttgaaaataggtccaacccgtccaattaaaccgaataacccgaccaacccgactttggcctcttttttttttacttcttagtttttattatatataacataaatgattaaatatataataatataaaattatatacttaattgttagtttcaaagtcctatatattgtgttgtgctttggtagaatttgatatttttaatttatctttttaatttttatt

SEQ ID NO: 331577 - DNA, 721 bp, Cannabis indica
atgagctactaccattgtttcgcaatttgcaagtcaaaaactttaagatgcccaaaatggtagcttataccgggaactctgatccgagtgatcacttgtcgcagttcaatcgagtcatgacagtcatgagagtcagcaacgacactaaatgtttgtgcttcccgcttactctaagcggatccgcggaagagtgattcaagcagttggaacaggatccgtgggctgctggaataagttacaaaccaacttccgaagacagtttgtcgccgcaagaaaagtcaatctggaggtcagtgccttgactaacatcaggcagctgcctacggagaaattaaagaatttcaagaggttccgggaagaagcctccaaaaccaagaaagtagatgacgaacaacagcttgctcttctccaagcaggcattcgtacggggactccattctggaacgaactacaacaagaaggagcttcaaaccttcaggacttccagaagagagtccaaaaatacattaaccttgaagaggcccaaatagtggcctatggaggatattatcccaccggggtaacaggatatgtgcccggagcccagctctcaggcactgtaccagcagcggctccaccaatgagcggcatacagttttctgccactccaggatatagccaaggccaggccctaggccccgcatcatcccattttggaaatccctcaggaataaatggacaa

SEQ ID NO: 331578 - DNA, 701 bp, Cannabis indica
atcaaggaatggcttgacactcaattcgaaatgaaggatttgggtgaagctgcttatgttcttggtattcagattattagaaactggaagaacagatcccttactctctcttagacaacttacattagagagattctcaatgaaaaatgccaaaggggcacagattccctctagatttggtatccgtctatctaaggaatagtgtcccactgatccccaagaaatagaagacatgagaagggttccttatgcttcagcagttgggagtctaatgtatgcaatgttatgcactagacttgacattttctatgcagtaggaattgtgagtagatatcagacaaatccaggagaggaacattggactgcagttaagcatattctgaagtacttgaaaagtacaaggcaatacgtgttagtctacaagggtggtgctttgaatcttgtaggctataccgattcaaattttcaggcctatcttgatgatagaaaatctacatctaggatggtgtttaaacatgggggtggagcagttttggagaagtgctcaaaccgcaacgtcaaactctacaatagaggtcgagtacatagctgctgcagaggctgctaaggaacttgtctggcttagaaagttcttcacaggacttggtgttgttcctggaatggaaaaccactggtttaatttgtgataacactggagccat

SEQ ID NO: 331579 - DNA, 684 bp, Cannabis indica
gatttcgaagcttgagagactttaattttggtcttttggggaagcaatattgacgtttgttggttaatgctgattctttggttagtaggctttataaggctaaatattatgctactggtaatctgttttctgctgtattgggagacaatcctagtttcatttggcgtagtattcttgaagcaaaagatcttatccacgcctgtgctcaaagaacaattgctaatgggaaaaatgtatccattcttaatgctccttggcttccacataattcaaacaacaacgttatctcactacaccctgctcttgtgaataagtcggtcagctgcctctttcaagtcggtactcgctcgtgggatgaggatgttgtgaaggacctgcttgttgcctatgatcatgaccttattttatccattcagcttagttattcggccgctaatgatggttggagtttgtgacttgagacttgtgggaattattcggttaaaagtgcatataaattcttgcaagtatctaagggtgcttggtgccgagatgccaatactgatttttggaagtgactttggtcattaaaaattcctcttaacatcagtaattttttgtggcgagctgcttcgggtgtgcttccaacttgttttcaactccacaagtgaaacatcctaactagcataggcgtattacgtgatt

SEQ ID NO: 331580 - DNA, 662 bp, Cannabis indica
cttcaatctttgctcaattttccaccaaatgttaccaaattttccagagtacctatccaatgtattcgcaacataaaccaaccagtatttcacagaaaaacacaccaaatcaatttgtgccattaaagctcaaagcttgagtttcaaaactcaagcttgcttagaactaaacaccaagcatcaaaaccagctgctaggaacttaaatcaactcaaactaaccctagaattcgaaccctaagcatttcaaaacccaaccgccactaaacctagaaattcataatgaaactaaactaaaactttgaagaacttaaggagaaaagaaactagggttaccttgtcttgacttctcttgaatcccttgctgaaaactccaaaattcagcaacaatctcccttggccttgctggtttcgaagagagaaaggagaaaggagagagagttcttcttatttttcgtttttcattcttaaatttctttttttacaaaatgagataaatctaaattggggaaaactcaattttcccttggttgaatataagtggccacgtgccacacctctaggcagccacccaaccccaaacaaaattactaaaatacccttgaggttaaaacctaagcatttctaaacctaggggtaaaatggtcaatttccataaccccg

SEQ ID NO: 331581 - DNA, 570 bp, Cannabis indica
tcgagactggggtgcagttctaggtcccgaccctggttctatatccctagtctgtttccatgtttgggtctgtgttcaggttcgggttcaggtcccgagtctaggtttgggttgggatctaggtccgcctcccaattcgagtctaggtttgatttggagcccaggtcctagtccggttacagttctagatctaggtctatggtgtacattgtcctacatagaataaatggtagagaagtgagccatatataagaacatgggctactccactcattgccaattagttttgagatggaaccccatgattctcaacatggtgttagagccatatcccttgtgggcaagtgatcatatccgatctgcacctatacagataatgaccatgtccactgtgagtcgcttcaagattggtgagcaaagaaatagccaccatcttcagggggaatactgtggacattctcccacatatataagaacatgggatactccactcattgccagttggttttgagatggaatcccatgattctcaacaacgtcctatttcagttatgactccaagtccaagtc

SEQ ID NO: 331582 - DNA, 1711 bp, Cannabis indica
gaattttttctaaactgcacggtacggtgcgatttgtggttttgaatttttagtatgtggtttaaacagcactgtaccgtatattataaaaatactaatttttatatttatttaggtccaatatgtgaaggcccaacctaaagccactaattattgtattgttgaaacttaaattttttttcatatttattttcaagctttatggtatttttgacaagtattgcttaagttttgttgtatttgtgatagtttaattatttggtgatagtccaaaccgtagaaatcgcaccgcaccacactattttttacagtgcaatttttgtagttttttagtttcacggtgcaggtgcagcttgaaaaattaaaaaagccgcatgtgcaggttgctttaaaaaaaatagtcaaaaactacactacccgcaccgcgaacagccctaagaacggttatatttttaatactattgaaaggtaagttttttttttttggaaagtttacaataatatacattttttttatctaatttacgataataatgtcactactattagtgacgtgctacgtcaatcaaatctaatgtttttttattttttttattttcttgtgtttttaaaagtaactttttcgttactaatatgcattaataaaaaataattaattacatttatataaaacaaattatttttattgtctatataatttgtagaaatattttaattaatctctaaaccttatttttattatatcttagttatttttaagttatattatggtagattataattaaaatacatttaggtaattttaaaaattattttcgaaactaatgactttccaagtggtaggaagaaggtgattggatgcatttgatgattcggggtttggtgctagggtttaactttgctgatatggagaagagttatgcctgtttggctcacacagcacacttccttcatcttcatcatcatcgtttaaggctaaaatccatggactaattagtctaagtaaatttcagataccctacatattaatcaattcaaatacaaaggatggccgatttcaatccaactcatcatcatgcgaccttaccagctttgtctttctttaattccttcccaataattaatttattgtagaagaagaaaaaaaaagcaaatgttccctatagattttgattttcgtaatccaatggagttataacgaggattttcacagctggaaagtctagctctaccatagagcaacttgattttgagttgaggtatttgtataccgttttgcaagtacactcttgagatagtatggaagagaaaaatgttggggtttataccctgaaaagcctataaagatatttctgattattaataaagagttgaattttttgatatatgcttgaatgttaaattattaatatttattattaaataatagaaaataccttattcatatatgaggttgtggcttgtagctgtacagagaactaaaactacttagctatgaataaaatagtcaacaacatattaagttataaaatctttaatcaatggttgctagtacggttcattgatgcccgttctacggtgcaagtaatcttagttcaaattactcatttagtgagacatctaagtgaaagtgttgtatataattgagattatatacgacaaggactgtgacagtcagtagtcccgtgatccgtaaggggaaacaccgggt

SEQ ID NO: 331583 - DNA, 566 bp, Cannabis indica
aatttgaaaaaaattaaaaaattacgttaacatgaaaaaaaaaattcagttttactcttagaatttttttttatttacaaaaatatatttcgtaaaattaataaattattttttgttgttttataatttatttatagttgtaaaataattttcatgaagttattttttgttattttataatttatttatagttgtcgtgatgttgatttctcgttgttttttagttatttttttactttatactgagaaaagtgtatttttataattttaaaattgtacaaacatatttttataaataaaaactttaaatcgtaaaattataaataaaacataaaaaaaatatttttgaaagtttctctaaaatattatagggatttttttcatttatttatagttaaattatgttcaatgggaacattttccactatgacttctccctgtgttactttgtctcgaatgaaatggtatttaatctcaacatacttggttttgtcatgcaatataggattcttgcaaagatgaacacaaatctgattatcagagtatattataggcacactactcag

SEQ ID NO: 331584 - DNA, 856 bp, Cannabis indica
agattggctggccaagaagtaagcaatcatcggcagttagtctcggtgagtggcttagcaacccggttgagcaggcaaatggattggctgtgaaagtcctaattactacaaattttaattgattaatctcatcagattattcctaagatctaaacagaaagtaaatcaaagaacacagaatttacaagcttcctctgcattggaaacgcattccaaccgagtagtgcttgggttcccttgaaccgggtaaagtaacatccactataaaatcaattcaattacaaattccagttctgattcttcaaatcaaacaatgtaatctaaattgacttttatacaatgttacctaacacttgaagacactcaagttttgagatctaaactcatttagatctctgtacacaagaacacctagcattcacacagctgaaccaccttcagcacagtaatttgaactcccttcagatcaagcagattcaatctccatcttcaacctcaggaagaccacatgaatttccatctgcaaaaacacgtaacaaacaaaggaatatgttgccctagcagagcaagaatcaagaagatgattataatcgaagagagttagttagcaaaacagacacaacagaatatatatcctgaagataatgaaaattgactaactaaccaaccagctaagtacagctggcacattctaataaacacgcagaaagctgacatggcactaaaatagatttagtgagatcagatgcaactaaccacaaaaagatgttacaaaacaaatactgatgcagaaaaactaaacaaatactgcttcgttatcatccgcagttattgtattaatttgttgtctatttca

SEQ ID NO: 331585 - DNA, 883 bp, Cannabis indica
atatggttagaatatttaaaaaataataataataagtttgaaaaatttatggtttgaaaccctaaaatatctattcaaactaaactaaccaatttttcaaatcttcatgttatttttgccaaaatataattttaataaaaaaaaatgtctaataagataaaatgttaaacctaacatattcctaatcttataattttaattaataaaatatattttgaaaataacaaatttgaaaaagatatgatatggttagcaaattttgaaattagtacaagattatttttaaaagataatattttaatatcaaagtaagatcatttaaaatttaataaaaaataatatctgatcttataattaaaataaataaaataatctaaaatttcaaaattaaccataaggctcctttgtgagaaatcaaattttcaaaattcaaagcctactaatatcagaaactaattttaattaattaaaaaattaataaaaattaattttattctgacaattagatttttaattgaaaattcagattctacacaaaattctaccaaaaattggcttttgtttcaatgaaaaacgatttttgaatcaaaagttatgacgaaaacaagtttgaggcacaggggtatgcattgcatacccctgcgcgcgcggaatggggtgtctggccgagcaaagaggctgcaagcagcctatttgaccgagggacatgggcgggacaggggcatgcttcggacacgccatttgtctgaagcgattttgtccgagcgagcctcacttgtgcccatgcgcgtgcgcgtgtgtgcattcaaaaccccatgctttcgttcaacttcacaaaataactatttcataaaaaatccaaattaggttctgtaaaagccta

SEQ ID NO: 331586 - DNA, 851 bp, Cannabis indica
agagagagagagatgagaccatgacaaatagagagagacagacagacaagggatgcgacaaatgccaaaagttctcacatatacctcgtgtaccaccaacccatttgtgatatgggaaattgacctgattggggctttacccacaggacgaggtggagcaaagtatgcagttgtggcaatcgacttcttcacaaaatgaacagaagtcgaacctctggtttccaacacatgcaagaaggttcttgattttgtcatcaagaacatcatatgtaggtttggcattccaatcaagatagtatatgataatggaactcagtttgatggaaaactattcactgattctgtgaaaggaataaaataattaagagcttctcgctcgtattgaggcctcaagtaaatgggcaagtagaagctattaataaaaccttgaaggatactattaagaagaagttagatgctgccaaaggaagatgggttgtcgagctaccacaagtgctctgggcccacaaactacagaaaaacaacaacaggacacactccgttttcattagcatttggctcagaagtaatgttacctatagaggttaacattgcgacccataagcgtgaactctacaatcaagagcaaaaccaaaaacttctaaatatgtcttcggatcttcttgaagaaaaatacaatgagtcacaaataactaatgttacttatcaataccgtatcacgaggtactttgtaacaccctaactaacttaggcgtattacgtgatttttaaacatgctgtgcagctcgttgctaaccaacgaggtttatggaaaacgcgattaattaaaatttttgctttttaattaaact

SEQ ID NO: 331587 - DNA, 752 bp, Cannabis indica
ttaaaaattctcctcgaattattgagattgttaaatttaaagacttttgtctaattttaattagtaaaaaaattctaacatggatgaacgttcaaggggcatgatttagtacatatcaaaatttgagggacatgatttggtagatatcaaagtctggagagcatggtttagtacataaacaatcactgaaacagtaaaaattgaatgaaattagacaaaagtccttaaatttaacaatctcaatagttcaggaaaaatttttaacggccaaaaaagtttagaaggcacaatttactacattttaaagtttagggaaaaaataactaattagcaaaaaatcaaataataagaaatgatactttgtaaagttaatatttttattaaatacattgctattaaaccttatgcttaacaaaatattgatgcggcaatttttagtaatttttcatactatttatttaatttaaatgtaaggttaaataataaattgcttaattttacaacacgaattattaataacaatcaacaacaaatcatgttcacattaaccaagatgaaatatttaattttaaagcattaatataataatagatgtgcctccaattttgaccttgatctccaatgaccatattattaattacatatttctttgatctatggagaaaagagagtttgggtgtaataaacacttacccatccatgccattcttctacaccataactacactcattccttcttaatcaccaagtaa

SEQ ID NO: 331588 - DNA, 2455 bp, Cannabis indica
taaattaattaaaaaaactaaaaaaaaaaaaaatagcagtggctacagtgcacggcatatatgccgtgcactgtagatatatcctcattttgcagtgcatgatggtgcctccttggagcattaattactccatttttgaatttttgctgcctccttggaggtgctctaagcataatcctgtattattgggaatctaagaggagattttggtgataaaggttatgaatgctttttttcgattttgtaaattttttagtgcattcccagcaacgtatttattttatcattcaaaatgtatcactaaagcatcagtttttctatttaacactaatttgtatagtgtgtatacgaaattttatacataagaattaacctctgtaattctagattcaagattacacttaaacaaacaaaaattaaatcaaaacaaacaaatcaagaacaaaaaaccaacaaacacataaatcaaaaaaatataacacagatgaatctaaatggcagtcagacacaataacacagagatttatactcgttccgatcctaagttcaatgtgaacttggtcatactccagtttgaaagctttaccaccaatctttattgataatgagaacaagagatatcaatctcaggagctacaaggaaataatcacagtaagtcatccatagtgtaattcctcaacactcattaactcactaacccgagccaacataatcaacaatgttgctcaatacaatttccaatcccagccctctctttttcagatatctctctccatttctcactctaacaactctgtctttctgtattgtgtctctctcttgtgtttgactttactccttcttcttacccctttttttcttgttgtgaaatgagaggagtagttctctttatatagcccaagggaccaatatgcaagttgtcctatttaatagttaggttagttaaagactaactaactaactgaaaagttgttgggggtttaaggaataataccacaaattccaccttatgtcttcaagccccaacaagctaagcatatctgtccaatgaaggtggtaatactttcatgtgtagctacttatcaactaaggttgagtaagtccaagcaatgcttgaacttactaacatgtaacaccttagtgccaatatcagcagggttctcttctgacttcactttctccaactcgattacttcttcttctatcttctcccttatccaaaacaaccgaatatcaatttgttttgtcttctcgtgttacactggattcttgcacaaatgaatcgaggattggctgtcaaaatatacccttgcctttcctactagaagcttcaactccttcaaattccttgtagccatattgcttctttgaatgcctctgtggtcgccatgaattctgcctctatagctgaaagtgctactacggattggagttgtgaattccaactaatacaatctccattagtttgaaacacataagatgtagtagaccttctagtatccttgcttgatgcataatcagcatcaacatatcctttcaaagttactttctctaaaactctcttgtaagtcaatccaatatctgatgtccctctcaaatatctcaacaaccatttgagtgccctccaatggtttatcccaagatttgacatgaacctactcaatatgcttaaatcatgagcaatgtcaggtcttgtgctaaccatgacatacatgagacaccccaaagccattgcatatggaatttcttccatatcttctttctcttctgctgtcatagggctttcttccttggttaatacaaaccgtcctccaagaggtactgaagtgctcttagaatcttgcatcttgaactttgttaagatcttctcaatgtaattttttgcttcaaatgcatgactccatcactcttggatctatgaacttctaaaccaagtatcttctttacttgtcccaattctttcatatcaaattttgccttgagtttatctttaattccttttattactgccttgtctttacccattattagcatatcatctacatagagtagaagatacacaattgttgactcttctaggtgcttacagttatcaaacttggaccttgtgaaaccaatctcctgaacatatgtcaaatcgtttgttccattgttgtggtgattgcttaaggccgtataaggacttttccaacttacaaaccatctcctttccatcttgttccacctgaaatccaagtggttgctccatgtatatctcttcttctagataaccatttagacatgaagttttaacatcaagctgctccacttctaaaccttgctgagttgccattgacaacattagtctaatggtcttatacttcactacgggtgagaacacctcggtgtaatctatccctttcacctgagtgaaacctttggcaactaatcttgccttaaatcttactggctcat

SEQ ID NO: 331589 - DNA, 820 bp, Cannabis indica
  modified_base (748)..(748): a, c, t, g, unknown or other
  modified_base (750)..(750): a, c, t, g, unknown or other
  modified_base (752)..(752): a, c, t, g, unknown or other
  modified_base (755)..(755): a, c, t, g, unknown or other
  modified_base (758)..(758): a, c, t, g, unknown or other
  modified_base (760)..(760): a, c, t, g, unknown or other
  modified_base (762)..(762): a, c, t, g, unknown or other
  modified_base (767)..(767): a, c, t, g, unknown or other
  modified_base (769)..(769): a, c, t, g, unknown or other
  modified_base (771)..(771): a, c, t, g, unknown or other
  modified_base (773)..(773): a, c, t, g, unknown or other
  modified_base (775)..(775): a, c, t, g, unknown or other
ttcttctcgacagaaccccctaaccctccttcttcttattcttcttcttccattttaaaattaggacaaagatagactcatccaataccagcttaacttacgaaaaattctaattcaaatattggaggaaaaacatgttttttcaaagtatcattcaacaccagcttaacttaacaaaaattataatataaacattgggggcaaaaacatgttttttcaaaatatgatcaacaacaatgaaattcactatcaaaggtgcacatcaccaactaatgtaaatgaaaaaaaaaaacaaaaagcagttaccaatcgattgaggatgatacaatgtcccagttatccaacgcaagacccgtgacctgcaactgatggcccttgagagtgtggaccttctccccagttctcaagtcccaaactaggaccagcatgtccatgtctccagacacaatcgcaccatacgagaattcttcagtatcgggcaaaatccattgcaatggacccatgaagcttgtatggtcgagaagagttttttatgccaagaatcgtctctcgtcggaggggtccaacgagcagaacctcacggttcgatcccgagatgaagtggcaatacatgcattgccgcaaacgcaaattcttcgaacctaaaaacaaattctcaccaatcaagtaacttaacaagaaagaagaagaagaagaatggcagaagaagggttaaggggggttctgtcgacaagaaagagaaagaganananaanaanananaaaanananananatatatatatatatatatatatatatatatatatatatatatata

SEQ ID NO: 331590 - DNA, 568 bp, Cannabis indica
aagaaggaagggaacagacgagcagaatactacaacgatcgttcagcctggagccaatactcaaatccccgctcagaaagacgctgacgtaatccaagtcgaccagaatgccgagcaggtcagcccagccgtacaggcccagcttgacgaattgaaaaatatgtttcatggcatggctggacagcgtaacaatgatcttgagttagatcgagctcgcggaactcccgtctcaccagagatcaatctcctgccactgcctcacaagttcaaaatgccaacgtggaagatgtatactaggagaagatcctctttcccatctcaagtactttgagatgcaaatggatttacaaggagtacggggggatgtatgccacagaatcttccccgccactctgtcggaagctgcacagcaatggtatttcaagttggctcctggaaagcttagttcatggaaaaccttttcttcagaattccatgcgaaattctcttcctcgcgtcagctccgattgcatttgggagatttggtcgaagtaaagcaacgactaggcgagccactccgggcatacat

SEQ ID NO: 331591 - DNA, 913 bp, Cannabis indica
aagagaaagtaaaatgcaaggtgaccgcccgcacaagactcagaagtccattatcacctgacatcgatcttatctcagacatgataactttctctttttctggaaaggggggagatggtcgaacaggtgaaatgggctcccttatgcaaattgcatgttcaacaggcctaggcgaggccggtagtttcttcttcctcttcagtggagtctcctgctcgtcctcgacctcatccttaggatttgaagactcctaagcatactgtttggccctggcacctcctttcaacttagcctcgcacttatgttgaataagctcatcctccttaggagcttgttcaggccggccagcaccagatttcctcttcttctccatcacagacttaggagaaaagtccgtaggcgcgcctccgtaatctttgacggaggacttacccacctggcgccctaagcaccctacctcctatgaggaaccgccgcagcaagctcctcactgacgtagtcaacgccctcgaccaagacatctttgttagcatcgactggctccccaacctcattgtactcctcgaaatttgggggttcaatctcttcctctccctccgccttggaaggactgccgggacacccatcgtcaatctcctgaatctcctggacctcagcgtccccctcacgattgtcctctatcgggacggtcgaatcctattcagcgctgggcagagtggcaagctgagccacttgaggatcagtagcgtcaaccagacgcgtggttttctttgtacgagccatcatcctatggctgggtataagagcagaagagtatccttcactggaaggaggactagaacgaagacgagggtgattgtgcagaagttgaagcaaatactagtcaatctgatgttcgagttcccaagactca

SEQ ID NO: 331592 - DNA, 920 bp, Cannabis indica
ctttgaatcgttgtcagttcactatcttatcaagtaagaaaattaagtagtttttatgtgttaactgcataatttaaattatttgtgtattgaattattattgcgatgtattattatgaatgtgtatatagtgctgagaatgtgtggtatggacacaatataagttatgaatcgatataaattatggttggtacgatttgtatgttgtatgttgtgtgttgtgtgttgtatgctaacgtctcagttacaaatgaggggccatggcggggtatgatatggggtaaggtcgttgaatttagagatattctaccctgcatttgtctgatttgtgtacgacattgttacggtaaggtatgatacgacgacagtgctgttgaatgtagagataccttattccataataatggtagggctaagtgtgcccaggttattatagggccaggttaggcccaggttgtgtatgcagtggctatgataagccacattatggtaaagatatgatatgattaaaataattattatatgttattattgtgattgcgctataagcataatgttagggttgtgatccctacatatatgtaatagtttcatttagcacagatgtctaagatataactttctatatcaagaattatttaagttatgttatgggctaaggtgtataatatcgctaaaactggataagttaatactgtaaggaatcgtattattgtgaattttaaggtatgtatggtgtattaaatgctattgtatgttaagcatttccttactgagcttttagctcaccccttacttttcccctacaggtactagacaggaaagtacgtatagtgagcagggtgagttctggtatgtatactgtgagcggctacggacgagcagacgatctaaaacgctggtggtgccttagttttatt

SEQ ID NO: 331593 - DNA, 607 bp, Cannabis indica
  modified_base (54)..(54): a, c, t, g, unknown or other
aaagcatttgatttggtcagctaaaactttgctcgagatgtcagacaaggctanacctaatagatctccatatgtttatgttaggattttttcttaagtatatctattaacacgtatgttgtagcaccattcattgtcttcccagtgaaagcctgcaaattatataataattaaatcaaatttttcttaattactaataagtagagaaatactaaaggcaccgtgtgttaatattgctatatgtccaattaagtatcatatcctatataatttaatataataatttttaatttaaaaaaatctcaaacgatatgtctgaaaataatagacactactgctgtctaatagcaatgctcaataattagtactatatatgtagtagtacaaaacagctacacaaatgaagaaatacatatagtgatattttggtggtgtgaaataattacgtgtgttttttcctcatcatgccatattaatattttgaaaaaattatagtgtttaacactataaaagttcgtttggaacgccgtattaagttgtattgtattgtattatattgaattatattttatgcaataattttatgtaaaactataagtggtattaa

SEQ ID NO: 331594 - DNA, 542 bp, Cannabis indica
tatttttatttttaataataaattattttatttttaaaatataataaaaagtcacccataaatttctcataaaccaagaattttgttatataggcacactttatataaaatagatatattgaaagacaatccaccatatttgatggtacttacttagtttttcgaatgtatgagaattggacgagaatgaagtcacaaaaacattccagcaattcataggctgcataaactgtttcatgtttgatcaactgctcaacctaattaagagaaagttgttcaaatcattagcaaatgtttagagatatttagcaaatgttttcaatgagatcaaaccaatgaatatttaaagacataatttgtttaatttcattttaatataacattaacaaaattagagtgtaaattctttgtttatattttgtaactttaacgcttttatatataagaaaaggtgagaaataatacatacccgacgaataaaggcagtatttttttgatgaccaatcttaataagctgatagctaagtcactacgtgattgtc

SEQ ID NO: 331595 - DNA, 5565 bp, Cannabis indica
aaatagagaaagggtggttttcaaatattacgcttcccacattagttaatccctcaagtgaaagaacaaaaaaggttcatgaaggtttaatttctgaaccacttcccatggtatactttaggttcatttaaataatgaaaatcagagcctccgttcgtaaaatttgtgaaaaatgtcgactgatccgtaggcgaggacgaattatagtaatttgttccaacccaagacataaacaaagacaaggataatttttagaaaaaagaggagaggggattctagaaatcgaaaggccctactgttcaaataatagaaataaataataaattaaaggctctgttttgacatgaaacggatatatctctatatctctgacttagcttagatttatgagatgatataattatggcaaaagctataccaagaagtggttcacgtaagaatagacatacgggttcacgtaaaaatgcacgtagaataccaaagggagttattcatgttcaagcaagtttcaacaatactattgtaatgttaccgatgtacgggggcgggtaatttcttggtcctccgccggtacttgtggattcaagggtacaagaagagggacaccatttgccgctcaaaccgcagcaggaaatgctattcggacagtagtagatcaaggtatgcaacaagcagaagtcatgataaaaggcccgggtctcggaagagatgcggcattaagggctattcgtagaagtggtatactattaagtttcatacgagatgtaacccctatgccacataatggctgtaggccccctaaaaaaaggcgtgtgtaaaaataaacattgaagatatttcaaaagaaataaataattcaatgatttgatcaaataatatcactatgggtcaagagaaagtaatagtatctactcggccactacagtggaaatgtgttgaatcaagagcagacagtaagcgtctttattatggacgctttattctggctccacttatgagaggccaagccgatacaataggcattgtaatgcgaagagctttgcttggagaaatagaaggaacatgtatcacacgcgcaaaatccgataaaataccccatgaatattctaacctagtaggtattcaagaatccgtacatgaaattttaatgaatttgaaagaaattgtattgagaagtaatctgtatggaacgcgcgaggcatcaatttgtgttaagggtcctggatatgtaactgctcaagatatcatcttaccatcttcggtggaaattgttgataatacacagcatatagctaacctaacagaaccaattaatttgtgtattgaattacaaattgagaggaatcgtggatatcgtataaaaacgccaaataactttcaaaacggaagttatcctatagatgctatattcatgcctgttcgaaatgcgaatcatagtattcattcttatgttaatggaaatgaaaaacaagaaatactttttctcgaaatatggacaaatggaagtttaactcctaaagaagcacttcatgaggcctccagaaatttgattgatttattgattccctttttacatgcagaagaagaaaacttccatttagaaaacaatcaacacaaaggcactttacccctttttgattttcatggtagagtggctaaaccaaggaaaacgaaaaaagaaatagcattgaaatatatttttattgaccaatcagaattgccccccagggtctataattgtctcaaaaggtccaatatccatacattattagaccttttgaataacagtcaagaagaccttctgaaaattaaagattttcgcatagaagatataaaacatatattggacattctagaaataaaaaagcatttcgcataaattttaatgagttttgaatctttaacatcagccatatactcggaatatatcaaaaatagaattgactaaccgtatctagggaaaattcactttgaagcgactattccctagatacacacgtcgtaatttatttattttatttaataaaaaataaataaaaatggaatcgatttaaaaaagacctaaagttagggatttatcaataggtaatgttgctccaatacccaaccaaagggctactgccgtaccaatcaaaaagacggttgtcgctactggacgacgaaatgggttttggaatttattaacattctccaaaaagggtactgttaataatcccgcaggtactgaaaccattaaaagaacacccaataatttatttggtactgtacgaagtatttgaaatacgggaaaaaaataccattcaggcaatatctccaaaggagttgcaaatggatccgcaggttcgccaatcattgatggttctagaaccgctaaacctacgttacatgcaatagtacctaaaattactaccggaaaaatatataaaagatcattgggccatgcaggttctccataataattatgacccatccctttagccaatttagctcttaatacaggatcgttcaagtcaggtttttttgttattaggataggtgaattattctcgatccatcccccgaaagaaccggacatgataatttttcatcatccggctcgagcacgaatcaaatgaaccaaatatacccatataaaaaaatcgatatgctagccatatccacacatatatgaatgattctatataagtaaaaatttaccagtttagtttccttttcggagtttcaacaatcagacattgcccaaaatccagttcttacagataaatgctcaatacccaagtaggcttgcaaggttgattataatcaagtgctttatgggtcgtctcagacctttcaattgggctttatccccccaaatagcgagactttttgtatacaaagaatttacttgttactaattgaatttagcctctgttcttctttagatcccttgtttcactccgatagtataataaatcaagtcaatgcataggaaatgaatccatttacatactattaagtaagtgaaagatataaaacataatctaatcaaaattatgccacatcacttattctttcgactggatcttacggagcctgttcatacatgacatgatcgagtctgatcatagaaaaaaacaattctcttccaacgaaccaccttatcctctatatcgagctttcgcggtggttggaacaaagacacatttttattttgaattgaaatgtggcagataaggacatatattctgcacaaaccaatcaatagttcaagtcacacactcccataatccattttatctttagagaattcacttcaactatgagtgtcaaataaataattactttatttatatatttggagttgaagagaaatatccaaatacatgtcttattcttttcaataatccatatttatagcaatgaaatactgttgggcctaccccatgtgataaccaattgattacaaatagtataatatagcccctttataaaggaccggaaataccttgcttacgtatcattaggaagtgcattaacataaatacggcagtaagaagaggtaatacaaaagtgtgtaaactataaaaacgagttaaagtggattgtcccacactagcacttccgcgcaataactctaccaagggcgatcctattacaggaatagcgtccggtacacctgttacaatttttactgcccaataacctatttggtcccaaggtaaggaataaccagttacaccaaaagatgcggtcaatacacccaaaaccacacctgtaacccaagtcaattcacgaggtcttttaaagccacctgtgagatacacacgaaatacgtggaggatcatcattagtaccatcatacttgccgaccatcgatgaactgatcggattaaccaaccaaagttaacttcagtcattatatattgaacagaagtaaaagcctccgcaacggtcgggcgataataaaaagtcatagcaaaccccgtagctacttgtactaaaaaacaagtaagcgtaattcctcctagacaataaaatatgttgacatgagggggaacatatttactagttatatcatccgcaattgcctgaatctcaagacgttcttcgaaccaatcatatattttattgagataggtaagccaaaaaactccccctctaagaaccgtatatgaaaatttcatctcgtacggctcaaacagaaagaccaaaatacaagttctatcggatatgccttcgaaacttcctaattgtattatttactcttttctaaagaaaagataaagaaagaatacaaaaactgtttattatggttataatgccaaaatctcaagtcggctcatttatctctatgttgatcaggcctcttgaatcttctatttccctattttatttatttatttgtgtgtaatgagactttattagtgttttctttattattgataggaattctcttgttaagaccctatgaatcaattaaaacctcagattcatactaaaaccacgatgagtcaataaaaccttttcaaactaagtccaaaaattccttgagtaagaatcgttggatcaccacttattcaatgaatagacataatgactaaaaatcaaaagaaacctttgtactttgatcaaaataagcaaaaaagggagtccggtcacgaggtctgaatattaagttaagaatgaatcatagttgtaatactttagtaagatatttcatatagtccgtgcttcagatactatcatagaatgacaatatccgacgaagtaaaaccatctctagcaagatgacagacccgctctctgtactattcataggatcaattctaacaagtcacacactcatattccggaaatacagaaacaaagaaatttcacgatcgaactaccaaaatagaatgggataaaaatcagagaactaaaagcttcactttgtagtgaaaagtgagttaatagtttttgtgaatctaattcattgaaattccgtctagtaaaatagaagaattataaatctccaaaataatagataggaataccgcaaataaagccattgcgatacccatcaaaggagtagttccccacccaggagctactttaccatattctgaattcaatggtttcaataaactccctgcacctgttcgtcttgaaccagatctagaactaccctcaacagtttgtgtagccataaagcctattttctattcattgagatctgttgactttgtataccattccgttgtaaataaatgatcttagcatagatctattgtggtcttttaataataatggaaacagcaaccctagttgccatatttatatctggtttacttgtaagttttactgggtacgccttatatactgcttttgggcaaccctctcaacaactaagagatccattcgaggaacacggggactagttgaagtaatgagcctcccaatatcgggaggctcattactttcaatcgagataatgaaaaatcatttcattttttagttggaactttaggcggttctcgaaaaaagatggcgaaaaaaataattcctagagttgagactaaaaggaatgtataaaccaatgct

SEQ ID NO: 331596 - DNA, 692 bp, Cannabis indica
tttttttttctaataatttttttattttcaataacattgttatcacctttattgatatttgtgatattacaatggagcttcatccttttagagtgcccatctcaagaccaaatttgcttgaatttgaatagaatttgtagattattacttttattttaaataatggtgttattttatctttaatttattgaataaattgtaaacagcttaatatgtctttagatatttgaatttagaggagtgctaattataataatctcttagtcaattttcacacttgaaatcacatgttaaaatattttttcttatagcggtattcgttatgattacaatattatccctgttaatttttgaaaaattctaaatagtttatagtaccttttataatatttcaatttaccatgcatgttaaaaaacttcatacttatttttggtactgtaaattttgcccttgattttttccaaaatacgtggatctataagaaccaacacttacgaaaatcgactaagtcttaggtgaaaaaggagtatcttaggaaggtgtctcgcagaggagacataagaagtatgtttactctccgagaggccgaaggcatgctaagacagttctgggaggtacagagatctcttgaatagtcaccttgcatttaatgccgcagaagacgtattgaaatctccataaacgacatgac

SEQ ID NO: 331597 - DNA, 789 bp, Cannabis indica
tcatcaaatctcaagatgagaaagcttggaggatggttctatcaggttggtctcttccagttgagatagattcctcaggtaattctacaataaaatctgaactggaatggtctattgaagatgataaactttctgcctacaatagcaaagcgttgcatgctatatttaatggtgtaggtgaaggttatattaaacttatatcatcttgtgtttctgccaaggaattgggagatccttcaaactcagtttgaaggaacatctgatgttaagcgctctagatttattatgcttcaaactaaatttgatgagcttaggatgtcagacaatgaaaccctaactgaattctatgaaaaactatctgatattgctaatgaatattttgctcttggtgaaaaacttgatgattctgttcttgtgagaaaaattgttagagttcttccagagaggttcgatactaagcttttggcaatggaggaagctaaagactttagcacaatgaaggtagaagaattaatgggttccttgcgtacttttgaattaaatcaacaaattaaacaaaaggacaaacccaaatccattgctgataaaggtaaaagtatcgctttaaaagttgctgataatgaatgtgatgatgaaattgctttgttaacaaagaatttacagaaatataggaaaaagatgggtaataaaaagaataactcaaaattttcaaagggtaatactcctattaaaccatatgtttctaacaaaaagggaattcagtgcagggaatgtgaaggttttgggcat

SEQ ID NO: 331598 - DNA, 738 bp, Cannabis indica
tacgccatgtactgtcctgatatcttcgaaagataacgggccttttatgtgatttagcagtatccgcaaaaaatatctttcgccttctaatgggtttgctgttacaatacgtcctattactgtctttttttttcgtggagtccaccttctgttttgattgttccaaacatagtattcaggaatttgtctgtacagtaacatccttgcattttcatctactttatttaattcaaagaattctgttaacatagattttttgtaatgttccgaattagcaatgtttgacaggtcagaatttcctcggaatgtaaccgtatgctgattcttgagatgtaaatgcaagctatatactgctggggacatctcatttacaataaatccgtatattctccacattgcttcaggggcagcaatccatcgagctgtctggaactgatgtatttcatcaacttgttggttgtttgtttcggagaccaagttgaatgcaacacgatcatggcctttgtaaatgtatttatagagatactttaccgccttcactgtagagcaaatttctacattcatgtggcagtcaaatgtggcaaggagatatgggttgtagggaacaacccaacgattgtctaatgttgcccctctgacctttacggtcacaccattatttgaacgcctataaatagggaaacagtcatttccaacagacgtaaatggagcatacttttttggaaaattatttttgca

SEQ ID NO: 331599 - DNA, 1756 bp, Cannabis indica
tatgcatgtgtcaggctaagctaaaaaaagactatggcgaaaactagtcaatgatgaccttccatggattctcctatataagccgcagctaaagttgcaaaaataagagcttgaataccacttgtaaataatcccaggaacatgacaggtataggaaccactaaaggtactaaagaaacaagaacaacaactactaattcatcagctaatatatttccgaaaagtcgaaaactaagtgataagggttttgtgaaatcttctaagatgttaatgggtaaaaggattggagttggttgaatgtatttaccaaaataccccaatccttttttgctaaggcccgcatagaaatatgctactgacgtgagtaaagctaaagcaacggtagtatttatatcatttgtgggtgcggctaactcaccatgaggtaactctatgattttccaaggtaaaagagcccctgaccaattcgaaacaaaaataaataaaaacagagttccaataaatggaacccatgggccatattcttctccaatctgagttttgctcacgtctcgaatgaattcaagaacatattcaaaaaaattctgaccgtctgtaggaatagtttgtggattacgaacagctagaatggccgaacctaataagatagcaattacaacccaagaagtaataagtacttgggcatggacttgaaaacctcctatttgccaataaaaatgctggcctacttccacgccggatatatcgtataacacttttagtgtgttgatggaacataataaaaaattcatattaccctctgaaagaaatcgaactttaaaagaaattattttgattcacctagctctttttcgactcgcccacaggaattgtctattttgaatatcaactaatcacatcaaagcctcagttatttttatctcttttgtgcgattcaggatatagtaaccggttcaataaatctatattatatggagttcccaaaataatttccttatttccttatcttattattaatcaagaatttcgtatatagctagaacgaccctcacaaatcgcaaatactaatttgttaagaattaatcggattgaagctatagcgtcatcattcgctggaatcgaaatatctgctaaatccgggtcacaatttgtatcgattaaacaaatcgttggaattcccaaagtgatacattctcgaagagccgtatattcttcttgctgatcaacaattattacaatatcaggtaaccccgtcatatatttaatcccgcccaaatatgtttgcaaatgagatagttgtctcttcaacacagccgcatctcttttcggaagacggttgagtctgcccgtcttttgttccgttctcaagtctctgaacttatgaagcctcgtttctgtagtataccaattcgttaacataccaccaagccattttttattaacataatgacaccgagcctttattgctgccccggctactgaatcagctgctttatttttggtaccaacaattaagaattgttttcccctacttgctgcatcaaaaactaaatcacaagcttctgataaaaaccgagctgttctagtaagatttataatatgaatacctttacgctttgcagatatataaggtgccattctaggattccatttcttagtaccatgaccaaaatgtactcctgcttccatcatctcttccaaattgatgttccaatatcttcttgtcatttctccccacacttcttctctttttttt

SEQ ID NO: 331600 - DNA, 547 bp, Cannabis indica
tttgaaatttctttagttgtaatcatagctgaaacaaatccttctttcctataattttcaaaataagaaactagaccatttagctgatttatagcattgtcaatttctatattttgactttgtaaatttttactaattgaattgacagcaaataaaatatcaaaccaaatagtcatgcccaataaaaattcaaaattctctaattcaaaagttgctagacacttagcttcactctttactttaggatcgtcacttgattctgctagttcaagcaaagcatctcttatttttggagcttgaaatctaattgccttaacactttcaatacgactttcccaacgggtttgagacaatgatttcacagttaacgtagatatattatttttcagtattgtccatctcttaggtgaagaagagaataatgaatatatacgttgtaaaacaccaaaaaatgttacagctttaacacaagaattagcaacatcgcaaatcactaaattaagactatgacaaccacaaggtgtatataatgctctaggatttatct

SEQ ID NO: 331601 - DNA, 773 bp, Cannabis indica
gatattgaataaaatggattacattgaaatggaacccaacagctagacgctgccaaaggcagatgggttgacgagctatctcaggtgctttgggcccacagaattaccgagaagacagctacgggacacactcctttctcgctagcatttggctcggaagcaatgctgcctgttgaagtgaacatatcgactcacataagagagatttataatcaagtagaaaaccaggaacttttaaaattgtcctttgatcttcttgaggaaaaacgaactgtcgcaaatcaccaactccgcataccaacaccgagttacaagatacttcaacaagaaagtcaagaaaagactattcaatgttggagacttggtgctaagacgagtctttacaaatacaagagacgcatctactgaagtgttcaacccgaattgggagggtccatatgtcatcgaagcagtagttggagtcgaagtttataaattggctcgacttgatggctcgctaataaagaactactggaacgtagaacatttaggaccctactaccaataaataaatgatgtaactcgcattactggtgtaaactttaaacttcagttatgaataaagagaatcatttatattaagtaattacaaagtttccttctttaaaaattacttaaggggcatttatgtatgattaaccagaatttatctggaaatacattgtataatgcaaacccatcatttcaatttttttttttgtaaattcaaaggttctcgactaaacttctttgac

SEQ ID NO: 331602 - DNA, 1100 bp, Cannabis indica
tttttttatctatattaaagttacttgacgatgccaaaaataacttactttcttcgtgttattttcttctttttaatttcaaaataatttttgatttgagtttattttttcaactcttttttaactatttaaatgaaatttgaaataaaatcgttttaaatatatgtatttggatgtatttggagtgaaattgaattcttgctgaaacttctttataaactatatttcatatagaaagaaaaataaagtatagattacatagattacttaagtactaaccgaaccaatgattattcataattctataaatggaattaattacatacagctttcaaactaaaagaatgttatggtaaaacttcgtttaaaacgatgtggtagaaagcaacgtgcgacttgaaggacacgatccgctgtggattcttacatccaccatttcatttcctatatataggaattaaagtgctcttgactcgacatcatttgttctgttccactagaaccgggggttgtgatgtaaaccatatcatccatgatggagctcgagcagaacgtattgattcgtttctcggaggcaagaatctaaggttagtatcaattaataaattgggacaactttgtaagtaaattttcgatggagaaatcgaaagagtccaatttaagcaagtttcaaattcaaaagtaaattttttggtgaataggtaaaactctttcaataaaatcaaaagtgtattacacaggaatcaaccattcgtatgattctttgatagaaagaaatccctcaaaatggtatgttgctgctattttgaaatgattcaagatcaccgaagtaatgtctaaacccaacgattcaaggcaaagataaaggatcccagaacaaggaaataccgttttaattgtctcaacaactagaactcgatttaaatgaagaattaaaatagatttgaacggagacagacaaaaggaggattagagaccgctcaataaataaactgtttaaaggatttcctttgcgagttatacaacttgagttatgagagttcaaattacaaatacgaataatttttttgttggggaaagaataataaccaagtatttaa

SEQ ID NO: 331603 - DNA, 875 bp, Cannabis indica
aaaaaattataaaaataacactaatatgctaaaaaatacaaacacatattataaaatataaaaatattagtaagaagataattaacaaattaaacgggttcccgtcggggcggggagtgtcatccccatccctgccccgtttaatatttggggacaaaaaataatcctcgtccccctcccgttctccatttagacgagaaattccagctccattaggggacaaaaactaatccccgccccttccttgtccttctcgttctccatttagacgagaaatccccatccccttccctatcctgatcatgaacttaagaaaagttaaaactgttaactgaaatttacatgtttgatagctattctaaagtgattaagggtggaccatcctatggtcattaagataagaaagtgtttgttttaacaaatactacttttctaagaatttgactaaatctgaaaacagagttgtaaagtagaggagatattttcaattccaaagtgttctatcatcttattttatataagatggtcccaatgcctcagttttcttgacacaaccgatgagaacaataccattaatgttcttagacagaaagtcacggtaccttgtcgtagtgggagagttttaaggaacccaccctgttatgacttggaagacacttgtgataaaaatattctattgttagtttaaacaagtaatggataatcagaataaggaactaagaagcaaagccaagagaactatggttaaaaccattcatatagagtaaccaaaagttgtctattataaggactagaagagaaatttcgataataagtctattcaataaacttaacaaaatttcccgatcctagtatcataggtttgagattatcta

SEQ ID NO: 331604 - DNA, 678 bp, Cannabis indica
gattaagggttaaattctcttgcgatacttgacttaggaaaaatagagaactttacgctcattgtattcccaaaaggcttttctagcttaagttacaaataacatcgactcatggactaaggctcgttaacgccccaactatgtaaaaactgtttgtgttgttcttactttttctcttttaattatttatttctttagctctaattattcttaattagtttttcaaaaatctaagtaaatatttttgtgtgttttcattgagagctgaagaaagcagtgataccatctgaagattatgttcagtaatcatggtactcacccgtaacaaatctagttttcacttcattgatcctaatgccaagacaggagatgtagaagattagaatgagactacgggctgtcacaaaggttaagttggcaaagacacagatctggacgctcctttatttggagatgacgattcaaaaagaacaattctgatggcgatcttcaagagacctcaaaagatgatcctcaaggcacatcaaaggataataattaggataagattgttgaaggcagtgctggagacaaggacactcttgatgagtcaaatcccatggtcgtcatggccaaaaaattccaattgactaaaagcaggctatctcgtcaagaccagttcaacgagatactgctcga

SEQ ID NO: 331605 - DNA, 828 bp, Cannabis indica
tatttttgtgatctttagggtatttccatactattcatcgataaggttattcttagttttgattttaagtccccgataagtgttttagcgtatctctcatcggaatttcgaatgttgtgatttagggccctatgaaacgttgagctgcaattccactcaggctgaccgacacacctgaacacagaaatgaggtaagatagtgttatacctgaaattcgactggcacttcagaggatgacacgtgtcaaccttggagaatacaaatcaacaaatataatggcaattatattaaaagatactaaatggaataactcatttaatgcggagttaatatagcatatctataactcgctgactgtatagtcttaagcgcgacaaggatgtatgaactattaattcaggtattgacgagaaaccattttgcgtcagaagacatgattgaaagggtgacatcgataatgaataagagaggcatcaacctcactatgtgtaaaaaggtgttaacaagacatgttgactgttagggaacttagcgtataatacacattatactaactaagtataacagcttaaagaacctggataacgattagcgagacacccatctcgctataggaaggtatactcctttcactaatcagctccgaatctttcaatgagatccactgctttgtcacgtcagctctctcatagatagaagccgacattcaaatgatgttggctactgaagtacaccttgtcacctattgggttttgtgacataaataaaacccattttaatataatcagattacttattaataaagatcagaaataacattttatgtt

SEQ ID NO: 331606 - DNA, 845 bp, Cannabis indica
gcatagacctaatccaccttttggagatgactaattctctgccaggaagtatggttccaaacccggtatcataactatcatcggtctatccaatttactaaaagttctagatgtcacataagaatgaaataacacagagaagcaagagttcttgaccgaaagctgacctgttacagcacaggggctagcttctgcatcaacctgagttagagcaaacacccaagttggagcgagttgtgtcgcagtcttttgatcttctttcttaagttgtggaaaatctcttttatagtgccctagcaaaccacactagaagcaccccgtccctcttcactctcctagatgatgtttttaaaacaacttgggcatcctgggtaagtgtatcgagttttagagctaccttgacgattgcctcgtccttggttccctcagaacctcttatttgacttgagccactagatgtagtgggtgcctttcttttctagtcagtggtcgagccactacctcccttactaaagcctcaggtagaaggagtaggagccccaccaacaacctgagtacctcgaaactcttgagtgcactccactgcgccctcaactcgcagtgcttttctcaccatataagcataggtggtgttgtcatcagttgggatcatgaggtcatgtcttatctttgaattcaacctgtccaggtatttttctttcttactaaaatttgtttgcattattcctgaggccagtcttaccaatcgatcaaactgtgttttgtaatcagtaacactcatattttctttctgagtcagctgagtaaattcttttcttttctcacttctgactgcttcattatag

SEQ ID NO: 331607 - DNA, 1236 bp, Cannabis indica
cagttagttcaatcaagcatgtatccttgaagttccaaacatcagagggtgtgggagtggtgtggggcgactagatgctggctcgcgattgctatcgcatagagttgctacataggaaagttgatcatcagttaatggcaatcttggcagaagaaaataaaaagaaggacggggatcttgacccccggtttgaagatgaaagaaactttttaaaaccaattgaggaatgggaagaagatattctcgacccaggaaatcccacaaagtgtgtttatattgggaagaacttggaagagcagctaaaatagtagctaatatgtttcttaaaggcgaaccaggatcaatttgcctggagccatggggatatgatagggatcgaccctaacattatttgccatcatttaaatgttaatccaaactacccaacaaagaggcagaaaaggagacccttggattccgagagacaaggggcactaaaacaggaagtggacaagttattagtcaatgactttatacgtgagttattttatccctcgtggatagccaatcctgttctcgtcccaaagcctaacggaacttggagaacttgtattgatttttccgatctaaataaggtgtgcccaaaagattgttttcaagtggatgcaactgctgggcacaagcttatgtcatttatggatgcatattctggatataacaagataaaaatgcatgtcccaaatcaagatcatacaagcttcgtaaccaaattgggactctattgttataaagtcatgtcgtttggactaaagaatgctggggcaacatatcagcgatcggtgaacgaaatgttcgctaaccagatcgggcggaacatggtgatttatgtcgacgatatgttggtcaaatcaataaaaagtggggatcataacatgaagttaaacctgaaaaaatgttcctttggagtctccttaggaaattttttgggattcatagtcaacgcgaggggtatcgaagcgaatcccgagaaaatcaaggcattaatagacatgacatcaccgacaaagcctaaggaagtacaagccctaacaaggaggatggctgcacttaacagattcatttcgaagtcaattgataagggtgtgccgttcttcaatgtattgcgaggcaacaagaagttcgagttgacaaaagagtgtgaagaggcctttcagagcataaaaaggcatctagcggcaccttcagttttggcaaaac

SEQ ID NO: 331608 - DNA, 593 bp, Cannabis indica
agaatctgagtggaaggagacattattgccctgcaaccaatgtaaggttttttatcgttttagaaagttcatatttagagtgttaaacaacatacttgtgataaaacgatttgtttgtgatttagatagtttcatgttgttttgtgtgttatatgacgattaattaatgtttgtgaattttcatgaaacataattgaaattttgtttctgaaattatttctattggatagtatggaaaagattaagcaatttacttatttacagaactcaatttcaattttatttgaattagttatgattttttgaagtttcgaaaactatatgtagtacctgccccacgcgtgcggaaccgagtgatcctcggtcaggtgcgtgttcggacagcattttgtccgagcgacacgcccaggggtgtctgaaacccctgattcgcgcgcggaaatgctgctatctgctccttgggccgaggttcctctgtcgtgcaacttcccctgtgcgcacggacagtatgcattgtacagctcgcaaattttttcgttttcttcaatttttcatgctatttcatggaattaacttccgattttttgtgtatt

SEQ ID NO: 331609 - DNA, 1631 bp, Cannabis indica
tggtctgggtctaggtgtttggttcttaggtcccaggtccatgtatcgggtcctggtcccattacaagttcccaatcgcggtcccagtctgggttctagtcctactccaagttcaggtctcggtttttgtctcggtctgggtcccagtcctaatctttgttcgggtctgagtcccggtttcaagtcaaagttctggtatgagtccgggtctgggtctgggtctaggtttcagtcagtgtttgggtcgggtcatggtttgagtctgggtctgggttagggtttggattcttgtacgggtctggcatctggtccaggtcccgagtcacgggtcctgggtcgtaggtcctggcccaagtcttggtccagtttcgcgtctagagctagttttgggtctaggtccaattcctgttccaaggtccttattccggttcttgttctaatttccggtctcgggtccgagtctgggtttgggtccttgtctagaaatggttctaggatagggtcctggtacgattccaagatctagacaccgactacgggttgggtccaaccctaggtcgtgggtcaagatccgcatcaaaatcttgggtctcggtccgtgttcgggtctgggaccgagaccggggtcaggtcttgggtcccaatcccaatcctgggtcccgattctgattctaattttgagtttaagtccccaatctatgtctggtcctaggtctagctgtgagtctccaatctcagtccgagtcctgggttagggtcttggtccatgtccgtgtctgggttcaggttcacgtcccgagtcttgatccgagttttgatttggatccgcgtctcgatctgggtctgggtctaaggtcctagtctgattccagttcccgaactcaaacccaaactcagacttggacctaggtcttgggtacgggtctaggtctaggtctgggtcttggtccgagtctaggtatcggtcccaaatttaaactctgactacgggtcaggtccaagccccaggaccaaatctggatcacaatctcaagtcctagtttagttccacttcgggtcccaagtcccaggtcggtctatgtcctaggctagggtctgggtctagggttaggtcttgggtctcggtcccaattctaatgcccgtgtcttggtccatgccctaggttagggtttgagtcccggttcggtttccaatctcggtctaagtcaggatctgggtttgagtcctggtccaagtttgagtctgagtactgtcttcagatttgggtatgggttccgaggcgcgggtcatggtctgggtcctaggtcccgatctgggtccatgtttgggtttgggtcctagtcccagttttgatttcgattcagtgtctgagttcgagtttgggtccgggcctagttggggtctgagtcttggtttgagtgtaggtccgagtctgggtctgggttcgggtccaggtccgagttttggtcttaggtgcaggtcctggtctgggtctgggtcacggtctcactatggatctaggtcccgagtttcgatcccgacatggttctgggtgtcggttcgagtctaggtttgtatccggatccctatctaggtccgagtctgggtcttggattgggtcccaggtcta

SEQ ID NO: 331610 - DNA, 814 bp, Cannabis indica
tttttgccatttgactgaattcgaactttaacaccccgggaacctgaaataatgaaaatcaagtgtaaaactgctccaaaagacaccaatagacgagataatgctaactttaaagacccgaaatataggttaattataacctaacactgagtacacgactaaatttgatcgcttggcgaggttggcctcgggaattgtgccaatcaatttcagtaaaaaggggaaatatctggatggattaaatgcaaagattagacatgatctaatgattactacagacgacaaaaccacctatgctaaaatggtttataaggcactgcgagctgagggcgcagttggatgcatgacagagtctgttgggacttcagtggttggcgggactcctacccctcccgcatcaggttttagcaggggaggtagtggtttggcaatggatcagaaaaggaaatcatccactgcaaccggtggctcaggtcagaacaagaggttccgggggaaccagggtcgaggcagttgccacggtagttctgagacccgatacacttacccagagtgccccagttgtaaaaggtaccatctgggggagtgtacaggacaagggtgctttcagtgtggcatgtcagagcattacaagagggattaccctcaactcagaactgaagcaccaaaggctccagcgaaacccactccagcaagggtgttcgctattactcaagctgatgcagaagccagcccttcaatggtaacaggtcagctctcggtcaataacttttacttctctgtactgtttgactctggggccacacattcttat

SEQ ID NO: 331611 - DNA, 520 bp, Cannabis indica
aagttgtgtgattttctttagttccaaatatttgttaatttgtgaatgaaacaagtgatattttaacttagcatttacttatatggttttcatttttgtaaagtgcatgctttgatctctattttaaaattttacatatttaactccttacactcaaattttataaataaaattttattaatcatactatcatacatataatgtaattaagtaatttaatttaaattcaaataatttaaaataattcaattatattgataaaattttattatttaaattcaaaatatcaacattgttcacaattaggtttagctaggccaatacctaaaagctcattcgagagaaaaatagaatactagaaaagaatagtacaccatgatttttgacgaacataattatgagtctatttaggtggcggttgggtaatatttttttaatcattttttttatttataaaattagaaaaatgaaaatatttttaaaaacatgttctataaaattattttcactttttaatttt

SEQ ID NO: 331612 - DNA, 617 bp, Cannabis indica
atttttgtcataatcccttttgaaattatggatgcctttgattttggcagttttatggttccaatgcacatcaatagcattaatggattgtctttttcacttttcttctattttcatccattagatcttctatattatgatctgatggttgttaaagttagagtataatatggtaagaatccaactttctaccattttcatcttcttcaaaaaacttaagctttctgaaacttccactcgagcttcctgaatccatgcatgccatccttatctttgacattcttcctgcgaatttactcggacttgctcttggactcccggtgctcgaaaaactcatttggctggccgccacgtctccattcgcagaattttctagcactcggtttttttgacttcacacagtaagtacctcttcctcccttttttttattcgatttatgattgtcttacattttattacttcattcggtttaacaactagggttcatattttctgggtgatttttagggtttagacataggttaggtttatcatattccttaagcctatggtttgataaatttcatccagaaattgggattgtttttcttttttagaaatgtcccaatctggttta

SEQ ID NO: 331613 - DNA, 750 bp, Cannabis indica
aaaaccttctcttcggaattccatgcacaattctcttcctcacgccaactcccattgcatctgggatatttggtcgaagtaaaacagcgaccaggcgagccactccgggcatacatcagcagattcatgacggaagtgaccaaggtatcacgggtaaccgaccatggaaagttatccgcaataatatctctgaatatataattcttagatagccttagcttatagcgtttcggcgcataatctctgtttacagtttttcgatccgatcccttgcccagtgaacattcctcactatttatagggcaggaaacttgaggaggaagagttttctctctcgttacaaagcgcataaacagaaagatcgtgtgatcaatgctgaatgctaggatcgtgggattgaggctgaatacactgatagtggaattgtgtgtatgccacatccacgcaagttgatccctgagttatagggattgagctggtgactcacgaagtgcttggttgaattcgctaagtgttgctcattctgcacggctcgttgagtattccattatggacatgccagcgaggcatcctgctcggcatgttgatccgactaggtgctctaagtagatgccacgtgtcaccattcttgtgatgccacgtcagagtgccaattttgggataacaatctcaaacaaagagttttaaaggcatcaaaagtgtgagacttttctctcaaaaaaaatctacccaagtgtaacgagagaaatc

SEQ ID NO: 331614 - DNA, 828 bp, Cannabis indica
tataacaataatcataattttaacatttaaataaattaaagatatattggtttaattaataccaatgaatggaaatattgttttggacatggttgaccactttgataaggagacgatcaccctccctagctataattcgaggtccaggaaactgcccatttactgtgacaatgctcttagtgtggcaaagtcttgttacattttgtagtttgatctgcatgaaaacacattattattaattaatcaagtcattaaataattattcgtgatatgacaaatcaaattatagtaggagtgttatgtttatctctaccagtattatttattgagactttattatttttatactatagtattttttttgtatttttacggaattctatataaaaatccctataacaactaaatgagcaacttaaattacaaccataatctacataacaactcatctagaacctacgagaaactacacctgaacaatacaaaacgtaaatttttaaaaaaatatatttaaattaaaatagtatatgggataatttaatatttagataattttatattaatctaatttgttttttaaaaattttaaataatttataataccaaacataaagttaaaatatataatcaattacatgggcattacaaaaaacatacacgtttacattaaattatatgtgttattagatatctatcaccttctagcaggaccggccctgacttttagtgggcgaaagaaaaaaaaaatttttaggcctttatttagaaaaaaatatggtatttttcaaaatcagtaaaagaaatcgtataattttaaaaggtaaatat

SEQ ID NO: 331615 - DNA, 942 bp, Cannabis indica
ctcttagctattcttaaacatctcaactttcccaataaaattgttaaccttattcaccaatgtctttcttttatttctactcggtttagtgtccatgggaacatttctaatgaaatctttccctctcgtggtttgaggtaaggagatcccctttctccctatctatttcttttgtgctctgaaggacatgctgctgctcttcgcattcaggagcaacttgggagttttaatggtatttctatagccaaatctgcccctgcaatttcgcatttgctctttgctgatgatactcttctttttgctaaagctacttattcatcttgcaatgctcttcaagctgctcttcaactttacaaccaggccactggacagtgtgttaactttaataaatcatccatcttgttttccctaaataccccctctcatgtctcggatcatttttacaatacccttgggcttgctaatagaccttttatgtctaagcatcttggggttcctcaatgttttggtaggtctaagaaaagcagttttacctttattcttgatcgtgtcagttctaatttaaaggtttggagccataaatttttcttccaaagcagggaaagaagtccttttaaaggctattattcaggctataccctcctatgtcatgtcttgctataaacttcctacttctatttgtcacaaaattgagaaacttatggctcagttttggtggggttcttttgggaaaaactctaagactcattggaaatcctggtctacgctttgcaactcaaaattttttggggggttgggtttttgatccttaattcatcataaccaggctttgttggccaaacaagcttggagaatttttaccacacctgattcccttgcttctcaaattcttaaagctaggtattttcgacattcttcttttttagaagcaagtaaaggtca

SEQ ID NO: 331616 - DNA, 844 bp, Cannabis indica
tatacttatgattataaaattcctaagcattcctcttggcaacagattactattctgcccaaggatcaagcctgggatcgcttggctcaagcataataccttcaaagtactgccccctgggaatccggtgaaagagcatccctagataattaatgtggttggtctcctactgtacttagagctgagtgtagtacattagtcacgtttgaagactcccgccttaacttttatatttggaattctcttctcgtggaccgcattgctcataagtttgacagctggtatcctagattccacgtccaggttaactgtcacgagtgattttatggtatagccgagcaatacggtactatggaagatagtgcatgtcacatagataggagctgggatttagacccaatcgagccttttgacatattcaaaattacaggctgtagggattttagcaaatattatggtccttctaccccttcatcttgtgatagctcgccttctagttattttggtaaatcccttacgtggaaaattatattcctcccctttttagccggccattttaataattgtaacgccttttcttgttttgaaaatatgggttatgaagatatcatggacaaaaaagggaacaaaagggcaaccaaccctggggtctctacagctgccgaagtggttccccccaagagacaacggaaaaccactgcccataagaagaaatcactggcagagcccatcgattttgaggtttctcacaatgagatccaagagcaaattcctcttccagttgtttccgacggcaatgctcctcgtcccgaggcaaccccgctactgcttcttcgagtcaggc

SEQ ID NO: 331617 - DNA, 540 bp, Cannabis indica
gttatgtcttctgagtggtaaatgaaactgagtataaatgtttttaaaatttaattctctatgtatacatttactaagtatataggagtgtctcaaatgttaacatatataattaagtaattacataattattaattttggatgaaaacagtcatatatatgtttctcttcaaaaaaacattcatctgttaacaatatacagtttgccttaactaaaaaaatccctagttatctttttgttttccttttaaactttttttgggtttaattttaaatgtaaatttaaaatcaagataagtttcattaataaataataataattaaaaaaaaaaagtacttaaccactctcttgtcgacccaaaccaatcacttaaacaaatcttaccgtacgcaggcaaacttttgttattttctagattttatcaatttgtattggaaatttggatttgagtattattgtgatcgattgggcaactagtattaatggtttgtttttttttttttttttttattttttatttcctgaatacgcaaaatttg

SEQ ID NO: 331618 - DNA, 667 bp, Cannabis indica
ccaacttgattatgccttgacgcataacccttaatctcaatatgtaacacataattattagtgccactgcactatttgtctatttgctatagacctgcatgttacgctcacatgcctatttatgtctacgtggcgtagacctacgtgttgctctcacacgtctatatacaataaggcctcagtagggtttacctcggttctgattaccgagcctaacctggttatgccttgctcgcataaccctattcatgtatatacgtaatccatgtattacgttctttcggtggtttatcctggtgatatataccaggtctaacccagttatgtcttatacacataattcttaacatacatgcgtgtattcaatatttactacaacatatataatcttagggtaataaccctaacttgcatactatgtaatcactcatataatacatttctatatactcagataacatttactaagagtgtcaaccctgactcatgctttcactggactcataatattctagggtaataaccctagaccgcattaaaattaaactcaaggtactagcttaccgagtctagtttaattatgccttaagcgcataattcataatctcaatatatacatatatctgacatggcatagtatttacacaacatatatcactagagtaat

SEQ ID NO: 331619 - DNA, 775 bp, Cannabis indica
ctcctcgtcccgaggcaacccccgctactgcttcttcgagtcaggccattgagaccttttcggtcgcagcaggggaggtcgtgtctaaatttgcctaagcatatggagtcgcctgttggcacaaacttcaaactcttcttccccctgattgggattttctcaatcttaagagtccaaaagtgatgctttcaaggtgcttagactgtcacttcatggtacgttggctttgttattatacttatattattctttttataactctttcatattcatctgtttgaaattctctagccttcttttgcttcttttgctttcactcgattactctctgagcagcttgaatactgaggcgaggtccacaagttattatcataatgcaaggttgtgagtaagtatcgagatgactccaaacaggaaaatacctgcctcaagcaagaagccgagaaagcaaaggaggaagccgagaaggcaaagaaggaagccgagagtgcaaaagaggaagctgagaaggcaaaggaaagccaatgagtttgagaagaagcttactgaaaaagaaatcgaggccatagaacggtgcgacaaagtttgctttcgcactgtatatcgggcctagatttggaaccctaatatggacaccggcaacttggaggagaaggaagaggagactttagctctttgcgagaagaccaggatggaggaagaagatggcgaggtcaaggaagaagaagaagaagatttgtccaagtctcctagcatgtagacttggtttttattt

SEQ ID NO: 331620 - DNA, 826 bp, Cannabis indica
gaattaaggattaaattaattaatccttgttgaaaaaagaatgggcaggtgtcaagtttctaggcagccaccaaaaccctcatgtggcaaattaccaaaatacccctaaacttataacttgtgcattttcaagactggtaaaatggtcaaaatttataaccccgctcaactccggtactctatttcctccaacatacatcccactaagaaacaaggttctagtatctcaaatctagtaactttgtaatgtttcctctattttcaatgaaagttacatattttaaaaaatatatataaatatatctattcttttaatttttttatatcactactaagtttcttcctagttaagttgtataaaaataaaaaaactcaaaagttgataacttaattcaataatttagcttatatgttccatatcagatgatacgagtcattttttataatttttaatggaaaaacatactattctctaaaatttatagtattttattttttactctttaatttactgttaacatcattactatatattcttgtagtccctacagactagataggggtgttcactaaatatccgatcaaatctaattcgcacgatccaatccaatttacaaaatgtgaatatccgcacttacgcagattaaattggattgaaaaatctaaaatccacacttgtgcagattggatgttgtttgatctcaataaataactgatcaaatccaatccgcacttaattatatatatttttaaaaaattataatatataatatatattaattttttagtaattttaaaaaaaatatacaaacttctaatttcttaa

SEQ ID NO: 331621 - DNA, 794 bp, Cannabis indica
ctaatggctaaaaaaatgtaaccataatggttacatatttaatgtaaccatgatggttacatatttaatgtaaccattaattgaaatctcctccatatatatatgtatcaaagtggtatacaataaaacctacaaaattacgtgtttcgacaaattgcttactctacggtaagcagttaatattattaatctgagcaggaattatacaaaatacagatacaggtttcctactaataatatctttcaaagtgtttcccaaaatcaccaaaatattttccaaaatttggatatacaaatgctctttctctcaaattttccaatgaacctgattgtacaaagttgtacccaaatgttgctttttcattgagatacatattctgaattgcaaatgttcttctaagagcatcttcaatagagatgctattaaggatgcttgatcatgacatggatacattttcagcattttgtaattgatgcttaccatttgaattgggggtgttcatcaaaccgctcaaatcgttcgcaccacaccgcactgctaaaaaaatgcagtttgaaattctttgcgatgcggtcgtggtttgaattttttctaaaccgcgcggtgcggtgcgatttgtggttataaattgttaatatgcagttcaaaccgcaccgcaccgcatattataaaaatattaacttttatatttatttaggtccaatatgtaaaggcccaatccaagcccacttattattgtattgttgaaacttgaaacttttttttcatatttattttcaagccttatagtatt

SEQ ID NO: 331622 - DNA, 1424 bp, Cannabis indica
aaacttactataccatgagtcgacctgtatttgcagcaaatgtacatattcgatcagtcttcaagatatttgaaacatggttaatttgataccaagttgtaacgccttaatctatagggacgccacatgtgtaattttataaattagtatagtactaatagattaattaattattaaaatctataataatattaaaaatttcactaaaacaaaatactagaaacagacatcttaacgacactaaaactgtgttccggggatccctgttataaaagttttacaaaaagactatatacaatgacaagtcaaatacaaaatcaaaatacacaatggatgtagcctaaaatatctcctggcaactagacacacaggtcggcaaggtcaatatgtacattgttgaagaagactgccacctcatggctgctctaacttttccttgcccttacctgaaccacagagcacttgtaagtcacaaggactcaacaagaaaagtaataaaggagaatacatgaaataactaattatctatttcactattataaaatgattaaacaataacattcaagagtggataatataactagccatatgcatagaaaagaaagtgatcatatattgcattttctaatcaggcaagcctagcatcatacaataatgtcattgcatcacctaatcagatgagcccgtgttacagccttgcaccaatgtatcgtgtcacttaatcagacgagcctgtgccacaacctaacaccaatgtattgcatcacctaaccaagcgagcctgtgccatagcctggtacccatatgtcattaccgctacctaaccaggatcaccgacaggaagaaacctaataatagtttcagtttagagccatgactttatgacggttgcctcacaagaacaatccgaacaccggtgtccacatatcacattgcccaggcaaattcatgccataacctggcatttatatatcgcatcacctaatcaggtgagcctatgccataacctagcatccatatgtcgcattgcctaatcaggcaagcctatgctctagcctgacatccgtataccgcattgcctaatcaggcaagttcatgccatagtttggcatccatatatcgcatcaccgaataaagtgaattcatatatcacattgtctaatcaggcaagcctgtgccataacatgacaccaatatattgcttaacctaatcaggtaagcttgtgtatcatattcacattgccattgcctaatcagacaatcaacaatcaaaaacctatcatgccatgtagtatattatatttttttttacctcaagtcccaattcaagtatgttgaccgaatttcttggagaacgatcgacgatcccgagccctatgttataacaacaaaacaactgttaatcaagcaatctaaccttattt

SEQ ID NO: 331623 - DNA, 575 bp, Cannabis indica
aagttgttcccattttccttaagtgatcaagctagagcatggcttaatgctcttcctcccaattcggtgacaacatggaatgacttggctgaaaaattcttgagaaagtactttcctccgacaagaaatgcaaagtttcgaagtgagatcatgtcctttcaacaatcgaaagatgagaccactagtgacgcatgggaaagattcaaggagttgttgaggaagtgcccacaccatggtattcctcattgtatccaacttgagacattttacaatggtctcaatgcagcctctaggatggtgttggacgcttccgctaatggagccattctttccaagtcttacaatggtcaactaatagagctcctacaagtcaaaaagtagtgggtgttcttgaagtagatactttgactgctctaacctctcaaatggcctcaatgaccaacattttgaagaacatgaatatgggaggaagtgtaaaaccagttgctgccattcaaagggcaaaagtttcttgtgtatattgtggtgatgggcatacttttgaaaattgcccttcaaatccagcttcggtttgc

SEQ ID NO: 331624 - DNA, 550 bp, Cannabis indica
tttttgattaaaagacagaaaaataaaataaccttgatatttttgcaactagaattcacaatgtccatttgtctttgtccctgatgaaaaaatcaaactcataagaataatcagaaattattttatcaaactaatgaagtaatagaatgaggtcataccggttcacaggaaaaattgactccatcaccaagaatattaaagcacatcaaacagtatgtaatagctttataacaccattttcgagaataaacaaattttaccacaaactgtgtcaagcattagtgtgtgaaagtgtaagcagggaacattgcccaatttgtcaaaaagactttttctgataaattgtacccataggagacgctgtcacactacctcaatggtagcccttttcaatggtagcgtatcttctacataactcctaattacatagttccaacttactcagagatggctttcacacattgagataggtagctctattcatccaatggagcttgaacacacagtttttgaacaacattattcgaaaatggtagcttacataacactg

SEQ ID NO: 331625 - DNA, 778 bp, Cannabis indica
ttaattgttttggatattttaaagaataaccatacatttagagtcatttggagggatgttagcatattttggtagaaaatagtggaagtcggccggtgagctcagttttacaaggcagaacttaattgcaaattttaatgatcttagaagtagaactggagttggagctcaacataaaagttttagatctcgttcttagcttttctaaacatcttgaatcgtctaattctgatgtatattgaagaagttatggccaaaatactagtcaggtgttagaaacaaggagcaaccgagtcaagaaacaagctggagtatgaaaaatggtgttgggcgcaatagcgtaggtattgagcgctatagcacaagttttaaaaaaaagataatttcagcatgtgggttatttgggaaatatctcatgggaactatagcgcaagtcttaggcgctatagcgctgtacttatcttttttaaaaaagaaaatcctaattctaagaggattcatctttcttttcaagcactataaatagaaccttttaggctacaaattttagaaccctagagctaccaaattaatatagaaacttagagagaaagcaaggaagagacggagatcgcgacttcgaagtgttcttctccttaaactcctactatttattatgattatcgttataatgtctagttctgagtagtttccttttagttaagctttatttcaaaacctgagacatgaattcttaattttattattgaatgttgatttctagttttcattatatcaa

SEQ ID NO: 331626 - DNA, 797 bp, Cannabis indica
tgatgcaggaggggtaggagccccgccaaccactagagtcctagcagactcaatcatgcactcaactgcgccctcagctcgcagtgccttttccaccatctcagcataggtagttttgtggtcggtagtaatcattaggtcatgtctaatcttcacattcaatccatccagatacttttcctttttactgaaatcagttggcacaattctcgaggccaaccttgccaaccgatcaaactgcgttgtgtactcagtaacactcatattttctttctgggtcaagtgagtgaagtctttcctcttggcacttcagacggcctcattgtagtacttggcattgaaaatttcttggaacttttcccaggtcatcgttgtgacatcgtgtatcatagagatcatgtcccaccatactaatgcgtcttcttgaaattgaaaagtggcaccgaccactctatcattcctggtgacgcccatgaaattcaatatcttagtgatcacagttagccactgctccggacctccccgaaaaatcggaggtgcttgcttacggaacctttcatacagaggttccatccgattaagcgctatcactggttcggcctggacaacaggggcaggtgccactagaattttccggaacaggcactgcaggagcaccctgctatctcaatcactggatttcactatcttgttcctcaattctggcttgcatttttgcaaacctattttcccaattctgggcttcctgagtagcttgggcagcatgtggcgggttagcattgttggaaattatttta

SEQ ID NO: 331627 - DNA, 833 bp, Cannabis indica
gttcgtgctcatggccttgaaggcattcttcgtggcacaacccctcgaccagaaccccaaattccaggtacaaacacaatcaaccctgttcttgatcattggattcgttgtgatgcccttctaatgagttggctaatgaattccctttctgaggcgatgttggggcatgttcttcattgtgaatctgctgctgagatttggaatgttttcgagagcctctttgccactcaatccaaagcaagacaactgcaacttcgtctctctatacagaccacaaagaaaggctccatgagcatcgattagtacattttgaaaatgaagaatcttgctgattctcttgctgcagctggtcacaaactctcggatcaagaattggctatgtatattcttggaggagttggtcccgagtacgaaactgtggtggtgttaatgactgctagtgccgatgcacttaccttacaagaagttcaatacatgctgtagaaccaagaaatgcgcattgaacaactccattcaacgaatcttgatacagtgcaagcaaattatgcccaatttaacaaaaatacctctggattcaatcgcagcaacaatcctggcaggggtcaatcacagggacgaggtactatgcccagtagaggctcaaactcaaacaatcgtggtgcttcgaatggccgtggccgtggttcacgccctgtttgtcaaatttgtggcaagattggtcatcttgcctacaaatgctatcatcgctatgacaatgaaccgcagaccagtaccccttcatctcaatctcaaggtcacaacccacaagcacttatttcagactcaaattgtcc

SEQ ID NO: 331628 - DNA, 749 bp, Cannabis indica
tttaaccaccttcttgggcatggttggtcccacaaaatcatcatcagaaacactcaaaccataccactcaaactcagaatgatccaacaagtctttctctgcatcagttggttccattggtacagctttcagttttaacaatacaaaaaaaaaaacaacagattagcataacaagctttgtaaccaaataatacacatagacataatgaacaaaaaatggttaattttttatttttttaccttagacaatgaaaacacttttttctcaagtttatttgaatttggcgaagaactatcagtccacctacaaattctgaaagttggagcaagatcatacatacaaatgtcctccctctttagaattggaagtacttcatacaaccaaacttgataagcaaatggaaagccccccattcggtattgcctaacacctttctctttaatatctaaatccctcttcttttgcatttgttttgacttcagcccaactctcaacccatgaaaggtgcaatcataagataatttcccacaagggtatgaattaaactccccagaacctatcaaatttaacaacctagcatgaacttttttattctctcccctgctaagcaagcaattagttacaaagtagagaacaaccatttttaaagcaaaccctgttgggttttgtgccctaaataaaacccatttcaatataatcagatttactatttaataaagatcagaaataaaattttatgttgcatggt

SEQ ID NO: 331629 - DNA, 1477 bp, Cannabis indica
tagcagaattactttctgctgctgcaaacgcttacagtttttatattttcgtatatacaactgacatttgcaaaaacacggtttttcagacaaggataaatccgggcttttggtggcgccgtgttgggcagtgtggaacgcaaggaatgataaagtgtggcaatataaaattgtgggagtggaaagcattgtagcatctgcaacaaactaccttaatcaatggcgtgctactcaaagttctaataatgagttgtcattcactggatacgttccatgggatggagctaagtaatggattgccccaaatgttaatagcattaaggttaatgttgatgcagctgtgtttaccgaaacctctaattatggtgttgggtttgtggctagagactctagtggtttattggtggaaggcggtactaaactgtttaatggctcggtatctcctattgtggccgaagctattggagttcgggaggccttgagttggattaaagaccatgtgtggcttcatgtgacattggaaacggactccctctcggtggttcaagctatttgaagcactacggttatgctttctatgtttgggaaagttataagtgattgtaaaaccttgttatgtactttgcataatttcttttcattttgtaaaacgatcagcaaatgtagtgactcactcctttgcgagagcctctatatcctaccctgatcgcctctttaacttggacactgttctggttattttgttacctagtttggtaactaaattactcgtttaataaaatgataactttcattttaaaaaaaaacaagttatgttaagttatatatataactaataataagataataaaacattcgaatagagaacagaatcgaacgaacccttgttcctcccccttctacaaaaccttctcctcctacatcctttttctttgattttcaatccgaaaattagcaatctaagctctggtagtagcaggatagcgaattctcaaagcggggaagcttaagggcccgagattatcgatcgttctctaagcaggtcggccaacatacctgattcgaaacttgaggtaagaaaagtataatgtaccacatggcatgacaggttctgaaattatcgattgtctgattaggcaatgataatgtaacgatactatgtacacgatatatgggctcacctgattaggtgatgcaatatatctggtgacgtaccaggcaaaggtacgagcgtcagtggcatatgatgagtaccgagcgtaggtacgagatcgtctgattagacgatgcgatatattagtgtcaagttgtggcacgggctcacctgattaggtggcgcaataatattatatatgatattgtattatgacacgagcttgcctgattaggcaatacaaatatatgagcatatctatttctatgcatgtgactgattatattacctactgttgaatgttatagtttaatcattttgtga

SEQ ID NO: 331630 - DNA, 901 bp, Cannabis indica
gactcattgtcgttggttaaaagcgaagtcaacattttggtggtttcattgagagaagaatcacatatcgctcttttcaatattcgacacgatggtataaacttgtagaggcctgtccgacccagcaagctcacagacgctggatccgatattgcagcgtgttcaaggattccaccggctgtcaatcttcgacagacgggaagcgtggtagatggtgggacaactcctgttactgaaactgcccctggtgtgcaagagattggaaaacaacggttctgcacacaaacagagcgttcgtaacacgactattccaccaagcatcaacgcccaaacgaccatcggagacgcaaccgaattgcaaaacctccacgctgcgctttaactcgtgcagggtcatagcaatgctctgcatcatgattaggaggaattacgtgccgcagtaaacctcgtgtttgatgaacagaggcgtatgttcgccgagtggagagacaaagagattgaagcattaagggcccaccatccagaaatcgaagatcgtagtcagcaagctactgtgttgatacgaagaacctatcagactgtaggccaacaaatgtcgagcgtcatttccctgggggaaacggaggatgacccgaggatgaatgcctccttgacaacaaacggtcagccgtccaatccccggtcacgagttccactcgtgggtcaagaggtaggcgggcagaccttgtttgggaattcatcaggaggagccatgctcgacggatccacgcaaaataatggagccattccacctgtcaaccaagcgaaccaatcgctaaggcagccaggttcttctgtgtttgataggctcgaaacaacccatgacctaagggatgatctaaacagaagaaggggaaaagac

SEQ ID NO: 331631 - DNA, 760 bp, Cannabis indica
tgcaacataaaatgttatttctgatctttattaataagtaaatctgattatatgaaatgggttttatttagggcataaaaccaaccatagactgcatatcccacttctgggaggcgtagagaattaacagggtagacagatacttaatgcccttgggagtgaattgggtcggacagaggtgaaagaattttaccacattcctaaagtacgggtgcaaaggcagcagtgccccttgtttagcatgagcatccgaccaggcacacatccccctctttgggtttgtggctcaattgttataggcggaaatatagcagtctaactcgctcaaataaccgtcctggtcgagatcacgtaagcgtgcctcgctaaccttggacggagggctcacccacctggcattcaaagcaccttgccttctgtgaggaaccgcaacattaagttcctcactggcgtagtccacgccctcaacttggacgtcgccatccccatcgactggctccccagcctcattatatcccccaaagtttaggggtgtgacctcctcctcttcctccacctcagaaggactgccaggacaaacatcatcctgctcctcaatctactggacctcgacgtccccttcatgatcctcctcctcctgcgcggatatatcttgttcggtactaggtaaggtggcatgtcgggccacttgagggtcagatgcgtcgattctacgcattgtcttttttgtatgagccatcatcctatggctggatgggag

SEQ ID NO: 331632 - DNA, 865 bp, Cannabis indica
gacctgccatcgacttataatatattattgggtcgtccagcattgatcggactagtggcagtcagttcgatcaagcacccatcctattattttagtataaacttgatttctatttcatgtttacaatttcaacaatataaattgaatttttcaagttttaattctattatttctcgtaatgatattcaaatatgtgttgctactatggaataagggctttatgttcttaaacaagatgaaccaatggcgcttaataacaaattgttcataatagcaaagcctagaaaccaaaaaaagtaaaagatcgataataaagatgaaacatatctatggcacttacatcttggttatatagactatgatagacttcacaggttaactaaaggtttgttgggctttgtgccctaaataaaattctatttcaatttaatcttttctattcaattattcataaagaaacaaatttaatttcattacttgtttaatgtgttatttggttcatgtgatcatttatctacttatttgatttataaattcatccaaatccttatcacactgatattcttgtttattgtgttgacaatacagtggaaagtaatcaagatttgtgtgattaaatgtattcttatgatttatcagtacacagggtttaactgtccggataatctaccacgtagtttacgtacaccttggataagtgttatgtcctttccagggtcattggttaaagtaagattgggttggatgtatggagtatgcatcggaagggaccaatattgaacttggactagatatgataaacttaccgtaatatctattcaattcaatatcacctagttgatcttatatcaaaatgatctcaatc

SEQ ID NO: 331633 - DNA, 664 bp, Cannabis indica
atttttaagcctatttaatctctctagaaaagcctatttaaaatctgaaatcgtgcacctatatctctctgttatgcctgtgtgtaatatttctaaggtttactgtgtatgtgtaattttactaatgttttgagggtttatatactttttagtttggttggctggtgatacgactattaaatgccttgttctaagtagttggatatctaattctttcttaggtttgaagttgtatttttgtttgtctctgttgatagccaaagaaaaaacaactatatgcatccaaaaacgaagatgattaatccatgttaatatatttcctagttagttacaatgcatattgttttagtgaaataggatagaaattttttcaaacctggttggatgtaccgactccttctatcttctttcaaatccctaaccagttgaaacacctgaagagtttttaattaacaaccagtcaatacaagattgtaaagccatcataaatttaatttagctcataccttaacaaatatgaccctgatttgctcttcagatttgttcaggccaattaagatttgtttgcgttaagaaaaattaaagtgaaagcgaacaaagtaaagaaaaaaaattaattgaagataatttgtgtatatatagtatatataaagatataaagata

SEQ ID NO: 331634 - DNA, 958 bp, Cannabis indica
gcgctgtctgccgggcctggttttggaaaccctaacaaggataccggcttctgcaggagagggaagaggaaactttcgctctttacgagaagaccaatatggaagaagaagacgacgaggtcgaagaagaagaagaagttctgtccaagtcttctagcatgtagacttagtttatttatcttcccttttttttaggaattggcccattggctgagacaatggttttgcccctagtggcaccccttttttcttgcaaagacaaatttccaaggttggacgaccaactttgctttttaatgcctcgtactcttgtgtataaactttattatgcagacgtttgcttgcgtttcattcacaatataaactatcacatgcataaagtttgttaggggtatccattgatcgtcctttcttctgatgttaagtagttaatttcctactttacgtgcgagtagcttacctgcccgctcctcaatctacgagccatcatcaattccatctcgcgatcattggtaatgatcttagtttaagcacattcaaatatatttttaatgaacttgtcattttatctagattttcattgcttacatgagtagttaaaatttctacccacgtgttgggtttaagtattttttcaagacatttggatgtctcgtttaatactttcccttagcgcgagccgttagtattcaggtttatgcgctagtcgtaacttttgattttcctatctcatcagataggttataaataaaaaattacagttgtttgatccctttctcgtcagaaaggtttgatcaaggcgtcataacaattcgacccctcttccgtcgaaaaagttttgtcagggagttataacagtttgacccctcttccaccaaaaaggtttggtcgaggcccttttaaaaagttttcaaaatttttattatttttttaaagtatgggtttgcattgtactatg

SEQ ID NO: 331635 - DNA, 1406 bp, Cannabis indica
gaggcccttttaaaaagttttcaaaatttttattatttttttaaagtatgggtttgcattgtactatgtgtttccaaatcaattccggttaatcatacatatatgcccctcaagtaattgtaaaggttttacgctttgcaatcacttgtttgaaagaaataattattttattcacaattggaacttaaaatattccatcagtaatgtgatttacaatcattaatctcaaaaaaacttccctggttcaattgtttattttatcaatcttctagaagcatcaagttttgataaaacgggttttgaagtctagggtcaatccccaacattctaccacaattgtttaaatactcagggtcgatccctgacatatactggggttccaagtagagtaatcttggttttagttctgtcttcgactgacactggttaacttccagttatggcaaccatatcgagccaatatctactcgggtcgcaattcttttacaagtttgcttttaccgaagtaactgccttttgtaatcttgcgaccctctccctcttgaaataaccaaagtgccctttcttgtcacggaagagggttataatcttcaatcgctcgagttattgggaagatcgaactgatcataggcattttcctgctgctttatatatcgatgaaggtgtccttgcgatatgagactttctatctcatctttcaactgacgacactcttctgtggtatgaccaatatcaccatggtatcaacaccgcttacttggatcccttttgcacctcgcatgtttcataggtcttggttcgccaaaaacaacttcttgtacgtgtacgaggtagatcttttctcgagtttcattgagctcagtgtattcggtataaagagggatatacttgttgggtttcttgtcattaggcagccttttggaatcatcttttttctttgatcccgaggcctccgaatcaaattttccaacagtatctttccccagttgtctcctggatttcgtgatttgatgtactctagacttattctctaactcactcattcgcaaatggaatgaatccttttgcatgaatttcattctcatgagcctaaatagtaggttattaatttttgtttgatgctccgcgtaccccaaattgtaccctcagactttcctcagtttcctcaggttgcatctcctgagagctctgagcatatctctgggtcatctcctgccccttgacttatgagccgtgaggtttgcctcgtaaatctcttttctcaaggccaggttgtttttgggtaccatctcccagcgctgcctttatggcagctatttcacgctccaactcggcatggtcagttttctctccaatcggcgcctagatggcaattttctaattccacgatcggtatgtatctggtt

SEQ ID NO: 331636 - DNA, 1075 bp, Cannabis indica
cgacaaaaataaacggttattcggcttctgggtggaagattaccatcttcctcttacaatcaatattggctaagtacttggaaaagaaatccattcccagtataatatcaaaatccactaaattcatttctattaaaacagtactcaacttcctatcctcaattctaattggcatagacctaatccagcttttggagataactaattctccgccaggcagtagggttccaaaccctgattcataactatcatgcggtctatccaatttgctaaaaattgtggccgccacataagaatgagtggccccagagtcaaacaacacagagaaataagtgttcttgacctagagctggcctgttaccactgaagggatggcttctgcatcagcctgagttatcgcgaacaccctcgtttgagtgggtttcgctgcagtcttcggtgcttcagtcttgagttaaggacaatcccttttttaatgccctggcataccgcactgaaaacacccctgccctttacactcccctagatggtgatttttacaattggggcactctaggtaagtgtatcgggtttcggtgccactctagcaatttccccgaccctggttcccctgaaatctcttgttctgacttgagccactagttgcagtaggtgcctttcttctctattacctcccttactaaagcctgatgtaggaggagcaggagccccaccaacaactggagtccctcgagactctaaggtgcactgcactgcgccctcagctcgtagtgccttacccaccatatcagcataggtggtgttgtcatcggcagtaatcatttaatcatgtttgatcttcacattcaacccatccaggtatttctctttcttgctgaaatcggttagcaggattcctaaggtcaaccttgccaaacgaccaaactgagtcgtgtatttagtgctaggttttgtgccctaaataaaacccatttaaatataattagatttacttattaataaagatccgaaataacattttatgttgcatggttcacatgattaatttcatgattatatatataatgtatgaatt

SEQ ID NO: 331637 - DNA, 539 bp, Cannabis indica
ccttggaggagttgcatcaggctgacttgcagtcgacggccaacctgactgtggaggtaaaggagctaagagattttaaagatcaggccttgaaaaaggccaaaagagatgagctcctgaccccagttgtctgcaagcattgtgtcaagcgctttgatgatggcgtttatatcgcctggcagtcgaatggccaaaacatcaagcttgacttctatcccaaacctgaggaagccctcgccaagttccgaaagaagaagaagaggcttgatgctttgctcgaagaacgccggggccctcgtcttcctcctcgtattgaataggccgagcagtccgaccaatctcaccattacaactatatatattttttttacatttagagtctctttcctttcctttcagacaatttaaattattatcttctaaggggagacagttattatggcccgtccccaggcccttgatatttttttaggacctgctttttggtcaggatatttaaatatatattttcactttgatatatatatattctgcttgat

SEQ ID NO: 331638 - DNA, 651 bp, Cannabis indica
ttttttgtcttaattaagttatagaacatgccttagttaggtaaactttgtgttttaataaggtaaacaacatgtaaactattatcttaagataaagtaaataacacgccttattaagtgaactactaaccttaaataagataaaccacgtcttataaagtcatatgagtaagattaatgctttcaaactaaatcatatattattattaaaagggtaaggcttatcatataaagtcctaccttaaaatataacttttatataattaaatgattttttttagatataatattttttcaaggcttgattcaattaaaaataataattctataaggagttaagtgtttatgtttacggctagaactcatcaatgatttaattaaggtttagaactatcactactacaaaattgggtttttctaacagtttataactgtcttttatactatttgccaacggttcctaaaaccgttggctatgtgggtgtcataaaaatgcggaactttaaaagacgttttataactgttgggaaaagttgatttaaatgacgttttacagctgttggaaaaagtcacattaaatgactatttataactgttggcaaaaatattatttaaattaaatttaatttcattttaatatatatttttaat

SEQ ID NO: 331639 - DNA, 733 bp, Cannabis indica
ttcactttgtctaaagacacgagccaaccaaacactttaacttttgatggaacacaacttttccatagtcttcgtccaaaacaagcccctagccattgggtttgatgtcaaccaacaaaaggctgatttacaagaaaaagcaccagacagatccgatttccaaattcgactatcatctgaaatactcaacacttttacacgttccaccttttgcattaatgaaataagacttggcatctctctatccattaagttccttctaaacatgaaattccaactctccacccatccgcttggcaacccctcatcaacaatcagttcctttatagaagcattccttgtcttagaaatcactgctaaatcagggaatgcactaatcaaaggagaattgttaagctaaacatcttccaaaaatcgaatcctatcccctcttccaattttgaagtgtaccaatcccaaatactcatcatgaagatatgaaatatccccctccatggacctttaggagacagacgactttctttcttagagtcccagaaattgtcagtcctaccaattctgcttaccaccaccctatgccacaacgaattttgctctaaagaaaatctccacagccacttcataggcaaacctccctcatctcgaggcctacaagcctcatcccaagccactaaatgatccccacatgtagactcgttgccttcccagaagaagtctctcatcatcttctcca

SEQ ID NO: 331640 - DNA, 1303 bp, Cannabis indica
tgtattatttgtgttttttgacttgtttgttaaagctgaccaaatggatctgccaaatacttacatcttataaacatggtagtgcaattgagtgggtgcgcttatcattgatacagaatctatagcttctataattatatagaagtaaaatgatgatttcttttgagcttagattgatagagataaatagaagaactctaatctcagtaattttgttagtttattgaaatatcatatataggaagttaagtattttaaggataaaatacattgaggggcagaacagtatatttatccctactcgatgtaaatcatttatagagaatctttgattatttggattgaaacaatagataattcatagcgtatctatatttggaacatatagaggattttatataattaggagtgtaatttcaaatctatagcagagtcgggaggaattaataagttaagaattttacttggtatattttggatctacttattgggatcttggttatataagcccatggtccccacattgtgagagataataatgtattgtagactcaattaattagtttcaattaatcaattagaattctaaacaagacgtattttcactaagtaagggcgtaattgacaagaaagagaggatttagggtttatttattaattaagagactttgtaaggtctaattaataaataagctaaataaaaattttatttaataattaattataattattgaatagatagatatgacatttagagagttagaattaaaatatgacatttgtagaagaaaagataagttcttaaataaaaaagcaaaattgaaacctgtagggcccacaatagtggttcggccatagggttcaataaaaccatcattttatctttttttcaattctaaacctaaccctagatgaaatcctataaataaaaaaaaaaatgactcttataaaaacatattttcaaacaacttcaaaaataaagagagagcctctattgaattcgaaatcatcctcctcttttattcatcatattttcaaaatctctgtagtgagttgaggaattttccacataattcaagccaatactcaggcctttgtggaagattgtgaagaattccaagaacaaaagaagatccaagtttagatcttgatcatactctacgatagaaaggatcaagagttactgatctaaatggaagaagacattatattttgctgccaccaatgtatgttttctataactttacatgtatttattttattgttttaagaaaatatagatttaggatgttagattatagtt

SEQ ID NO: 331641 - DNA, 571 bp, Cannabis indica
aatagactgggtgttgtatgttgttctcttctctggttagcacgacacttacagcatgttccgtgatagctaagtatattcccagctcttctccatccagaggtttatagggtacaggagattttgcaagttgcgtttttagctcttggaaagctttttcacattcttccgtccactcgaactgctgaacgcggcgatccgaccagtcaggctttgcacttctttggtttatgttggcgagttcatatccaggagggcttgaatcttctctggattagcttcaattcctcaagcattgacaatgaatcctagaaactttcccgagctgactttgaaggaacactttaagggatttagtttcatattgtactttctgaggactttgaagcactcgtccagctcatctatgtgccccccaacatttctggatttgacgagcatatcatccacgtatacttccatagtatgctcgatctgatctttaaacattttgtttaccaatctttggtatgtagctccaacatttttcagaccaaacgacattactttgtagaaatatagacccatatct

SEQ ID NO: 331642 - DNA, 751 bp, Cannabis indica
tatacttttcttaattttttttcttttcatttttgaagtgagttgcctcccatgtgttatgagggcaatacctgtaccaaacaattagtcagtgcagcttccatcaacatgtaatttccatgttgattctttaggttttttggtgctactgctgttgctcttgcttcttctttggctcttacttttctcttgaatgttaagagatttcaagaggtattcttgtacattcatccacaaagtctacaagggcttggccttttatggccgagtttgatggcccacgtgagtagtcggccagatgcatcaggtttttgtaagatttgtagcaatggttggttggtgtacacctttattaggtgtacttagaagtacgacctcagatttctagatgtaaagagcaagttatagcttagcttttccatgagtgggtatcgactttcagcatcgatcaatctcttgcttaagtagtatactatgtgttgtataccatcttcttctcttgttaagactgcactcatagcatgttctatgacagcaaggtacacgcctaactcttcattgtctagaggttttgatacgaaaggtggttgagcaaattatttttaagctcttggaatgctttctcaaactcccctatcaactaaaatttttggttccctcaaagaatattgaagaagatgttgggttttctgccctaaataaaacccgtttcaatataattagatttgccaataaagatcagaaataacat

SEQ ID NO: 331643 - DNA, 779 bp, Cannabis indica
atgaaatgatatgttatatgagagactatttggtatgtaatttagggttattaccctaagattctatatgttttgttatctattgaatacatacatatatttcaagagttatgtgcataagacataacttggttagacctagtatattactaggataaaccactgaaagaacgtaatgtatggattacgtaaatatatatgaatagggttatgtgagcaaggcataaccaggttagactcggtaattataatcgagataaaccttactaaggccttattgtaaatagacgtgtgagcgtaacacgtaggtctatgctacatagacatatatagacgtgtgggagcaacacgtaggtctatgctacatagacatatataggcgtgtgagcgtaacacgcaggtctatagcaaatagacaaatagtgcagtggcaccaataattatatgataaatatatatgttgagactaagggttatgcgctcaaggcataaccaggttggactcggtaacaagaaccgagatgaactgatctaaggccttattgtaaatagacgtgtgagagcaacacgtgggtctacgccacgtagacataaatagacgtgtgagcgcaacacgtaggtctacgccacgtagacataaataggcatgtgagcgtaacatgcaggtctgtgtcacacagacaaatttgaatagcattgttgtttatattgtatgatgagcatattattgatatgttttatactgtcttgctgggcttggctcacgggtgctctactgt

SEQ ID NO: 331644 - DNA, 1378 bp, Cannabis indica
ctaccctccctgcatttttttgagtcgtgtatgaaattgttatggtggtgtatgatacgtgataaggtcgttgaatgtaaagataccctaccctacatttgtccgatttttatatgagattgttatggtaaggtatgatacaacgacagtgttgttgaatgtagagataccttattccatagcaatggtagggctaaatgtgcccaggttattgtagggccagttaggcccaggttgtgtatgtagtggctatgataccccacattatggtaaagacatgatatgattgaaataattattatatgttattgctatgagtatgatgtcacggttgtgatccctacatataagtaatggtttcgtttagtacaaatatatggtaaataatataactttccatatttggggttatttaaattacaattatgagctaaggtatataatattgttaaggctggatacgttaatgttataaagaattgtgttattgtgaattttaagatatgtttagtgtattgaatgatattgtatattaagcatttctttactgggctttgagctcacccccttactttccccctacagacaatggacagggaacattgaatgtaagtttgatgagctgggttagttctgatatgtatactgggaggggctatggatgagcaaacggtctagaatgccaatggagccttggttttatttttttatagtaacgtaatctaagcttagtgggatgttacaaatttatttaaaaaaaaaaaatgcactcaactacttattttgtttttaatatgaatgatcattcacctttttgtatatttattgtaaaacccactgtgtatttccaaatagctttgaatctttttaattaatgcatcaaaatagtatttcgtaaaataaggcaaaatattagggcattacatttttattgaaactttaaaagaaactttaaaagatcataactaattcataaaaaatccaaattaagttctataaaagcctaaatatattaatttttcatctaatttctagaaaaatactttcagaatgaaacaaaaaatatttatcatcgtaaaatctcgatgtccagacaatcattaaatatgcacataaaccaacatgaacacatccaaatcaacacaatcattattttaaatctatatttcatgaaattaaattattaccgtggcattgaggctaattgttggggattgttttagcagaatcttgatttactacaatgtatgttgtttaacatccgaaacatgaatttctaaagtcatagaatttaaacacatattgtaatgccctaatgctaaggcacgctacagtgctttttcaattacagtgctatttttgctaatcaaataatttt

SEQ ID NO: 331645 - DNA, 1423 bp, Cannabis indica
cacttactaccttaaaacaaattaataaactgaaaggtttgcataacacaataacaatgtttcttttattgtgatcactcaattaaagcactccatcttctgtaatttcttctaaaaattggtcagcccattccaaacgaatttcatcaatttcttgttttgtataagtttttttcccattccactgcaatgagtaaggtaagtattagttcatatagtagtatttataataaaatagaaaaatattttatcatagtgtatataccccaaatatataccccaaatatatatatatatataacttacttgagtggttagccaattgataggtctagaattcatgcaaaattcacgcatgtatctcattacataatatccacactcaaaatccgatatttgttgaggacactgcacatatttatgaaataaaaacacataaatattttaaaatttatagaataattactatattgttatattaatgtaattttattttacaacttacttttatagatttccatgtaatgccagacttttttggctgcctattactggaagcattgtagtaatcaaaagtcctaataaacaaaagaaatattaaaataatttaaaaaataaaaattaaattagactaaaccataatattatttaacttacattgccattagagatttaattttattaggcgggggtaatccaattgagtcaagccaataacatgtttcacgcaatacatcaataattgctagcatccaatggtctctgttgaccaccaaagtaagatattatatgtaagtcaaatatattgataacataaatagttaactaaataattcttacccagtattaacagaaagcaaccaaaattgtcccgcttctgttccttccatgcgatctgccattgtcattgcattttgtgcttgacatgaatccaaagctaaaattggatgaaagaaacgaaaatattgtgctcgatttgccttcaccaacttttcatgtaagatcctaaatattacaattagattaataaggaaaaaatattatttagtgcattaagtgtaatttaaagataaattttttacctaatgtaaaatactatgcaagcagctccaatccgtttcatagtgcctagatgaattacatcgataggtgaaatatgtaaatattcatcattatccaaaatttctgggtccatgaccatggaaaaagtgtgtgaagcttttataaatcgaacagctagtaatgcagcttttacaccctttggagtgtccttaggaatctcaaatttaattggagaatctcgcacttcttctaaatttgaggacgatttagtgggtttttgtgaagatgagggttgatctttttctttacttggctccagttgcgtgaaaaaactattttgtttatcctgaatcaaaaaaaa

SEQ ID NO: 331646 - DNA, 536 bp, Cannabis indica
cttaggtattacaattatcccctccttaagaaattttgtcccaaaatttacctgaacaactctggatatttctactgcatatccgtctcgagttcctaggttgcctcttctactttattgttcttcgataacactttgatcagtgcaattgtcttgttcctcaagactttctctcttctgtctaaaatttgcactagttgctcttcgtatgaaagatctggctgaagttctaatgcttcataactcaaaatatgacaaccaataatataacctaatcccgttaaattgcgattactagaaaataagagcgtgaaaatttaaactttgacttacttacggaataaaaacataacttgtaataatttatgctttacaaaccattccaaaatactatactatttcaggatcgcataaaaattttcacaaaaaattacaagttactttaacatgcaaatccagacggaaaaatccgagaataaaaaatacatccagtggttgacccaacccgcttggtctagtatggcctgaacatgtac

SEQ ID NO: 331647 - DNA, 684 bp, Cannabis indica
aagactgtgaagaatccaaacaactgaaggagtgtcgggctcagatcatggtgatactttgctacagaaaggatacaagggttaaagatctgagcggaaagagtcatttaattctgctgcaaccaatgtaaggtttctcataccttttatgtgtttaattttatatcgttttagaagttcatatttaggatgttaaaaacatacttgttagtaaatctaggtcctcgtaaattaaattcctacagctatcacattggtacgactagagtaccgagtataggctgatattttggtcaatagtaccattgtacgaccgttctagacttagtaccgcctcgggtgcggggatagggttacagttgggtgtatgggcgcctaattataattcatgatatgtatttatgattatgattatgcttttcttactgagtttgtcgactcacagttattatttgtatgtgtaggtaaaggcaaagctaaagctgagtagccgtgagtgagagcggatgaacattgtacatgtcggggcggttaggcctgaagcgtacaatctttgggagagcgggctatattttgtatagtcgctaggcgacaacttttgtatctagtattttttatcacaactgttaatattttaaatttgggatccggttatataaaagttatttattttcaagttaatag

SEQ ID NO: 331648 - DNA, 731 bp, Cannabis indica
aaatcacgtaatacgcctaaattagttagggtgttacatgaaccctagggagatttctgctcttttcaagcaaatcttgcaaggatttcatagcactaggtgctggctagtttgaggtaagttcttcacttctattcttgattttggtaaggtttaagttgagtttttggttagggtttgtgtgatttcggggctgaagtgtaaattgagtttagaatgtgttattaggcttgaattaagaatttgtttaagcttgaattggttagaaataatggttgattgatttgaattgatttaagtgaaaattattgagtttgatttcacttgggaatacaattttgagtaaatggatgagttgtggtgttttgatgcattggttatgttgtgtttatgatattatattgatctggagcagttggacaggtttggtgaagatttggttcgagtttggggaggaaactcaaaattgcaaccctgccagaaccagtcgaccggtgggttctggtgcaacagaaccggtcgatcggtttaggcagcagggggaaattttcagttttcttcagggccagttttattgctcggggtgatttccgtatctgggatagattgtttaaaagttgtagaacctattttggagctaatagaagatagggtttaccgattatgggaattagagttattctcggaatgattaatttaagttatttattgttgttgtcgtgacataggac

SEQ ID NO: 331649 - DNA, 615 bp, Cannabis indica
aacataatcactaaaatgagtactcaaccatttatctttgtttagtcaagctcgaaagaaatcatcattttacttctatgtcctgatagaagctatagattccatatatatatttagcgctcccactcaattgcactaccatgttcccaaaatttctcattaattggcgcgtagctcttgtttctccctaagtagggtttttcatgcttactaataataacaaacttttctctaatgaaagttatctttaattctatataaaaaaaaaggttaaattctccaaagtattgtttcatttgtatttaattcttaaaatttaaattttaacagtaaaacttttaatattacgataatacataaacaatccatgttacgagttaattataaaaaatagatgacaccttaaatttgttaagagtttaataatttagaaagtgtaataatagttaagatagtttattttaaaaaaaataaatctctgtatatattgagattatatatataaataaataatagatagcatccctcgtattcataggaagacctgaaaggacttgaattcattcatgagcataacgataatgatgatttaatgagtaaataaaaaatacgatt

SEQ ID NO: 331650 - DNA, 687 bp, Cannabis indica
attaaatattatattaaactagttttataaaatcacacacgtggtgttcctatatattagagtgttactctagctatgatgaataggctcaaaaccagggatcagttactcaagcaaggtttgatcgacatggaaacatgcctcttctgcaactctgctgtagaaacagcatatcatctattttttggctgtgtttttgctgcagattgcctcgaacaggtgaagacctggtttggatggaatataagagatagttcacttcaaactatcatgagaaaggtgaggaaagcaagttgttccagcttcaaaaaaagagtgttggcagctggtgttgcataggggtgttcattggatcacatccaatggatttggacccatccaatccaatccaattgaattgagtcatccgatccgatccaatggatgtattggattggatcggttccatccattggatgctttaactggttttttattagattgcattggatccatccaatggatcccatggatgaatccaatccattttaaccactatttaggctaatttcattaaaaaatatatatatgaaaaaacataatttaaaacttaataatctaacatagataataaaataatatataaaatattaaataaaataattaaatatataaaattataaatattaaatatgattggatggacat

SEQ ID NO: 331651 - DNA, 1088 bp, Cannabis indica
tgtatgtacatgttcgggccacgctagaccaaatgggttggggcctactagtgttgaaacttttgtaactctattttgccgcttaggtcggctaaggggaaaagacttgtaatattttgtaaaatgatttttgggatcctgaaacatgtaacttttatttgtaaggttaaaattattacaggtttattttcattccgttttcgtttaaagtttaatttctgcgcttattttattagtattcccattttaggggattagggcttcttaatcatcttgggtagcgtgcctaaatgttagggcgttacaccgggggaccccgatatagagtacaaaattattaagatactatagccatttgtaaatgggctggatatcctgatttatttcttactttcacttgcaacccgaagtgcccagaaataaatgacatgattaatttaattgatcaaaaagacgatgagaataaggttgatatcatatgcagagtttttgaaataaagttgaaccaactaatgcatgatctgaaaaaagaacaactatttggaaaaatatcgcatgtaagttcttatattattgaattcataacaaaattaaattattttaaaatgatatttaatgaaaatatttcacagtttttctaacaattctaaatgtaaattttaacattttctcaatgttattgcaggtttatacacaattgagttccaaaaaagaggattgcctcatgcacgcatactacttttcttccattcgacattgaaaaatccttcgatagaacatatagacaaaataataagtgcgaaaatcccagactcaaatattgatcttgatggttataatgcgttcaaatttatgattcatggaccttgtggaaaactcaattcaaactctccatatatgatgcaaggtaggtgcagaaaacatttcccaaaaaaatttaatgatcggacgacaatagacgcagatggctttccagtctacaaaagaagaaataaaggtatttacattgaaaagaaatgtgtcattttagataatcgatatgtcgtcccttataatagaaatttgattgtcaagtttgatgcacatat

SEQ ID NO: 331652 - DNA, 644 bp, Cannabis indica
cgaattgccacccctacccaaactcactcttatccaagtcaaatccatactttcatataacacaatttcttaaccatatttaggggagaagttgaaaaatacccactttttttatacattaactaaattaatctaccaaataaaattttaatttaaaaaaaactcctttttatgagaattgtactcaaattatcctcacacactcacataactaagatataatttcaaacataatagatttgcgttctttgtagatggatgtgtaggtttgtggaaaacttggggtaaaattttgattagagaagaatgaaaattatcgtaaaatgataagggtaaaactggtagaataattgaaataaaaagtgattatatttacacctcaaaaattataactacaccccattactaagtttatcccattaaatattattttttataatcacaccccactctatttacaaaagggtattatttgtacaccccaaattatttttttaggttattaaaaaaaacaaaaaaaaaaaagacaaatagatagattttcaacatctgcgtttaccgtgtcactctcattttcttctttattttttctttattttttctgtttttttttttttttgtagcaaaggctctttttctttttt

SEQ ID NO: 331653 - DNA, 450 bp, Cannabis indica
aaaagggaaaagaaaaaagaaaaaaagtcttcctatgccctaagcaattgctaatcgaagaacacatggccctcttcaaacaaagctgtgcgcctacagcagaggcatgacaatggcgactctacaactaacacagtaaacataaagcagaactcgaagaacttaaacaatcacacacccagaaatctctgagcgcggacccagaaaacaaacaaaataaatgtaagcatgttattatctaaagatgcaagaaacttacagttgattgttgaactgggggtactgggtatggttgagtgagagttgagaagcactggcaaaaccgaacactggaaaattaaaggaagtgtttaagtgttaaagcagtttgtgctacttcgagaaatttttctttctgagaaattcgagcagaaatggcaaggaatggaaagtaaccgaaatgaaggaaag

SEQ ID NO: 331654 - DNA, 994 bp, Cannabis indica
cctgacagtttccttttgtccttcttcacttagttcagattttaacattctttctctgtacaaacttgtctaaagatagcttacgcttattccagggataaattggctccctctaagaatgctgccatttccaatactatgtgggcggaagtggacctggccaggaaggatgccatgaagcaaggatccagcttggggctgtccagatggaactgggagaggttaacaagcaacttcttgctgctaagaagaaggtggctgagctgactaaagatctacaggcttccgaccaacttgaaactgctattgcctccttgtcaaaggaagtgaccaaccttcaagaagaaagggaggttcttcgagctgtcttccgcaggttggaagaagagaagaagactaaggacgcggagcttgaagctgaggttgagaagtacaaatcagaggccgagcagtagagagctgaagcgacaaggcttggagggaaagtgaatgctttagagacagctggtctcgagatgttctatgacttctggaaggctaatccccagggaaactttgattatttgggcgattccaaatacatgtttctcgattactgcgcttctcaggtggcctacaaggaacccgaggcaaccacttccacaatttccacaatattgacgtgccccctgctcaaacaaacgatcctcaagttccaactaacctagaagacccgtataaagagcctgagactccagccgtttgaatactttctttttctatctcttttttatctgtccgaccataaggccttttttaagacaaagtgaccgaccaagcggtctttaaacttgaaattatttttcatttttcagacaacaggcggaccgggcaacctttaatcccggttttacatgcttttttttatctttaatgaatttcattctctgtttataattatcatgcaactgtgtttgatttatttttaccaaatgctttgtacaggtataggtgc

SEQ ID NO: 331655 - DNA, 771 bp, Cannabis indica
aatcaaattaaatagcaaaccaaaccgagttgtatgcataaacatacaccctgtacacagatgcccacttttcttacctcagttgctaagacctcacttgctacctcgagcacctcaatgggtttccttgttgagaacaagatcctcagaatagcccagaacgtggtcggcggcattcacgtcagttttgtcgccggcaaaatgtaacttgtccccgattgctcttgactcgtcttttcaatttgggaatctattcacagtgcttaggacctcaaaacaatcaagctcaacccaagaaaagaggcctaagttggcagatcggggttgtctccctcgttggcggtgtaccgtctttaatggagtcaaaatcgtattcttttatttttgacgttaaagctttattttcttacgtcaaaaacaatccttagggtcccatgtactcatatataacctcccttgacctaagaacaagcttaaacacgttcaaattcgtgtccgtttcaagtcccactttcgaagcttcaacaatggtgaaactcaaaacaatgacctccgacccttatactgttggtattaattttaccaggatcttacatctactcacaagtatgttgattaacaacctaaatatgaacttctaaaacgataaaaggaaaacacatataaagttaagaaaaccttatattgattgcagcggaataatatgtctccttccactcagatctctaacccttgattccaatctgttacagagtataatcaagatctgag

SEQ ID NO: 331656 - DNA, 297 bp, Cannabis indica
ttgcactcttagttatatagaatgctctatatgttccacgatatagatacgctataaatttaaccatcgttctaatcccaataatcaaagatcctctatagatgatcctctataaacaactgttaaaaatatgagttcaaaaatttgtgctgtcatttatattatattattaattttgtacaataatttagcaacttgcgaaaatttaaaattattgtaaaaagccgcacaaagcgcaaattagtttcctattgtaactctaaagtaattatttttggggttttttcatttttacac

SEQ ID NO: 331657 - DNA, 1034 bp, Cannabis indica
atatttaaatccttctgagtgaaaaagtacttgaggcttttgtgatcagtataaatctcacacttctcaccatacagatagtgacgccaaactttcaatgcaaaaacaactgctgccaattcaatatcatgggtaggataccgctgttcatactctttcaattgcctggatgcataagcaatcactttccctgactgcataagaacacaacctaacccctgtttggatgcatcacagtatatcacaaacttttcatcacttaccggtaaggttaatacaggagcggtaatcaacctttgtttcaattcctggaaactactttcacacttatcagtccaaacgaacttgcagttctttcgagtcaactctgttaagggcgtagaaatctttgcaaaaccttcaacaaaccttctataataccctgccaatcccaggaaacttctaacttcagttgctgacttaggtcgaggccaatctcgtaccgcttcaatcttcactggatccactaaaataccatctttacttaccacgtgtcccaagaaactcacctgaggcaaccaaaattcacatttcttgaactttgcatacaacttatgctccctgagacgttgcaataccattcgaagatgtctttcgtgagtttcttctgagtctgaatagattagaatatcatcaataaagacaataacaaaatcatccagaaagtctttgaacactcggttcatcaaatccataaacgctgctggggcatttgttaatccaaaggacattaccagaaattcatagtggccataccgggtccggaaagctgtcttgggaatatcctcttctcgaatcctcagctggtgataaccagatcgaagatcaatcttagagaagacggtctttccctgcagctgatcaaataaatcatctatccttggcaaagggtacttattcttcactgtcaacttgtttaactcccggtaatcaatgcacattcgtaaagttccatccttctttttcacgaacaaaactggtgcaccccaaggtga

SEQ ID NO: 331658 - DNA, 1232 bp, Cannabis indica
ttacctcaattctgaattcaggtgtgccggtcaacctgagtggaatgatcagctcgacggattacagactcttaaaccgtaacaatcacaacaccgataagtgagacgctaaattacaaccgggacaaaggttttaaacctaaacttaacctactgtaacttaatacaaaaataccacaaactagcagggaagaatctgcctgaaaacccgaaactagcacgaaacaacaagttgagaaaaatcggtttcacaccttacggcaaaattggggtaaccggttttacaggcagtgtaaaatttgttagccggttctacccagaaaaccaacaaagatcaaatccccaaccaaaacgtttccaaactcaaccaactttccagacttgctaattaaaccccaataaacatttctaaggcaacaaaacaaagcttcatgcataaaatcaaaatccaccattaaagcaccaagctttgagttcaaaactcaaacttggttaaatctatttaacatgcattcaaaccagctcaaatctacctaaatatgcatgtattaacctcagaaaacaacagcaagagtcaacaacaaaggcagcaacagattccattatttcactttgaaaaacatagtttttgaacccaaaaattctcaaacttgaacaaggttaactagcatgcattcaaacctatctaatctaacttaattcagcattttaatcacaaagacaacaacaacaattagcagcagcaacaacaccaaaaaccatacaagcaaatcatcattttcttcaaaaaattgcaagaaacaaagaagagaagctagaacaaggattacctcgactagagttactctaaacttgatggaaatcacttgaatcacaaaggaaaagtccacttccttgctgttcaaggagggccaaaaagagagagagagctttgggaggaaaaactcttaattttccaattttctaatttttgagtaaatgagttataaaattcactttttccttatttgtttcagccaaagaaaaatagaaaatcaagttactaacatattctaataatccataaaaagacaaattcataaaggcaaaatgactattttgcccttccacaataaaatgacaaaaaagggtactaaggggtattttaggaaaactctaaattcccgaccacacccgacattctcaatgtcaaaaaaaaaaccgtcccacaatactaccatactaagttgtga

SEQ ID NO: 331659 - DNA, 1171 bp, Cannabis indica
aggcttcaagtggttgacgggcatggacgactcggccatcagcaagattgggcattttgctgatgagtacttcatggtggatggcacgggcatcactcgcactcggttccaacagattccgaaatatcaccaccctcccctcactcttgctctcagggatagagctcaaaagtttgctcgactaccgggggaagaccgaaatattatccagttgaccttcaaagataattttgtgaagtacgggctctatcccacggacttcattcctaagtccgtgacggggaagtagtggaaatcaggcgctggacggaccgaacaagctcatccagagaatgaactcaacttaagcacgaagtgaagttgaagggaggtgcaagggccaagcagtatgctcaggagcccttgaatcctgaaaatgaggctgaggaagagtaggtgactccgctcaagaggaagaagaaattttcgaccctgcccaggcctgttgaacatgccattcgcatcagggagcccatttcacctgttctgccatcccctcacgtgttcggtaaagggaaagtcgttatgtctaaaataagattgatgtcaggtgtcgatgaactttcgagtcttgtttgggtagtcaccttgcatactatgttgtcttgtttttgagcttcttcacttttatgccttatgtttctgatgcctcttttttctaaccatgttgttttttgttctgtacaaacatgtctcggcagatgcttgacgctcaagagaagagaatggacgaaagctctagcgcctctcctccggccaagaagtctaaaggcggtgaggggtcctcttctaaagaaaagaggcctgctggggaggtcattgatctttccgaggagctaacttctgcaaacccctctaccccaaaagcttttaagtcgaaggagtctcaggaaggaagcttggacaggtctggaccaccgaaggttgggtttgagctggtcaggagtgaacctgaatgggtgcgggcacctactccacctttgtcggtgcttctagaggcaaagaagggcaaggagatgctgacccattacatgaaccagctggttcctaaggtcagtgagcaactggctagtgttgacaatgactcttctttggaattgctggtggggggagtcttgaaagagttcaccag

SEQ ID NO: 331660 - DNA, 671 bp, Cannabis indica
gagccccgagtgactccgaatgttggtggaacccccactttccctactcttgtatatggtagtgatggtggtgattccaccactaatcagaagaggaaagttacccccagaatctggttgttcggggtagagtaagcggttccgtgggaaccaaggcagaggtggacgccagagttattcttaccctgagtgcccacattgtaagaaacatcatccgggggagtgcaaccggaagacatgctttctgtgcggcatggtgaggcatttcaagaaagatttccctcatgcaaagaaataagagccgaaatcagaggcaaaacctgtacctgctcgggtgtttgccattactcaagctgaggctccagccagttcttctgtggtgacaggttagctccttgtcaacaactccttgtatactgtattgttggattaggagctacacgctcatatgtggttacacaggtaattgatcttttgggtaggccttgtgacatacttgaaagagggtttggaaccctgatgcctagcggacaattggttatctccaataggcgcattaggtctatgctagttaggatcgaggatagggagttgagtgctgaccttatagaactagaattaagtgacatcatacttgggatggattttctgtccaagtattcagccagtat

SEQ ID NO: 331661 - DNA, 549 bp, Cannabis indica
acataactccctctacaatgatgtaccgtgcagcctttctcctcttttatgagcttcaaatctgttatctaggagctccccagtgttgaggtaggctgctattggcgtcatccagtttggggatgtatcaatcatttcaacctcttccgtgccggtgatactcagttttttgagaaactagataagagtcagatttgctttatcatttatgttgcagctcgcaagtcgagctactgcatcagcagttgtgttttcttcccttggaattttcttgagaccatagcttttaaattgagcacgtagatcatgtatttttctcagatatgctatcatcttctgcccccgatcctcgtactctttgaatacatgatttaccaccaatagtgaatcactacagatctaaacgtgttcagctttaattttcggagcaagtcttaggccagcaatcagagcttcatattaagcttgattattagatgccttaaatctgaatttgactacagcgtgcaggtgttgcaccccaggtgtgacaagggcgattcctgcgcc

SEQ ID NO: 331662 - DNA, 1021 bp, Cannabis indica
aaagatgaacatggagtaaaggtagactctacactttatcgtagtgtggttggtagtttactttacttaactgctagtcgtcctgatatatgttacagtgtaggtgtttgtcctcattttgaaagtaatcctatggaatctcatgtctctactgttaaaaggattattagatatatcaatagtactcttgattttagaatttggtattctaaagacactaattctaaattggcttattttagtgatgctgattaggcaggtaatgcagataattgcaagagtactagtggtggttgttttttcattggaaacaatctggtttcttggcataataagaaaaaaaattctatatctttgtctactacagaggtcgagtatatagtcgttggtagatgttatactcaattgttatggttgaaataaatgttgattgattatgattttgaattgagtattttaacaatttttttatgataataccagtgtggaggccaaaattggtctcatgctcaatatcacatgcgatgttttcaaagaatgctcaagtaagattgggttggaatatttgactaattatgatggtacgatcacaacaccaagcccaacgagcccaaaacaaaacagtcaagtcatacattaacattacgcatgacccgtcattgagctcacaatgatctgacccgtatacgagaccgagtcttattactcatctaacaatctttgaagtggtcagttaattgaccatgtaaataactatctcccacataaagtgggggaagagtgcttctaaaggagggtgagtcgtcatgagtaacgtccttccatggacgcctataagagtcactctcgaccactgagaaaggacatcaaatttcagtcatctcaatacatttcacttatcgttcaatctcattctctctaaaaatacatacttatttccacagtcaagataggtggtaacttagttcgatcatttattctcatcttttttattacagtgttaacaatcttgctgacttga

SEQ ID NO: 331663 - DNA, 1295 bp, Cannabis indica
cccttttgatgagaatttgcaagagcaagaggctgaggtgagggaactttttgcaacaacacaggcagcctatttgtcttttctacaacaaaaagaaaaattatcttggctcaggaagggggatacaaactcagcattctatcacaatagcattcgggctagaagaagtcaaaactgcattctctctatttcagatgtgaatggggtaagaactgatgaacctcacctcatttcattcatgtttcttgactattataagatgctacttgggagcaaaatgcagaatataaggaaagtgctgcaaaccattataagacaagggaatgttgtttcgaccacacaagcagatgtgctttttcagagattttctttcgatgaagtcaagcaagcaatttttgcaattcctagaaataaagctcctcgccccgatggctactctagctttttctttcaagacaattgggaccttataagtactgaagtttgttaagctataacatcctttttgcactcaggcaatcttcttagggagataaacttggttgtgttaactcttattcctaaaagtaagtgtcctaacttagtcgctgattatagacctattgcctgctgtaatgttctttataaagtagctaccaaactgatatgcaaaaggttgaaatctgtcttgcctttccttgtatctcaaaatcaaagttgctttgtgcaagggaggttcattggacataatatgatgatctgtccggatctcataagacactatgggaggaaaagtgggaagcttaattgcatgatcaagctagacctgcaaaaagcatatgatacactggaatgggacttcattgaggaaatgttaagtgccttcaaatttccagaaagcttcgtcaagctcatcgttatttgtgagaacaccaaggttttctttgatgttcaatgaatggattctttaaggcaaaagggggattgagacaaggtgaccccatgtcacccttattatttgtcttgtgtatggaatatctgtccaggataatgaagaagataagctcaaagcaagatttcaagttccatgagaggtgtggatatctgaagttaaatcatcttagttttgctgatgatgttctgcttttctgtaatggagactacaaaagcatctattatatgttgcaggggctgaatctattctctcaaacaccaggtctattccctaacccttcaaagacttttgtttattgcaataacatgagtgacacagacattcaaagaatccttgatgcttctggattcaagagacatga

SEQ ID NO: 331664 - DNA, 912 bp, Cannabis indica
ctcaaatgaaagaaaacttggagcgcactcaagcactggaaagagaaaatgcgtcgttcaagaaagagaatgccgcaataaaggtccagcttgagtcattgaatacttcgatggcaacaccggacaatagtcgaagaagattcaaagttccaattgatccaatgcaatcacttgacgataccccaataggcggatcaagacaagtgacctgacaaccatcaacaacaagggcaactaacgtcagggttggacaacaaacaaccatagtcaatcagaatatgggttcagcagtcaattcatcagccattcctccagtagtcaattcgtcagccattcctcttgcagtccattcgtcagccattcctccaacagtcaattcgtcagccattcctccaacagtcaatttgtcagccatccctccagcagtcaacttgacaaacctgactgtccccgaaggctctctaaaccaaaaaccccttactagagcaaacaatgcaataattgatttaacaacttctattgtgaatgcaggagtgaatgttgcacctacccaagaggagttgattgaacaaataattgcacaaaaactggaaggcatggaggccatgatccaaagattcctgggagtgccaattccaatcaaaaagagcctacctagcagctttgcatattcatcctttgtagatgccattgccttggtcaaaatgccaaagaagtttgtgttcccactgatgaaaatgtatgatggaacgactgatcccaacaaccacatagctagctacaagcacaggatgttcactaccgcaatacctcgcgagttacgcaaggcgtgtatgtgtaaagggttttggtctagtctagtcggcccagcccttgagtggtatacaaacttgtctaataattctattgctt

SEQ ID NO: 331665 - DNA, 608 bp, Cannabis indica
aatagataaataggttttaaataattagaaaaaatcagaaaatagataaacaagttttaagctattttagagtgtcacgtcaccgtcttatacttctcctttatatatatatatagattttatatatcaaatttagaataattttagcatattctaaatttgagacattttgttataatacactgaagttgtatttttattagaatgtactagattatatcaatgcatgacattttttttacactccattataatgctattagggaactgattcaagttttacgtggtgcacaataattatataatattttaaagttactaatttttatattgatatgacaatgtgttatgagatattattgctcatattagagagataaagaaggaaaagtaattgttttattattctgaaaatgtaataataaatgatacaataaacgatgctttatataggggttggatatccaaccctagaatacataccaaactcaactaagaatagccatatcttcatacccaaacactaaatattatttaatatttaatatgccccctcaagatggagtgtacaaatttgtaacattcatcttggaaaataactccttgaa

SEQ ID NO: 331666 - DNA, 702 bp, Cannabis indica
gttggatagtctgttgattgaccctccccaatctgtcaactagtctcccttagagaggatccacgatgagatcctaacctctttcagtagttctctcattaaactgccttatcaagtcgctagcttctctgttacggcgatccagctctgcttggtgagatcgaaggatgtactcttggtcatccatccatctcaaaaatttgcgtctctattgtgagaatacatcacagccaacaacgcgtggttcttcagtttggtcgacttggcacacggcttctttaagcttgccaactcgagatcttctcccaagtttacatggggctcgtcgattcccggccctatctctccagcataatattggggacaagatgcagttttggtgcttgggggctgctctatgtgggtcctttcttcactagaaggcatcagtggaagatcctttctaggaggcatgggtcgattattcagacccacaggaatggttgtgtcgacctagccaattgtggtggccaggttcgtggtgcttgttgaggtggcaggagtggccaaatgtaacgtccccgctttaagcctccattgggcccttacacccatggaatgatggcttttgtacacgagtatgtcactctagctgcttcatggaatgatgactgaccctacaaactaacacgagtattttcagcgtgctttgtcctcactggc

SEQ ID NO: 331667 - DNA, 695 bp, Cannabis indica
aaaaaaaatggtagtaattaagaaagcgttttcttaattagtgcctttcatccttttatttatttattttgaaatgaaagatcttatcaatacaaactgagaaaactaagcttgcaaaagatacaaggcttagtgagggaactcttatttatagagattgagttttacaaaatacagagaaagccaaggaaaaactaactgtaacagacataacagaaaagatatttccactcaagaacctaactaacaatacaactaactgtcagtacaactagctttatcatgaaaataggcgttatataaaagtatactattttctataaaataagacgtccattccttgtaacgactagttttagtatatatatactattaaggttgaaaacgtttgaaattatttatttacttacaaagaaggtagtgtaaatggcgtgttgttaatttcttaggtatatatatcttgtacttttaacgtgagtataaattattgaggcaatagtgacacagtaaacgtatgttgaccttgtacaactatgccaagttatttataatatttgaagggcctatatatatttggtaatctatacacagtgggggacccaaaatttaaagtgagggggtgtaaataaatttaaaaagaaaatataaagtgtagttagtggggtttgaacatttaccctctaacctatttacca

SEQ ID NO: 331668 - DNA, 792 bp, Cannabis indica
ctccaacatacttatgctattttccatgaatcataagtagattgtagtatcatttgattattccttgaatccatgtatgttgcctgagaatttaataatcccaacacttctctgaaaccagtatcgtcctttccatgccataaaattcttcaagacatgtcactttagtcttagttgtgtctcacttgtctctcatccctaagtgaggctttccaaacctctcctccttgagtgatgctccacacagttgttgttgtatcgatgagtattggaatctagggatgtcaccttgaatgtaaatttctccttttcctcaagttttgaatttgtgatctactctctaacttcttatattagattctattcagcatactacactcctttacatgatggcattgtcctccttggactaatttctataacagacttatctctaaagtcttcacatacatacttcttactatctaacttaggagggtgtaacttataaaacatccatcaagatagtacttttccttaaagatatattttttcatccttcttaataatcgagtttggtgaaatgccctgtcccagtctagtatagcatcaactatcctaagccattacctacttcctataggttcgctttttttcataactaggtgtggggactgcttctttaaccatttgtagacaggtacaatcctatgcatcggtatttagttagctattggtacattttattatgtgcctcaagttgcactactagtgttggtgatctatggcgctaaacctatgaaaactcttcaa

SEQ ID NO: 331669 - DNA, 755 bp, Cannabis indica
ccatcacaactagaagtaaaactttggaagatcaaccaataacaactaccacttcaaaatctccacatgatgtccctgcaagtgtgccatctaatgcttctgcaaaagttccatttccccaggctttaagacctgctgggagaaatcttgaaaatcgaggagaaatccttgagtacttgacacaagtgaagattaatcttcctttgcttcacgtcattaaacaagtgcaaacctatgctaaaatcatcaaggatctttgcactgtaaaaaggaagcatcatgtcaaaaagactgctttcttgactgagcaagttagtgcggtaattgaacaaaagacacagccaaaatacaaagatcctggttgtcccaccatttcttgtcaaatcgggactcatgaatttagccaagctttgctagacttaggagcgagtgttaatctcatgccttattctgtctactcgcaacttggtcttggtgaaatcaagcctacttctgttgtcttacagttggctgatcgttctatcaagaagcctcgtggtattgttgaggatgttcttattcaagttgacaaattttattaccccgtggactttctcatcctggatactcaatctgtggttaacaaggagtcaaaaatccctatcatacttggaagacctttcctcgctacagctaatgcccttattaactgtaggaatggtctaatgaaaatatcttttgggaatatgactcttgaggtcaatatttttcatgtt

SEQ ID NO: 331670 - DNA, 1059 bp, Cannabis indica
gcccaccttcttctagtgaaggacattctccaattctcaagtggctcgacacgccactctgcccagcaccgaataggatcaagccgtccaggtggaggtggatcatgaaggggagctgaagtccaacagatcgaagagccggatgatgttcgtcctagcagttcctccgaggtggagtaagaggcagaggttgtacccccaaattacagggagtacaatgaggctggggagccagtcgatgctgacggagacgtcctggttgagggcgtggactacatcagtgaggaacttactcctgcagttcctcatagaaggcaaggtgccttgggtgccaggtgggtaacccctccatccagggttactgatgtgcgccatcggactctcgaccagggcggatacctgggtgcattggattgctacattcccgcccacaacaattgggcaacaaaccctgaaagggggatgtgcgcctggtcgggtgcccatgccgagcaaggggcattgatgcctttgcatcaatacttcaagaatgtggcagacttcttcgacttttgctcgaccaagttcactcctaagggcattaaatatctgtctgccctcttcgtcctctacgcttccaagaagtggggtatgccttctcctcatgaagtcagctggctttttgatttgaagtccacccctaagcaagacaggtctgggtacttttatttctctcaaccagacttcaagtggttgacgggcaccgatgattcgaccatcagcaaaattgggcattttgcgaatgagtacttcatggtggatggcacaggcatcactcgcactcggtttcagcagattctgacatatcaccgccctcctctcactcttgctctctgggatagagctcaaaagcttgcttgactgccgggggaagatcggaatatcatcaagttaacctccgaggataactttgtgaagtacgggctccatcccaaggacttcattcctaaaccagtgaaggggaggaagaggaaatctgatgctggacgggttgaacgagctgttgggttttgtgcccta

SEQ ID NO: 331671 - DNA, 560 bp, Cannabis indica
aaattaacaattgcaatctttgtgtttcagttacaaaaattttctttctcttcttcttctctcaagaacaaagtagtgtctaggctttctaaagatttcttcctcttcttatttttcctctacagccgcacccatttcttcaagatcttttcttttcacttgtaatggcagctaaggaaataggtaaggttttcttatctcttcttcttcttacagcaacaactattctatgggatcttctaatatgtttttcttttctagctacaggttcaagagatataagtttctctttgttcttctctatatacccgaaactacacccaaaaatacaaagcttccaccttttattttcggcagtagaaaaatggtgttctagggttttctaggttttattttcttactctccttttgttctacccgaaaatacaaaccaagaaaaacctaagcttctaaccgaaatactaacccagaaaaactctttaacttccggctaaaaacacatcaaaccgaaaatagcaagaacactcaacatacacacaaatacaaatatgaacaatata

SEQ ID NO: 331672 - DNA, 934 bp, Cannabis indica
tctaccagtgttgaaacttttgtaattctgttttgccgctttggtcggctaagggaaaagacttgtaatattttgtaaaataatttttgggatcccgaaacatgtaaattttgtttgtaaggttaaaattattacaagtttatttttcattttgttttcgtttaaagtttaatttccacgcttattttattagtaatcccgtttaggggattagggtttcttaatcatcttgggtagcgtgcctaaatgttaggtcgttacagttgaggttattaaaaagatttaagctcgtatgcttgcctcacaaagtggacagaaaagctacgctgatccaaagcatagatatattgagttccaggttgggaactttgttttcctttgggtgtcaccaatgaaggggattcagggatttagaaagaaagaaaaagtaagtcctagatttattggtcccttcaagatcttgaagagggtaggtcaagtagactatcgactagctttaccccctacttcatttggagttcacaacatgttccacatttcaatgcttaggaaatatgtgtttgattcgacccatattctgagttatgaggacattgagcttcagacagacttatcatacgaggaacaacctggtcagattttacatagaaaagaaaaagtattgccgaacaagaccattctgctagttaaggtactatggagaaatagtaagtttgaagaagcaacttgagagttagagtcgcagatgtgggaatagtacccagagttgttcaggtaaattttgaggacaaattttctataaggagaggatagttgtgatatcccaaaaaaatataattatatttaattggacatattttattaaatatgtaattatataaatattagagtaagattatagccttacttgagtcaattatgagataattagtga

SEQ ID NO: 331673 - DNA, 865 bp, Cannabis indica
agatcctggtaaaataaattccaacataggagtgatactgatttcaccagaaggcttcaagtttcactgtgctttaagattccaattcaatacttcaactattgaggccgagtatgaagccttgatgactggtttaaagatagtggaagtgatgaaggtcaaaactctcatatgtcatagtgattcacagccgataattaagttcttggggaataccaagctaagtgctaaaaaatggtaaagtacctagagaatgttttgaagaacttggaaaggtttgattatctcaaaatcgagcagataccaagagaacaaagctctaatgctgattctttagcaaaactggcctcgcataacgaattggatgaaatgaacttggtaccggtggaggtattaaacaagccaagtatatgtgagaaggaggaagtcaagatgatagatagctcgcctacctagatgacacctatttaactatcttctcaacggacaaattccaactgacaaaaacgaggcacgaaaacatctatattcagtacctcgctacacaatagtggaaggaaaattatatagaagggctattcaaacgagaacatcagagaaatccatgagggttattgtgggcattatgcaggttggaaaagttgtccaaaacaattatttgacaaggatattattggccgaccaaaaataaggtgttgtcgagtgaatttcgcaacaccaaattatattattttactaatacgaaagagaattttaagagaaacgacaagtgcgagtattcaacctagaacggcgagtactcgactaggaatgggaaaacaatcaacaaaactggaaaatatcaataagacagagaattatagtg

SEQ ID NO: 331674 - DNA, 1222 bp, Cannabis indica
gaagaataagtggttgaaataaagtggcaaaattataactagtaaaaggcccttaagtggtcggctactatgtgtgatttttacccattattttattgtttttaatctatataattcaatcgtaagcactagttaaaacactataacaggaacatgatgctctcatctcatccaacactttcaacctgccgaatctagtttctaactctgtcacacaactagtagatgagagataccttctatagaatttcaaaccctcctttattattcttcacctattcgacctgtagtgataaagtgccataccaacagatagcaagtcaaatactcaatcatagtgcagaaggcagtggtaaccaacccggaggtgagaaagagatccagtgaaacgcccgtatttgaaatactaaattttcaaactaactttaatacatattataattacttaattacaaagtccgggatcccgaattttaaaacatagtttaaaacgatatttgtattttacaaaactacgttgagattttttttatatataaacatgcacaagcaactcaaaatacatcttaaaatatttgaaagatcgaaaccctccaggttgcactgccacgatatgtacaatcactgccgagctctatctcactgtacctccagcttcacttttcctttacctacacaagatagcaaactgatgagtcaacactcagtaagataagcaagacatatatataagcaatgcggtgtcgactttatgtttaagccgccctgagctcaataattgagctcaccaaattgataagaacgttcttaagggaagtacgatctctgtaccaaatgcactatagtaccaaccctgtacttgtgttggcagagccattattgtactcccaggaattagtaagtgttgtaccacatgcacgacgtaccccctggtactcgtgttggtaacactgtaaccctactgataatctacactatactaacactctttaaagcacaaacatattagtgttagtattgtaaacatccaaaacaagcattcattcacatatatgtaatattcatgctatcttacctcgctccgtgctcaggtgtgccggtcagcctgagtggaagtgtagctcgacgctttacacggccctaaaccataacattcaaaacttaatgagagacactctaaaacacttatcggtgattaaaaatcaaaactaagaataaccct

SEQ ID NO: 331675 - DNA, 763 bp, Cannabis indica
aaaaaatatttttttttctgtttttgaaaatattttatttcgattctgttcccctgattttgccacaaatacgtggaccaatgcgatcgcgacacatagatttgaagagtatggctttggtataatttggctaagtctttgtaaacctaaagggtcggctaaagaggcacctcctagggaaggcatgaggggaccacgcactctggagggcaaagctatagcaaagcacttccgggagatatcagaccccctctcaacagtcatctcgcatttaatgcagcatgggagaaggcgtattggtattgccataaatattaagtctgacggcgtaaccccccttctgcagctattacgctatgatttataagcctagtgacggctactttataagggatcacatcagtcaagaagggataaaggagtatatctatctaacccctgaaatacctaggggacagaccatacatttcctattttgcatgagctaagaatgcatgcccctactgaagttacacagaaatatatatgggacaattctagggattaccctagaaaaaatactataaataccccccaaacacattaaggcaggggtcgagaattctgggcttcgtaagaactaaatagaaaagtcaccaagaacattctctgtaataaatactctcataaatacaaaagactcgtaaactaaggctcattaacggcccaaccacgtaaaaatctcatgcattaaacttctcacagctttctaatatattattat

SEQ ID NO: 331676 - DNA, 616 bp, Cannabis indica
ttgaatgggagtgatttgaaattatgtaatgggttcccctttttaaacgcgtcagaccattctcgccgcggccaaattccgagaaaaaaaggactttctgtaactcttaaatgggcgcggcggcatgtcccctcgccgcggccagataagtgtgaaaaaatcacctctctgtaatgcttaaatggccgcgacggctgttcagctggccgcggccactgggcgaatccccaaaaaaaatactttttttttatgcaatacataaataacaccaaaactaaaaattgttttacaagttttctaaacaaaactaaacagaacagaaaaagaaaataacactaaaacataaaagagttcaactaaatcataaagaacacttgggttgcctcccaattagcgctgcctttatcgtcgcacagctagacgttgatcgagttcttcatagtggcgccagaatcatggcggacttggcttgatcaaattgacctcccaagtagagctttaaccgctgcccattcactttgaaagtattagggccttcacctttcagttccactgctccataaggaaacaccttgatcactgtaaatggccccgaccaccttgacttcaatttacc

SEQ ID NO: 331677 - DNA, 807 bp, Cannabis indica
atgtccaacttcagtattttcacgaccagtgtcatatagtttccctacaacacgaaaaaacttttggcatttaatttgtagtgtctgtcaaaccagctaataatagatgttcaagaatggatctcttcataaaaatgagacgcctatacctgttataggcgacggttttaaactatcggaaatgtaaaaaaaaaaatacattgcagaaaaatttgtattttcccctattctttttcttgcattagttttataattttacctaatttaaaataaaacaactaattaattttattacaataactaactttaaaacacattaaatttatataataacaaaataaatatatataataaataaaagagtatataaataaataaatgtatatatactgagctcagagagagagggagacggacgggaggtagtggtggtccgacgtatgagacggagatgatagggacaccgacgggaggtggtggtggtccgacgtatgcgacggagaggagagggagaccgacgggagaaggggtgggtggagatcgatggacgagagagacgagaagaaagggagatcgagagagggaggaagacgacgagagaggagtgcaatggtgcatatgcgtggtgtagattttggaaagttgagattttcgtttagggtgtgggaaatggagaagaaataggtaggcatgtgggaaatagaaaagaagtaggtgggcatgtgggaaatgtggtaagaagtaggtaacaatttttttattgggcttttatactcgacggttttaaactgtcgcctataagggccc

SEQ ID NO: 331678 - DNA, 563 bp, Cannabis indica
tgttaccttgttcacaacccaccaaaagtctcttaccatcccgtcaatccttgaagccagtttttttgagagtttcgtcatttgcatggtataaacaggcaatgcaaggccaacagatttgatcaacgtggcacaacctgccttagaaagtgattttaatttccatccatgcaacttcttcaccaaattatccaggataaaattgaaatcggcatccttctgatgggatctaaacaaggggagtcccagataacttatgtttcccatcccagataactcatcttcatcccgatacttgtattaccagagaagaaaatggatgttttgagcttgttaatactttggcccgaccaatcacagaatttctctaagcactgccacatccccttggcttcaatcaaatttgccctgcccaccagaattagatcatcggcaaagaaaaggtgggacaaagatgggccatctctgctcaacttaataccttttatagttccacagtttagggcattctcaaggatacgtgaaagaatttccgccgcccagataaaaatgtaaggggagag

SEQ ID NO: 331679 - DNA, 1036 bp, Cannabis indica
aactaaagcagctacaaaaacaccttatgacctttggacggggcaaaagcctagtcttaagcactttcacgtttggggatgtccagttgaggctaggccttataggccaaattaaaagaagttggaacccaaaaactatgagcagctactttattggatattatgagcgatctaggagtttcaagttttatgatcccaaagtaagaaatatatttgaaacgggaactgtaaagttttttgaggatattgagttttggggagaaatattgttaaagactttattttttaggaggatttagaatcaaccactcctcttgaagatgagttgattcctattccattagttacttttgacaatgttcaggattccaatcctaatattgatcaagttttagatcaagagcaaccaaacatagcaagcaaaccccagaggtacaaactcaacaacctcaagaataagtacctttgcgacgatccactagagaaagaaaaaatgctataaatctagataaatacatagtgtatcttcaagaacatgatgatgacattggaatgatggaagatgatccaataagctttcatcaggtcatgagaagttctaactctcaaaagtggaatgatgccatgaatgaatgcaagacaataaagtttgagaagttatcccattaccagaaggtgtaaaactaattggttgtaaatggatatttaaaaccaagagagatgaaaatggtaatgtggtgtagtttaaggcacatcctgtagtaaaagactatactcagaaataaggcattgattataaagagactttctctccaggttcttcgaaagactcttttagaataataatagcacttgttactcactttgatcttgagttacattatatggatgttaaaacaacgtttctcaatggaaaaattgatgagacaatttatatggagcaactaaaaaactttgtccgtggtgacccaaagaaaatggtttgcaaattaaaaaaatccatctatggacttaagcaagcttctcgtcaatggta

SEQ ID NO: 331680 - DNA, 684 bp, Cannabis indica
aaatgcgatggatggctagtttgattacatgggtaagtttagaaccttatttcttagtttgattaagcggggttatggtttttgaccattttacccatagactttatttttgcttaagttgtaagtaagggggcattttggtcatttaaggagatgattaggtggcttccttttggtcttggcagctgtccatttgattgtttcagttggccattttgtgtagaaattaaaaaggaagtatcaattatgagaaataaagaaaaaaatcaaaaaaattagaaaaccctctcccttttcctctttccccttcgagtctagcaagaacagccaaggacttgggactttggattgaaattgtggtggtgtttagctgaattcaagtgctgataatcaaaggtaaccttagaactctaaaccttgtgtaatatgaagctttgaattttagtttgtttatgctagttggtgatttaagggctgttaaggtttgggtgaagtataattcgatttttaggtttaaattgggtttatttgatgatttagcagctggttgtggtctgtgggattggtttgagcaagcttgaactttgaaactcaagtttaggtctttaatggcataatttgttttggtgttttttttttctatgaattactggttggagtatgttgtgtatgcactatctaggt

SEQ ID NO: 331681 - DNA, 595 bp, Cannabis indica
tcaaggtgtgggtttgagttcgggtccaagtctatgtccgggtttgtgtccaggtctggagcccgatctgggtctaggttcgggtccaggtccaacttgaggtcccgagtgcgggtccaagtttgggtcagggccaagatctcggtccagatccaagtccaacatttcgatcccagtctgggtcttggtccgagtccaggttcttatccagatccctatctaggtccaagtctgtgtttgggatcgggtcccagatttaggtccaagaccgggtctcagttccggtctgcgtacacgatcgtgtctgggcctgaatttcagtctcagtttgggtctgaggctaggtctgtgttcggttctacgtcttggttcgggtctttgtcacagtcctagtcttgttctagggtcctggttcggcgattcttgttcaggtttaaattttaggtcccaggtctacgtctgggttcgggtttggtttttagtcttggttttggtcctaatctaagtcccagatctagacaccgactactagtctgttcaaggccccgttacccgaatcccaatatccggatcactgtcacgggtctcggtctgg

SEQ ID NO: 331682 - DNA, 766 bp, Cannabis indica
tcataattttagggtattacaatttggctcgctcagcatctccaccgaaactaagttcaattcatccaagtcattctgcgaggccagttttgctaaggcatcggtattggagttttgttctctcagaatttgttcaattttaaagtaatcaaatctttccaatttcttctaaactttctctaaatacttcgccatttttaagcctttggcttggtattcccgaggacctggttcacaatcagctgtgaatcactactacagatgaggtttttgactttcaatgcctcagctatctttaagccagcaatcaaggcttcatactcagcctcatatttcatgcgtcaaattggaacctcagagcatagtgaaacttaaagccttctggcgatattaatactaccctttcacccgaaccttattcgttggatgcaccatccacgtataacttccaggtttccgcatctcgctgaacaggtggaatttcttcaagagttataccttctattaagaagtcggccaaagcttggcccttgagggatgttcgaggatggtatgttaagtcaaactgccccagttcaatcaaccattttatcaatcttccaaaagcatctggttttgataaaacttgtctcaagggctgatcggttaacacttttatggggttcgcctggaagtatggctgtagtatacgagacgcatggactaggcacaacgcgagttcttctagagggggatatcgggattcttcccctagtaaccttttact

SEQ ID NO: 331683 - DNA, 513 bp, Cannabis indica
ttgactttcaacgcctctgctattttcaagccggtgatcaaggcttcatatccagcctcgttattagatgcgtcaaaatggaacctcagagcatagtggaacttaaagccttctggcgatattaatattatccctgcacccgaaccttatttgttggatgcaccatccacgtataacttccaggattccacgtctttccgattaggtggaatttcttctatcaagaagtcagctaaagcttggcccttgacagaagttcgaggatggtatgttatgtcgaactaccctagttcaatttaccattttatcaatctttcagaagcatggttttgataaaacttgtctcgagggttgatcggttaacacctttatggggtgaacctagaagtatggccgtagtttacgagacgcatggactaggcacaacacgagtttctctagagggggatatctagattctgcctaaacttttacttacatagtaaataggttgttggtgcttgccctcttctc

SEQ ID NO: 331684 - DNA, 686 bp, Cannabis indica
gaatggaaaaaccaaattagtgaaaaatgttatcgcttttgctaaaggtgatcttgaacaatggcttcttgctcaagaaaaaactttcactccctcttcttatgcgatttagggtgaaggggatgagcaatggtgtgctcatgaggaaaacaattacaagatcaatgtggatgcggcaacgtttgttgaaaagaatagatttggttatggttgggtgcttagggatgctagaggtcaggttttacatgctcgaacgaggtcttggagtggttactgtgaacctgtccttgccgaagctcttggagtgaaggaagccctcagttggataaaggcatccaagattacaaaagtcaccattgaaacagatagtctcattgttgtgcaagcttttcgaagctcggtgacttttacctctccatttggttgttgtatcaagaaatgcaagaggatgtttttcagatttaatcaatgtttatttatgttttgttaaacgttctgctaattgtgtcgctcatggtcttgctcgagtttcatggttaaatgcttaacgtagttactcgtttgattctcttccgagtaacattattgatgtaattgtgcaagaatcgttataaataaagtttcagcttttattcaaaaaaaaaaaaaaactatacaaaaaaggcttaaggctttgattcaagata

SEQ ID NO: 331685 - DNA, 1118 bp, Cannabis indica
agctcggttcacggttcagtaagcccatacttgtttagtattatatgtgattattaaagtatgttaggaggcatattagattagaattatttgttttaagtgtattgcctttaattcaataagagcggtatcaagttttatgatcgctgtctaacgtggcaggcttatgggttcgtaggttaagtcctattaaatggacgcccagcgaaatacaagaagtcagggtaatatggttgagaccggaggtggtcagggaaatcgaattccccagaatccccgtagtcgcggtcgtggccgtggaagagctcaaggtggttgtcctgtaaatccaccacaagctcctctggattaggagcagaggtttgcagaaatgcaagatcgaatctgccaacaagatgaagaaatttagagattaaggcagcagggtcttcctgcggtgcctccacagcaagctcaggctgttgtagctccagcggtgccagcagaacaacctgttgctggcgaccgtatggagccattatacgaaagattccgtaaacaagcacctcctgtgcttcttggaggtctagatgtgatgaaggctgagaagtggctcactgtgattgagcgaattttgaattttatgggtgtggttggtaatgatcgagtgacctgcgctacatttcaattccaggaaggcgcccttgtttggtgggaattggtgtccctcacctgggatatcactgtaatgacctgggaggagttctgagagttgtttaacgccaagtattataattaagccgtccgcaatgctaagcagaaagagttcgctgagttagtacaaactgaggggatgtgagtcgagtataccccaagtttgatcgtttggccaaactcgccatgggtattgtgccaacagatttcagtaagaaagaaaagtaccttgtcggtttgaatgtgaagattagacatgatctggtgatcactaccgatgaagtgacatcatatgcggagatggttgaaaaagctctgcgagccgagggtgcggtaaaattccttcaggatccccaagtgacctcgaatgttggtgggacccccaactttcctactcctatttatggtagggatggtggtgattc

SEQ ID NO: 331686 - DNA, 571 bp, Cannabis indica
agctcggttcacggttcagtaagcccgtacttgtttagtattgtatgtgaatattaaaacatgttaggaagcatattagtttatagttgtttattttaatgtgttgccttaaaatccttacgagcgattatgatcgctgtctaacctccctagcttatgagttcgcaggttaagtcctattaaatggacgcccagtgaaatacaagaggtcagggtaataatgttgagactagaggcggtcagggaaatcaaattccctagaatccccgtggtcgcggtcgaggctgtggtagaattcaaggtgatcatcctgtggatccaccacaagctcctccggattgggagcagaggtttgtgaagatgcaagatcatatctaacagcaagatgaagaaattctgagactaaggcaacagggtcctcctacatttcctccaccacaagctcaggctgttgtagttcctacggtgctagtagaacaacctgtttttggaaactgtatggaaccgttatacgagaggtttcgtaagcaagaatgtaacaccctaactagcataggcgtattacgtgatt

SEQ ID NO: 331687 - DNA, 1143 bp, Cannabis indica
tgcacaaaaaatagaagcagtaaggaaaaaataagaacaaaagcttttttacgtggttttgtaattaaaattttgcatagtccacgagtcaatcttgttagattttttatacaattcaagggcctttttcctaatgaatttttcatccctttttcagtgtaacatgttcctatttatagttacataggagggcagttaattacaatcacactgatatcttacaacaataatatcttgaaattgtgggatttgattacgtcccacgtaaaataaatgcggttattatttgaaaatcatacagctgtgattggtccgctttttgttggaaacttgacgcacagatggaaaactgatgtaacaactcttaagtcatatagggcctatcggcctaacatcacattaaaggctgaagggacatcaattatcaagaattgttccattatagttatgctcctcagagcttgtctaagagtgagatgtaggcggatttgtcctagaggtgcaacgctctagctggagaaaccatataaaaagctgggtgcaggggatcaagtctttatgttggagtcccattttctcataagttgtattgaacaagaatgtttgaggaagctccatttctatcatagtctgtgccactgtcttatttgcgatttgcacttccacaaccaaggggtcattgtgtgggaagtggttgtggctggcatctgcttcagtgaatgttatcgctggctcccctacctgtggtatttttggttataacattttcgcgcaacttgttgatttcctttaggcacactaccccattctttgttgggaacttgatgcacaaatggaaaattgatgtaacaacttttaggtcatataaggatggtcgcctaacataacattaaaagctgaaggaaaatcaattatcagaaattgtgccatcatagttatgctcctcggagcttgtccaatagtgaggggtagacaaatttgtgcaaaaggttcaacactttggccggagaaaccatacaccggttgggtacaagggatcgcatctttgagttggagcgtcatcttttcatatggtgttttgaacagaatgtttgttgaggctacattgtcttgttgggttttgagccctaaataaaacccatt

SEQ ID NO: 331688 - DNA, 697 bp, Cannabis indica
cattcggcaaacatacgcctctactcttcaaacgcgagatttaccgcagcacggaggtcctcctgatcatgatgtaaggtgttggtatgacacttcattagtccaagagcaacacggaggttctggatctcaatgtcatctccaatggttgtttgctcattggtggcgggcgaaatgactatgctatgaacgccctggtcgactcttgaactggtattccagtctcttgcacaccaggcgcaatctcatccacaggagtcgtcacacagtgacgcgcagttgacggctgtttgggatttacagctggcggaacccttgtgtttcctggattctacagtgcaggatccactgcccgtggatttactagatcaaccacgcccctacgagtttgtaccaccatcgtacttgttattaaatttagaatgaagagcgatctttgactcttctctcaatgaaagcaccaaaatgttgacctcgctcttagccaacgatagtgagtctaattttgtaagcgacaagtagttaaacacaattgaaatattataaagtaaataaagacacaagaattttatagaggttcagccccgagcagttcgataatagcttaatcctcgttatttatattgacttaagaacaaggagaaaggttccttttcttatagctcttaccacagtatctcggaatatgaattcttag

SEQ ID NO: 331689 - DNA, 528 bp, Cannabis indica
atttaattatctaaaaataaattcagtggggacaaatcctatctttaggtgcctatcactgtgtcctaaccttatgaaagtggtgccacctctgtcctaaccagacagtggtggtatttttgtctagacaacttttatcttttccctaatttatttaattaataaatttgaaaataaataattactattttgataaatcaaaatatattttttccaaacatcaatatacaacttttatccatacccttgataatatttcaaggtggcgatctagggaccatggacctataatactaaactctaataaactagattatttattgaatatcctcaaccaaataatcttgtttattaatgctataattactcaactataaatatggaattgaattcttaataattatagaattatatttactgagttttactgcagtgtccattgatataattaattccagtgattagtcctccttgtgtccatttgtaattagttttggttaaattctattttaaccttctaattatttc

SEQ ID NO: 331690 - DNA, 681 bp, Cannabis indica
tttcgttgcgatgataaatggtcgccgggacatcgctgcaaacaaaaagagataaatgtggtaattatcgctgatgaaattgaaggtatcaattcagaacaaggttcagaagaggctaacgagggtgtggctgatttagaaatggcagaactcaagggtacagtggaagtctctctacaatcagtagcgggtctttcttcaaataagactatgaaattgaaggggctgattgaacaatgtgaagtggtcatcttaattgatcccggcgccacacacaatttcatctctcaagtgttggtggataaactcaagcttcctattgttaagaccagtcaatatggtgttacaatgggcaatggagattccatgcgcaatgaagggatatgcaaaaatgtccacctacacttacaaggggtagaaatttttgatgatttcctacctttaaaattggggagtgctgatgttattttgggacttcaatggttggcaactctagggatgacacacacggattggaaacttcaaacgatgcaattccaaattggcagccaacaagttactatcaaaggagacccttctcttgagagaagcctcgtctcgcttaagaccatgtctaaaacaatgtatgcagaggggaatggccttttaattgaatttaattttgggggcctagaggagaac

SEQ ID NO: 331691 - DNA, 617 bp, Cannabis indica
gaaaatgctcagccaagggcagaatcagttcgagccatcaatcaaacaaaacaaaaatgcttatttatcataaatcgcataaaaatcgcacataatcgcagaaaaaatagagaccaaatggtacacgtcatcgcacaaaaattgcacaaaatcgccaaacaatcgcataattcccacaggcacgactgtcaggtgaacatcgcacaaaatcacacagaactcgcacaacatcgctcaaattcccaaaactaacagaaatcaaaattgcatttttaatcgcataaaacgtcgcacaacatcgcacaaaatcgcacaaaatacccaaaactagaaaaaccaattccccctattctagattcttctccaaacataaaaactggcaaatcgaacataatttcaactacatatttcagttatatcacagattctaaatgtaaaggataaattgcaaaaaaaaaaaaaaaaaattaagcttagcccatacctggttcgtggacggtgcttgggacgatgatgaacagagtgggtctcgtgggtcaactgggatcgagtggctctcgtaggtcgtgagggatcgactggctctctgttagtttgtgccttaaataaaactcatt

SEQ ID NO: 331692 - DNA, 545 bp, Cannabis indica
atgatgacctcgccctacccatttgctatttgggggattgatctgattggggcacttcccacagggccagggggagccaagtacgcagtagtagcacctgacttcttcactaaatggaccgagactgaacctcttgtctccataaagttctcgactttgttatcaaaaacattgtctacaagtttggaattccaatgaagatagtatctgataacggaacttagttcgatggtgacttgttcactaagttctacgagaggaataaatattaagagattctcgtcagtatccaggcctcaggcgagtggacaagtgaaagctattaacaaaaccttgaaggatactatcaaaaagaagttagatgatgccaaaggtagatgggtcgacgagctacctcaagtactctgggctcacacagcaacgagaaatactccattctcgctagaatttggcttggaagcaatgttatctatggaagttgtaagaactgttattttatgtagtgacaaattatgtccagttgcattccagttgcatctgggact

SEQ ID NO: 331693 - DNA, 877 bp, Cannabis indica
tatttatttttgtgtgtttttcaagagaaatattggaagattttcatttttacttattttagtattttataagccttttgagataaaaatagttaattatgaggaaaaagaaacttcaagatgtaaataatacttagttgggattctcattgattaataaggatcaaagtttgtattttagcttcaaaacccgtggtccatagtcaagagttgttactttccaataataaaatgaagaaatgagaaaattcgggaaactgctctcgaagatcgcaatcagcagggaatgttgcgacattcacttggtcactggaagaagaaaaagaaaaaggaaactaagaattggcaaaaacatggaaagtggaaatctcgctttgaatgccgcgacattcaaggtaatactgcaacattaaaaatttctaggatacctttttaatttcatatttaaagggggtaaggagctaagttctgactttattcgaacttggagactaattttgcataggaggaaggctaggaccataagacaccaggactccaaacactattttatatatatataaatatatatatgtatgtttatcttttgtttttaattgaatctttattgttttagagtgacttttaataattaattttctttaagatttattatgtgaaccatttgagtttattttatggattgatatagttattcaattttatcttcttctcttattttaatttcatgcaatctgatttgattttacaattattgactgatcacctataattgttatatatgaattcgaatcaaaattctgaaaagtgagatttgaatacagtttgattgttatggatgcaaattgatttatgacgaaagtatctagattatttg

SEQ ID NO: 331694 - DNA, 551 bp, Cannabis indica
cctaattattatatcttattattgtgttctatgttatatacaaatagatcttggatttattattaatttttctaacatatatatcttggtgttgatttcttatttttactgtgttattgttttctggttgttcatactctgttcatccttgtttttcgtttgattactatttgtgttatgttaatcttgtcattgttaatcatttgattgtttaaagtttagttgatttgattttgcaccaatagttgtatttcccacaaaactaaatatttctttctacataaattttttatcttcctttaaatttgttgttttttattttattgttgttggagacatataaaacaataataatttgttttattttgttgttagttatgtgaaagaaaatattttttaataaatattaaataatttaatattaaaaagtaatcaatacaaaataatcgatctaatcagcaataagattggatttgagttactgtgcagattggatttagattcaaaatataaaatctacacttaatttggatcggatgcactatgaacaa

SEQ ID NO: 331695 - DNA, 664 bp, Cannabis indica
tttaacattgggttcaagatattatgaaatcagtatatataaggaagtagtgcaaaatttgctatcgaaattgaaatttttgagagctctatcttttcgtggtcttcaaatgactaagttctctgattcaattggtgaattgcaacatcttcgctatttagatctttccaagactacaattgtgatgctgcccgaatttgtaactaaattgtataatttgcaaacattgaaattaaatgattgtgatcatcttcaaactctgcctaatgatatgcatcatctcattaatttgagacatcttattatcagtggaaaaagtctagttgagatgccaagtcaaataggcaaattgacgaatctccaaattttgacaacttttgttctgggaagggatagtggcgccaaaatagaagagttggcagaacttcaaagtctacatggagagctctgcattacgaagttagaaaatgtggttacaaaagcaccaaatcaggtgaaggtactggagaagaaccaacttgagaaattgatgttggaatggatttatattgattctgatgttgatccaaagcatggagagggtgtgctcgaaatgctttcacctaatagaactttgaaggagcttcaaatttttaattacacgggcaaaatatttccaaattgg

SEQ ID NO: 331696 - DNA, 970 bp, Cannabis indica
aaagagattacactagagcccagctgaaaaataagtgggatggattgaaaaatgaatggaagctttagaagcatctcaagggaaaagaaactggtttaggatggagtatgcaaaagaatacaattgatgcaactgaaaattggtgaaatagtaaattacaggtacattataatcttgttaaatatttatatgaaactaaaagacttttttatgaatggtacatttaatcaacaaaattgcttttgtagactcatcccgatgctgcaaagtttcgcattcggggaattgaaccagaagtagaagaaaaattagataagatttttatgaacactgttgctacaggagagtatgcttggacaccttcatctggaataattccatctgagtctgaaaagccttttaatgatactgaaaccttacatgaacaacttgagagtagtgatgatgatctagagacgcctaatattgatagattttctaaagagaaaattagcaagagatcaaccgagccacttgagaaacaaaataaaaagggaaaaatgaaaaagggaaatgaagaagacagggcctgtaatgatatttgaacaaattggtcgccttgctgatgccgtggagacaagaagtagaaatattgaaatagctagaaaggagaatagtattgccgaagttatgaaaatattaaattctttgcctgaaatcgaaaaagggagcagcttgtatttatttgcaactcgcttgtttatcatgaaagagaagagagagatgtttgcttcattggaagaacctgagttgatgcttacttggctcaagaatgagtatactttggaatacttataatgcttaaatcgctcagaatagtagtatttattttctaaactttgtgttatgactttaatatatgtttgttatgttatttctttgattgtatttgctctcaagactttaacatatgtttgttatgttatttctt

SEQ ID NO: 331697 - DNA, 1238 bp, Cannabis indica
gaaaacaagagagaaggagagggggcttgagagagaaaacaagagagaaggagagggggcggctgttttgcagaaaatgaagtggggggaagaaagaaggggcttcgtagcccctgatacatatcacaccttttaccggcgcatccaattgcgccggtaaaagtattaaaaaaataaattgtaaacctaaggcaaaacgagcgtttcacttaacacttttgccggcgcataattgcgccggcaaaagtggccccacctaccacataaaacccacgcgggaattttccctccaatttttttatgccttttgccggcgcacctatgcgccggtaaaagtataaatgcgccccaaaaatgaaatcgaaggcggcaaattctcgcgcctaatggttttatgttttaccagcgcatttaatttgacatcgccggtatagctatgttttgccggcgcaaatatgcgccgacaaaagtaaacccaaaataaatttggcagtacacacatttgtttgtgtcgacaacttttgccggcgcatgtcacgaaatgcgccggcaaaaagtcattttcttgtagtgtattgattgtaagaggaagatggtaatcttctaaccagaaggtgaagaaccgtttgtatttgttggatcggtttagggatctcggatcccagtaatttcactactaacagccagggaattgttacgagatggatgtctagggtttctggccgtggtattagataccacttggtttgagtctgttcggccagaggacatcaaggtggttcggaaattcttaaatgtttttcctgatgaacttctgggtttgccaccgtaaagggaaattgactttattattaatttggtaccttgagcagaaccaatttctaaggccctttacaaaatggctctagcaaaacttaaagaattgaaaattcaacttcaggggttgcttgacatagggttttcacggccgactgtgtcaccctggggagctcctgtactatttgttaaaatgaaagatgggtctttgcgaatgtgcattgactactagaaattaaataaactgaccatcaagaataaatatcctttacctaggatctacgatcttttcgatcaacttcaggggaaaatagtattttcaaagattgatctcccatcgggctatcattagttgagaatccgagaggaggacattgttggatattattttacgaggatcttagatccactcacaagtatgt

SEQ ID NO: 331698 - DNA, 651 bp, Cannabis indica
ccatcaatgtttaccttcaaaaaaccagctgcaggtggagtccaattgttgctgagattgctggtgtcgttgatgacagcaggaagtggagagaacctgtttgcagcagctgatttccattggttcaacacggttcttgctgagtttatcacttccacggctgtagtaacatttttattccaaagcaactcattccttgctttccaaacagcccaagacaccataagagcctcttccaacaccacggtttggccattattcaaaattttctccacccaggtcccaaaatctgatgccacaaaagcaccagtaggcacacaagacaagttccaaactgatctagcaaaagagcaggataccaacacatgataaatcgattcctcctcaacgttgcagcagacgcaatccaattgcacaggtacatgtttggtgtagagctgagtacgagtgggaagacaaccggttatggctttccaagcaaaatgaataaccttaggcggtactttaagtttccataaagatcgccaaagattcgattccatatcagcggaccatcttcctttcgaaacttgcagccattggtaacaactcttgacagagtaaaacccagaattttcatgttgccaataccatacatcagccacttcatta

SEQ ID NO: 331699 - DNA, 1159 bp, Cannabis indica
tcattgttggaggctttgaatccgaatttgaccgctgcatgcaggtgttgcccccaggtgtgacaagggcaattcctgcgccggatagctgatctgtggcagatctatccacgtgaagcctccaggtcggcttattttcagtgctgttcggctgtggtgttggctcgggatcgccttttgggatgcttttagtttttcctgtgcattccaccacaaagtcggccaaagcttggcctttgatggttgttcggggttggaaattgatttcgtactaccccaattccaccgcccacttgagtaatcgcccagaggcgtctgacttttgcagtatttgctgtagtggctggtcggtgtacacctgaataggatgagcttgaaaagaaggtcttagctttcttattgctaagatgaggcaataggccagcttttctatcaacggtttggcctcgatgagtcttttactaatgtaatagactggatgctgcacgccatcttcttctctgattagtacggcgcttatggcatgctccgttactgccaggtataaccctagttcctcaccgtttagaggtttagagaggacgggaggttttgcgagctgtgcctttagatcttgaaaagctctttcacattcttctgtccactcaaactttttgtttcctcgcaggatgttgaagaatgggacacgtttatccgttgattttgacacgaatcttctaagtgcggcgattcgaccagttaggctttgtacctctttggtttttgttggcgagttcatatccaggagggcttggattttttcaggattggcttcaattcctccagcgttgacgatgaagcctagaaactttcccgagctgactccaaaggagaattttaggggattcagtctcatgttgtgttttctgaggactttaaaacattcgtccaggtcgtctatgtgccccccagcctttctggatttgacgagcatatcatccacgtatgcttccatatttttgccgacctgatctttaaacattttgttgaccagtctttggtatgtagctccggcatttttaagaccaaatggcatgactttgtagcaatagagacccatatctgtccgaaaacttgtatgttcttggtctggcggatgcatcttgatttgattgtagcc

SEQ ID NO: 331700 - DNA, 500 bp, Cannabis indica
gtcatcttgaagctccaaccgaggcaccactaggctcgatttgaaccacaatagtgaggtgtttttgaccaagaccattcaaaacattagttagtaagtgtgactcgggataaggaccacctactatggcgagggtatctacccaagtgcgcatctgtcgatgataggcggacatggtcatattctccttgtgagttatctgtaaccaagttcgagtatcttcaacttttgcttttgagtatgctccatagagtgtctcaagagcacaccagagattgcaggcagaggtacatcccattacttcgaatgcaatggctttgatccgtaaagccaacccatgagaagctggtcattgattatctagacttcgtaatttggattagggtaaagttcaaaggagggtgtaccatcatttgttgaaatggctactggtatgtgttgactttgcttttagccaacgacaatgagtctattttataagcgataaacgatatgtagta

SEQ ID NO: 331701 - DNA, 664 bp, Cannabis indica
cttctggagttataccttctatctagaagtcagctaaagcttggcccttgatggatgttcgaggatggtatgttatgtcgaacttccccagttcaattgaccattttatcaatcttccagaagcatctggttttgataaaacttgtctcaggggctgatcggttaacacttttatggggtgagcctggaagtatggccgtagtttgcgagacgcatggactaggcataacgcgagtttttctagagggggatatttggattctgcccctagtaaccttttacttacgtaataaataggttgctagtgcttgccttcttctcgcactatagctgcactaatcgcatcttccgagatggctaaataaagaaataacgtctctctagttattggtttctctaaaactaaaggcgttgcgagatgccttcttatgctatgaaaggcctctttacactcttttgtccactcaaactttttgttgcctcgcaatatgttgaagaacggcacacacttatcaattgacttcgaaatgaatctgttaagtgccaccattcttcatgtcagggcctgtactgttgggttttgtgccctaaataaaaccatttacaatctgattagttatcaatataagaaatttgaagtgatttatgtttgcatgaattttac

SEQ ID NO: 331702 - DNA, 617 bp, Cannabis indica
aaaaaaaaacagtaaaaatgttattttgagcgtgtcaaagtataattgtaagattattggaaaagttagtaaatgatgtaaatttcccttactataatcactaaataaagctatatagaaagagcatgactaaatctatatatatctggtatataatagcatagatagtatagatggaagaaaaacataaaaataaaattataatatgaacttgcattactcaaataaatattacaacaaaaagtgaatcaaaaatacaaaataaccttactttgcatatggaatcatccctaaccttccaaggaagattagaccattatgctaattattctcataaaatttctaaagagaaagatgagaagaagagtgaagagaattttgctataatttttctacactacaaattacacaccaaaaattactaaaatgagctcctatttatagagccataaaaagactaaaagtaaatacatacaagtttgggattataaaataaatattaatattaaatttaaggtttcaaatcaaaaataaaattaatattatttctgttatcattgtgattttgttttttactctctagatgaaggttgagtggaagagggaaatagggttga

SEQ ID NO: 331703 - DNA, 1047 bp, Cannabis indica
tatgagttttgaaaaaaaaaaagaatcgaaggatcaagaatatcgcataaaatggttttgattttgagtttgagggagaagaaagaggaatcaactatgcgttttggattgaacgacatgagttaacggaggggttagattctgttaaaattaacagaataaaaataacaaaacgttaaatcaagaattgccgttagatagacacttttaatatataaagatatatatatatacggtttaaaattgaataattatattttagtattttttattaattaataatgctaaattttgaaaaaagattcgtagatatttattagtatatattttgttttgaggtaaaattagtaaattaatttattaatatttatcaatttaataaaaaaattaaaaatatgagaaaattaaagaaagaataattaaagcatctaataaaaaattagaagaatgagagaattgaggagagagcaaatagatgtatttagagtgattttagaccgccactttaccgcctcatacttctcttttatatatatactagtaaacatcccacgcttcgcgacagatatataaaatattaaattatatataaaaaataaatagtgtattttaattaataataatttcttagtaaaattatattaaaatttttatttacgattaaaaaatttgtgacataaatacttaaaatattaaatttgttgctaataaatatcagaatttgaaaaatagtagcatagatctttatttatggtttaatttttattctgacgtgtttgttaagttctgggtttgaattttattgcgtgtgtttttaatgtttgagttttattgttttactggagttctaatgtttgagtttatatttatttttatagattttgaaaacttcaaaatttgatgttgtttccattgattattgggattgagagtttgatttttcatacgggaattaaagtttgcattttcatttcactgattgaaaaatattagtagaaaatttatggaatacttgacattaaagttatcatttcaaaaaaaaaaaaa

SEQ ID NO: 331704 - DNA, 673 bp, Cannabis indica
gattaaagttttttcccttctctttgaaggataaagctaaaagctggttatactctctgagaccaaggtctattggaacatgggaagaaatgacatcatcattctttcacaaatacttccctaaccacaagaccaatggtttaaaaaggcagatttctaccttttcccaaaaagacaatgaaactctttatcaagtctgggaaaggtttaaagaactgttaactctttgtccccaccatggttatgaaaaatggcgcctagttagttatttctatgaaggcctcactagtcgtgaacgccagtttatagaaatgatgtgcaatggtgaattcctccaaaaagatcctgaagaagcctttgaatatctcaatgagcttgcagaaaaatctcatacttggactggtccaagtgctactgaaagcactaacagaaatcgaccagcaggaatttaccaactaagggaggaggacagtctcaaagcccaagttgagtccttaacaaagcaacttgaggcctttaaaaaaaaaagtgggcaaggactgaatatggttgccaaagcagaaatacatgagccatgttttgtgtgtggagaatcggatcatttagctaaggattgtttagcctttagagaaatgaagggggtttatgaagagcaatgcaatgccttagggac

SEQ ID NO: 331705 - DNA, 727 bp, Cannabis indica
gccacaacagagcaacatgcaaagcccgcatttgaggcgtagtatacttattagctgtaataacatgttttgtatttcttattcaaaactgctttaaaataaggttgaggttgataattttttgttgtgaatcaaagacaatgttaaatatttttacaagactaataataagtatgttaaatctattatgaagaactgagacactgttagactttacaagactaaataccaaaaaaatatttttaagtaaacagaatatataactgtatttttaattacaaaaaacatacacatataatcagccgacattctggtaaaccaaatcaacacaccaccgttcacgaaacaacttgatccggccttgcgtgacatcagttaatccacgtcgcatcatgagatgctccacatactcaatgtaataaacgccacaatcaccactaaatgcaacataaaatataaagttagtacaatgtaaatcatgtcttaatactatagtacttttttatcgctatgtacctgattgttgccttcggagctaagtcgtgagtggctcgactcgcatgcatattcagaagcacgatgatctccttattagttaacgccatgatctggttattaagtggaaaatccctgaatgcatggattggtgagggcaacagttcttcccaagtcttcaagatgggtgtcatggcagtccaatgacaaatgctggaatcatagtcgtaca

SEQ ID NO: 331706 - DNA, 492 bp, Cannabis indica
atcctaataaaatatattccaacaactggtatcagagtcatgataatgatttacttccaagaaatatggatttaaaacgataaatgtgtgatttggatgtcattcatgttgatctatgtatttatttgatgattgatagatgtttacaaaattttcacgaaaaataattagattcacgatatggaattattttatttagatagtatggaagaaactaatcaatttatttttttacagaactgaattccaatttaaattgaattagttataaattttcaaaatttggacaaaataagggtggggatcacccccctgcgcgcacgcacacccaagatcacttggtcagcatgcgcattcaaacacgttttgtccgaggaagctcaaccagggttcttttctgaaacctcctccgcgcgtggaaatgctgcatgcagcatggatgtgtagccaacctcggtcaaatgcccccaacacgcgcgcggatggtatgca

SEQ ID NO: 331707 - DNA, 689 bp, Cannabis indica
ggaaaagtttcccttctgtttacaatgtctatatttggtaagattacacattaaatacagaatgcactgattaagggatctagatagcttgccatatctctgtaatataatcccagaattatagggattgcttctgcgattcacgatgcgagtgttgaagttgctaagtgttggcatgctattcggaccgtccactgcccggccaggaaggcttcgttcgtgcagaaatatgcgatgctctgttcggcatatctatttcgagcagatatgtgaagtcgattccacgtgtcaccagtatgtgatgccacattagagtgtcaaaattaggataatatttgccccccaagtctgtacgggacttcctgagttgtgcgtagacttcatccaagctgcctttgcatttgaatgggtgacatgtgttaggcgcgtctgttcatgattcgatgtgaggctgaccagacgtctcctcagttttcggctaattaatgctttgacttaatagttgaagtgacctttgttggttggtatccctggaggaacatctagtcacaatactctttccggaacgagttagggtttgctttgggaacccttacactgtcacttctagccttctttgggaaggagaaagacaacctactgttgggttttatgccctaaataaaactcatttccatataatcagattt

SEQ ID NO: 331708 - DNA, 985 bp, Cannabis indica
tttcacttaaataatgttcatcttatgttatcatacacatgttttcaaattgagattaacttactatatatgagtatgaatatattaaggttagcttattatttattattaataacaatgtgcatatcataggtttatatacacatagtatacttatcaagtctttcaaataataattctaaattagttaccaaattctagaatgaaaaattcactgaaacttaaataaaattaatttttacgtgactcgacactaccatattcaatttatcaatgaaaaaatggacaactcaattatatgtgaactcgactaagatgaaaagtgtaaaatataaaaattacactattgtctctgtcgaagattaaaatctacccatgagtatcattatttttcttatctataatttttagacagatgttatcttcaattatcaacaatttagagattgatttttaattttcttttttatcttacacacaacaattaagttgtgtttccttaagtatttgaacatcaatttttagtttatttttggattaacttaagaacatatttaaattatcaagctttcttaaacactaatatattgcatctggtatttttttttaattgttaaaattataaattatattatttagatatacataataataatctcacctaataactaataatattttttctttaatttttaattgtatcacttttaaataaagtaaaaaatacttagcataaattttagtatacgtgcctcgcacgtaactttttgctagtatatatatatatttatatatatcttaaaatagttccttaacaatatgtgagatttatcctacactacgtggtaacattttatacttattatttttaagacaatttatttttatttcaactatttctctcttcttctttttttatatattaatttttcatttttatttttacaaattacaaatatacgaaaatgacaactgttttccaatt

SEQ ID NO: 331709 - DNA, 1089 bp, Cannabis indica
tatctcactagagggagaggatgatggggagttgggtattgattttcttgtccttgaagaccaagttatgaatgttgagttatgtattgtgggtcggttcttgactggaagagccattgatttcgaagctatgcgccatgttatggcctctttgtggcagccgggtaaaggagtttatgctaaggagattgacaccaatcgttatctatttcaattctttcatgaaattgattttgaaagggtggtggagggaagcccgtggacgtttaatagagctcagtttgtttttcacaagctcagaaggggagatgattaaaaaagggtagtgctaaacaatcttgacatctgggtgcaaattcatggtctccaaccagtgtttaaatctgcgagtgttgtggagaagttgggtaattttgttgttacatatgtcacgactgatcctaagaactttcagaatgtgtggagagattatatgcgtgttcgggttacatttgacatcactgttcctttgaaacgacgaaggaagctccgtcggactgcactggaggaagggttctgggtagaattcaagtatgaatatctccctacgttttgttttatctgcaatataatagggcattctgagagatttttccctaagcgttttgatacaccacccgagatgctcatgataaagccttatggtgcttggatgagggctcaaccacgacggagaaataacctggtgggctcgcagtggttgcgtgatgggaatgagaccgacgagatgtttgccagccaattccatggtggtagggcgactgattcggtactgttacaacaacagcctcgacaagaggagggtgttggaggattttgtggcccttcagtcctgcataagggggggaatgctactcaatttaattcttctaatgctatggaaagtatgggctaccatgttggtgttgacaatagtgggaatgagatacatgataatgacgctgatattgatgattcgaatgatgatatcatgttgttggattctaaaaaaaggcgcacaagggatggagtgccatcgggccaacgaggtgtgggccaacatgctattgg

SEQ ID NO: 331710 - DNA, 627 bp, Cannabis indica
aatttttttccaccaattatcaagtataattttgaatttccctttaatacaatacactttattgtaggtaattatttaatttattttattgttttaataaatttttgttggctattcttttgaagttctttttcaataaataaattgttagactagagaagatgaaaaaaaaatacaatttttaaatgtgtgcctgcttgtataatattttcttttttcatattttgtttttaaatttaaacatttaaatcttaaaaaacatgttattaattttttttggaaattaaaaacgggattatttaataaacactcaaaaataacaaaaaatttgcatttttatggatctacaattatttttacatttttacgaattttaattttcttttttaaatacggagtgttattttcacattatttcaacaagaaaacaacgtgaaaacaatgtcttgttaggatttataaaacacttcataaatataagttacagatctaaacatattcctaaaagtgctttaatataaaaaaccgctaaattaaagaagaagataataaaagatgagcggaagcactaacctgaagtcattgttggagattgcagagaaggttttgatcttccaagaatacact

SEQ ID NO: 331711 - DNA, 662 bp, Cannabis indica
aatttttagttctttatgtctttttcatttgatttttttttttcagtctaaacagatgggtgtatgaatgaatgatcttcaagtatgtaacattgttagtaatgtgcatttctatgttgtgtctgtttatatgatgcgaaacaaaaaatggagtgtttatacttttttatatattattatgagctctattgcattttaaaaaaggaatgatattcaatatgaaaatttctatgtttatttatttatttattttttttaggcatgtcaaaaagatcaatttagttggagcgggttggagctctaatccgacggatcacctctgatccgaaaccttcgagtacttattggatcttggatcagatccgctctgccccgcctaatttttttctgcatcgaatctgatccgacccgattttaatttatttttttaaaaaaaacttaattcaagactcggatgccttggagacttggaccctgacccagactgggaccaagaccgggatcgggaccgggacccagacccagaccctgactcgggacttggaccctgacccggacctgaacccgagacccagacccaaattcggaccgagactcgggacccaaactaagacccgaatcgggacggggacccaagactggacccgagacccaagaccagg

SEQ ID NO: 331712 - DNA, 572 bp, Cannabis indica
tggttttttttttttttttgaaattaggtgttgttcttggttctggtgtttgagcttattttctgaagttaaattaaggtttattatgttgttcgaggtacatcaacattaaatgaccatcttttccacttccattgcaattaatgtcagtaggatcaaacatctctctgatccaacgaaactgatttcaagagtataaaataagaaaaaaaaaccaccttagaattatttcctccattttagaaattttgagaaaatcttaaactcccttgctgaaaaacaagcaccgaaaatattcgagacattgcatgccatctctgtccttgacattgtttctacgagtttcctctgacttatattccgactccacatgctcgaagagaccctcaccacatctaaatattcgcagaccgaagagctgtatttcgtcccaaaccccaactttcaacagtaagtacattttcttcttgacatcatttatgtttgttatgctacgtttctgggtttaattactacattattgttggaaatattttacaaggatctagatttactaccaagtatattttatt

SEQ ID NO: 331713 - DNA, 748 bp, Cannabis indica
tgtttactttgcaatgtttactttttgaatgcaccttcgactttgttgtataagatatgtaggaaaccctaagtttagagactctacgattctcttttgtcatgggttcatgcgatttcacagtccataatgtttgcttcctgaactgcataatgcctgtctttcatctttcttattctaagctttatgaattttttttccctaattcgggaaagtttcaaacttcatgagttttggcttttcgtttaacattcttattctttaatctgttgagtactcctggtcggcatatttgcttgttttaacgttcgatattctaaccaaaccctcatcttgtgtgttgtcttttgtagatgaaccaaagtgagttttgggaaagcgaacatagaatcgaccaggacttgcttcaactcttgcacgaggaccatcctcgtctctgttctagcccaccttcttccagtgaaagaaattctcccttgaatctttcgtccagccatagaatgatggctcataccaaaaagacaatgcgcatggctgatgcatctgactctcaagtggctcgagaagccactttgcccagcactgaacaagatccagccgtccaggaggagggggatcatgaaggggaccctgaggtccaggagattgaagagcaggacgatgtccatcctagcagtccctctgaggtggaggaagaggttgcacccccaaactatgggggatacaatgaggctggggagccagtcga

SEQ ID NO: 331714 - DNA, 1692 bp, Cannabis indica
tcatgttcaccagcctttgataattggcccttgcattttttagccgaaagggcatgactttgtaacagtatatgcctaggtctgccatgaatctggtttgctcctgacaaagtggatacatctttatctgattataacctgaatatgcgtcaataaaactcaagactttatggccagccgtggcatccaccaactggtcaattttgggcagcaggaagcagtcttctggacatgctttgttcaggttagtgaagtcgatgcaaactctccaattcttgttgggtttaggtaccaacactagattggacaatcattgaggttagaatgcttctattatgaagtcattgtcccttagtcattcgactttatctttgagcatttgggcatgctccttgtccagtaattaccttttttgttaaataggccagatgctaggatcaatgttgagtgcatgggttatcacggaggggtcaattctgaccatgtctccatgtgaccatgcgaataggtccaggttttcccttagaaattctatcaagactaacttgatttctagagccaaacctttaccgattttcggtcttcttgttggatgagtgggatcaaccttcacttcttccaactcttctacaggtctgaagcttcctgtaggatcatcaaagcgaggatctatgtctatatcccaaccttgggctagacttcattgcctcttacagggctcatcttcttgacttctggcaagcatcttctccttttagacttagataaggccaagctgtaacagtgatagttagactgttggtctcccttcgaacatgccactctgtgccttattaggaatatgaggcataagtggtatatatacgttactgccttcaagtcattgagggccaactgtccaattatggcgttgaaagtcgagggtacattgagcgcaacgaactacaacatcattgttcttgtggttggattctctccaactgtcagggttaatctgatatactcgacagctgcgatgccttggccaaaaaagtcgtacatcacttggttgcaaggtgccaggtcggtgagttggagccctattttttcatttgttgatttggaaagaatgttggaggaggctccttcgtccaccatacatctagccacgatcatattcccaatttttgtagtaatgaccaagggatcaatatgcaggaagctgaccggtgctgcatcttcttcgccaaaggagatcatgggctctatgggttctattgcttagagcttcggtcttcgacagctagcattttgcctttgagcttgtgacggagtgtctaagcatagcactccctggctttgctcgtttcaccagcaatgtgggggcagcctattatgaccctcagatgtcctgccatgggtggtggcattggatctccatttgggcctccttgcgtctgggtttggtcatcttgcacataacgacataggtggggattgttgcatcttatcatatactaaatctccctcttcaaattttgacactcattagtgtcaagtcgttgtgatatttttagaactttgacatgtccctcttgcccatctcctttttgattggaaagggattttggtacggcaccgttccctgagtggccatgaagatggtctcatgcttctctattaggagggtgaagcaagtgtacttctcctcct

SEQ ID NO: 331715 - DNA, 664 bp, Cannabis indica
agtctaggaagcccttcaaaattaagaattcctatccctatgacttttctaactagacagttactgaatataacttttctacatttcattggttgaatagtgtcaagataatctttttcacctctcatgtgtctagaacaaacactgtcaaagtaccacatgttagaagcaatagttttaaaacatgaagagcataccaagcatttattcttaacaacccatttttgtttttgaaaaacatgtttattcccaaagtaattagatttaaacatgttttacatggtgacacacttaggtcgaatgtgaccttttatcaactaaaaatggcaaataggaatgaatcgtcttttattccctttgaaattgtcaaacttatcgtgctgcttcttttttgtattagctgagtgttttgcggaaataacagaaccctgtaaggtaaagacagtaccttcagaacaaaaaatatcagatttaacaaatttgcactactacaaaaagggctttttgcttcggtttttaagtggcatatagagattttgctttagttggtgtaagcaacgctataaccgtagacgcaaatagtgatattttttgcttcgattatgagccgatgctaatgttgggttttatgccctaaataaaacccatttcaatataatcatat

SEQ ID NO: 331716 - DNA, 563 bp, Cannabis indica
aaatcccttaggcgggaaattatgtccaaactttccctttttcttgctttcaaacaatgctaacacgttgttttgtctcgtagaaatgaatctcgaagacctcttccaatcttcaggcaagaagggaaagaaaaggttgactacctcggagacttcatcagatgtcaacgtggagcctctcaaaaggcccaggaagataattgccaacaagaagtgagcctcccaggctattgatctcgaggtcccatgagactgagactcaagctcaggctttgacccatccttcggcccccatgcatactaaagagcccattcccgaagcgaatcaagcttctgcctcttcgagccaagcactcaagactctgcctgtcgaggcagggagtactggctcgaagtacactgaggaatttggtgcgacttgttggtgtcacttcaagtcgttccttcccaatgaatggatttgatcaacaatgggaaccttgaagagatgcttgaaaggagtgtcgcccatggcctcttggtaaattcctctatccttctcctcttacttccctttttaacat

SEQ ID NO: 331717 - DNA, 775 bp, Cannabis indica
ccttctcctcttacttccctttttaacatttttcagactttcttacacattcttcatttacttacagcaaaccttcatatcctttgtcgcccaacggcgaagtatggaaagaacaaagtacatgagagtgagatccaaaatttaatggtcagcgcaaggctgtgaccaaggaatggaacgacttcaaggcgaaggtcactcgcctaaccaaagaagttgaggaggtaaagaggacccacaagaccgagcttgaagctgctaagaaggaggcgaaggataagactgaggcatgccaaaaactcgaggaggaatactgataactccaagaggaacttaatgcagccaaagtaacgctcgataggaaagaagctgagaccattgagcgatgcaatattgttggattatgctccattaccaagcctggatggcaaatccaggaatggatatgggttttttgggaaattccatgggtgaagtccttgcctactaggaggaggccaagaaggtagacgaggaagtcgaggcagtagcagaagaagaagaagcactactagaaaaatgggttttagtgacacacattaagtaactctaaaactctttagtgacacttcaacgcgcgtcactaatgaaggtgactggaaaggcagtttttagtgacactccacacatgtcactgaacatttttacattcactttctgcgcgtcactataggcatataaagtcaagttttgtcagactgaaaaagtaacagcaacacctatagagtgtcactat

SEQ ID NO: 331718 - DNA, 624 bp, Cannabis indica
gagtgaggacaaagcatgctagaaatactcgtgttggtctgtagggtcagtcgtcattttatggagcagccagagtgatgtactcgtgtataagagccggggtgtacccaatagaggcttgaagcgaggacgttacactctaacagaaataactatccctgctcaagttaacttctagctaacaaactctatccaagttagtaaataactaacttagctaactaaaaattgtaacttataaccattcatcacaaatgtccaccttggttcaagttaagatgagccaaacattgatcaatcaagccttgagggcttagctaaccccaatattgatcaattccaagcagtactcagacattttgcttgaaatcaactttggttaatatgtctgagggcttatcttcagtatcaatcttagcattattgttagttcctttctccacaatctctcttaaaaaaatggagctttataataatatgctttgtgtgacagtcagtagtctcgagatccgtaaggaaaaatatcggctaagttgtgcaatccctcattgcctcgggaaggtccagatggatgattctgagactgtgtaggtatgggactgcacagttgaagagagcttaaat

SEQ ID NO: 331719 - DNA, 738 bp, Cannabis indica
cgtcacttcaaatccttccttccccatgaatgggatttgatttataatgaggatttggagaacatgctcgagaggagtgttgctcatggcctctcggtaaactctgtttcctttctcctcttatttttcctttaactattttcaaatttgctaacacattcactatctgtccttagcaaactttcttcgcatttgtcacccaacagcgtggcatggacaagctgaagtacttggaaggcgaggttcaaaaattgataggtctgcaggaggttgtgtccaaacaatggaacgatgccaagttaaaaagcacccgcctcactaaggatgctgagaaggttaaaaagaaccttgaggccaagcttgaagctgctgaaaaggaggcaaaagacaagaccggggaatgcaagaagctcaaagaggaacttgatgctgccaaggtgacacttgatgggaaggagaccgaaacccaagaacgatgcaacaacgtttgcctccgtacccttaatcgagattggatggcaaatccaaatatggatacaagtttcctggaagagtgtgaaggggaaattcttgcttactgcgagaagaccaagaaggaggaggaagaggccgaggcagtagaagaagaaaatccgtccaagtcttctactatgtaggcttagtttttatttatttttattttgtttaggaaaatggccctagggccgagacaattgtttgccccttgtggcacttttt

SEQ ID NO: 331720 - DNA, 841 bp, Cannabis indica
tatgtgtatatatgtataggagaagcgatggtggtgtatggtaatggcttggaggaatgaaagaataaaaaaataaaacttaaagaaatatgcggttaagagttaagaaatataaaggcaaactatgttgacaagtgagatggagacgatatggtaatatatttaaagtgtgaatgagagtgactaagaaaatgaaaatgatagcctcagtattaaagaaacctataagggaggagagattgagagggtaacttgagagcttggtctttgtgagtaagaaataaagagaaatagaaatatatttataggctctaagaattatatatatcacagtctactcaaccataccatggtccgctaccacaattgaatcaactcaacaacttaaaactaatttcaaacttaattattttccttaaaacttccttgctactctgtccagtaaactgatacatagtcttcatatattgtttgttgagaggatagttctcttaggttcccacgtgtactacactattcagtcaagtgggccaaagctataaagttgcttcttcgtgcaaatacacatcctttgtattgggttttatgccctaaataaaactccatttaaatgtaatccattttattcaatatcaataaagaaacaaaagtatttttcattcatttgtatgttctggttcatcttatcaattgcttgtctatttgatttataatttcatccaaacccttttcacatacttgatcctgtttattgtgttgtcaacatagtggaaagtaaacatgagtatgtggttaaagattcctagatttatcagaacactggagttttactgatatgata

SEQ ID NO: 331721 - DNA, 504 bp, Cannabis indica
atataaatatagaccataaaataaaaattataattatccacaaaaagaacaagtacatcaatctcttcctcaattatggagtaatgagcagctagtgccattaaatatttcaagtcaatggcgtatagatgcaatattcacattataaaacatatgtaataatcatatataagaaatttatatatacgtattatataagaatacatatatatatgtatacatatgaccccagtcagttttcgagagctgttaccactgtgttggtgtatattgacaaattcatggagcccagataaatatattgacatatatttatacaagtacagcttttatatataatatatatagggatatgattttgtcccgtgattgtacttttacggaatgcattccgtgatgtacggcagccgtcagatgatagacttatttgatctgacggttgagattgatctaggggtaattagggttaaaaagtaaaacgtacattgacactcatttaatgta

SEQ ID NO: 331722 - DNA, 1308 bp, Cannabis indica
atattccacaattagatttctctgataacaagaccctcatcaacaacaaaaccttcttcaataataggttcctcatcaataataggaccctcgtcatcttagatattaggagcaatatattcatcaacaatgggagtgttatcaactagagtaagaataagactgctatttttcaaattagaatcataaatccttattttagctggacaaccccatacacaaagatgattcaaactaggctttctcccaatccacaactcaaaagggttttgggaacagatttatttggaacacgatttaaaatataagttgcagtcaaaagtgcttcaccccataaaaactctagaagatttgatttactcgtcaagcatctaacatatccatgagagtgcaatttctcctttcagcaacgccattttgctcaggtgaacttgacatagtgtattgagaaactacaccatttttttggaaaatattcagcaaaaggcctcatgtgtagtccaaattttgaataacaatcataatattctcctctacgatctgaaagaataactttgatgactctttctaaatgatctcaagaacatttcaaaagattttaactttatcaagagcgttatatatttttttttgaatcaagtgaagccatattaagaaaaatcacttaggaaagttatgacatacttgtatccttaacatagtggaataaggtccattaatgtcagtgtggataatctctaataaagattgactacagttagcaatcttctttcgtcttttagttaattttctacaagtgcaatcaacacaagtatcccaaccagaagtatcaagaggaggaagaattttagctctaattaatcgttcaaacttgtttcagaaatttgacccaatctaagaatgttaccttaatataagagctcttacgcacattattcacaaaattgaaagaggaaactaaggaagttaatgataatttgaaaagacgatcagagtaaaaacagtttccaagtattcgaagtcaaacataatgtcaacattatgattggcaaaatgaaaagaatattattattgaactaaaagcggaagcgaaattaaatttatcttaaaagtagcaatatagaaggtattgctcaaaacaatctgaacattacactgtaattcaagaataaatgtgccagcatagataacgtcaactccaatataagtgcccactttaagctttgactccctctcacttgtcttcttaagatcccttagcccctggttgtgatttcttattttcatattttctttatcctttgttgg

SEQ ID NO: 331723 - DNA, 817 bp, Cannabis indica
accttaatcaaaccttacccaaaattaacttcttacagataaaaatcatcacaacaaagagcaaacaacatcaacaacaactctcaaaattcagattacataatcaacttaaaatcatgctcaacatacaactttcaagctctagaacttgagcttgaactcctttaatctcaaatatatatccagcagcaacataccaactttaacatgaaatcaaacccagaaaataccctagaatctcattccatgctcaacaaacacaaaactcaaaagattcaagtaccacatgctcaaattaacaagaactcacaatcatgcacatatcatcttcttcaacctattcatggttttttaactaaaattcagcaagcaaaagagaatcaaagttataaaaattacctcaattccttgcacaagctaactccaagccttaacacaaatttttccccaacaatcaaactagtttctcatcaatttctcaccaaatcaagttgaaaaacaagagagtaagagagggaaagagaggttcaggtttgagagagaataaccagaatttctattttcttttttgtcaaaaatgccatttcacacacttatctcataaagccaaattactaaaatgcccttagggccatataacttccactttaaacatacaagggcaaaaatggcattaacacacaatttcaaacccaattaaatttcagattatcaaatatcaattaaaatgccaattaattcaattcaattgtatttcgggctcgaacccaattcggcccgaaatacccggttgtgactataccgcgccaacctgtca

SEQ ID NO: 331724 - DNA, 773 bp, Cannabis indica
attattcaatttttaaaattgatcttttttataccttcctatttaatgttattttgatttttttagatttgatttttattttctatttaattttgtaaaatcatttttatatgtagcattatttttactaaagtttagtgtaagatcatactctctcacttttatttgtttttctacatttacattataaaagtcattactttaatataaatatgaaattgtattactaatattttaattttgtatatgcaaaaatatatttttcacattttaataatttttatattatttttatagaaattcatgatggagtccgaaatggaatggagtatacgaatcgagcgaatgagaaatgaattggagtatttgaaagtacatttggaaaataataaaaaatgtgaatgtaaatcagcgaagaaaaataaattaacaaatgaatcaataaacatcaaatcttcagagtcattattttctgaaaagcatgttattagtgaaaatgagattaagttatttgagcattttaatatcagtaatatttttcgaccgattgataagaaggtgttagaatacatttttttaaaatccaatccatcgtaagttttttcatgtttatgtttttttttcttttgtcatgccttattattttaatgcatttgtatatgctttattttttatgttttatttttatgaagggatgttatagttgattgtggctatagttttttacaacggcacgagttttcgaaacttgcacctaatatggaattggagat

SEQ ID NO: 331725 - DNA, 849 bp, Cannabis indica
aggtcttgagtttggttctagattcgagtcttgattccggtctcgatatttggatttcaggtctgagttagtgtttgggtccttgtttggaaaaagttctaggttcgggtcttggtacaattgcaagatctagacaccgactacgggttaggtccatgccctaggccgtaggtcaagatccagatccaaatcttgggtccctgtctcgttttgattctgatcttgggtgtcggtccgtgtccgtgtttgggtgtgggtctaagacccagactggggtcgggtcttgggacccagtcctagtcatgtttcccgattctggttctaaggttgagtttgggtctccaatctaggtttgggtcctaggtccaaatcctagtctccagtcccggtctgggtcctgtgcctgggtctgggtccaagtccgtgtttgggttcagattcgtgtcccgagtcttgatccaacttttgattcgggtctgcatcctggtccgggtctgggtctaggtcctaattagattctagttcccggactcaaacccaaacttggacttagacccaggtctgggtataggtatttgtctaggtcagggtttgggtcttagtttgggtctgggtttgtgtccgggtatgggtcccaattccaaacactgactacgggtcaggtccaagcccctgggtcaagagttggatcacggtctcgggtcctagtctagtttaactttggttcccaggtcccagtctgggtcctatgtcagggcctaggtccggggtcaggtcctgggtctcggtcccagttctgatgcccgtgtcctgggtccaggaccctcatccaagtccgagtcctaagtc

SEQ ID NO: 331726 - DNA, 893 bp, Cannabis indica
tcctaattagccttatttttatagggagcgattcacttacaaccactgatgaaacgtttcatttatttacacatgggataatatctaataactacccaaattctccttgtctttatcctttaaatggttatgctaactatgaaggttgttactcgttgagtatgagttatccttcttatctatttttagaggaaaaaaatgcaagtgtagacatgcttctcgcagcattctcatttataatgatattagtgagatgactactacgttgcgtagaaagcgagaaggttgagtgtagttgttttcactctgctcatgtatgtgggtcgatcagttgcaagcttttattccaaagtatgtgggtcaataagctgcaagattgttgtggtcttgtcttgcacgttcttattatttactctctttatatgagccggacatattgcctcgtcaattatatctgttaatagttatttattcttttcttgcatattctcacgtagtcatcgagtttgaatattttctatcaactttaattaattggaatgagttattttaaattgcttttaattatgcaatttaattagtattttttttagctgattcatattccttgtgtaggatacacgtcagcttctgattaatagccaaatttcgggtataacatcaagaaattgtaggaagtggttgattttttggtatttctattcaaggcgtagtccgtgtccacgaaccctttcaattcttattatcatttttctttttcataggtcaaactataattctaagtgcccttcaaatatctcaataaccatttaggggctttcgaatgttccatgcccagattggacatgaaccgacttaagattcttaaaacgtgagatatattcggtctcgtg

SEQ ID NO: 331727 - DNA, 542 bp, Cannabis indica
tttatgtaaaattatgtgtggtaataacttttatggacacctaaatatataatattttagtataaattaaagtttaacatagtattatataaaaatatgatatataatccaattcaatataatacaatacaatacaatacgacctaatacggcgttccaaacgagccctaaataaattttcaaaatttaaatgaagtcacgggtttgaaaccatcattcttaaatctgaaaatctaaaaatgtattttgataaaaaaatatatatatttgtatttatgtatttttaaaaatttatatatataaaacataaatttacatttatattttgatttgttacaggtaatatatgttggttatttgtttgggataagttgaaaactacccttttttattacacattataactaaatataactgtaaaataattttaattgataaataccctcttttataatcaaagtaccaaatataacctcagaaaacttatcaaaattagactttctaatgcacataatggggatataacttataaaagtgggtat

SEQ ID NO: 331728 - DNA, 746 bp, Cannabis indica
ctaaagtttattgtacttgctctgttgatcaataaaatatcgtcattcaggtaaatgattaggcagttagataaattacataataattcattggcaaaaacctaccttcagacataattttggtcgaggatctttgattggtagaacttaatccttggatacaatccaccatcgaacttttttcatacgtgtttctttgttgacgatttcgtgtgtaagttcacattagtccagtgtctgctccattttggcaccattctaaattaccttaactactagtgttatttcctgattaaccaaaagtagttgccaaaggtatatgagaactctaagatttacaaggaaagaactaaaaggtggcatgaccggaacttagtcaggaaggagtttcaacctgggcaacaagttctactttcaactcaaggctaaagttgtttcctggtaaattgaagtcacggtggtcagggccatttacagtggttaaagtgtttccttatggagcggtggaattgaaaggtgaaggccctaatactttcaaggtgaacgggcagcggttaaagctctacttgggaggtcaaattgatcaaaccaagttcgccatgattttggcgccactatgaagactcaatcaacgtccagctgtgcgacgataaaggcagcgctaattgggaggcaacccaagtgttctttatggtttagttgaactcttttattttgttttagtattattttctttttctgttctg

SEQ ID NO: 331729 - DNA, 889 bp, Cannabis indica
ccagcctgaacgagctcatcaggacgatgagttgattcaactgaagcgtgaagctaagttgaagggtggtgttcgggcgaagcagtacgctcaggagtctatgaatcctgaagatgaagttgaggctgaggctgaggctgagcaggtggctcctttgaggaagaagaagaaactcccggccacgcccaagcccgtggaacacggcattctcataagggagcccatttcacctattcggccatcccatccttatgccggaaagggaaggtcgttattgctgagataaagtcaatgtcaggtgatgatggacttttgactttctgggcggacagtcactctgtgctttgcttcttttttcagcttcttggcttccatactttgtattttttgttggtttttgctaaccatgctgtttttgctttgtgcagacatgtctcagtagatgatggatgccttacggaagaggatgagcagaggctctagtgcttccccaccgaccaagaagtccaaggtcggagaggggtcttcagagaagaggccttctggagaggtcattgacctttctgaggatctggttgctgcaaatccttctactccccaatctgccaagtctaaggagtctgggtcaccaacatctaggttcaaactggttaggaggattcctaaacgggagcaagcaccatctctacgcgtgcccgtggtgcttgaggtcaagagggcagggaggtgatggctcatcacatgaaccggctggttcttgaggtcggtgagcagttggctggtgcgaaccactcatctctggatgtgttggtgggcggagtcttgcaggagcttactagggttagtcttttcttttcgacacttcccctttagcttttcatacttagct

SEQ ID NO: 331730 - DNA, 705 bp, Cannabis indica
atgttattttatattttatttatggttttttttttcaattttcgagttcaaaatcaacaatacatcgacattgcatcgatatattgtcgacaatgttggtcgacttaatgtcgacatactatcgaaaaaatgtcgacaacttctcaaataacttgtgtatgtgtttttcatcgacatgctatcgacacacggtcgacacattgtcgataatggtcatcactgatctttcttagcagaatatcgacataccatctatattccatcgataaatcgtcgataacatctggaaaacccaaattttgacagaaaaccagatctaccagatctcaaccatttcagaccaaaaaataccagttccaacaaatacgacacatataacgaaagcaaactacataaagtttaacaaaatgcttaaaacacaacttacccattgtaatggtgtaagattcttgagtgatattggggtgtgctccggttttccaccaacgcccaccgagaaacaaccattcaacagggaagagagagagggcgagagagtgggacgagaaagaggaaagtttttgggaagttttttcaattttttctagagagagagagtggtgcacgagagagagggaagagagagtggaagagagagggaagttgttttcagtttttaacaattttatttttttaaaaaaatggtaaaatgggaagttcatgtaa

SEQ ID NO: 331731 - DNA, 552 bp, Cannabis indica
cccaaacccagacccagacatggacctggacccagacccgaacacaaactcaaacttggacccggaccgagacccatatccgaaccccggacctagaccaagacccagacctagacccggccggactcggacccagaccgacactacaagaatgtgtacttttgccggcggattaaaggacttgcaccggcaaaagttaagaaatgccggcgcaagtcaataaagtcgccggcaatagtggtcaactttttttgtccacatcaacctttttccggcacagtgtactaattgcgccggcaaaagttggagccaaaccgccaaaaggtgggaattgttggcaacctttagccgacgcatgatagcgaaccggaaaaaccattcatttattatttacttttgttggcgccaaaatgcgccggcaaaagtcgaggaaaaaagggggttcattttccctcgcagtaaaaaaacgtgcccgcaaaagtaggcggggacttttgccggcgacatcaattgtgccagcaaaggttgtgcccttttgaccaaaggacacgt

SEQ ID NO: 331732 - DNA, 1039 bp, Cannabis indica
ctttattgaataaaaaccaaagccaaaaacgaaacgctttcggcggtgggcaggcgttgatcggaggcgacgaagtctaactcagaatcgaaaatggatccagacacagtttcaaaggcattcgtggagcacttctactccacattcgatactagccgtgcaaatctgggtaccctataccaggacgcgtccatgttggccttcgaagatcagaagttctaaggggcccagaacatcgtcgccaagctcgctagtcttccttttgagcagtgcaagcacaacatcaacaccgtcgatttccagccctctggcctagccggtggaatgcttgtccgtcaactgcaattttcagcttgccggtaaacaacacactctcaagtttagccagatattccatttgatgccaacaccacacggaagcttctacgtgtttagtgacatttttcgattgaattatgcatgaatgaaaacattctctgcaattcgaagaaaagatgagaaatgatgtctgcattgtttggaaaataaaccagtttgctattatcactctttacttttagacttctcaaatgaaaagttggattttctatttttatattttaaatttttttaaaaaaaaaaaatggtttttaaagttgtagtttcccccgggaaatttgaatttccatgcttaaataacccatatattattcccctaaactaatactatatataattaattttatatgacactttttgtatttttcccataataccctccccacctacatctacccactccaacctttttctcatcaattcaacaaacattccacccgaaagcttccacaaccaccaaaaaaattttcttctcttcactcatcactaaaagctacaaccttccacactacaagctaccacactaatccaccacattagaagcaagaacacatacaagctccatcaatgggtaagtaattaattttttttttttctaaatcttgtttgttgttgtcatatttaattaagaatgttgtgtttgatgattgatctgtggatt

SEQ ID NO: 331733 - DNA, 688 bp, Cannabis indica
aggttcgaaactggttttcacacatatattttttagattcttgttgtgcattgtgtactgttttgatcatatttgtggactgatgaaacttgtttcaattatcttcatcgtttatcatttatattttgtcatgatttagttatgatggttcataggttccaaactggtttcacagggttcataagtttgaaactggtttgttgttttacgtaattgaagcttaaatttcattttccttttgttattttaaaaaactggtttcactgtgtgaaattttttactagttgataaatgtaaccactttgtatgagtgggatccaacctctaactctggtgacaacgacaactatgacgacaataataatttgtttctatttattttgcatgttctaacaagtgttcacttagtatatatattttttttctacatatacaatagcaatcgatttcagaatttagctccaataaaaattattaaatctttaaaagtttttggggtgtagataaaatttctttttttttatagggtcgagattggtttcgtaaattttatatgattttcttatagggtcgaaactagtttcagagattttgaaagttttgtaatgggattgcttcattttatgatttttttattttaagtttctttagattatttttttttttaaatttcaaactggttttcaca

SEQ ID NO: 331734 - DNA, 657 bp, Cannabis indica
tgaagactggtcgaatatgtacatttgctgcgaggacaggtcgactcatggtatagtaagtgtttatattaattgctattggattacctgcctaggctattataaagtatgttggaaagtagcatactgataattttgataagaatatgtgtatggtatatgcatattgatattaatatccgtctgagttttaaatagttagaagatgtggactaaatatgtgataagttatacagtaagggcaatcaaatagtctgattagcgagctatttgggctcagggcaaacaatatggaagagaattatttattgccataatgctgggaacatgtaaattctgttatacaggacatgattagacgacaagggaaaataaatctaagatttaaaagaatagcaggctcatcttgtgtctgttcttatactaccgacacttcctgttgtaccactggatgtggtggaatatatgaagccaacttactagtagatcaagaagcaaaaactaaatgaaccacaaattatgggatagaacgaaaggttctagggtgaccatgatagcggtcaaagtgagtataagaaatggcgaccttatcctgagtgttcaagatgcaaaaaggcgccatttgagccaatgcagagccatatcttgtttttttat

SEQ ID NO: 331735 - DNA, 476 bp, Cannabis indica
tttatgattgtatgactttggttgcagattttgatattgtttcttttatttttgctaaacgggctgctaataaggttgcgcatgctttggcgcaatcttctctttctgaggctgaccgtacttttagtagagactctttaccttttgtttttgcatcgttggttttggatgatttagtttaatgaaatttaacgattattcaaaaaaaaaaatatacttgggttatgattgtgtttattgaaagtgataatataggaagcaacgtgcatattcttcattgaatcaaaatatttaagaccattttattcatcttaatgtatatatatacattgaatacataatttttcattcttgaaaccttgatgttaatgcatcgttaacgataataagcgtattttgtgataggatcaacacaaaaattagttgaaatctaggaaagaataatgaagcaaaaacaacaccaagtttttacgtgg

SEQ ID NO: 331736 - DNA, 764 bp, Cannabis indica
ggttcacaatttttttggaccccactcggggatccacctcatcttcttcagccatttctggctcaatggtttcccggaccatcagtacgggcaggtgggttgaaacattgtaaccttgcctttcctccccctgatttcctctcaccgtcccaattccagcttcatgggtagggaactttaagcacaggtgccaaatggatgtgactacgccaaagtctactagggccggttggctgaggatcgcgtgaggtctcggtccgttaggcctattgcagtgaaggcctccttgaagagtaagttcacggaacttccattgtctatcaagactctggccaccactttattagcgatgggggtctcgatgaccaacggatcatggtgagggaagtgcaccgtcttggcgtcttcttccgtgaacgtgatgggttgatccaaacctcgttgtgctttacggcccccgcgtaccgctttagttctttgcgggtggttcctccaatatggggtcctccagagatcatggctaccctcccgttgggtctgggcggcaagccggggatgtgttgggcattgcccgcaggagcaactggagccaatactcctgctgcaccccccggtgttccctatggcacaccccctgtcacctggctcagattgaggtgagacagccgattcttgatccactcatagaggtggcccaatcagatcaggttttcaatctcgtctttgagattcttgcattcattggtgctatgcccaatgtcgtt

SEQ ID NO: 331737 - DNA, 748 bp, Cannabis indica
agttgctttagcattccagcccagccactgtttaatctctttcaagcacagaacagtttctctacaagcaaagaacaaatgctgaatgttttcagtttgttcatcacaaaggctacattgctcttgcatcatgacacccattctaatcaatctttccttagtcttcaacctgtttagcatcactagccaaaggattatactgtgtttaggtgtattcaatcgggaccagacctctttactccaatgagtagtcggctttggagtgttgaacatcctataaccagctttgataacatatctattgctctgaaattcagcactatcatgaagggagagaatttggtttttaagagctactaacctcttccaataccagctggaatgaatcgaggcatcataactccaccaactctgccccttgatatatacactattcacccatcttaaccacaagctctcttggttgtttgcaattgcccaaatgtatttagacatggctgccttattccagctttctatctttgtaattccaagccccccattagctttggactcacacacattatcccaagccacagcacctgcaccataaaacacagcttggcctttccataaaaaagctctacaaatagcttctatggacttcaaaattcttttgggcatgattatgatttggctccaataagcctgaatagcaatcaatacagagttgattagtgttactctccccgcaaatgaaaggttcctt

SEQ ID NO: 331738 - DNA, 1168 bp, Cannabis indica
gtgaccctagagtgaaacagtacggagaagtaaaagttgttgaccgagagctgacctgttaccactgaaagggctggcttctacatcagcctgagttatggcgaacgcccttgttggagtgggtttcgctggagccttcagtgcttcggttctgagttgagggcaatccctcttgtagtgccctggcatgccacactgaaagcacccttgccctctacactccctcagatggtgccttttacaactggggcactctgggtaagtgtatcgggtttcagaactaccctggcgattggctcatccctggttcccccggaacctcttgttctgacctgagccaccggttgaagtggatgctttcctttttgatccatggctgaaccactaccttgatccaggaggggtaggagccccaccaaccactgcagtcccaacaggctctgtcatgcatccaactgtgccctcagctcgcagtgccttatccaccatttcagcataggtggttttgtcgtcagtagtaatcattagatcatgtctaatcttcgcatttaatccgtccagatacttctcctttttactgaaatcggttggcacaattcccgaggccaacctcgccaagcgatcaaactgggttgtatactctgtaacactcatgttttccttctgggtcaagtgagtgaattcttttctcttggcacttctgactgcctcattgtaatacttggcattaaacagctcctggaatttctcccaggtcatagtagtaacgtcatgtatcatggacaccatgtcccaccaaactggagcatcttcttaaaattgaaaagtggcacagaccaccctatcatttctggtgacgcccacgaaattcaatatcctggtgatcacagttagccactgctcggctttcataacatctggacctcccagaaaaaccagtggtgcctgcatacggaacctttcatacagaggttccatccgattcattgcaaccactgctttgtcttggacagtaggggcgggtgccactagaatttctggagcaggtactacaggagcaccctgctgtcttaactgtataatcatttcttcttgttcgttgattctagtttgcatttctacaaacctgttttcccaattctgagattcctgagtagcttgggcagcc

SEQ ID NO: 331739 - DNA, 512 bp, Cannabis indica
tgaatcatgagccattaaattatcacataaaaatcttaccatgcccgtcaagcgattaatctctcctggaagtgatcgtatattctcttattcttcagttagttgggatgagttttggcaataaggagggtattggtgattccaaccctgaagtgattgatcccagtgtcagtcctaatcaaaatttcccatatcattcaatagatttattacatcatgggctctctttaacaaaggctctccagttacctttgtccataatcaacccagcttcttgtttcatcatcaagtctgttataaaagaaccaagtaaagcacccacttgagaaattggaataacatctctctttgagctctttaaatctccctcaagcagaatagaatgactcaatatgttgttggacaaaatccacaagttatagcatctagatttaccttgcaggttaaacacatcagtaaaatattaataaaattaaataaaaagaaataagattagaatagaattcaactat

SEQ ID NO: 331740 - DNA, 597 bp, Cannabis indica
aaacgggcatcgagtgacagaccagcttcctcacagaagctgatcggccacccttgggttgccctatggccagccagcctttggactgcaccatagccagccagcctgctccctataggagtttggctggccaagggggactctacaggattctttgtgcacttcttcatgtggacaatattatatgggttgcaaattaggccctaaaagcccaatataatagttgagtaacatctacgttcaagggcattttaagtcttttataattaattaattaactattcaaatatcctagagtttaaagggtaaattaggattttaggcttcctatataaaggccttaactctaacctagaaaacctaagctaaattaagcctaatactagcctccaagctcttatcgtaagtctgataacttctctcttcttcactttctctctcacacgccaatacaagcactatcatttgagattttccattcaaaattcatacattgtatccttaagggttttatatcagatctcacctatagtgatctagatagtattaaccatcggtattaatacaactaaaagggtgttggattttgtgccctaa

SEQ ID NO: 331741 - DNA, 466 bp, Cannabis indica
tcactcaattacgtgtctattaaattgcatctcaattcataagcttttccccattctgggtgagtatgcctttccataattgcataataaagtaatcttttcccagaatgtcaatggtctccttatataccatattgactatccagtcaattataaagtactctccatcattaccgtatcaccttaagtaatttaggtaatcttctttaccttagtgataccactactcttcctgatgttcttttatacattacctcggtaacatcactatttcaagcctccattggcccttattcccacgaaataatggcttttatacatgactgcatcactctagctgtctcttagactgacgactggtcctacgaaccaatccaagtgtttctaacgtgctttgctctgactcgtacgcttcatggggaaatttcttaaatgaaaccaccccaagtcaaggacactcaaccat

SEQ ID NO: 331742 - DNA, 761 bp, Cannabis indica
gtccattggtcaaattttttgaaatcattatcatgggtataaaataaggaaatggaaccacctttgcaccatttcagaaagtttgagaaaaacccttaaacttcttcgtttaggatcaccattaaactcatctgaagacttgcatgccatccttgtccttgacctttctcctgcaagtttcctctgacttcatttttttaaggcgatccttgcttcattcgaaggtttgtagacggatttccctggcattgccccaagccctaacttcaaacggtaagttattttcttctttctcatgtttattacatagtgtggatcagttacttgattcatttgtatcgttatcatctcatttggttttggtagtttcttagggttaaacctgttcatactagggttcaggcaatatttaggttgttttaagatctccaactcattaccttcttgtttgataaaattctctcaagggatcggggctgctttttgttggtagaaatgtcccactctggttcaggagtttatcatccagaagctttagagattgagtttcctacaaaattggccttcccatataaacacaatccctcaaaacccacctccaaattagagctaaacgatgctagggttagggaacacacagtgagaacccaacatgaagatatttctagtcgccacaggcgcttcttgcaagaaatatccgaaggcagacgctggttgttgcgagaagcagcctggccagaaccatccagcttgtcctttat

SEQ ID NO: 331743 - DNA, 1511 bp, Cannabis indica
actataacccaaacccaaacatggacatagactgagacctaggacccggacctggacctacgcctcggaacccatacccaaatcaaaactcgagactcaaaccccaacctagaccaagactcgaacccaaatcaggacccagaccgagatcggaacctgaacccagactcgaaccaggagttgaaccctgactgactcttagactcggaccgggaccttggacctggacccagatgagggacctggactcgggaaacgggcatcagaactgggaccgagactcaagacctaatcctggacccggaccctgacctttgactaggactgggacctaggacccgaagtggaactagacttggacccggagcttagaccagactcatagtcagtgttttgatctgggacccatacccggactcaaacccagacccagactcagacctagaaccaaacccaaacccagacccgtaacacagacctaggtcaaagtccgagtctaggtttgagtccgggaactaaaatttgaataggacccagacccaaacccggaccgggacatggactcgaataaaaactcagatcgggactcgggataaaaacccaaacccagacacggacttggacccagacccgaacccaggacccagaccgtgattggagattcagacccgacccagtaccaagacctagattaggggtccaaactctaaattacaaccaaaatcaagacccaggactgggatccaagattagaccccggtcctggtcctagacccggacaaagatacaaacatgggcacggacccaagattcggatcttgacccacgatgcaacgcttcaaccaaactcgtagtcggtgtttagatcttggaatcgtactaacactcgaacttggaaccatttccaagacccagacccgaacctgaacccagacttgcactaggacctacgacctaggacgcgtgacttaggaccttgaccagaacctagactcgtaccagaacccagacccagacctagacccagacctagaacaagactaagacccagacccaaacacaaattgaaacctagacaaagacccaaacccaaacccagacctgaacccgaaatcgtaacataactcagactcgaacccaagacacggacctagatcgagatcaggacagggacccagacccagactagcaccgagacctgaacctaaattgggacaagtactcggaatgggacccgagcctaggatcgggactaggacctgagaaccaaaccgtgacctataccccaacaaggtcaagactcgagataaggactagtacggaacatggaccgggacctgcactcagaatgggaacctaacccagaccgggacctaggaccttgacctgaatcaaggacatggaccaatgactgaggacccaagaccccaacctagaccaaaaccttgacttgagacccaaaccaggacacaagacatgagctagaactggactaagatcttgatttagac

SEQ ID NO: 331744 - DNA, 1483 bp, Cannabis indica
ttcacaaagcagctgaagtaatctaaatcgcaatctaaattcacatagcctacatactaatcaccaaaacaatttaaaccataaaaaaaatattaaaaaatattatataaaatgatttccattattatttatatacagaatatttttaatatcacctcatttactttttatatttttggtgattaagcacaccgtatagtggccgtattttggtacatatgggaattgttgtacatctcatctcgaacgaggcgtaaagtttgattctgtcctctccacctttaactttttcttagttaactaataataataaagaagattttaataaatatttatacatccctaaactaaataaccataagtaacagaaaaaaatattttttgttatttaattggggcattgaggtttgtcttatctttctcctattattcatccaatattattctctctttgagctaggattttgtcttttagggctatatatagattttgtttgtttgttatagtttggtagaatatacatgaagagaatttatcatatcatatcatatcattccaatgtatatcctcaccaaaccaatagtctctcttaaaatcatgttttatatatgtaatgttactctagtggggaagagaaaaaaagaaaaaagaaaaaagatttaattttgggacaaaaattctcttcccactatgggtaccatctaccatgggacccctaatatatacatactattacatatatgatataacacatttccactcaaaaacaaaaaaaaaaaagtcatataatatatgtaggtaggtatatatagccaaagtgttgttttcaaaacataccttatttttttttctttgcttttctttttgagtggggatcatgtattgttggataaattcccatactatctatcgcatataaaagttacaaggaaaataaaacaaagatcttttacaagcctcaacagaccattataactcataaagttgtcggttctgtttttcataagcctagatctcttatctctttacaatataaagaagcaaacaaatatcttaagactctaacaaactttcagctttacaaggaaatatctacaacagttttataactgttttcagctcagaaacaaacacaacaacagccagcaacaacaatataaatagatgtacaacctgcccactttgacaagtgatactcggctcaacctagagaaaggcagcagcttgtttttcatgaagaaaaaccacctcagtaaagagagaaaaacagagagagagttagatagtttcttttgtaagaaaccagaaaaataaaggaagaaaagagagaaaagagcaagagattaccagctgactttgtagcttggaatctccaaaatccttgtaacccgaaaccgatttggatagtgaagaatcgagcaactttgagggtcgcttgacggagacgtacctctgatttagagggaactccgaaatcattgt

SEQ ID NO: 331745 - DNA, 596 bp, Cannabis indica
tacctaatttttttatctaattataaaaagttttttttacattatatgggcttgaattgttacatcggctaaaaaaataaaaaaagtttttagataaaaaattaaatttgacttaaatattttgtatatataaatatatttttaatatagtgtaattttttttaattgagtaattaaataaaacatagaaatttaaattcattttttcttattcatcattgtattaaaatataataatttaatatttttaaaattaataataacctaagtgtagagtcgaccctcagttaaaattggttataggaaaaaatatttttttggccccttactatataaagataattgatatttttaaaaattattaaaaaaaatatgtatattttgtaaaaagtatttttttattttggtccttaaaatcagtggaccctaagcgcgggcctagcctacctatgcctagggctagccctgcctaagtgttacacactattcaatggttacatttttattgtaatcatatggttacatttttctttaacctgtaatagcatgttactaataggtaaatttttcttttttagatttaattaattataatt

SEQ ID NO: 331746 - DNA, 547 bp, Cannabis indica
aaaacaaaagaaaataaatcataaacaatacaatccaaaaaaaaaactcatcaaaataataacaacttaatcacaaacacactattaataaaaaaaaataatacccaaaataataataatacagtaccaataactaaactcatataaattaatataaaaaattaaacaacaaaaatgtaaaacaaaaatattaactttcagagataactatttctaaactaaaaaaattataagtaatcaattacatactgtattccaacttaaagtctcacatcaacatctatatatactcttgcattatgttctagtgttctgactcataaggaaaaagatcacgaagaaaagactaaaatacatttttaatctttcaaaataaatttaaatttttttaaatctattagaactttaatcagttaaaattatgttttgaaaaaaattataataatttactttggcaacatatgttgtatttaaatgaagctgattttttaatagggataataccattttggtcccctgtgatttatctaaatactactttggacct

SEQ ID NO: 331747 - DNA, 1685 bp, Cannabis indica
ttatgtaattttaattaccaaaataccacttacactatcatcacttacacaatcagacgatgattgtagagtggttgctgcgtggttgcacggtagttgcatcagacgatggttgcagggtagttgctaggtggttggccgaaggttgcatcagacgaagttttcaatcagacgaaagtttttgggcggttgctaggttgttggccgaaggttgcatcagacgaaggtttcagtcaaacgaaataactgttagaaaaatggttatgcaactgtaatgcaactgttttgaaacattaaaaatcagaacagtgttttcacgtacgtaactctatctacatgtctctttatgatttaatatgaacaaatgcagcattagaaatttggaaaataataaaaatacaccaggataaacattttactagagtattgatgtattttttcttggattatacttgagttggattgtttgggaactccaattcaactttttgagatatgcctttcatggatctaaaaattgaaatcaagacattagttttaagaaaattaaactagatttccagttgaattttagtttcgcagtagtttttctacatttttttatgaattcaaaacagtcccggttttgattgattttagtcgtcttctcaggtcttctcaggtgaagtcgcaagaattaatggtggttctctttctggttaaattttcgtttcggttgcgctgggtttctgcgtagttgcacgatggttgcgcgatggttgcgtgatagttgcccaggaagcatggatcctgagttaaaggtgtgtgaaagtggtatttgtgtaattattttatttgggttgtatatttttttatttagccaacaggaagtatttttgtaatattgttacttttttttggttaaactgaaaaaagccaaaaaaaaaatcttatgagaaacaaatttacatttatgacctaaaaagggaaaataaacataaatagaaattacaaaaataccggaaacaaagacggaggagagcctcctacgtgacccagccgacgaaccccaacaactcaatctaaactattttccttccaaaatcaggaaaatctgatctaaaaaagatgtagatcttaaggaaaaatcactcagatcctgaaaaatccaaatacaaaaagggaaaaaaaaaagcattcaacctccattgatgtacaaaaaaactcaaaaacaacattcagtcaaaagcccaacgcgttcagagtagaagaatcgaagagaaggagatctggaaatcattgaaactcaccaatgattgaatcaaagaaagaattgaaggtaatacaatttcgtcatgtacatcttcctatcttttattctacataactgagaatttgttataaattgaggaaaacaggaataaattgaaataataatgaaattttggtcaatctgaacaaaaaaacagcaactgtttgcattaaaaaaaatattataatgcatataattagatgctacagggttttaatctgtaaacagttgtttataagttgttttctagtaaactaattgttgtttgggatctgcaaacgagaaatgatgaatctattcttattaattactgaatgcttcaaaatagttatttaatagttgatttgaaaaaatagtcgtccagatcgaaatgttatttgcaaatattgttgct

SEQ ID NO: 331748 - DNA, 520 bp, Cannabis indica
taaactcttatgtgtttatttcattgttttagaattcatattaggatgttaatcaaacatacttggtagtaaatctagatcctggtaaaataatttccaacacaaatgttatccgaatttctacacagggtgatgtggcatccatcttagtgatacgtggagaagatttcataacttggatggacaatacgctccatgatatgccatccaaagtgatttattataaacaactaactctaagaagaagttgagacatccgaacaagggtatgttatactatctgacctgagtaaatgcagctacaatatcttcaaggatattctctggcccatttggtacgcagaactgaacttgattggattggactggactggacaagaatagattatgctgaaaataattctatgtttggttttagaatagattggactattttatttatttccttttaaagaaacttaaattaaaataaaaatgtataacaataaataaataaaaatgaataattcgtaacaaaaaa

SEQ ID NO: 331749 - DNA, 657 bp, Cannabis indica
ttcgagtttgggtccgggtccgggtctgggtctagctttgggtctgattctatgtgtgggtgtttgagtttgggtccgagtatgtgtccaggtttatgtccagatctggaccccgatctgggtctagttttgggtctaggtcgacgtcgggtcccgagtgcatgtccaagtttgggtctgggtcatgatcttagtccaaatctaggaccagcatttcgatcctagtccgggtctttgtccaagtctgtgtttgggatcgggtcctagatttatgtccaggtccgcgtctcagttccggtcttgttacacgactgtgtccgggcccgagttccagtctgagtttgggtctgaggcaaggtctgtgttcagttctaggtctgggtctgggtgctggtcacggtccttgtcttgttctagggtcctggctcgacaatttttgttcaggttctaattttgggtcccaggtttaggtcggggttcggtttggttcttcatttgggtactggtccaagtctgagtcccatatctagacaccaactactggtctatcccaggccccgttactcgaatcccgagtcaacctttggatcactatcacgggtctcggtctggttcttgttgaggtcccaaagtcccatttctgagttttggttcggg

SEQ ID NO: 331750 - DNA, 642 bp, Cannabis indica
tcacgttttttagaaaaataagcgtgttactttttattctgatttttcagaactgggcttgcaaatttaacatctattgcatctagtgtgaggttgtgcagaagatgattagttttttttaattctttttttcttttatttttttatttgttttagtgttgttttatgcttgttttgttataatttatttatttcatgtcgattttagtgttcttgctctatgtcgccagaattaatggttatttttcagctgttctcgtgttgctgtggtggatctgtccgtaggtttggaagatggaagctataaatacatttcttcttctttttctattggttttttttggtttttttttttttacttttattctcctataaatacatttgacgagctcactgacaaaagggttttgaggtgtgtggttcttttatgattttctaagtggttatttttgcttcattgttttacatttattttgtgttggtttaggttttttttagtatttttttattctgattttttcaagactgagcttgtaaatatagacgctattgcatatggtgttaatgttgtgcataagatgtttggttttttttaatctttttttgtttttttatttgttttagtgttattttaccgttgtt

SEQ ID NO: 331751 - DNA, 971 bp, Cannabis indica
aagcttctaatacccctgaccgttataggaggcagtagcttttcaataacttccaacttatccttgtccacctcaatacccttgtgagaaaccttgtgacccaaaacaatgccttcttttaccataaaatgcccaattgagtaccaaatttgtttcttctcacctcttcaacactttctccaaattagctaaacaagtgccaaaggattccccaaatattgaaaaatcatccatgaaaatctcaagaatgctctccgccatatctgaaaaaattgccatcatgcacctttggaaagtggcgggagcattgcatagcccaaatggcatcctcctaaaggcgaaggtgccatatggacaagtgaaggttgttttctcttggtcctccgacgctatagaaatttgattgtagcccgaatagccatcaagaaaggaatagaactctttacccgccaaacgatccaacatttgatcaataaatggtagcgggaaatgatccttcctagtggcattattcagcttccgatagtccatgcataccctccaaccagtcacagttctagtaggaatcaattcattgttcttattagcaaccaccatgattcctcctttctttggcacacattgatcagggctaacccatgaactatctgaaatcgggtacacaataccatagtctagccactttattacttcttttcgcaccacttccttcataataggattcaaccttcattgatgctcaatggagttactacagccagcttctagaagtatcttgtgtgtgcaaatcattggactaattccttttatgtctgccatagtccacccaattgctcttttatgtttcttcaacacttctagcaacaaaccttcagcttcagcttctaaccatgctaaaataattactggcagcgtttcattctcccccaaataggcatatttgaggtgacttggcaagggtttcagctcta

SEQ ID NO: 331752 - DNA, 580 bp, Cannabis indica
gagagatcttagtcattgagtctaatggcaacaaaatcgtctttaaatagaaggttaactgaacaaccattgtttatcataattttggcggcaattttattggaaatgggagtttcaattaccaatgggtcataatgagggaaacacactttcttggcatcttcttctataaaggtgatagtttggtccatgagcgaagcctttgtgccaggagctggttgacttcccatacttctccatcataatcaaagtccttaattagcataacgattcagcttatttcatgtagttcctccattatgtggccctcctaaaaccattgctacccttccatttagtctaggaggatgtcttggcacaagatggtgttagggaaggaatctcaatggaactttcttttttggaacttaagctctaggagcactggtgctctaacttgtcctccattcatgtacaacaatttgtcatttatccatttgtacaagtgacctagccttattaggctctcaatctcatctttcaagtttttgcattcattggtagtatgaccaatatcgttgtgatatttgcatcttttgtt

SEQ ID NO: 331753 - DNA, 563 bp, Cannabis indica
ataaaccctaattatttaccattaggcttattttcgattcaagtgctctcgcagatatggttgggagtaattgttcgcagatctgtcctactcatagactatctttaagtggctcgcagatttacttgttcccatactctcccgatcattagctcgttgagtactctctcctcttcgagttgattggctatgggttctggatcacctcgaagtcacacttccttcttcatgctctgttctttcctcccgagagcggtttgtcgtatttcccccatcatggtacgtatgagtcctcgctctatgggtttgggaagaacattggtgattcctagcaggtgatgatctcaattctcttgactgagctccaagatcctcctcattttcacgagggatttctcgttcatatgtttccggttgtctcctttctggctgctcatcctgattctcaaggggtgtctcattttccccgggttgttctctcgagccttttcctgtctcctaattcgtgagccacgaggtttgcctcgtggtcttctcttaccaagtttaggttgattttaagc

SEQ ID NO: 331754 - DNA, 709 bp, Cannabis indica
gatgttaatgaaacatacttgttagtaaatctagatcttggtaaaatatatccaacaacagcagccttaatttcttcacaagagtaatccttgcacagccatttagcatgctgatcatatacaacagcccccaaatgcaccaggttttttattacaggtattctcccttgcattttattgcccagcaaccctttgtaatatgacaaaaaagcttctaaaaattttacttcttctgttagtctttccccctcctgattctgtattgaaagtactctatttttccttcttctagctttaatacttgcatgaaataaagccgtgttttcatctccacttttaagccaagtcaccttagcttttttttgaagataagactggtaattttttagtgaggcaatataagcttttcgggcttctaatttctcctacaacaaaatctggtttaacgggtctgatgcactctattttgcatctgctttaacaaatctttagccttctcagtagccatttgtatgtccaaaaaagcttgcttattcaactcccttaatacccctttcaatattttgagcttagtgaccacttggaacattttgagaccctgagtttgttgattctaggaggctgctactgttgctgcaaaatctggatgagtgtttcacattttgaaatatctaaatggtttcttgccactaggagccatatatagaaa

SEQ ID NO: 331755 - DNA, 669 bp, Cannabis indica
atgtatttactattatataaaataattttaaaatttgataatacaggtagagaaaattgcatgaaaatttacaattttttccttatctacatttatttttcattttataagtgacgcaataagtgaaaaaaaatatttcaccaatttatgtgtcatttttcaaccgatggtataagttttttgtgacagtttagaaatgtcacaaacaattttacgtcagtttcaaactgacacagaagataaaacaaaagtgtatattttgtgtcagtttttaaatgatgataattattttttgtgtcattttaaaaacgacgttaataaaaaactatttgcgactaaatgacacttaaaaccgacgagaattgtactttttgtagtagtgtatagtgttcttattatatacaaattttgtatcttgagattattaatttttgaaacatgttgtatcagattgccaaacgtatatgatttagaacctataatttgtgtaatagttaatatgtatatgttaatattttttaattacatattaattttgttattattttggctaattagtaattttttctcccgaactttgacatgtactaaatcgtgctctttgaacttttttggccgttaaaaattcccctcgaactattgagattgttaaatttaaggacttttgtc

SEQ ID NO: 331756 - DNA, 959 bp, Cannabis indica
aacacactaaaaaagaaaaaggcccttgcagcaacctggagtgatagtgatgaggaaaagaactccacaaccagtgaaggatcagatgaggaaaagcaggtactggcattcatggcccaaagctgtaatccagttgagtctgaagatgatgcagtctccacctcatcagaagctgatagcacaggtcatcaaaatgcttatgaagaaatgtttacacaatgggagtacatgactaaacagatccgtgctctaaagaactctttagagcaagtggagactgaaaaaggaaagttagaagacactgtcaaaaatctcaacagacttcttgatgaaaaggagaatgagatctataaactcacagttgatctaattcgaaccaagaaagctttacaattcattcccccaggcactgctgctatcaatcaaaccctacagcttcagaagccctatggtgatcgaacttccttaggatataagatgctttataaacaagggaatgatctatctgttgagcattctctgccctccaatgtcgattcatcaaagaaggaagatgagttacctgccacctcaacaaccattaacgaatctgactcatctgagaagagataggttccaactggacccattaaactcaagtttgaaggaaggaggactaatgctgacaatctactatagaattacaatttcattcctacatgtgatttctgtaataggagaggccacattcgtcccaagtgttacaaattgcagaactacttgaaagccatgatcaatcgtccaaatagtttccctcaaccaaataagtgacatggacgcaaacctcgtcgagaatggaaaataaagtccaaaccaaatcctgatgttggtttggttgcaaagctatccctgtctgcctttgttgaaggtcagtggtacttcgacagtggatgttcacgtcacatgactggaaataagaa

SEQ ID NO: 331757 - DNA, 579 bp, Cannabis indica
tggtacttcgacagtggatgttcacgtcacatgactggaaataagaaattgctagttaactaaaaagatgaaaaacgggggctctgtcacttttggggatggtaacaaatggcagattgctgggagaggtgatgtgaatgtgaatggagtagctcaactgactaatgtcctatatgtgagaagactcaaagccaatctcatcagcatcagccaattgtgtgacgacaatctctctataagtttcactaaaactcaatgtttagtttcatctgatgggtgtgttgtcttaacaggaaacagaactgtagaccagtactatgctgtatgtaataccatagtgtgcaacagtaccttcttggacaaacctgacttatggcacgacaggttgggacatttgaactatagagatcttcaaagattggtgaagctccaagctgtaaggggattcttgatatgaaagtatccaaggagagagtatgtggtccatgtcagcttggaaaacagcataagacacctcatcccacaattaatagacttctcacctctcgtgtgttggaactaatgcatgttgacttaatg

SEQ ID NO: 331758 - DNA, 644 bp, Cannabis indica
cgcgcgcgcatggaggggacacgaccatgtcacgtgcggctcgctcggacatgaggcattcagacaaggccatgtccaaattttttcccctcttgaccgagatttgtcctaagtaggcttctagcagccttccccttgctcacttgtagcctcatgtgcgcgcgggaagtggctgattgttgtttattaaaggtccgtcaagccagtgaccccaatactgggttttcttggggcttgcaatcttcccatgcgatgactcaataaatccttgaggacttaatggttcttttacggggcgatgattgattccttcttgaggattattatcttcggagtcatccattacttttatgtcaagaggccttttctaggctttttcacagaggctctcaatgaaggcaccaaattgttagcccaggttttcgttaattaaatttgagcctcacagtgataattttacacagaacaaataaaagctgtagaaaagtaaagaatatgaacacagggttttttacgtggttttgcagttaaaattctgcatagtccacgagtcaatcttattcagattttgagtatgtttcagggcttctttcatatgggttttttgtccccctactttcctcttatctgccactatttataat

SEQ ID NO: 331759 - DNA, 744 bp, Cannabis indica
atcattcaggggtaaagctagaagctctaaaacacaacgaggggttatctcttctaatgtttcatcaatttgtgattgtagatccggcgcaaggctactagccccttcttcctacacattttggatatttatcaagcatgtaaaatattcaaagcgataaacttccaaataatctatgatggtaaataaacttccaaagttgcacaatctcaattgtttttcctttacatctctcactattctaaaaactttatcaaattccaaaaggttaagatacaattctaacctgcaagagcttcaaagccctttcaagcacttcgcaaccccgaatgaaattgggaggggacagtgccatagcgtccctagacaaatcaacataagcaagtgccatagccaaaactacatcttgtttgaacgactttggcagcctctctctaagcaaactttcaccaatttgaagaactagttcggtttttcctgcttcttgcaaaacacataaagccccaagaacctacaaaaccactaacacaccatcaacaaaggtgaactcaaccaaaaatatcccaattttcaaagaattacactaccatatttttccaacttccccgttcggcggcagaaccacgtctgggagcggcgcctccctatttgggttcacgatggcggaggtagcccgtcgaactgaaaaaaaatgagagagagagagagagagatgagcgagagagaaggtcagggcattgcgtg

SEQ ID NO: 331760 - DNA, 671 bp, Cannabis indica
ggcataaaatcaatcaacattcaccatctccccaaataggagtttagttcataaaatctataataacatccataatcaaatataaaacagaaattaacatagaaattaagagtttaaggaagaactagttagtgattgcgctccgtatcgccacaattgcttcctctacctccttcttttccttttgggtccaatttatgcctccctttgttctaaaacatgagcccgttaaatagaaattagggttgcaacctctgaatggtgaaagtcaaaaattgcccaaaattcccgtatttttcccatagtcgcgactacataaagcctagtcgctaccactgtgcatatcgaatttttgggctctctgtaaaaccactggtcgcgaccatgaaaaagggtcgcgactaataaatcaaattgacagcttcagcatctttcagtaaaatatgcataactttcacatacggccaaatgagttgattcaagatgcgttggaaagaagaaaaagaaatctaaaatttctaaatttcgactttttctaaaatatgatcggaacatagtcaaattaaggcttgaagtttcagctttattttcttgcaaaattttctttattctatagattgttattttctgaaatttgatcaattgatatattccaagtgtgaaacctgaaa

SEQ ID NO: 331761 - DNA, 1157 bp, Cannabis indica
ttataatatgataatgatgatggtgtaaaccactcaaactgtaccgcaccacactgcattttcatagtatgatttttgcggttttaagatctcgcgatgcggttgcagtttgagaaattataaaaattgcatatgcattttgatttgaaaaaaatagctataatttgcatcatctgcactgaaaatacccctaaaagatacctcaatatatgatacatataaactttaaaaaaagaattgctaaaaggtattattggtatctagcaccctcctctgtgtcatactgttatcagctctcatataactcaataaaataattttaaaaaaatatcattaattaattgtaaaatatcacttatagaaagtattgcgcaccactggtgtccaatgataatattgtttacaaaattcaggggggcacccgagcttataaatagctctgcccttcggaattaagagtacaaacaaaatggtattcttcttattattattattattattattattattattatgaaagggaactgacttatattcaaatgaaattagcttggcaactacggaactctaaaatatcatattaaattttggctacaatatccaagagagactgagagagggcatttattttatttttgctggaatgaaatagagagttatttaagctactcattatgattagaagatatattaatcattatattaatggataaattaaaagcctgaacacaatggatttcttcattagttcaatttatctttctagaaaaaacattgtgtaatggatttatggtgtattttttatttaagggtttgtttggtacgccgtattacactgtattatattgtatagtattatattaatttgtattttatgcaatatttttatgtaaaactatatgtagtattaatttttatgaacacctaaatatataatattttagtataaattaaaatttaagatagtattatataaaaatataatatatataatctaattcaatataatacaatacaatacaacttaatacggcgttatgttgtcggatgaattttgacaacacccattttgtgcgagtattcaagggttgcttgaataccaaaaaaatagatatgcgagtactcacttagaatagcgagtactcaaagaatatagt

SEQ ID NO: 331762 - DNA, 967 bp, Cannabis indica
atgaattaaatagcagtccacattaaacaacagtggtgaatatcaaataacaagtaaaggtatcttatagaaaatgatatatgcttttaaatattcaatccaactttaattgtcatttatgttttctttataattatatataaatataaattaagtaggtgcacaatgaaaagaaataattctactaataatcttttttatttgaagtgatacttaatgatagattaatataaaagtatatacatacataaacacatgttataaattcttttttattgttatagttttattgattaattattatggataggattttgttaataatttgtttaatatatatatatatagttctttttaattgtagatgaaaaaatcaactacaattgatacatttttcaaaagaaagaatgttgaagtttcaacatctgatgtctcatcaaatccatcagtatcagtggatgtagatcatgaaaattcaaaaaatcggccaataaagtctttaagacttgacattaaagaagggtttgatattaattcattagagcgtgatccaggaatacgcccgccaatatgggagtatccacctgagaagcgtgatgaagttcgcagagcttacattaaagctggtccatttcagattatactatctagctatcaaaaatcagaagaagctcattcacgttcttttcagtcatcttggtttaagctatttccatcttggttggaatattctcctaaagtacatgctgcattttgtctaccatgctttttatttcactctaaagatgcacatcctagattgaatgcatttactattaatggatttcgatcatggaaaaaagtgagaggaaaaaattgtgcatttttagcacatattggagacgatataaattcacctcatagaaatgctgagaaagcagttgcagatctcatgaaccaaccaacacatattggaagaaggtttgcg

SEQ ID NO: 331763 - DNA, 604 bp, Cannabis indica
ttttttttacattcttacggaattttacaaagaaattcttattgcaactagcagagcaacttaaatcgtaaccaaaagtcgtaaaacaacccacatagaaattatcggaaaaactactttaaaaactcaaacaataaattttaaaaaaaattaaaaaaagtaatatggtgggtaattcccaaaaaaaaaaactatagtatcttagatctcttggtctctctaatatagcacatcacattcacatgtggttcttacgctgattcttttattggtctaattcattaattacttaaaggttaattaaaaaaatttcgtcccaaactttgacatgtactaaaattatgtcctctgaacttttaagatcgttaaaaatattctctgaactattaagattgttgaatttaaggacttttgttcaattttagtaaaaaaattctaacatgaatgaatgttcagggacatgatttagtacatgtcaaagttcgagggacataatttggtaaatatcaaaatctagggagcatgatttagtacataaacaattactgaaatagtaaaaattcggtcaaaaaaattcaagagaatataatttagtacatgttaa

SEQ ID NO: 331764 - DNA, 516 bp, Cannabis indica
tctttcaataaaaatttattttagaataaaagaaaagggatattggcggctaaaccacccgaactttacggtttgtaacacttaaccacaaaaaccgaatttttggcggctaaactacctaaactcccattccgttttgctctgtacacctccgtccaaaaatctcagttaagtgccacggtggactatccacgtgtacacacttatacacgtggcaattttttagtggtccacgtaatattagttttaaaaaataattataaatatttaaaaaaaaataaaaaaacacaaaattttttttaataatttatatattaaaaaaatagtttaaaaaacagaaaaaaataattattattttttttaattcttcttcttttttttctttcttttcttcttcatctttcttctgcttcctcttcttctgcgttttttttttccagaaagcaaaaagatagtcatacgagtcatcgattcgaccagtccccatctgctgctaacccatatacatatttctct

SEQ ID NO: 331765 - DNA, 973 bp, Cannabis indica
agacccacaaaaggagttgtcaaggtttttgaatagtgagtttgcaaaaatagatcaaaatgaaaatgatatcttgcccaccctcaaactaagttataatcatctcccatcacatttgaagcattgttttgcttactgtagattgttcccaaaagatcatgaaattaatgtgagggagttgatacagttgtggatggcacaaggatttataaaatactctgatgacaaaagccaatgtctagaagaaattggttacgagtattttataaatctactttggagatcctttttccaagagccagaaacttgtgattttgatgatataatgacatgtaaaatgcatgaccttatgcatgatcttgcaattaaggtggcaggatcaaatagtgtcataatcgatcaaaattctaaaatttctgatgaaaaatatctccatgtgtcattcgtaaattttgattttgatcttgaaaccaacaactcactcgagattttcgaattcttttctcaacaaaaaagacttcgaactttacttatacataattttgaagggttgagcttctcagaactagagggttttgggtccaactttaagtgtctacgagctttgagtgtaccttccatgaaaattgaggtgttgccaaggaatttgtgtgaattggaacatttgagatatctaaatctttctggtaattctgagttaaaagtgcttcctagctcttttataagattacagaatttgcaaactctgaatcttactaattgttataggcttgttagattacctcataacatgaataaattagtcaacttaaggcatcttatgattgatggatgtaatagattgagagagatgccccctgaatttgggtatatgagttcccttcacacattagatagatttgttgcatctgagtccagtggggttcatgaattgagcaacctcattaacaacttaaatggaagtttaacaatt

SEQ ID NO: 331766 - DNA, 647 bp, Cannabis indica
gaagacaacttagttgatccaataacaaaaattttgacagtcactacatttgaaaagaatagaatgaatctaggattgattaaaatgtactgattgttttatgttagtgcaagtggagtttgttaggtcttgtgccctaaataaaactctatttcaatgtaatcttgaatattcatttatcaataaagaaacaaatttatttcattacttgtataatgttttatttagttcatgtgatcatttgtttgatttataaattcatccaaatccttatcacattgatgttcttgtttattgtgatgtcaatacagtggaaaataatcaagattatgtgattaaatgaatttctatgatttatcagtatacaggatttaattagtagaataatctacaatgtagtttacttgcaccttagataagtgctatgtcctttccagggtattagttaaagtaagattgggttggatgtatggagtatgcatcagaagggaccaatattgaacttgaataacatataatactgtagtatctatctaattcaatatcacctagttgatcttagatcaaatgatctcaattctgagatggttaggttctagttcagttgtattgtaacaccctaactaacataggcgtattacgtgatt

SEQ ID NO: 331767 - DNA, 402 bp, Cannabis indica
acgattgtttgtgatttggatggtttcatgttgtgttgtgtgttgtatgatgattgattgatgtttgtgatttttcgtgaaaaataattgaaattcagtttctagaattatttttattggatagtatggaaaaaattaagcaatttaatttttttacagaactcaatctcgatttaatttgaattagttatgattttttgaagtttcgaaaaatatcgggatggtgtcactgccccacgaacgcgcatgaggggcttcccttggacagcacgtgcacggacacgaatccgtgtctgaaatcgagcttccgcgcacggaaatcctgctggacacctccagcgccgagcttgctcggccgtgcactccccttgggcgcgcggacagcatactgtccgtacagct

SEQ ID NO: 331768 - DNA, 628 bp, Cannabis indica
ctagatgggggacctggacccagaccttggaacccaaacccatatcggaacccgagactcagacctggacttgaatatggactcgaacccaagacttgaatcggtaaaccttgaacccaaactcggactaggacttgaaacccgattgggtcctagactcgggctgggacctaggacccgttctggaaaccgagacccgggcttcaaaaatttggcaccgagacccacaacctgaccccaaactggaccctgaactaggacctggaccaggactttggacccgaagtggaactagactcggacccgagactgggatccatatgtggacccgaggcttgaacctgacccatagtcgatgtttagatttgggacccataccctgactcaaacccaaacttgaactcagacccaaacccagaccaataccccgtgacctgaaagtggaagcagactagaagcagacaaggacctgagaacaagaccacgggactaggacccggcctcggtcccaagactggaatctaactaggaccgagacccaaactcagaccgagatgcggacccaaatcaaaacttagatcgggactcggaacacgaacccaaacccagacacggacttggacccaga

SEQ ID NO: 331769 - DNA, 1404 bp, Cannabis indica
tctctctctctctctctcgtgccttcaagaaaagttttctgtgtaattcaagaattccagcatgtttcttagttatccaacccaaggtaacctctctaacactttgtcctatggatttcttaagcttgaaataaaggttttgcttgatttttgtgagttaggagctgtagttgctattattgtttgttgatgctttctgaagtcaatttgaggttatttatgttgaattgaggtggatttaggggttgttgtgatgtttgagcaagctttgagtttaagaactcaagcttggctttatggtagattttaattgtgagcttgtttagttgttttgttgcttggaatatgtttaatatgatatatttagttgttttgttgcttgaaatatgtttaatatgatatatttagtaggtctggaaagtttggtagagtttggggatgaattgaagttgtattggaattttgagtgattcctgcactaaactggaattccgtttcagtgggacctataggaaccggaattccggttggtccctaggaatccccacaaaaccggaatttcaattggggaaccggcctaccggttggggcagttttgggaaacctagttttcccctttttgcgatatttagggtattgctatatcatttatcgatggggaaacttttagtttcaagtttaagtccccggaaagtgatttagcgtacgtgtcactcaccagttttacgaataatgtgatttaggggcctgtaattcgtcgagtagctgttccactcaagttggccggcacacctgaattcgaaaacgaggtaagcttagtataatgatatgcatatgtatttacatgtttagtgtgcatgttagttaagcctgttagatcacattagatatgtatgttggcttctgtactatttgacagtatcacatcagtacgcctagagtatgactagtgtaccgagtatagactgatattatggtcgatagtatcgtactacttgacagtgtcgtatcgatacgactagagtatgactagcatactgagtataggctgatattatggtcaatagtattgccgtacgaaagttctagactcagcaccgtgttggacacggggatagggttatgattgggggtatgggcgtatgatcataatccaggttattgctatgttattgtttatgctttgcttactgagtctgttgactcacagttgctatttccatgtgttggtaagggcaaggctaatgttgagcagctgtgagagcgagcagatggagattgtacatgtcggggcggttaggcttggagcgtactgtctttgggacatcagggcttattttgattagtcgctaggcaacaaacttttgtacatgcacagtgaaacttttgtaaatgtttttgtaa

SEQ ID NO: 331770 - DNA, 660 bp, Cannabis indica
ttattattattttgttttattttaatttttaaaaaaaaatattagagatatttcagtcgatacaaataatattcaagatattgaattatatagtagtattaataattatgataattataatttcaaagttcaaaaatagatatatttttttaaaacaaaattaaaaaataaataagtgactttctaaatctaaaaaaaatataaattgagagactcaaggatttatttgattattttataaaaaaatgtgaaagaaaggtatactcgttacttgaatgaattttttaaaaattaattatcaatgttcaaattttaaaaataaagcaatttatatttttatttagaaaaaattagaaaatagataaataaatttgaagtaattttaataaactaataaaaaattataaattgagagaatggagagaataaaaagagttaattagagagattttagagtgtcatctctattcattaaattataattattgataatgttatttattaaaagtttatttagtgtgttttagttttttatttattaagaagtttaaaatttatataattaatgtatagttgaattttaaattgctttttcttttttcttccaaaagataaataaataaatagggcaaattacataaaaattaagggaaaaaaaca

SEQ ID NO: 331771 - DNA, 607 bp, Cannabis indica
atttatcaatagaaaaacttttaatttaaaatttatgtcctcaaaaagtgatttagtgtatcacttatacaatggtttacgtatgttgtgacttaggggcttgtgaattatcgagcagtagtttccactcagatcggtacacatgaattcagaatcaaggtaagattagtataataattgcatatatgaatacatgtttagcgtgcatgccagttgccattagaataacatatcagggtatcggtgaggtgtacataaagttacaccaagatatcagtagatatatgctaggcataccagtagccattagattatcatatcaggatattggtgaagtgtacatagagttgcaccgagatatcaacagatatatgctacgctttttcgtacaaatgtttcaaacttactacgcgtgggatgcggaatatgattgtaattaggtgtatgggcgcctagttaaaatatagtttatgtttatattatgtttgtgcttttcttactgagtctattaactcatagatattatttatatgtgtaggtaaaggcaaagtaaaggttaaatagtagtgagctcaagctatattgagacggttagacctggagtgtt

SEQ ID NO: 331772 - DNA, 593 bp, Cannabis indica
tcttagatagccttagcttatagcgtttcggcgtatgatcactgttatacaatttcgatcaatctctcttttttcgtccccctgcccagtgaacattcctcactatttatagggcaggaaacttgaggaggaggagtttcctctctcgttacaaagcgcataaacacaaagatcgtgggatcattgctgaatgctaggatcgtgggattgaggccgtatacaccgatagtggaatcgtgtgtatgccatatccacgcaagttgatccccgagttatagggattgagctggtgactcacgaagtgcttggctgaatttgctaagtgtttctcattgtgcatggctcgttgagtattccattatggacatgccagcgaggcatcctgctcggcatgttgatccgaccaggtgctctaagttgatgccacgtgtcaccattcttgtgatgccacatcagagtgccaattttgagataatattttccccccaagtctatgcgggaccgtcgaggttgcgtatagacttattccgagctggctctgcctcggaaggggacacatgtcgagcatgaccgttcgagactcgatgtgaagc

SEQ ID NO: 331773 - DNA, 816 bp, Cannabis indica
gtgctcataactcacacgcagacccattggcccgcttggcctcaaactaggaaagctgaattactcgatgtaatcaatgttgacgtattggctcactcgacagtaagtcgcgaagaagtgatggaaatagatgttgccaaagaagtcacctggatgactccaataatcgcctacttggagaaggatatcttgcccgatgacaaaatggaagcgagaaaactgcggtagcgggctgccgaatatgtcatttataatggaagattatatcgcagaagcttcagtcagccgctacttaaatgtattgacgggtaagattgcgactacatactccgcaaggtgcacgggggtatctgagggaagcatactattgataattcccttgccctaaaaatcattcgacaggggtattactggcctaccctgcggcaagacgctttcaactttgcaaagatatgcgacaaatgtctgcgaatagccacgtatgcccatcaacctccgagccacttgcattccatcacaagcccttggccctttgcagtttggggcatcgacttgataggtgaactaacaaaaggaaaaggtggagtcaagtacgctgtagtcgcagtcggctattttataaaatgggctgaggccaaagcactagcaaccatcacagtggctaaactgcgagagtttgtctacaactccacaatctgtcattttggcttcccctataagctcatttcagataacggaaagcaatttgatttcaagaagatgcaacaattatgcgaagaattggggattaaaaaagcgttctcagtagtcgcctat

SEQ ID NO: 331774 - DNA, 1884 bp, Cannabis indica
taaccaaatcataaataaataaataaatagtagacagtagcaaaattaaaataaaaaatttatatagactacctttttataaaaaaaaaacaaacatcatatacccaaacaagattcaaattagtttcatttccatctagcaagacaatgaaaaaaaaattatttctatttcaacagagcaatgagaaaaaaaaagtcttacaagttgaaaatgaaaacttagaaggtgcggctggcgtgtggaaagctcagttggacggtcggtggtggttcctgctgcggattggatggctggcacggctagagatctgaatggtatactggtgcgagatgagcgtgagacgagcaatggctgacgtgcgaccgtgcgtgagactgagagtggttgagtgtggtggtggctgatgcggcacggtgagagaacacggaagagaaaaataaaatgagggttattaggtttaaggttttgatttcgacctgatagaatgaattataaatgtgtatatgtatatttttttacttgggctgggtttggccggttcggtttgggttcattgggttagaaaacccctaggccgaaatcaacccaataggagcgggttggatctttctcaacccatacgtatttcggcccataaaaaaatggccatgtttcgacccatttcgggttgagttggcccatttccaacccatgctcacccctagttcaaaggacatttttaaggaccttaaaagtttaggggcatcatttggtacatgtaaaagttcaggacaaaaatcctaattagccttcatttagagtgtgtttggaagtaactgtgtaattactactaggataattactagggtagtaattacaatatattgtaaaatgcaatgtatgtttggatatgagctggtaattgcatatgaattcctaatatcttgtttggcaaaatagttagtaattatataggaaaataatatttttagtaattacacagtaattacattcaattctcatgaggggccatgataattgaagagtgtaattgtaactcttcaattacttccaattatatacaatataattacatagtcaaacaaacatactaaattgtataattacctgaaattacacacaaattcaattacattgtccttaattaaaattagggagtgttagtttaaattcaaatagcgtttgaaaatcgtagctgctctgaagtctgaactcaaagatggcttctccaatggcttattctggtctggaggacaaggatctcgacgacgccgcgttgtgggctgtaattgactcagccgtggccgcctcggcttcctccaaatctcgcaagcctatcgctatcaaatatcctagtcttaatcccaattttcgttcaaacgcatctcctccattaatgctcaccaagaccactgcaaacccttactgcactaaacctgcttccaagtccaagttctgcactgagggtgaggtattggaggaggaaccttgggttttctgcccgccgaggaagatccagaggacctgctcttccgaagttagcgagacaagccctctcgccgtagttaggaatgtgcagcgcacgcctaccacgacagcctattccactccggaaaagtatatgtcgccggagatcggaaggttcacttcctcagaatgttcacccggtattagtgggaggagtcaagacagggagtgttcagggcagcacagcttgtccggcatgtttccgtccgtttcattatttaaggagtaccaaaacgcggctatggcggtaacgtcttctacacattttgtgcatagctttattattattattaatattattgttgtttgttttgtttttttttttttttttttttttttttttttacttttattct

SEQ ID NO: 331775 - DNA, 694 bp, Cannabis indica
gaaaaatacataatcgcctgaaaatttaatctaccaattttataacattttatatatcatagcccatcatataaaataaacctagatttttcctgagcaaccaaagtatttttcataattaatttatgaaataaactaaataattcacaataatttcaaataaattcagaaaattatgaaacttcaccaagcaccttagaatagaataaagaatcaaaatatacaaaaatatctaagaaaaacacctcagaaacgctcagaacgtggtcgccggcgttctcgtcggtttcatcgctggtaaagtgtaactttgtccccgattgctcttgacatgtcctttcgattggggaagctctccacagtgatcatgacctcaaaacgatcaagaaaagaggtctgagaaggaaaattggagtcgtctccttcgttggcggtgtaccgtctttaatggagtcaaaatattggttcttcgttttggacattaaagcttcgttttcttacgtaaaaaacaatccttagggtcccacacactcatatataacctcccttgacccaagaacaagcttaaacacgttcgaattcgagtccgtttcaagccgcaccttcgaagcttcaacaatggtgaaactcgaaacgaggacctccgccccttataccacattaaaaagcttccttaggtcgtatataagtgatc

SEQ ID NO: 331776 - DNA, 821 bp, Cannabis indica
ttattactatgtataagttttaaaatttttcacttaattatttcagaagtctacaccggtaatggatgtagatgaaggacaatcaaagtctattaaagctggagagattgaaacattcaaaaaaactcactacacagaaaaaaatggatggatcaaccaaattgctgaggaaaaatatgtatgcaacacattcactataagttaataacattttctccactatttacattttatataaatatattacacaattttttttatctttgtagaaagagatgattgagttacgtgaagatcaacttaatcaactcgaagctggtacattaataatggtagacgatgctgctatctatagacaagttttaggtgatgctaagtatgggtggctaagagggactggacctgtaataggaaaaaaattatcaatagagttatcatctaaatccaaggagcttcaagaacaacgcattgaaaaattagaaaaaatcatcaaagattttaccagtgaaaaagatggtgtttttgaaaaatatattcaagaaaaagtggacaagcgggttgaatcattggaaagaaaattcttggaaggacataaatttcaatcatcatcaaataaagagacaaatccaccacaacagtggccaactccaccaacaatggttttttcttttttttttatttaaaataatattgattttactactattataactaattcttctatgttgtttgtaggataaaacttatagattaactttgggagacggtgatgtagttgctattggtgaaatttttccgggaaaacaagttcatgggaaaga

SEQ ID NO: 331777 - DNA, 1086 bp, Cannabis indica
aaaacttggagtactggcacattacctcatttcatcacccttcgttgttaagcaaacttcagagcaaaaagagagagctttctggttcaaagttgctgaagagtttacagacgatttctggcttgcttgaacccggacacttgaatctttgagtaagtttctgattccctttatgtttttcctttgcatgcttgtgctttgaatgtaactttgttgtagaaagaacactgtaggaaaccctagggtttgaaacttctgcgactcttcttttccatgtccttgtgttagctttcagccgtaaggcttgttttagaactgcattgcgtctgttttccattctgcttttttcaagcttcatgaacttttttgccctaactcaagaaaaactttctgacttcttgagtttagacttttctctgaacatgatcgttctttaatctgttgggtactcctggtcggcatatttgcttgttttttcgcttgatactccgtccaacactcatcttgcgtgttgtcttttgtagatgaacccaggtgagtcttgggagcccgagcatcaaatcgaccaggagctgcttcaacttctgcacgaagtccaccctcgtcttcgtgctaatcctccttcaagagaaggatattcttctgattccgtacccagccataggatgatggctcgtactaagaaaactacgcgtctggctgacgcttctgacccccaggtggctcggcttgccactctgcccgacgccgaacaggatttggcggtcccaatagaggaggaccgtgagggggacgccgaagtccagaggttgaggagctagacgaggcgcatccgggcagccctcccgctgctaagggagaggaagagattgaaccccctaactatggggagtacaatgaggctgggcaaccagtcgatgctgacggggacatcctggttgatggcgttgattacgtcactgaggcgcttgctgaggcagttcctcacaggtgggtgagtcctccgttcaagatttcggaggcacgcctccgcactctcgaccaggacggatacctgggcgagctggactgctacattctcgccca

SEQ ID NO: 331778 - DNA, 532 bp, Cannabis indica
tgaattcaaataaatcaacataaataattatttaaatatcgataaataattttcatcattaaaccttaattatctgctaatttccaaatttaaactaagcggtttttacagcttattttttgtatcttgatcttttgacacgtacgataccttttaatggaatctctctgttccaaaaaaaaaattatgtattttttgtcaaattagtttttgtcatttaatgctttgtgagggaacaaagtagctcattcattgggaaaaaaaaattgtttaagtaataagtttgatagctcatcttacgttaaggttgtaaattgcatttctcaacttattggacaagatatttgattaatggataagatattctttgttctaccatacaatattcctattattattggtattattattagcactcataaaagatcagtctagtaactaaggcagtcttcattgtttttggctacttggatttgaatgtaaaaataaaaattgaaaaaatgaatatttaatattagatccatgtaaagat

SEQ ID NO: 331779 - DNA, 442 bp, Cannabis indica
aaattgaactttacaaaacacacttaaattttttatttttaaattaaaaaataaaagtgaatatacaatatatttttgtttttgaaaaacaaatgaagcgtttggtaacacttttacttttaaattttttaatcacaaaaatataagtcaaatttttgtttttaaaatacaaaaatatgttttataaccaattttgtttttcaattttataaacaaaaaataggtgtattctgtaaattttatgtttattttgatttgctgattttatttaagtcgggtccgaaatcgggactgggtgccggtccaagtttggggccgggtccggattcggtttccaaagtctaagttggggtcagagtctaaaatattgattaaaaaaactgtttaaaaaatattgaaagtgatttttttttatataaatttaaaaattaaagagtaaaaa

SEQ ID NO: 331780 - DNA, 789 bp, Cannabis indica
tttaaagagttttgttttgtatctacaggtgcatttactatacaaattggatcgtagtcctattaaatgaaagaaaacaccaaaatcaaatttgtatgtattacgttacgttaccgcatatgtttatgataacaacagaattacagtatagtcaaattcaatcttgaataatttcattgcctttgtagtactaacattaaatatatatataaaaatattttttgcttcgcagtttattgtaaaaaaaaattatggttaaaaataatataatacattaaaaaaaaaccaaaaactttaattagttgccaaacgtaaaattcttgttattaataattttattaatagttacagcttacaactaattttatcatacataagtcccaatttatagtgtttggctttttagtttggatcgtccaaatagcttaatatgcgacaagacaagtaggagtagcttttctctaatcattactaaaatgtcaatgcagtggtacaatcattatagagtaatcaaaattgaaataaattaattaaaaattataacaaaataaatggtaaaaatgggaatcaatattttttgtgattaaagataaattgcactaatcaagaacattaaactaaatagaaaatgaatctgtaaagaccgcttagctttaatttgaaaattagtagataattagggtttaattatgaaattgtttatcaacttgaattattaatctatgttgatttatttgaattcagaatgcattttatatgtcatatttagaatttcataattttgcatgt

SEQ ID NO: 331781 - DNA, 1056 bp, Cannabis indica
gcataaaacccaacatgaacttccttgaagctccttaaggcctaatctggaactacacttgacggttactactcgtttgacaccgagtccgattctgtcccctgcgtcagaccgtggttgtgcgcgtacgtgcctctgtaatgcttattgtccaacggcttgtatgggtaattacttttaaaggagaaacctttgagcaacacgtgtctagatctttacgtgacatcttgtagtaattaaacaccgcaagatggaaaaaccacctaccaaaccaacggtcagatggtcttgtggtgtttttggcctttcttgtgtgctgagtaagaaaccctagtggggtaaaggttatgcccttacccatttgtgtgcctacaaatatctctatttttttatatacaaagggtgaacaatttttacttacaaaacctctactaaaattcctagagagctttcttctgagagaaaaacaaaaggaatacataaattatcattgtaaacacttgtaatactcacatacttgccaaacaaggctaatacaattgactcgtggactgtggatcattaacgcctgaaccatgtaaaaaatttgtttgcctatcatttaacactttgtattttcttaagctcttattaatcagtttctgaaaattttggtaaacaataataaataataaatagtgtaaaatagtcatttctctataagtttgaaatgtgctatttacttacatagtgttatgatttgaggtcattcactatgaattctcataattaatataatacaactcttatacggcctatcaaacgagtccataaatatatgtaattattcagaaacaatataaaagataaaaacactcgtgataattttttttgtaaaagtaatgtcaattttaatattgtgatgttgatggtgatgttgctggcagaaaaaaaaaatgagaaaatgagaaagataaaaaaatgggagttttatttgcaccccataaaatgataaatacaccccattattaaaaaaaatataaacttaaataatatttaaaaattactcttaatatt

SEQ ID NO: 331782 - DNA, 590 bp, Cannabis indica
tgaccttccccaggcggtgtgggattgtacagcttacccggtatttccccttacggatcacgggactactgactgtcacaattaccttccactgtgttaacatcactgttaatgtgaataactatatgctctggacttaacaaaaattgtacacattaaaccataaatatgaaaactacacgtagacataaatgacttctaatgttttattgataacaaatcagattatattgatttgagttttatttagggcgcaaaatcccaacaccgacaacctcaatcgcacgtagttcaatcctaacaataagtttctacggacaatattatattgatcaaacatgcagtacatactaaacccaacttgagctcaacatttctattatagatacaaaattgcaaaaaatcaacagagtagtgaggtacttactggatagtagaacaaaatagagaagagtgtcgtgcaaattagctcagttgtgttgtgcccaacctatcacccagtcgtggtaggctcaaattaccccatataatattttttttaattgttttttcaaatttacggtttgggtttctaaagtggttgcagtgct

SEQ ID NO: 331783 - DNA, 1615 bp, Cannabis indica
agttataaacatactctgcgaattatgtctgtaacgagttgttccatgctaaatgcacttttgtttgcgtttttgagttctttgttcttcccagcttgacacgtgtcttcctatgatatgcttaccaaattttgagtataatagaagattagaaatcatttatgtttacatgtagttttcattttcacggtttaatgtatacaatttctgttaaatccagaacatatagttattcacaattacagtgatgtcatcacagtggaaggtaattgtgattatatgcttcgaaagataatgtcgcatgattcatcagtgcactggatttacaccgatatgatagtcaacgataaagcttacttacaccttaaataagtgttatgttctttccagaatattagaaaagtatgctagtatcggatgtatggagtatacacttgactgggaccaatattgatcttattaaagatattataatgttaccggtttatctttctaagtcaatatctatggtggatcttagatcaaaagatttaatcctgacatggttatgtttgatctcaagagtgttattagtgttcttaaagttgttagttaatgcctaccatttggttcaggtcacacgtaccacttgggaacttgataatacaattgagtgggagcgctaatcatagatatggaatctatagcttctatctggacatagaagtgaaatgatgattttcttcagcttggcttaatagagataaatggaagagctcttatttcagtaattatattagtttattgaaatatcatttataggaagctaagtgttttaaggataaaatacattgaggggtgaaacggtaaattagtccctactcagtgtaaataatctaaagaggatctttgattattgggattagagtgatggttaaattttcatagaatatttatattgtggaacatatatctatataattgagagtgaaattccaaatctatagtggtgtaaggaggaattaataagttagggaatttacctggtaaattctagatctgtttgttggaagcttggttatataggcccatggtcctcatactagttgcgacagtactgcttgtaagactcagctaattgatttttattactcaattataattctaaattagactatatcttatttatgaattttcactaagttagggcttaattgtgaagaaaagaggttatagggtttatctattaattaagagactttataaaagtctcattaataaatatattaaatgataattttaattgataattattttaattattaaataattagttttggaatttaagtggttgaattggaatatatggcatttgtgaaagaataagataaatagatgaaaaatggcaaaattgcaagtggtgggcccacatcctatggtcgacacctaatgctccttttttaccatttatttatcaattttttaatgtcaaataattcaaacctaaacctcgaaagattcctataaatagataatgacggactcaaaactaacagcttaagctttcactagacttcagtaaaatttgagccttctctttctctctctatttcaaatcctcctctctctctctctc

SEQ ID NO: 331784 - DNA, 562 bp, Cannabis indica
tgaagaatctttccaatgtaattctgttgaaggagaggaaattctgcattggcagcaaattagaaagatatattagagggatgtaaccattatgttagaacttgtatcactgtttttctattaaaaagttccattacttgccctttttccggatttcgagctgtgcaaattattatatcatatcttttatgaatatttaagttccggtaatgaaatataattgaatgaaaaagatttgatttttaatttttttttcttgtttagtaatattgtaaaatattagaatatcattctaatagaatgattatttttgaaataaaaaaaagataccgctaaatttttttatttttatttctagtattttaaattttattttattctattcttatttttagtcttattattgtgttttgattccttccgactaaccaaatgcagctgagtgagaagtatgagcaattatctgtatatacttttcttataaatagttaaggactgttgtctaaatatacttaacaatttgtttatgcttttaatatttcatatacactacttgttatat

SEQ ID NO: 331785 - DNA, 708 bp, Cannabis indica
gtaaacataaataaatattacataatatataatttgttttgtgcattataaatatatttatttaaacttaatataaaaaagatttttttatttttatactccaaaatatatatttttttctttaaaaattcacataacaactcacatagcaatcaacgaagcgacctaaattgtaatcaaaagtcacatagcaacccacatagaaactaggggtgtatatcggtcggtttacgttgcattttattcaaactaacgtaaaaatcgagttacaaaaatctaagtgcaacctggccaattaagaaaaaataaaattttaacccgcccaatgaattagttggtttggtcgggttaacccgcccaaactgagcactaatattttttttttacattcaattattatattttaattaattatatatagattgaatttaaaattcaaatcaaccaccataaaagaaatatagtaatttgaactttctatttcttattaatatatatatattatattatatatagattatatataataaaaatatatatatatatataaaaaaacctctaaatagggttggtcgggttagtttgcattgattaggctagttgatattattttcaatctgtccaatataaagattgagcatattatattttcgtcggattttttggtttgtatttttcgtcaggttatctcggtttagtttgggcggg

SEQ ID NO: 331786 - DNA, 603 bp, Cannabis indica
tcagccaggcttcaagtggttgaataggagggaccacaaagcaatcaccaaaattgggccccaaacatcactcggactcggtttcagcagattctgacatatcaccgtcctcccctcacccttactcttacagatatggctcaaaagcttgcccggttgctggcagaagacagggatatcatccagttgacctctaatgaaaatctggtgcagtacaggctctaacctgaggacttttcttctaagtccgtgaccgggaagaacaggaaatctgctcgtgcccggcctgaacgagctcataaggagaatgagctcattcaactgaagcgagaggctaagttgaagggaggtgcccgggcaaagcagtatgctcaggagtctatgaatccttaagatgaagtcgagctgaggctgaggctgaggctaagcaggtgactcctttgaggaggaagaggaaactcccggccacgcccaggcccgttgaacatgccattcgaataaggcagcccatttcacctgttcggccatctcatccctatgctggaaaagggaaggctgttatggctgagatatcaggtgatgatggacttctgactttctggg

SEQ ID NO: 331787 - DNA, 535 bp, Cannabis indica
tctctctctctcttcttttttattttttgcattttattatttctttagttctcaaatatttagttttcaaaaatgtcggtaaatattttggtattttcattgagagctgaagaaagacgtaagacttacaatgttacggcgcccatggttttcacacgaaagacggttcctaagaagactcttcaaggtggcctcgagactggaggaagtaaaccccctctcaccagagcacgcccaactgagtgatgtgagaggcggggatgcatccaatgcgaacagtcaagaggacgacccaaacaaccagcatgacaacatcgatgatgagagaaatgcttagaatgatgaaaaggaggaagatgatggagaatacatcaaagatgggtactacaaagatggctaccattatgaacaagtcctcgaagtagttcaagtgtctaatgagttgcttgagaccaaacaaaagctagcccatcaagagaagttttctcaaatgatggagaaaatgatggcttgccttcaagccaagtttggagat

SEQ ID NO: 331788 - DNA, 1107 bp, Cannabis indica
tagggcacaaaacccaacattagaaccctcatttttcatattttcttcatgtttaaggtattggtaccctagtgacctatagggagacttatggtgatgaatttagaacaggttaggtcaagtgattaatctttcttttcgttgttgtgacataaggcccaagatcgttgatctttctctatttaggtcaaccaacacacctgaatcaaaactcaaggtaagaacagtacattcaacatagcatgttaagatataattattatcattatgagtcgattatgatcaaggtaatggaacggtgattaccgttaagtggactaaagtcatgatatcaagtgaaaccattgttaggttttctacttgtcgattgtcttattagacaatgagagagatgtttagatgttggggtaggacatcgacgttgccttattaggcaatgggatatatggatgtcttggtaggaaatcggctttgccttattaggcaatgagatatatagatgtcatggtagggcattgactttatcttattagaaaatgagatatatggatgctagggtagggcattggtattttcttattcggcaatgagatatgtggatgtcgggttaaaacatcaaggttttcttattaggcaacaacaaaaatagttactttatgaagtaacacttacatctggtcttattatacaagtacttaagtactaatgtttaattatgttattatactaatttaaatatttgattgttatatactttcattgtttacttttcttactgagtctaggaaaaactagggcaaccatgagacgacaaccttctttagaaaatgtacaaatcaacttatctggcttgtatggtcgagttgtcaagggttgttttgggttgtacctgatgtgtattttgacttactgttgtacatagcatttttgtaaaaacttttgtaatatgggatcccagaaacaaatttttagtgatatcatcacatttattgctatggttttactttagtgaagttgttattattgccacaaattttattaaataattaatccacaactatgttccaaaactacacatgtggcatttttggggatatggcgttagaa

SEQ ID NO: 331789 - DNA, 1133 bp, Cannabis indica
agaagttccccttgtcactgtttgactttgataaggtcttctagctatgatgatacaagtcttgaggatgagaattgtgtatagaattctcttgagaactcggccctagagttgaatctccacagggtgagtttaaagtacaattgttgggctatctttgatagtgtggctagaaatatgcaacaacgcacatcaccagtgaccttctggagttcgagctgcatctcgaagtatttaatatgagtcagtgggtcctctcgttcagtatacatcttccatgccgacattttgaactttggcaagggtaaggtatttatatatgttgagaatggtgatctcctcgaccaatcaagtttaaggtttgaagtcttcaggctataccctagatcatgtccctgagttggtccaattgtgcttgcaagatggatctattgctatgggcactcgattgaatggtctccttggggaggctaaaaattctaaagagataggggctggctggccaaaccctaatagagtatatggtgaagatcagcccgactcagcaaaccctagccggccattctcgagtataggagttggcttaggccgaccctgcttacacccaattcatatgcttggctagtcagacctacattgtgcagggctggcaccccaatactcctccatggccaaccaaacctgcaaagagcagggtctggccgcccgtgatgcttccttggccggccaagagtgcattgtgtagagtctagctgcccgtgactccatggtcgactggtgttggctatgtgtttattgggggtagatcacaacaattgatggagtttggtggatttggatgcctgaagtgatcagtttctcttctcaaataaccattgggtgtttccacccactctcaatcatcatcggtcgaagatcaatcttggggaacctcgctccccttggggaggaaatgatgtaccctggccagccattagaattcttgttaatggctggtcggccagtggctacaaaatgggtgttgctattgagccagatatccctggctgggcccatgatctagttgttctcgccgtttaaccttcgagcaaaggtttgtcctccctttggaaagggaagatatgtcctagttc

SEQ ID NO: 331790 - DNA, 865 bp, Cannabis indica
taagaatcattttcagaaggaaagaactataagtactttttaaagtctggcaacaaaaaatattttgatacataaacctgatgtttagaaacactgtttagaaacactgggacaaccaggataagaaaaaccaacttggaggacaaaatattataagcattaaaatgacatcattaacataagagaaatttgcggcaaaatcttcaaaaagttcaatttgatacagataagtctccaatctcgaaaaatagcggtaatagtcatcaacgtcatattttttttatttgtccgttagtcctaatttttaactgagccgtttattttttcaaaattgacacgtgtcgaaatattattagtctaaattattattttaattttaaacaataaaaataaataaataaataaataatttaaaatattttttttctttttctttttatttattctttctttttcttttcctttcttttcttctttgtcgtcttcttcttcttctcactgtcagaccctagcttctcaccaacgtaaccaccctgcaagctcaggaaatttcagatatggtggatcaatgattcaccaccatgcaagttcaaccatatataatcaaacaagattcaaccatggaaattcccccatagaataaaactagcaatacccatctagatatatatctataaaggagaagtatgaggcagtgacatggtattctaaaagggagaaaatttcaatttttgaccctaataatacaacctatatcaaaatttatacccctttataatttgtacaaatttattcctataattttaaaagtttcctaaaataccccctaaattaaaaattccctctctcagacgttccctctctc

SEQ ID NO: 331791 - DNA, 913 bp, Cannabis indica
cctactaagaactttttaaaatcaagcaaaaaaaacaaaaaatcttctttattttttattcttcacgtccaggattacgccccggatcattagataggaatccaaagatgaatagagagacaaagaatattactaccgtgtaaacaaatagttttagagtaagcattaaacaatctccaagattcttttttttaggaaaaaagagaatagattctctatttgtattttatatcgcataccctacttttttctatttttattttgataccaagaaagaaactaaagtactttttgagactagaaatagaaaagaattttcaaaaaagttatttaaaatactttttaatacaaagtggagtttttgttcattaccaaaaattttctttcatacccacaattagacattgtggaagacttcaagaggtcttgcaatggaaaaagaccagaataaggaagtgaaatgtggtgttcctgatttattacagctataccagtctgatcttatcatatctattgatataatttttttgttttcaaataaacgatgaatttgtctagcacagtattcaaaatcttagcgaaaacttacagcggcttgccaaacaaaagctaatagaaaaaatagaagagggattactggcataaaatccacgattggatttaaaaaagcgtaagcctcgggcaatttggcgatgaaaaaactacttgaagaaagggcagaattaagacagatacagatcaaactaaatatgttaagcataacaaacattttattcttgagggtaattgtatttattttgattgagttattaataaggcgagttattgatataaggcaagctgaataaaaagaaattttataaaaataaatgaaattagatataccaaaagaccttctttgattttttctcgc

SEQ ID NO: 331792 - DNA, 698 bp, Cannabis indica
aaacaactcgtctctaatgttctctcgggacttgatatcgaatacctccctatagtgcttcaggttgaagcgaggatctccaccacttggcaagaactccaggatattctcctaactttcgacagtaagctagacaggttaaccaccttgtctgggtcatcaaaagttcctgtttctggctctccatctgccaatattgctgctaccagaccatctggtttttcaggaaacagacctcaaaataatgctaattatggtcatggaaatcgtggaggatctaaccaagctagaggaggcagaggacctggtcgatttcgaggcagaggaggaagaaatcagagtaattctaaaccaacttgccaggtttgtggaagatatgggcacagtgcagcctattgctacaatcgatacgatgaaacatacatgggtacggacccgaatggatctaataacagcagcaaaggacctcagaataacaacaatgggaacaatggagcctcggctttcatagctactcctgagatggtggaagacacagcttggtatgtggattctggggccagcaaccacataacagcagatccaaacaacatgactcacaagaccgaatacaatggtgaggagacattgactgttggtaatggcaataaacttgaaattgctcatgttggtaaaagccttttaccctctatcaataa

SEQ ID NO: 331793 - DNA, 631 bp, Cannabis indica
atgtgtttgttgaattttttgctaaaaattgttttgtgaaggatcaagcaacaaagatggtgctcctccaagggactcttaaggatggattgtatcaactcccaaaccagcaagaaggtctttctcctcatttgagtcatgtggttgagtctaagtctgttacaccatatactggtgtagtgtctgtgtctaagaaaaatcaagttgttacttcaaatttagtttccctaaaggatagatggcataagcgtttaggtcatccgtccaatcgagtcttgagtcatgtgttgagtcttgttaatgtaaaaacagccatgaatgaaaagaatagcttctgtgaagcatgtcaatttggaaaatctcatgctcttccatttaactctaatcctaatcgtgctaaacacattttagacttaatccatactgatgtatggggtcctgcaccaatcacttccagcagcaactataaattctacattcattttgtagatgatcatagtagatatacttggatttaccctctcaaaaccaaagatgaagctcttgcagcctttgtccaattcaaaacattggttgaaaaccaatttgataggaaagttaaagcacttaagacagattggggaggggaatt

SEQ ID NO: 331794 - DNA, 533 bp, Cannabis indica
atgatagagtctggtgggactcctgctgttggcggggctcctagccctcctgcatcaggttttaacaggggaggtagtggttcggtcatggaccagaaaagaaaggcatccactgcaactagtggctcgggtcagaacaagaggttccgggggaaccagggtcgaagcaatcgtcagagtggcactgaaactcgatacacttacccagagtgtcccagctgtaaaagacaccatctgggggagtgtgaaggggaagggtgctttcagtgtggcatgccagggcactacaagagagactgtccccaactttgatctgaagcaccgaagagtccagcaaaacccactccaacaagggtattcgccataactcaggctaatgtagaagccagccctttagtggtgacaggtcagctctaggtcaacaacacttacttctctgtactgtttgattctggggccacacattcttatgtggcagccataatctttagtaaattggatagaccgtacgatagttatgaatcagggtttgg

SEQ ID NO: 331795 - DNA, 493 bp, Cannabis indica
ttctttgatggtgaattttccttcttgttgtttggattcttcacaatcttccacactatgattgagataccacttgatgtgtgtgggcactactcaatcactctagcgatttaaaaaaagaagagaagaaaagagagagagaggtggcggctcaggaattttctctgaaaggaatgagatgcaattgtgatgactttcctgaagccattactttctattcatagaataccacacagggttagggttgaattacttgacattaaaataatgaaaaaaataaatgataaaacctatgcatggggcccgccaaggtttatggaaaaaggcctcacttttgcaactttcctattttatcatttctatatcccattttctcaaaaattgccaattttcacattcaaccatttaaatgtaaattttaactatttaataactataattaattattaaataatattttcatttattatatttattaattagactaaccaaa

SEQ ID NO: 331796 - DNA, 536 bp, Cannabis indica
tagcattagggcgttacatttacccttcttgggtcaaaattaccccttcttgggtcaaaattactaaaatgcccctggctcaccaacagggtcttaacatgtcataattcatataaattctcatatattaaattatataataatataatttctcaataatacataattatctaattagggttttgctaatccattttataattctagggtattgcaaaatgggccaaagcataagtataggatgtatatcgccaagcgtcctcccctgacctgatattctccattgatttgacaaaccacaatttgggaatagctgaaagcctcgaggtacttgactttcatcttaataacgagctttaaattgacgataagagcttcatactcggcttcattgtttggagtaggaaattcaaatctcaaggcagcatgcacttttaatttttttaggacttatcaatattattccaccgcctaatccttcgttatttgatgccccatcaacatacaaagtcctagggttgttcgcggtgcgggtg

SEQ ID NO: 331797 - DNA, 451 bp, Cannabis indica
caacttctgggtattatgttgaggaacctttttgatcgaagattagggattatgtttctttcttcttgtttcttctttatgttccatggcaggtgatctttgagcttggaggtattaatccaaagttgcagatcaaagcttgagatgttaagttccgattgaagggattttagtatcatctttatcaccagatatgaagggagttcaaattgaagaaaagtgttgaagagagctcatcattcacacaaggggatcttgtgtctccaatcaaaggtcttggttggtatgggtatagattcactgtattacaatattattggtttttgtaagatatatatttgaatatagtgaaagtcattaccctggttcagggaacccaagcactagccgcctagaatgagtttctagggcaagtgaagcttgtaaaattctagtgttgaatctttgattt

SEQ ID NO: 331798 - DNA, 1490 bp, Cannabis indica
tggagattgcagagaaggttttgatcttctaagaatacactatatttctaaagtattttctctgatggagaaggagagaatacagaattcgcagtgtttcttcggaaccactacctatttataggctcattatataatgagttttgggtatttataatttagcccctcaacaaattataaattaacttatggtatctacacattatttccatgacaatttaatacccttttgatacccataacataattggtctcttaattttgtatcacactttataatagaatatacattataaatatgtgccacttgggcaacatatgttaccttataaatgtataacactatgagctcaaaatttgctattatgtaaaggtattcacaacaatctcttccatcaactatacccatataggatctaagcaatttttgtcatatcaatcatgactaaacccatcaatggtcacatatacaaatatagccaaattcatagatcaatcatggatgtgtagcatggaaattacatgcaatgtgaaccgaacatgcctgtttctaaatgttcctccttaaaccaaagtgagatcaaactaaaacaaacaaaatagagtgaatggactgaaaactttatttttgatcaaaaaaataacaaaatacataaatgtcttaaacaaaaataaagcaaagaaaatacaaactcccactaaatcatgatatcttcaagcaatactacacacatatgagcagtgtgcccatgaaagaccttgggttgtaatccttttctgagcggatccgttatcatggagtttgtccaaatgtgctctatggatatctttccactctgcactctttctttcacaactaggaactttacaccaatatgctttgacttggatgagctccctttgttattggaatatagccctactgatttattgtcacaaaatatcttgagtggtctttctacattctccaaaatacacagcctagtgacaaagtttctctgccatattccctgatttgatgcctcataacatgctacgaattctgttgccatagtggaagaagctataagtgcatgtttgacacttttccaggttatagctcctccagctaacaggaaaatgtagcttgttgtagatgttctgctatcttgccatccagcgaaattacaatcagaataccctacgacctccaaataatttgacttcctgtatgtgagcatgtaatcttttgttctctgaagagacctcataaccctcttggttaatatccaatggttcataccagggttgcttaaatatctgcctaacatcccaataatgtacgtaacatctggacgcgtacatacttgtagatacattagactcccaacaactgatgcattgggaatctttctcatttcttaaatttcaaggctgcttttagggcattgattaagactgaatttgtctcctttagaaataggggtatcacttggtctacagtcttgcat

SEQ ID NO: 331799 - DNA, 526 bp, Cannabis indica
aaaataaaacatatttaaattattttgcaagatttcgaacaaatcaatatcaatgtctcgttttggcgagagtcaaagatatcatttcttgaatagagtagtcagctcatctaaaaagactccattctagcaaccttttatatattcgatcgaaaagagaatctgatgttgtcccatttaggcaagagtcaaggtcattcctatttcatgagcttttattattatttcatactttgtaagccctactcttaacaatcactaattgggtgatcattactaagaataaaatatttataataatacttatattttaagattttacagtgttaaattgctaaggaatgaacatctattgtggatgaatctcattaaaacaagaatcatgtagaaccaacaatggagatcgaatgtcttatattaaagttcattattaaaaaaatatatttttaattaattagttattttaatctatttatttcaaattaataataaaaattacttaatttaagttggtctaaaatttatt

SEQ ID NO: 331800 - DNA, 657 bp, Cannabis indica
acaatgaaatttcctacccccgctggtgtaggatatgtgcgaggagtccaatcggattctagagagtgctataaaacagcagttaaactcgcagaaaagaagaagttagtaaatgtaaatatttactgaaagcaccacctcctcggcaaaaagttttcagaatcgagaagatatcgcaagtagagaaacctgatctagatgcaaggatcctcgattataccaacatcgaacaagttgcagaggatacaattgaggtaccaatcaatctttctgatcataataaagttttgaaaattggttctaaactaacatttcaacagcgagaaaggcttgtcactattctcaaacaaaatctagatgtttttgcgtggaaacattcaaacatggttgggatatcaccgcaagtcatgtgtcatcaattgaacattgaccccgaagtgcgaggtgttcgaaaaaagcgctgtaaaatggaccccacgaggtaccaagcgcttaaagaagaagtagatcgccttttggcttgtggcttcataagggagttattctacccaaactggttagcaaatcctatagtggtgcccaagccaaatagctcatggcgcacatgcgttgatttcactgatttaaataaagcatgtcctaaggatagttttccct

SEQ ID NO: 331801 - DNA, 1936 bp, Cannabis indica
ggtgtagacctaaaccagccaacctcgagagaccaatctgcgaggtatcctaaccaggaaacacgggttgatgaagaccctgagcgacgaaatcctcgcagctgaccatcaagagacaatgacgagaatccacctcttcatcctcgcatggtcgacacaacaaaaaaaaaaaggccggctccgtagagacgcagcaaggaggacgttatcaggtacatagaggcgatctgcgtgatcacctcaacgcagttttcagagcgcgctctcgcgccacccgcaacgaggaaacaccccgtgatccccccgtgggcgattaaggtgtaaacactcacactaacccgcctagcgcaccggcagcgactactggggttaatatcccagcaaacctcgctgcagtagtcacgacacctacagtcgcagcaatcccgactcctgtagctggaggaattgaccaaagcatgcttttgcaagctttgaaaatgctcgagcagcagagaaagcccatatacaagctgcatgggacctctcctttcactacggaagtgcgacaagctcaacttcccaagggatttcgactatccgaatccctaaaatataaaggtacctctaatcccatagattaccttgaaaaatttaatactataatggaagtggatcaggtaccacagctcgcaaaatgtcgcattctcgcggcaacgcttgaggaaaacgcccacgattggttcacccaattgcctgaggcctcgatatcgacatgagagacctttgtcgatttattcctcacacactttcaggccacaatgacttataggcctccctacacaactctagccaacatcaaataggaacccggtgagtctttgcaagactattttaaacgatttaaagcggaagtaacaaaagtcgagaaggctcccgagtcgtcgcttgtttgtatgttgataacaggtgttttgccgagaaccgatttttggaaggagttacaagctcgaagaccagaatcactagtcgaattcttcgctatggccgaaccccataagagaattgaaaattctctagcagagttggaaaaaggcaaggataagcgtaaatcaccagtgccgcgatcaaggtctcgtagtccccgagggaaaaattccagaggtcgaagcccgagaagacgcagcccacggagacagcgaagtccgaagttggccaaatctcctccaaagaaggagtcctcgccgaaaaggaagggtggatcgcgtttcgttaactatactgaactcgcagtgccacgagaccacatctatgcaattgaggaaaggaatggagtcttcaagaagtcgccccctatcaggggaaaccgcgacaaaagagactccaaaaagttctgtaagtaccataaagatattggtcacactactttggaatgttgggtcttgcaggatgaaatcgaggagcggattcgaagaggaaggttcgacaaatacaaaaataacgaggaagatcatcctcgagcggatgacaaagaagaaaatcagaacgcgagtggttcgagaacacctcgcaatatattaacaatcattggagggccccatatcgcaggagactcccgtaaatctcaagagcgatatgccaaggaagctaaagagaagccgctcaccaatgtaaacaatctcagtgaacggccagagaaattgtttaaaagagaatgcgacgacatcacctttatggaaagtgatgcgagattggtccatcacccgcattccgacgcactagtcattgccgcaaatattggcggagataatgtccaccgtatactcgtggacaacggaagttcagtgaatctcttgaatttccaagcttttaaacaaatggggttgcatgagaaggacctgcgacctgtgacgtcgagtatatacggttttaccggcgacgtcatcgcactgaaagg

SEQ ID NO: 331802 - DNA, 600 bp, Cannabis indica
ttttggcaatggcttcacaacacgtagattgtgatgggagaatcaaatgtccatgcgtcaaatgcttgaatctaagattgcaaactttagatgttgtgcgggctcatgtacacagatggggtttccaacaaagttatcaataatagatttaccacggggaagttgcagtgggtgttgcaatgaggaagtggatgataatgacatagatgagatgatcgatgtcattgatgattttctcccttagacaaatgatgaagatcgatggcagtcgaatgggtcggtattatgacgagttgttcgaggagattgaagctgagttgtatcctggttgtaattggatatcatccctaaactttatagctaagctgatgcacttgaaattaaaaggaaagatcccgaaaaacatatttgatgaattattgaaacaattgaagtttgcattaccaaaggaaaacaaaattcctgcaacacactacgaggccaaaaggaagctcagccgactaggattgggatactagtccatccatgtgtgtgaacatcatttttgcttattttacaatgagcatgctgttgggttttatgccctaaataaaactcttt

SEQ ID NO: 331803 - DNA, 1500 bp, Cannabis indica
aaatacttatgtttctttattgatattgaataatccggattacattgaaatagagttttatttagggcataaaacccaacacttatgacgttcatggatgcatattctagatataaccagattaaaatgcatgtccctgatcaagagcatacaagcttcgtaaccaacataagactttattttataaagtcatgccttttcgattgaaaaatgttggggcaacgtattagtgactagtaaatgaaatgtttgcgaaacagataggaagaaacatggaggtctatgtcgtgatatgttggtgaagtcaataaagtggagatcacacaaaagacctcacagagtgctttgagatactgagaaagtacaatatgaaacttaacccaaaaaagtgttcctttgagtctcctcaggaaaatttctgggatacatagtcaacgcgaggggcattgaagcaatcctgagaaaattaaggctttgatagaaatgtcatcaccaacgaaaccaaaagaagtctaggccttaacaggaagaatggcagctcttaacagattcatctcgaaatcaactaataaatgcctacaattcttcaatgtattgcgaggcaaaaaaaagttcgagggacagatgagtgcgaggaggcctttaaaagcataaagaggcacttgtcaacacctccaattttggcaaaactgataactggagaaactttactcctttacttggttgtctcgaaaaatgcgattagtgcagcaatagtgcgagaagagggaaagcaccagcaaccagtttactatgttagtaaaaggttactgggggcagaatcgaggtatccacctcttgaaaaacttgccctatgcctaattcatgcatctcgcaaattaaggccttactttcaggcacatccaataaaggtgttaactgatcaacccccgagataagttttgtcaaaactagatgcttctggaagattgataaaatggtcaattgaactggggcagcttgacataacttatcacccaagaacatccatcaagggctaagccttagcagatttcctgatagaagggataactctagatgaaaatctacttgttcagcgagacacgaaatacttggaagttgtacgtggacagagcatccaatgaacatggctcaggtgtaggggtgatactaatttcgccagaaggctttaagtttcactatgccttaagatttcaatttgacactttaaacaacgaggttgagtttgaagccttgatcgctggtttaaagatagctgaagcgttaaaggtcaaaaatcttatatgccatagtgattcgcaattaattgtcaatcaagttctaggtgaatagcaggcaaggggtttaaaaatggcaaaatacctagagaaggttcggaagaacttggaaaagtttgattattttaaaatcaagcaaattccaagagaaaaaaactctaatgccgatgccctggcaaaactggcctcgcaaaacgaactt

SEQ ID NO: 331804 - DNA, 622 bp, Cannabis indica
aggtcaattcttggccagttggaagtataaggaaagaatatatatggccctctacttcgatagggcgcgccattgggtgacgctagaggtagatctggatcattggttgttgaacatattttactcgagcctcggatcgatttccccgaatgaattcaagagtcacctggcaatgtgggaaaaattactaccaactttgatgctgcaggctggcctattcgagactcatgacatgatactcgtgcctcaacttaccgcctcagagagccaggttagaaatttcacttcaaaagtcatggaccgcggcgttgttcgacaaataaagtcaaggtaacttaattacagttgatttttttgttatttaacttgaatttaatttgcatacttttatttatttactttttattgtctcatacagcagtgactgtgggatgtatgtgatagagcacatcgagcatagtatgctagagactacgtttgataatgtgcacgatgacaatatgaagaaatttagagagcggtggtgtgtagattggttttaccagaatttagcatgaacaaatgtatttttttttatttggtatttattaagataatagtgtaactggttttttaattggta

SEQ ID NO: 331805 - DNA, 1699 bp, Cannabis indica
gcaaggctgaatttttgtaactggtcgttagacgacttttatttttatgtaatggttaaacagttaaatctttttgtaaatgattttataatcgggatcccgagtcttttgtaatatggtttataagtttaattaaaaagcaaaattttaattaatcacgtttttccataaatctcgttgattagcaacgagctgcacagtacgtttaaaaatcacgtaattcgcctaagatagttagggtgttacgttgaagatgaagaataaaggtattttcgaatttggggtaatattgatgagtatgtgggtggtttttgatggaaagtgtagattgatgagtgaaattaggttttaggatggattaggattgagaaattggtttgaagatgaaagaattgaagatttggggaagaaatttgaaatttctttgaatgaaaagtgttgggacggctgagaagtttgaatttgggtgtagggttggaatggggggaaaagatggggtattcaaagaaatttgcgagctggtcgcgactagcttgaattcgaaaaatccctgctttctggaaattggggtggtcgcgactagggtcgcgactatgaaaaagggtcgcgactatgacaggccctggttgcgaccactggaagctaaaatttcactcgtttctgtaaagtcccaggtcgcgaccagggttgcgactaccaaaaatggtcgcgacccaagaacctggtggtcgcgaccactaggctcccagtcccgaaaaattattattattatttttttcatgtttttcacgattcaactggaaaaaataatgtctggtacttaactaaaaaaaattaaaatacaagaaatactaaaaaataaactaaaaacataaaaagtctgaaaaattaaagaaaacacttgggttgcctcccaagagcgctgtctttatcgtcatctagccggatgctgagttgttgtttagagaggcgccagaaaaatggcgaacttggcttggtcaatttgacctcccaagtagagctttaaatgttgtccattaactttgaaagttgctggaccttcacctttcaactccacagctccatagggaaacaccttgaccacagtaaatggtcctgaccaccttgactttagcttaccaggaaacaatttcaaccttgaattgaaaagtaacacttgctgcccaggttgaaactccttcctaactaagccttggtcatgccacttcttggttctctccttgtagatcttagcattctcataagcctcattacgaaactcctccatttcatttaattgcagtagtcttttctttcctgcagccttcaattccatgttgagagtcttcatagctcagaaggccttatgctctaattccaccggaaaatgacaagcttttccaaacaccaaccgatatggtgacatgccaatcagtgttttaaatgctgttctatacgcccacagtgcgtcatctaactttcttgaccagtctttccttgatctctgcactgttttctccagaatcatctttatctccccattagaaatttcagcttggccattactctggggatggtacggtagagcagttctatgtcggacaccatatcttgaaagaagtgcttcaaactgtttgttgcagaagtgactaccttcatcgcttatgattgctcggggagtaccaaaccgagtgaagat

SEQ ID NO: 331806 - DNA, 758 bp, Cannabis indica
ctccaggagaacataaagagactgaaacaagaggcggctggtaaggacaaagagcttgaagaccttcgcaagtctaaggagcaggttgagctcgaggccaagaactctcagatgaagatcgaggagatggctcgcgacttagaggtcgagaaggagaatgggaagaaacagtatgatcaggcagtttctgattatatttacaccactctttccaaaatcccagactttgacttctcaatccttggagcagaagccgctgaaatggctgaggcttttcgcgccatgtcgcccacacaaactcaaggcggtggagggaatcttcccgaggaggctgaggctgcggatgctgaagaagtcgagaatgaagccgtcagcaaagtcgcggatggatctgctcctgctgctcccaatgcttgacttttctctcctatgtttaaactattttttgaatttgctagttactttttaatgcggtacaggggtactcgcactctgtacttagacatatttgcaatttattttggacaaattcatatcctcgcggggataagtaatgtttaacattttcgcagtacacgggtactcgcgttttttaatatataaattcgacgttaattacagcttggtgtaataaaaaaagcttacaagacttgacaaaatttgtttaaatttgaaaaattaacaaacatgaggcatttcctttatataatcaatagtacattatggcatatatacccccctatacttaggattttttt

SEQ ID NO: 331807 - DNA, 768 bp, Cannabis indica
atgctatgccatgctaagtagatgattatattgagtagtttaagggttatgcgttcaaggcataatcgggttggactcggtaaccataaccgagatgaaccattctaaggctttattgtatttagacgtgtgagagcaacgcgtaggtctatgccacgtggacataaatagacgtgtgagagtaacacgtaggtttacgtcacgtaaacataaacaggcatgtgagcccaacatgtaggtctgtgacacacagacagatttaaatggcattgctgtttatattatatggtgagtatatgttttatactgtcttgctgggcttggctcacgggtcctctactgtggaggaaagggtaaagctgtgtttgatcagccatgagcgtaggagctggacgaggaatgtacatgttcgggctacactagaccaagcgggttggggtctaccagtgatgtattttgtgactttgttttgccgcttaggtcggctaggggaaacgtacttgtaatagtgtttgttaattatttttgggatcccaacttttgtaacttttagatcgtaaagtttaaattatgattaaagtttatttttactccgtttatgattaaagtttaaatttcgcgctaatttcattagtaattccattttggggattagggtttcataagtatcttcggtagcgtgcctaattatttagggcgttacaagaacagattgaagatttgctagaaaagcctgctgccgaggaaaaggaacctgacggagctaca

SEQ ID NO: 331808 - DNA, 779 bp, Cannabis indica
aattcagatttctttttcatgttttaaaaataaccatatttttagtaaggctttcattgaaaggtctgtcagggggctgtgatgctccaatcggctttcatgagacaatagtaaggcttgaacctcatcaagtgtcaaagaatcacttcttgaagtaattttggagacaacgggatcaaattcagcacctaatccattcaagatctgaagcacaatgtcttgctcacttatattagacccagcaattaacaaagaatcagcaagagactgaactttatcaacataatctgatatggacagattttccttatgaatattggaaaactgaccttttaataggagtaatcttgcccaagattgactagaaaatctttgttcaagcgcacgccagactgcaaaggaggtgtggtgattggcaactaaggcaagaactccttcagtcatagaggagcgaatccaagacaagagcagctgatcgcgtttcttccattgatgataggcagggttgatagaaccattgatcaagaattggggaggagagatgccactgaacaggatatcatctaaatcatgaccaattactgtaggaaccacttgagacttccaagaaaggaagttggtacgatcatgcttgatcgtcagagaagtagagagagaactagaaaagggattccaaactaagggggctgaatcgaaggagtgagcagactggtctggtgcagtggcggtgaccgtctgaggaggatcggaaggagaaggaatcgacgactccattaaag

SEQ ID NO: 331809 - DNA, 657 bp, Cannabis indica
cataaaaatgcatttctgaattccataaataacagcataataaattatttaaatagctataaataatttccataattaatcataattaactgctaatttccaaattaaactaagcgggctttacaccataggttctcaggatgattagacaaatcccaacactgacgctcaccaactcactcgtggccaaggtagcatgtgaggcaagatgccaacaataagctgacgtgccaacacttctatcgtgccgcattcgatactttccaaacagtctccctcatcgcccaaggactcccatacgtccatgaaccaatgctcaaagtgccatgcctccacgcatgttggcaggccctcaagagaagccaccaaactagtagcatacgttagacctctgtctcattccagcatggtgcatccgacccatgcacgcatgtaaactagcccacgaatgactacccgtgtcatctcgtgttgagactcctggccaaggcacaccacgatcgtcttagaggtttaggccacgtcccgtacaagcagcacaccggcaagctagtgaaaatgtacctgttaacctctaacagcattcttagacgcactacaagttctgcccgataatgtccatgagtattctaaatcgtggagacatatgagtcctgt

SEQ ID NO: 331810 - DNA, 647 bp, Cannabis indica
gtccaagggcggtgaggggtccttttcaaaggaaaagagaccttctggagaggtcattgatctttccgaggagctgactgctgcaaacccttctacccccgagtctaccaagtctaaagagtctagaccaccaacggctgggtctgaacttgtcaggagtgatctcaaacgggtgtaggcaccaactctacctttgccagtgcttctaaaggctaaaaagggcaaggagatgctggcccattacatgaaccggctggtttctgaggtcagtgatcaactggctggtgttgataatgactcatctttagatgcgttggtgggcggagtcctgaaggagttcaccagggtaagtcttttttgatacttccctttaactttccacacttagctcaatatgctatagttttttctttgtgcaggccggtctgaagttggcctacacctactcccgggctaagtctgttgcttccaaaaacgcgactctgtccgacaccttgagggcggaggcgaacttgacaagaaggaagttgaggaatccagggcggaagccggagctgttcggttggagttgggcgaggccaataagaagttgttcgctgctgagaagaagatctccgtgctaaaaaaggatctcgaggctgctgacc

SEQ ID NO: 331811 - DNA, 725 bp, Cannabis indica
tgttcttgagagatttgtgctcctacttcttctttcttatttttttttatttttctgaaatgtcgatcaactctctctccttctctctttcctcaggtgtgaaggttcggggtcgacaggttcatgatttttcatggtggacgaagcttcgtggtcgctatttgtggtagttgataatggctcacggttgtcgaaggtggttcgccgctatactcgtggttgtcgaagggtgttcgcgacgtggctgttgttgtactaatttgttgggatttaaatctgtacttattgtatattttgtcaaaattattattaagaaaaaaaatatctctgtaatggttcattgcttgttagttttagaataatttttttttttactttttttacctttaatcccggttattatagaaaaaccaggataaaaaattactttttatctcagtttttaaaggaaaactgggattaaaaatagtcttttatcccggtttctctataataaccgggattaaaagtgattttttatcccagtttttataagagcttttatcccactggcatatatcccggtttttattttagcgaaaaccggaataaaatgcccttaaaaattgggataaaaagcatatttttgtagtagtgaatcaaatatacttttatcttgattataagtgtgtccgtactacaggtacgcgactactattattcaattccacacatgatatatagat

SEQ ID NO: 331812 - DNA, 278 bp, Cannabis indica
aaaatcggatttttgggaaaaatcccatgaaagtcggaatttttaggtgatgctgtcagtaggctgcaaacgcagccttcgaaggctgcagatggggcaatgcacgcgcggcgcttgagggggatgccaagaaacctctgcgctggcaggatgttcgtgggcgtattgcagcgtctgggcgtggggctgaccgtgtctgaagacacggcttgtctgagtgtacgcgcgcgtgatcccgttgttggaatttattttactagaatcttagatctactcac

SEQ ID NO: 331813 - DNA, 946 bp, Cannabis indica
aacgaggattaggctattacgaactgctcggggctgaacctctataaaatttctgtgtcttattattgctttactacatattcttattacgacatatcgtttatcgcttatcaaaaagactcattgcgttggctaaaagcgaagtcaacattttggtgctttcattgagagaagaatcacagatcgctctttcgacacgatggtgcaaactcgtagaggcctgtccgacccagcaaactcacagacgctggatccgatgttgcaggacccagggagttcgagggttccacccgctgtcaatcctggacagacgggaagcgtggtgaatgatggaacaactcctgttactgaaactgcgcctggtgtgcaagagaccggaaacaacggttccgcacacagccaggacgttcataacatgactgttccaccaggcatcaacgcccagacgaccatcggagatgcaaccgaattgcaaaacctccgcgctgcgcttggactcatgcagggtcacaacaataccctgcatcacgatcaggaggaattacgtgccgcagtaaacctcgcgtttgacgaacagaggcgtatgttcgccgagtggagggacaaagagatggaggcattagggctcaccatgcagaaatcgaagatcgtagtcggcaagccactgtgctgatacgaagagcctatcagactgtaggccaacaggcaccgagcgtcattccccttggagaaaccgaggatgacccgatggtgaatgcttcccaaacaaccaacgatcagccgtccaatccccggtcacgagttccactcgtgggccaagaggtaggcagacagaccttgtccggggaattcatcaggaggagtcatgcttgacggatccgcgcaaaataatggagccattccacctgccaaccaaaacaacaaatcgctaaggcagccaggttct

SEQ ID NO: 331814 - DNA, 807 bp, Cannabis indica
gtaccttgtacactatttcactgcttgttcatatagcatgctttattgttcatttatgttttctgggttggatgttgaactttctgggaatttttgtttgagtttctgcacaacgcgttagattcctcctcttttgcgtttagatcacttcttttcatcatgtttttgtcgaggaatcatcttcgtcccacgtaatgacactttagggtttagagcagacttcgtcttctcgattttacccttttttcccttttctctccttactttttcgtaatgtcacaatctgtgggattcttgcacctgactcttgtcaagggtaaccttttgaggctttcttttttggcaagtgtccggagggggcctctttccagcggttaggggacccccattctctttttgaattagggtttggtttggggcctgactgctggattttttcaatctttttcagaaccaaaaatgtcttcttcagcatccggttctaagtcgtcaaagaagggatagaagcgtttggccaccctggaggaggtcatgaaaggtcccgtggcccaagaagggtacaaatcccgtaccaacggatgggaagcggctgaccttcattctaccctgacctgcgcccatgagctggagcagatcgtggtggtggcacgcatcaagccttccacctctgggacctaccaccggctgccccgggatgaggagacgcccaaccagaactatgggggcttcggagcctggagccaggcgcatcttatggccggggccatgctccctctccaagatgatttcattaacttccttgtattt

SEQ ID NO: 331815 - DNA, 949 bp, Cannabis indica
gtgtttgattgtcacaactattcggaaacgaaaaggtaaaacttgctgccattgattttactgactattccattatttggtgggatcagttgtgcattaacaggaggaggaatgaagaacgagatactgactcttgggaggctatgaagagggtaatgagatagcattatctcactattatcgagacttgtacctcaagttgcaaggtcttcgtcaaggctacaagaatgttgatgagtattacaaggagatggagatggctatgattagagccaatgtggaagaggatcgagaggcaacaatggctaggtttttgaatggattgaatcgagagattgctgataccgttgaactacaccattatgtggaattggaagatttggtggacatggaaatcaaagttgaaagacaactcaagaagggtatttagagctcaaagccaaggccaagtccacagaatccaaatacagcaccttggaggtcaaacttcccaaagaaagaggatcaacctagttcatcctttgcacccaaaccagccaccgcaactacaacccctcaaggaaaagtagcccctctttcatctcgttctagtgagataaagtgtttcaaatgtcaggggcaaggacacatagctagccaatgtagaaataggagagttatgttgatttcggaaaatggtgaagtagattctgaagatgaagaagagattgctgatatgccaccattggaatatgctgttggaaatattttaccaggatctagatttactaccatgtatgtttcattaacatcctaatatgaattctaaaacaatgaaattaaacacatataaagtttgagaaaccttaaattgcgtgcagcggaataatatgtctcctccaaccaaaaccccaaacccttgtatcctttctgtcccagagtattatcaagatctgagcccgaatgtcct

SEQ ID NO: 331816 - DNA, 1252 bp, Cannabis indica
cagcagtcctcaatgctatcatcgctgccgtgctttacatgttgtggaagaacaggaatgattgcctttttaatgatgtttgtaacaatatttcttcccttagtaaggaaattaagtgtattgttaaggctagagttgttggggttcattgtaaaagccaaaagaggaaatatcagtatgttatgagtgttgtaaacagctggtaacagcttgggggctggtgtggtcctttttgtggtagttggtttgttcctcctgccttgcctttgtatttggtttgtcctttagaataaaaagttccttttgttcagaaaaaaaataaaaattaatgttgtatataattttttattttcactttttttgaattagaattttgaatgtttaaaaaactataatcaatcaatatcaatatatatataaaggaatgcataagaagattttaggtggctttttactttttttattcctatttttcctattttgtgacacattctcttattttatttgaaaaatgaactacactaaaagctaaaaagtctcacattgtttagagacattttagttgttatccatgtagcttattgttgaccgaggttttcggcaaccaatataatagtaataattaaaagagctataagggattaagagagagatttttacgtggttggggcattaatgagccttagtccacgagtctgtgtatttatgatagtatttattatagagaatgttctttgtggatttttcctcttctagttcttatgaaacccagaattctcgacccttgctttgatgagtttgggtggaatttatagtgtttttgtggggtgatccctagaattgaggtacatgtctttcggtaactatcagtaaagccacacattcccaatgaatatatcataggaaatgcatggtctaatccctaggctttgtaggggttttatggatgtactcctttatcctttttgactgatgtgagtcctcataaagtagtcgtcactaggctcattaatcatagaatagtagctgcagagagggggttgtgccgtcagactttaagacatatggcagtttcaatacgtctcctcccatgcggcattaaatgcgagatgacttttcagataggatctgacacctcccggagatgctttgttgtagctttgctctcttggagcatgtgagacttacatgccttctccgagaggcatgtctaaggctgatccctatgttaaagagacttagctgatttatt

SEQ ID NO: 331817 - DNA, 1699 bp, Cannabis indica
gtcatagagactcccattgccaacaaaattgtggctagaatattaatcgataatgggagttccgtgaacttattattcaaagaagcattcatagccataagcctcacggactgggatttatcacctagcggttcccaactcacagaatttaatggaatcacgcttatcccaatgggaaaagtgagattgcaagtcaccctgtgcctgaatacacctcagagtacttttaagtactgcacatttgtggtggtatactggccaactacatacaacgcaatccttggccgaccaaccttggttggttttggcgtaaatacgtccatctgacacttgtgcatgaaattccccactcaggaggccggagtgggaaccgtaaggggcaaccagggacaggctaggcattgttataatgtcgcagcccacgtgccggtgctgatggtccgtgagaatattgagccaaaattggcagaaaaagatgagttggatccctgtgtgggatccgaaaagattgtagagcccatggaagacatcgaggaagtgcaagtatgcgacctcgacccttccaggaccctccgcctggggaagaacctagagccagaggagagagacaaaattattgaagcattaagggggacaacaggtgtttttgggtggtgccaaggagacatgaccgacataagtccacatgtgattacccatgttctgaacgtcaatctagatatgccgccagtacagtagaagcggcgtccccttgacccaataaaggcagatgccctagaaaaataagtggacaagctgctagccaatagcctggtccgagatgtgtattacccggaatggctggccaatccgatgctggtgccaaagccaaatgggacatggcgtgtatgtatagacttcaccgatctcaggaaggcttgcccaaaatactgcttccccttaccccggattgaccagatggtggacgccacctccgggttcaagctattgtccttcatggatgcctactctggctataaccagattaagatgcatatcaagagtgaactagcttcaggaccgatatgggggtatactactacttggtcatccctttcggattaaaaaattatggtgcaacatatcaaagaatggtgaaccggatgttcaagggccttctaggacgaaatatggaagtttacgtggacgacatgctagtcaagtctaaagcatgcgtgagccatgcggacgatcttacagaatgcttcgaagagttcggagatatggaatgaaacttaacccgaagaagtgcactttcggggtcaagtcagggaaatttttgggattcatcgtcagccaaaagagaataaaggcaaatcttgaaaaaattcaagccttgctaaacatgccttcccctaagaagcacaaagacgtgcaaagcttgactagaaaggctgccgccttgagccgattcatttcccgatcaaccgacaagtgcatccctttctttaacattttaaagaaatgccaaaaatttgaatggactgaagaatgcgaggaggcatttagaaaactgaaagagcacatggccaaaccaccgattctatcaaagccagttcacggagaggacttgttattatacctggccgtctttgagaacgctgtcagtgcagctctagtctgggaagaagaaaaagttcagcatcctgtgtactacgtc

SEQ ID NO: 331818 - DNA, 541 bp, Cannabis indica
ttgagaagtggaaaaattcttgagtctgcaacaggcagtacggagccctcttcaatccaaaaagagggggaaatgaagaaaaattcaccaatttcagttgctgaaattcccacagatgttacagcatcagatcagcattctgctgcagaaaagtctttgcaaaagcgacctccaccgtttcctcaacaattcaagaaacagcaagacgatggtcaattccggagatttcttgatgttttaaagcaactccacatcaatatatcattagtggaagctttggagcaaatgccaacctatgtgaagtttttaaaggacattttgacaaagaaaaggaggcttggcgagtttgaaactgtcgctttaacagagggttgtagtgctatgttgaaaagtaaaatgccacccaaattgaaagatccgggcagctttacaattccaatttctattgggggtcgagatgttggaagagctctttgtgacttgggagctagtattaatctcatgcctatgtctatttttaggaagttgggaattggagaag

SEQ ID NO: 331819 - DNA, 1786 bp, Cannabis indica
gggggcccaatgtaggcttgaagcggagacgttaccaaggtaacttataaagaatgtcagggagagtggttgtatcaactaaggtaaagaagattactttgattgcttatggtgatacggtaattatggaaagtgcttttaactggctggatagtcaatatggtatatcaggagactattgaaaatttgggaaaagattatcttgttaagtaatgatggaaatgcgtactcacccataatggggaaaaagcttataaattgagatgcaatttatggatatgtatttgagtgattggtgaatgttggatctcaaagtaagttatttattaaaaaaaatggactacataattgagggtaaactgatttttagaatgattaattaggtatggagatagtgatgattgtaaggaagcaattcaaaagctatgctctcaagtaaattccaagagaagaaaacacaactgctgatgcactagctcgacttgtcagcagcaacataaatgataaagcaaatctgatccctataaaatttcttgaaaaacccagtatcaccggcacagaggaaattgaaatgattgatacatcccttaactggatgacgccaatagtagcctatctcaacactagggaactcccagataacaggaatgaagcttggaaaataaggagaaaggctgcatggtacaacattgtagagggagttatgtattgaagaggattctccatgccactactcaggtgtgtcacacaagaagaagctgcacgacttttgtcggaagtacatgatggattctggggcaaccacgtagctgggcagagtttatccaagaaaattctaacgcaagggtatttctggccgaccatgattgaagactccaaggcctacgctaagaaatgtgataagtgccaaagattctcaaagataccccgtgcaccgcccaaccaactaactcagatacaaagtccttggcctttcgccatttggggaatcgacctgatcgaaaagctacccaagggaaaaggcggagtacagtatgcagtggttgtagttgattattttgccaaatggacagaggcctagccattggccaccattacgtctaaaaaagtgcaagacttcattgtgaagaacataatttgtcggttcggattaccataagatagtcttggacaatggagaaaaatttgacagtcagtccttcacaaatttttgtgcgaaccatgagatcataaaaagtttctctgcaatggcacatccccaagcaaatggtcaagttgaagcagtcaacaagacaccctaaagaaacgacttgaagatgctaaagggaattggctggaggaacttcctgaggtattatggtcgtatcacacaattgagaaaacaacgaccggacagactccatttgccatggcatatggttatgaagccatgctgccagtagaacttgaaccgttgtcccacagaagactgacgtataagcaagaagttaatcattcactccttgtagaatcacttgatgaagttgaagaaaaacgaaccacaacaaacttgaaattgatagcccatcaacaaaaggtagctcggtattttaacaaacaagtgaaagcacaaaaattctttatgggagatatggtcctaagaagagtatttttgaacaccaaagacaatacaataggtgtgcttagaccaaattgggaagggccatatcaggtggtcaaagtcctagaatcaggagcatacaaactgggtaagtacgacaaaaaaatgcaacttgttctagtacca

SEQ ID NO: 331820 - DNA, 733 bp, Cannabis indica
tgataagttgttttacgtggtaaaaccgaagccagatttgggcggtctgagtttggtttgatcaccggactaaagatgagcggtggcccctcaacagaagatttgagtacactgtgtgagtctgatcggatactgcgggactacctcaataatgccaaacgggtcactttcaaaaccctttggctagcttttgaggcctgcgatgtggcggacgatgtgtacaagttggggctgtgcgcatttgttgagggtgttcttctatcaagggctgagggtgtttatatctggacggatatgctgaagctggtagaaaacgtagaaaacttcttcgagtatccgtggggcctcctttcttatcagaagttattgtcatccacaactaagagtatgagtgacctgaggaagaattacattgataaggtctctactaaagataagatgaagaagaaagggaagacggagaaaaaaattactcaaccggaggcaaagtacaatgtctatggatatgccccggcgctgcaatactgggccttcgaggtgatgcaagatttggggaagaagtatgggcagtgcagagggactagattccctcgaatgttgaattggagtactcccgattccgttacgagacatgatgtgaagcaacctgacgtggctgcactatttgagaaaagggtatgtcaatcttagtttctttgtttttttggtatttaaattgtgaaactgtgatttt

SEQ ID NO: 331821 - DNA, 779 bp, Cannabis indica
agggcataaaatccaacaagctttgcttcttagttctttattctgactatccattacatcttagaactaacaatggattttaatcacaggtgtctcccaagtcataacagggtgagttccttgaaaccctcccactacgacaaggtaccgtgactcttttgtctaagaatctaaatggtattgtccttatcgattgtatcaagacaacagaggcagtgggaccatcttatatagaataagatgataaacacttttggaatcaagataaaaaagtttatttttaaatttagtcattttcttaaaaaagtagtgtttgttgaaacaaaactttcttatcttaataacaataggatggtccaccccaaatcaccttagaatagctatcaaacatgtaaaccttagttaacagttctagcttttcttaaattcacggtcaggacatccatgaatctaattatggtttacactaaatgcacaaccattccatcattttaaagtttttctatcactagggtatatctctagaaggacttaggcaactgttagtaacttatcatagactttttactttcatcaatatgcaatttgaatttttaggggtgtaagtttggatacaattcaaaaattcaacttaatgatctttgaactgcatatccactaaatatttctcaccctatcagttcgcaagatctttaaccacttaccttaatgttttaaaccatgctagaaattcatgaaatttctcaaacatttcaattttttttgcataaggtaaaatc

SEQ ID NO: 331822 - DNA, 914 bp, Cannabis indica
gtacgatcctcgggacatcagggcttttgttgttagtcgctaggcgcaaatatttttgtaaatcactagtaaacttttgtaaagcattttgtaatcgggatcccgaaatattttgtatgtaatatataagttttaattaaatagcaaaattttaattaatcacgattttcattaacctcgttgattagcaacgagctgcacagtacgtttaaaatcacgtcaacacgcctatgctagttagggtgttacacagacagtcacgcttgacacgtgtccccatccaaaggcgaaagcagctcggatgaagtctatacgcaacttcagaagtcccatacagacttggggggcaaatgttatcccaatttttgcagtctgacgtggcatcgcataatcgtgacacgtggaatccacttggagtatgtgctcggaggggaaagtccgagtaggatgcgtcgctggcatgcccagagcaaagcaatcagcaattcgcgcagggcaaccaacacttagcgaattcagctttcgcattatgagtcatcaacgaaatccctataccttggagatcagattacagggatatggcatacacacgatcccacaatcagtgtatcctgcatcaatcccacaatctttgtactcaacattaatcccacgatctttctatttatatcaattataacgagaggggaaagacttcctctccaagcatatagccctataaatagtgatggatgttcactgggcaagaggacgcaaacagttcagtcgagattataccctaaagaaattatctaagaatgcatattcagagatactattgtaagagctataagaaaaggaatctttctcctagttcttaagtcaatacaaataacgaggattaggctattaccgaactgctcgagactgaacct

SEQ ID NO: 331823 - DNA, 844 bp, Cannabis indica
aacaggatgcctcgtgagcaatctgcacaaaataatcagcgatccacgcagaacgatcaacacttagcgaattcagctttcgcgctgtgagtcatcaacgggtccctataacttaggggtcagattacagagatatgacatatccatgatctcacgatcagtgtactccgcatttatcccacgatcccacgatcggtgtattcagcaattatcacacgatcgttctgcttatacacattgtaacgagaagggaaacactttttctacacgtttacagccctataaatagtgatgcatgttcactgggcaagagatcgagaacattttggtcgcagacagtttagtcgagactttaccctagagttatctaagaattcatattcagagatactattgtaagagctataagaaaaggaacctttctccttgttcttaagtcaatacaaacaatgaggattaggctattaccgtacagatcggggctgaacctctataaaattcttgtgtctttattctgctttactatatatcgattactataaatcacttatcgcttactaaataagactcattgtcgttggctaaaagcgaggtcaacaatacctaaccttggaactgatctaacatcggaccaccatcagacctctatcgaacaccatcaagctagacgaaaaaaaatagaaaccaaaaaaatgtaaaaaacttgaccaacaactatttccacacaaataaatagcataaaacagcaacaactaacagatcgaccatctaaacaacattataaactaaatataagaaccaagaacaagattaactaaagaaaatcattacccattgaattcgt

SEQ ID NO: 331824 - DNA, 681 bp, Cannabis indica
accgtttcaaactcgccaagcctccttttctttgtcaaaatatcttttaagaacttgacataatttggcatttgctctagcgcttctaccaagggaatattgatatggagctgtttcaacacatccaaaaacttcctaaattgcccatcttgctgctgtttccgaaatctttgaggaaatggaaggggtggtttaggactagaacatactggtgcggattgctgactgtcaggttgctgaccctttgctgtatcaactggactggtatcagcaaattcctgggcagttttgttactcaatttttcgtcgatttggattgaagtgggctccccactaccctttatttcctcctcagaatttttcagattcttgccactccttagctgaatggcgttgcattgttccttcccatccctccttggattttccgtgtcactaggcaaagaaccttgcggcctagcttttaattcattggccaaatgtccaagttgcaactctaagtttcgaagagaggcagcttgactttgtatcaccgcatcatttttggccatataatcccgcattagactctccaaagaacttggttgggaattttgagcatgttgtgaatgtcggggttgttgtgaaaaacccggtggatatgcttgtcttccttgggctggtgcggtgcttgagcttgct

SEQ ID NO: 331825 - DNA, 491 bp, Cannabis indica
tctaattatttagtccaatcttagatattactctcacctataccattaaatggttaaataattattatcatcgcattctaccttcaaagtcgagtacaatgacatataatatgactatatttaatatttgaggttctgaagcctcacctaagcggtgcacattaactatgggtggcggtaaaaattggtgtacccaaaacgtcgccgaaaataggagtagtgtatatcaaaacgaccacctcgatgagtagatcacacctatgccgaccgtttgtcaaaacagtacatgatgtcgccgaaaacgggcggagctacaaaattgtcattggaaaaagtagagaactgggtgaaatagcttagtgtatgttgttctcctcgacgagttaagtccagtggtgaagacggctcgtcaaacagacaccggaggtgaccggaaaatccgttcaaagtttgaaacaccaaactttgacttgtgatcccgagctaacgac

SEQ ID NO: 331826 - DNA, 569 bp, Cannabis indica
cgagttttctttggttttggatgtagttgggcatgcacctagttatgtttggtggagcataatttggggaatgtctcttttaattaaagggttgcgtaagcgagttggaacaggtgacacaattatagtttttaaagacccttggctgccacggccagtcacttttaggcctactgttctactcaagataatcttaatttgttggtacgtgatttgattgacgagtcaaggagtggttggaatatgcaaatggtgaggaagttgtttaatgtggctgatcaacagagtatttgttctttaccaattagtaaatttccgaaagcggattcttggatgtggcactattcagttaacgggaattattctatgaaaaagtggatactatgtggaatcgcagttggctcaatttcatccttccccttctaagagttggttcacagtatggtaataaaagttttggaaaacttctttgcctaagaaagttttaatctttgcttggcgtgggtttcatgatgctctccctatgtatgtggggcttcaaaaaaggaaagtggttgatcatactaatt

SEQ ID NO: 331827 - DNA, 868 bp, Cannabis indica
tttttaaaaaaaaataagagaaatgcaatgctaaattaccataactgagtgaaccagtgtagtatatggaacatgattatcgaattgaagtgtcaatatcatgtgaaaattgttatgagaacaagctttttttctgaaataagtagcatttagtttctgatattaaaaatattaagttttaaaataaaataaaaataaatataatgtatctgaaccctccacgtgtccatattttatgagttaacggaagtggtagtaacggtgtaagagaattgtaacattaggtatttttgcctccaaaaataaatattagaaatataagtgtataaaatctaaaacattaggtatttatgccgcaatttacctatttttatttatttatttatttttgtaaaggtagtataatagtatttatgattaaataattgaaatacaaacaaatatttataatttgactaaacttttaacattactcatttaataaatgtagcattatcgtcattaatataatttaataaataataattaatatttttgttactgaattttcgacactatcttatcatgtcttctaaaatataatagttacataataatatctattctatttcgttccttttacagttaaaaattaatatttttactctctaaactttgaccaatataaaattttgtccacttttattaaaaaaacttaatttaaaaattataatgttctattaattatgaaaaaattaattaaaattattaaaaaaaaaacacttagataaatataaatttatttaaaaaacctaaattaattcctaaaaaaatatttactaaattttattttatttattaaactacgtaatcttaaaaaaatactaaa

SEQ ID NO: 331828 - DNA, 679 bp, Cannabis indica
atgtctgagttcccaagactcacctgagttcatctacaaaagacaacatacgagatgagtgttggtcagaatatcgaacgataaataagcaaatatgctgaccaggagtactcaacagattaaagaaaagctatctttaaagaaaagtcagaactcaagaagtcagaaaattttcttgagttagggcaaaaaagttcatgaagcttagaataagcaagatgaaagacgaacgcaatgcagttcagaagcaagctttatggctgtaaacccacatgaacacatgataaagaagaatcgcagaagtttctagccctagggttccctaagcatttttctacagcacagtgaaagttgcattcgaaatataaatatgcaaagataagcataaaggaaatcagaaacttactcaagattcgagtatttgggttcgagcaacgtctatccaactagcagttgtatgaaggcacttcagcgactttgaagccaagaaatttttcttttcgctctggagcttacttagcaaagaagggggataaaatgagtttatgtgccaatgttgtggatatttataggcaagtcacgaaaagaggaaattgtctcaaagagacctcagacccctcggcttcccgccttaaaaacgaatatgggaaataaaaagtaatcgagtacaaccgtcagc

SEQ ID NO: 331829 - DNA, 559 bp, Cannabis indica
atgggaattaaacttttgaacatattatcatgattatattccactgtgctgacaacactataatcataaacaaatatatacatatttacatatgttctgaacttaacataatttatacattaagtataatcatgaaataaacaatgtgaacagtgcaacataaaagcgatttctgatctttattaattagtaaatgtgattacattgaaatttgttttatttagggcacatgcccaacaataaccagctagtctgcccaagaatccaaataaccaagggtaacaacctcttccttttaaaggagatgacatcttggttatttcaggagggctacatatcgcatgggagagcaacaatgcccaaaagaggtatgtcaaagaggtaaaaaatgagcagtcggtatttgctccagaaccttctaagaaggtaaaaaacaaagaacttgcaatcatattctcggatgaagatgagaagaacgtgagatatcctcacgtcgatccattggtgattactattcagctcgccaataaaagggtaaagagggtgtttatagatagca

SEQ ID NO: 331830 - DNA, 539 bp, Cannabis indica
atacatcaacagattcatgacggatgcgaccaaggtctcactgataactgaggatggaaagttatccgcgatactggggggcattgaagtccttggcgaactgtggaaagatataagaaaaaatagaccggtcgactcagtgagtgatttccttgaccctggttgaaggtttcatcatgctcgaagaagccattcagcgagcagaaggtgagcaaaagccgagcaaaatgaaggctccttctactggaacgtccgcccaacttccccaatattccagcaattcaagtggcaagcgttcaggcaacaacaacaagcaaggaaatgggaagaagggaaagttcaccaaaaaacccggacagactccctgtgattgcaccaaacacactgcattcactatcttaactgaagatatagaaagtgtgtatatagcgactcagtcgctaattccgtacaagaagcccgggcccatgaagaaagataccagcaaaagcgacatgacaatattttgtcggttccatggagactacggccacgacacc

SEQ ID NO: 331831 - DNA, 926 bp, Cannabis indica
gaagaacgtgagatatcctcacgtcgatccattggtgattactattcagctcgccaataaaagggtaaagagggtgtttatagatagcaggagctcagtgaacgtcctttataaggaaacgctgaaaaagatggggcttgtaaaggcaaaattaacgccttgcacggtaaatctttgcggcttcactggcgacagtatcgccagtcaaggcataatcgagctcgcattaaccttgggcgaggcacccctatccgccatagttatgcaagactttctagttgtcaacctgccattggcttacaatatattgttgggtggttcaacattaatcgaactagggccagttagtttgaccaagaacctatcccttaaatttcaaacaccagggggtgtgggagtggtgcaaagcgatcagatgctagctcttgatcgctatcgtatagagctatagcatagaaaagtcgatcatcaattaatggcagttttggcagaagaaagcaaaaagaaggatgaggatcttcacccctaatttcaagatgaaagaaatttattaaaaccaattgaagaatcggaagaagttattctcgacccaggaaatcctgcaaagtgtgattaaattgggaagagcctggacgagtagctaaaatagcagctaataagtttcttaagggccaatcaagatcagttcgcctggagccatggagatatgatagggattgaccctagtattatctaccatcatttaaatatcgatccaaactacccagcaaagaggcagaaaaggagagccttggattccaagagacaaggggcgctaaaacaggaagtggacaagttataagtcaatgactttatacgcaaggtgttttatcccttgtggatagccaatcctgttctcgtcccaaaacctaacgaaacttggagaa

SEQ ID NO: 331832 - DNA, 1050 bp, Cannabis indica
actttctaaaatggaggaaataatgcaaaggtggatccttttttctcactttatacccatgatagtggcttctttagatcagagaaagatttgatcctacggacatgattcaaagcagaagtggaaaagatggttattcaattctgatgtacctcgaaaccgctcaaccgccaaattagaggacatgcgtcttttcaaaaagtggaacatgacaaaaataccctttgtaatcattaaaaagctctttctattgaaaaaaaaaagaattttttaaggggcaattgttacacctaaaattcggtgagcacatcagagaaagacacttatcgagctgggaagaacaaaaaactcaaatgcgcaatcgtaagtacatttggcatggagtaactcgttaaaatcacaattttcagagtatgtttttaactcgactggctgaacagtcttatgcgagacagaaatgtacgaattgttaacttgtgtatcgacgagaaaccatgtaagtgcaagtatgcatgacgagacattaacctcgtcgcgtggaggagatacgataacgatacttcacgtatatgacatgttatacaaactaagtataaacagtttggtgaatcaaaattgacagacagtgagacatctatctcgctgtaagatggtgttggaaatattttaccagtatgttgtttcacatcctaaatatgaacttctaaaacgatatttaataaacacatataaagtatgagaaaccttacagtggttgcagcggaatataatgattccttccattcatatctctaaccttgtatcctttctgtcacagagtatcaccaagatctgagcccaaatgtccttttgttgaatctggattcttcacgatcttccacaccatgattgaggtacaacttgatgtgtgtgggaactcactctatcactcaagggttcggtttttagaagtgaagaaagaggagagagggcggcggctaggttaaggaagaaggcactcagtttttctctgaaaaaattaagatgcatcatcttttcctaaagccatca

SEQ ID NO: 331833 - DNA, 594 bp, Cannabis indica
aaaagtgattatagaacacattttttttttaaaaataaaagtttttaaaataaaaactttacttttatttttgtgattaaaaaatttaaaaataaaagtgttactaaacgccaccaaattttttaacaaaaagttgctttaaaatttgttttgtccaaaattttggaagggccccctttggagctaaagtagctccgtccctttacttatcaattttaatctaattaatattttaaataaattattattcaaatatatatatatttatatatatatattgcgttatttgtgggataactcctaatactttcaatttgcttgtacttaacccccaaaactcaaattttggcagtaaaattccaaaactagaaaaccgtacgttagcaatttacagtttccatccattttataattttttttttcagttcactttcacagataccatcaccaaattcaccaccactgttacatgaaaagataaacaaccaccacccaccaccctcctccacaacccaccatcagcacagcaaacactaccacttcaccttactgtttatatccaaatcacacatagaaaaaaattaaacaaaactt

SEQ ID NO: 331834 - DNA, 1069 bp, Cannabis indica
aaaatctcatatggttagcaaatttaaaacttcaactagattatttctaaattttattaatattttaatatcaaaataagatcatttcaaatttcataattaaataagtaatatatgatcttataattaaaataaatgaaataaacaaaaataatcaaaaatttcaaaattagccgtaaagctaaatttcaacttcaaaggctactaatatctaaaactaattttattctgataattagatttttaattgaaaattcaaattctacaaaaaattctaccaaaatttgaattttgttttaatgacataaataaaattgggcacaagggcatgcaatgcatacccctgcactcgcggatgaagggaatgggcgagtggacaggctgcgtgcagccactgttggctgagggaactaggcgtgagaagcccttcagacaaagccttgttcaagaatcctcggtcaggcacttgtcaaaagacatgtgctgtccgagcgacaccacatccctgcgcgcgcacgtgtgtaacccaaacccagatattttcatctaaattaaaaaaaaatcataattaattcataaaaaatccaaattagatttgtaaaagctaaattcattaattttttgtctaatttctagtacaaatattttcagaacgaaacaaaaaatattttacaacatacattgtgatttccatacaatcatcaaacatgcacataaactaacttgaaaccatccaaataaacactgtgatcccaatttttgcactctgacgttgcatcacatgatggtgacacgtgaaatcaactctaggcacctgctcgcaagatacaggctgaacagggcgcctcatacatttgctcagatgaagtcctctagacctagcagtgagcaatctgcgcagcacgccaacacttagcaaatttagcttttgtatcgtgagtcatcaaggaaatccctatgactttgggattagattacagagatatggaatgctgtccaaatcccatgattaggatattatgtatttactatgcaatctttctacttatatcaattgtaactagaaggg

SEQ ID NO: 331835 - DNA, 801 bp, Cannabis indica
taacattaatgctattctcatatgccagtatgacacagacccgcatgttacgctcacatgcctatttctatctatgtaacatagacctacgtgttgcgctcacacgtctaaatacaataagaccttaaaatagttcatctcgattctggttaccgagtccattctgattatgccttgaacacatcacccttaatctcaatatatataacacataattaatggtgccactacactatttgtctatttgctatagacctgcgtgttacgctcacacgcctatatatgtctatgtggcataaacctacgtgttgctctcacacgtctatatacaataaggccttagtagggtttacctcggttttggttatcgagcctaacctggttatgccttgctcgcataaccctattcatatatatacgtaatccatacattacattcttttggtggtttatcctgatgatatatactaggtctaagccagttatgtcatccaatgtcatccttgtctacattccttcgcttcaatccttctacgcacatccctccaaaattcacccacgaaacctcacatttgactcccttctcccaaacacccaaattcccctacatgcatacccagctcctcccactcgctcacaccgcaatccctcccccgcatgcactaatggctcgcatgcgaacccccatgggctcccatgcgagcccccactagcaaacaccacactcctcctcacttgcactccctccacatgcactcacaactcacgtgcgagcccccactcacacacaccacactcccc

SEQ ID NO: 331836 - DNA, 1004 bp, Cannabis indica
gtgcccatggtcagcaaggggcattgatgcctttgcatcaatacttcaaaaatgtggcggactcttcggcctctgccaggcccagttcactcctaagggcatcaagtatccgtctgccctcttcgtcctctatgcctcccagaaatggggtatgccctctccccacgaggttgcttgggtttttgatttgaagtccaccccaagcaaggcaggtcggggtacttttacttctctcaaccaggcttcaagtggttgacgggcacggacgatacgaccatcagcagattgggcgttttgctgatgagtacttcatggtggatggcacaggcatcactcgcactcggttccagcagattctgacatatcactgcccttccttcactctttctcttcgggatagagcttaaaaacttgcccggcttccgggggaagactggaatattatccagttgacctctgaggataactttgtgaggtacgggctctatcccaaggactttactcctaagtctgtgacgaggaagaagaggaaatctggcactggctggattgaacgagctcatcaggataatgaactcattcaacttaagcgcgaagctaagttgaagggagttgtaagggccaagcagtatgctcagtggcccttaaatcctaaagatgaggctgaggaagagcaggtgactccactgaaaaggaagaagaaactcccagccccgcccagacctgttgaacatgcgattcgcataagggagcccatttgacctattcgaccatcccctcccgtgttcggaaaagggaaagctgttatgtctgaaataagatcaatgtcaggtgatgatggacttttgagtcttgtttgggtagtcaccttgcatattactttgtcttgtttttgagcttcttgattttcatgccttatatctgtttcttctaatcatgttgttttcgttttgtacagacatgtctcggcagatgcttggtgctctgagtaagagaataggcgg

SEQ ID NO: 331837 - DNA, 614 bp, Cannabis indica
tttttactaaaattagaaaaaaatccttaaatctaacaatctcaatagtttatggggcattttcaatgaccttaaaagttcaagggacatgatttggtacatgtcaaagttcaggggacaaaaattctaattaacctaaatataatcgatattttggtttcgaactgaccatcaaaagtgaaataataataattattattattataaacaagtttcttaataactaatagtcggttactatgtgcttaaaatattaatcaaaatcgactgatctagaaaaaattgatcatatctgatcgaattttactcttagtataataaaatcgagatcataacttttttatacatgtgaactggtgttctttaaaaagcaactatataataaaaatatataagaaggattacttttacttggattctttacttggtgatgaggagaattaaaaagctagggtaggaaaagagattatgtgggaataataatattataagcaaattccttaacaactaagaggtttggatagtgatatacgaaaccatccatatataactatgtctcattaattaatattgggtaagtttatactcctattttggtaaattttttatttgtt

SEQ ID NO: 331838 - DNA, 505 bp, Cannabis indica
ctcccaagagcgctgtctttatcatcaaattgacctttcaagtagagctttaaacgctgtccattaactttgaaagttgctggaccatcaccttgtaactccagtgctccataaggaaaccttgactactgtgaatggtcctgaccaccttgacttcaactttccaggaaacaggttcaaccttgaattgaatagtaacacttgctgcccaggttgaaactccttccttactagactttggtcatgccacttcttagttctctccttgtagatttttgcgttctcataggcttcatttcaaaactcctctagctcattcaactgtagcagcctttctcccctgcagcttttaattccatgttaagagtcttcatggcccaaaaagctttatgctctaactccaccggcagatgacaagcctttccaaacaccaaacgatatggagacatgccaatcggtgttttgaaagcagttctatatgaccacaatgcatcatctaattttc

SEQ ID NO: 331839 - DNA, 579 bp, Cannabis indica
taagaagaaaggcaatcaagcgtatgtggctgccttgatagagattaaacaagatcagtgggtagaggtacccgatgaagtggctggattgttggaggagtttgctgacaccatgccagacgagttgcctaaagaactccctcctaggagggcaattgatcacaagattgagttgataccgggagctgttccgcctgcaaaggcgccgtacaagatgggtccttcggagttggaagaactcaggaaacaattgaacgggatggtggaatcaggatacatggtgccttctaaagctccatatggtgctccggtattatttcaaaagaaatcagatggatcgttgagaatgtgtgtggactatagggcattgaacaaagtgacagtaaagaacaagtatccagtgccaaatgcggctgacttgttcgataggctgacaaaggcgtcatacttcaccaaactggatcttcgggcggggtactggcaggtccgaattgcggtgggggatgaagcaaagacaacctgtgtaacaaggtatgggtctttcgaatttttggtgatgcctttcggtttgacaaatgc

SEQ ID NO: 331840 - DNA, 489 bp, Cannabis indica
accaaaaagacaatgcgtatggtttacgcttctaaccctcgagtggctcggcacgccactttacccatcgtcgaacaagatccaaccgtccaggaggagggggatcatgaaggggacgctgatgtctaggagattgaagagaaggacgatgtccgtcccagcagtctctccgaggcagagggagtggaagaagttgcacccccaagctacgggggaaaaatgaggctggggagcaagtcgatgctgatggcgacgtcctggttgagggcgtggactacgtcagtgaggaacttactgctacggttcctcatagaaggcaaggtaccttgggtgccaggttggtgagccttccgtccaaggttactgaggcacacctgcgggttctcgaacaggatggctacctaggcgaattggattgttacattcccgcccataataatcgagccacaaaccctaaaagggggacgtgtgcctggtcaggtgctcatg

SEQ ID NO: 331841 - DNA, 563 bp, Cannabis indica
tacttctggaactacttccaaagaagtgtagaattttttcagccagagcgcttccttagctgcttcacaagctgctatatatttagcttccatggttgaatctacaatactggtttgcttaatgcttctccaaactacaactcctccaccaagagtaaatactgacccagatgtcgactttcagctatctttatctaattgaaaattagaatcagtatgcccagtaggatttaactctctaccagaatatacaagcatgagatctctcgttctctgaagatacttgagaatgtgctttataactatctaatgttcctgtaatatcctaagattaaaaaaatggattagcgaaccctaaccagttggatatgtattaatgtagaataatattattatataatttattataagtgaattaatttgataaatgacatgttaagaccccattggcgagccatgtgtatattcgtaattttgacccaaaaagggtaatactgtgaatttaatttaattgtgtgcttatgaactatattattatatagtatacttgttttgtccttttt

SEQ ID NO: 331842 - DNA, 656 bp, Cannabis indica
tagttctagtatttctataggggttctagttgcaaagtacttggtgtttggttgattttgtttagcttgataattttttaattaaagtttcattatggttgtctgatgtgtttcaggtagaattacagtttattcagatttgttatttttcgtgacagctagcaacaatgggaaaatatatgtcaattgagttaggagtgttatttgaaaatgttatagctttagtgtctaaatttctgtggacagttttgtcccatgcggcttgctctaagtatttagcggcccatgatttggcaaagcatgctctgcggttaaatgatgagctatcctggttcgaggaggttctagcgccgatggcggacttttgcatcgtaaattcatgagtgattctaatcattttgtaaaaaaaaaaaaaattaagggtttgcttgataagtttttttttcaaactaaattatgagcagggagcattttcaataaaagttgtttatggaattatttttaccacatatgcaatgtgatgattattttttatacaattttatcaacactattatctatatttaacaacaatcatgtggtattattttatatttttttctttcttttttttctcaaaaaagttcctttatagtattattttatagtatttaata

SEQ ID NO: 331843 - DNA, 1229 bp, Cannabis indica
tttattgcaagttatttatttaaccaagttttatatttgttttaaatcacctggcttatagaccccgattaatgagaatagtagcttgtaatcacgacacgtggcattcctctgagtaggacatttacaattttctatcagagcaccaaggtttttaaaattcttgaagactgctgaacatgtacaatcatcgtaaaaaataagctcgactcatggtacagtaagtgttgagagtaaatacttatctgcttatgtaaataaatgttcactacttttagtaataggcagcatatgagcatctagaagatatatttatataatgaaaagcatgattattaaatataaatagtaattgttatatttgggaaagagaattgtgtgtattaattagggttttggcatgacatgtgtaagtgtggaattggtgcctgactcactaggattgttgatttcatgattatttgaaagaaggaaccctaaaaaccaactagatcacagggtgagtctgtagagcggggtgataacccaaccaatcaaccggcaccgccagctcctctgcataattctgagaatactacgagggtgaataatgttaatcctcttgccgactggcaacaattgtttactgaaatgcaaagtattatacttcgtcaagaagaagagttgcactgaattatgcaaccggttcaggcagctccagtagagcaattgattcctctagctcctggtcccgtggtagccaaccttggatcggccctacaaccacaccgagattcagtgtttgagtggtttgttaagctgcaacctccaacattcttgggtggtactaatattataaaggcagaacaatggatgagtactattactcatattttggataatatgggggtagtaggaactaggagctgagtgggtcaactgtgtcgctttcatgtttcaagagcatgcccgcacttggtgggatttagtaggtcaatctcgagaccttagtacgataacctgggaagaatttaagaacttgtttgaagaaaagttctataacatagccatccgtacaactcaaatggagggttttgtgaaactagttcaaggtgataagtcagtggctgaatatacactagagtttgatcacttgtctaagtttgcctgcgatttggtaccaacatatttcaccaaagaacaaaaatatattactggggttggagtgctacaattagtcgggacttgaa

SEQ ID NO: 331844 - DNA, 808 bp, Cannabis indica
ttgttgcattcattagtgtcgtggccgtagtctccatggaatcgacaaaactatgtcatgcccctcttgttgacatctttcttcatgggtacgggcttcttatatggggccagcaactgagttgccatgtacacagtttctatatcttcagtcaaaatagtgaatgcagtgtacttggcttgattttcccagggagcttgttcagatttgccagtgaactttcctttcttcccattcccttgcctatggttattgttggaaagtttaccatttgaacttgaattatttgggtaatggggaagttgggcggatgttccagtagaaggagcctttgacttgccaggcttttgctcaccttccactcgttgaatgacttcttcgagcttgatgaagcattcggcatggtgaagaaaatcactcattgagtctaccggcccattcttccttatatccttccaaagttcgccgaggacttcaatgccccccagcattgcgaataactttccatcttcagttactcgtgaatctttggtcgcctctgtcatgaatctgctgatatacgcctggagaggctggtcttgtctttgtttaacttcgaccaagtctcttagatgcaatggaagttggcgtgaggaggcgaattgtgcatggaattcttaagagaaggttttccatgaactaaactttccaggagctaacttaaaataccattgctgagcggcttccgacagggtagcgaggaaaattctgcaatatacatctctgttggaagttattttaccaggaacttagatctactcacaagtat

SEQ ID NO: 331845 - DNA, 719 bp, Cannabis indica
cacacacacacacacacactatagatgtatattgtatagtaaaccgaacttagttgttccatattaaagattcctattactttaatacactctggcttgttttatttatatcgtataatcttaattctcttatacatccttataagattataccttctccatatgaataagaaatttttagatatttattaattatacttctataattaatgtattcatttattataattgtatttcatatgtttcgtaatatattatccattaattacttactttaaggcataaatctaaacaaaaacatcctctaataatacataattcgactcaaattaaattacataatgtagagctcgccacaagctatcaaatggtatatagaacgtctaaaacaaacacccgagtgaaaagttatggctaaaatactaaaatggacattctcggtaaaatccttcctggaaggccccctgtttggaaactaacatgtacgctaaacatgtatacataaatgctaccattatactaatcttaccttattttccctaactaggattccggttctatggggtttcctggggaccaaccggtcgagtggtttctacaggtccccctgaacaagtcgactggttcagtgaaggaaaaactcaaaaattcactacaccctcaattcgacccccaaactttaccaaaccttccagacctgcttaatataccacaataga

SEQ ID NO: 331846 - DNA, 1143 bp, Cannabis indica
tactttaaaattgaacaaattctgaaagaacataactccaacactgacgcttgagcaaaattggcctcacataatgacttggatgaattgaacttagttctggtaaagatgttgagcgagccaagtatacgtgaaacgaaagatgttaagatgatagacgactctcctacatggatgactcctattatcaattacttactcaacggacaacttccaaatgacaaaaacgaggtgcaaaaactattgtattcagtgcctcgttacacaataattaaaggcaaactatataggagagggtactcgatgcccctactatggtgtgttctccctgcagaagcaaatgaaatcattagagagattcacgaaggcttttgtggggatcctgcgggttggcaaagcttgcctaaaaaaatcattatacaaggatattactggtcaacgatcaataaggacacccacaagtttgtgaagaaatgtgataaatgtcaaaggttctcacatacacctcgcatgccgccaatggaactaagaatgatgacctcgccctacccatttgctatatggggaatcgactctttgaggcattacccactgggcgaggaggagctaagtatacggtagtaccagtcgacttcttcactaaatggacggaggctgagcccctcgtttccataacctagaagaaagtgcttgactttgtcgttaagaacattatctgtaggtttagaatttccatgaagatagtattcgataatggaacccaatttgatggccacttgttcactgaattttgcgagaggaacaaaattatcaaaagcttctcgtcagtatccaggcctcaggcaaatagacaagtggaagttgttaataaaacctcaaaggatactatcaagaagaagctagacgctgctaatggcagatgggtttacgagctacctcaggtactctgggcccatagaactaccgagaaaatagcaatgggacacactgctttctctctagcatttggttcggaagcaatgctgcctgttgaagtgaacatatcgactcacagaagagagttttataatcaagaagaaaccaggaactttgaaatttccttggatctacttgaggaaaaaaaactgagtcgcaaatcaccaa

SEQ ID NO: 331847 - DNA, 818 bp, Cannabis indica
atttaaggtcatttactgattatgtcatgaataattgatacactagttctaagtatggaatctctgcaaatttcggtacagagcaatagtcattggaataacaacaagtactaatgtactaagttgattacgaatcaattggagaaataatattaagagattgcgctttgctaaactagtgcagataataatggaaaaactacaatgcaatcgtgaaacaattcaaaaacaactaaaatatcaactaacggaaggttgtcaaccactccaaatcaaagatgacaaaagtctgttattttacataaagctattaactaataagaaaattgatttcacacgatatccattgtgcgtgaacacatttagtaacacagaatcacaatcattttcggcagctacccgaagatgctgaatattgaaaaatctattattatttgtttatcgtttgatattgttttatttgaaaaatacacaatatctacaaaagaataattaagttgttttcatgttattgtgaagcttcttttatattatttttgcaacatcttatttcaacttgaaaataaaattaaattattttcatgttgttgtaaagtttgttatgaattgtttatacactacaatggttgttcaacaaaaggaatagatttttacatgtcaaaacaaaaacttatcttatctcttacattcagacatggaaaataatacgaaaacacgcattatgttgattttaaatcaagcggaggcattgataaaaagtgattgtaaatctaaagaaaaattacttatatttagtaatagcattttacaattgtttt

SEQ ID NO: 331848 - DNA, 514 bp, Cannabis indica
gtgggattgatgctgaatacactcatcgtgtgatcgtgtgtatgccatatcccattaatctgatccccaagttatagggatttcattgatgactcacaatgtgaaagctagattcgctaagtgttggttgctaagcgcagattgctaatttgtttactctgggcatgccagcgaggcatcctgctcggactatgccctccgagcagatactccaagtggattccacatgtcaccattatgcgatgccacgtcaaactgcaaaaattgggataacatttgccccccaagtctatacggtacttctgaagttgggtgtagacttcatccgagctgcttctgccttttgatggggacacgtgtcagcgcgactgtccgatactcgatgtgaggctgactgggcgtccctaaggttcttggctaataaatgctctgacaattaatattttgaaattcgattttctctcaccacgactgacagcttgcacttgattatttttgatttcccatatttgct

SEQ ID NO: 331849 - DNA, 582 bp, Cannabis indica
tttttctacttcgaccttgctcaataaattatgcataacttttgcatccagactccaaatgagatgatttaacatgttttagaaagctgggaacgagctctatcattttgggtttcataagctcttcgagaaaataatgaaatcattgtaaaaaatgggctcaaagatctcaatccatcacaaaatgtcttttcaacacaaacctacacacttggagaaaacacatcaaatctatacaaaaataaatactaattcatctaataattgactaagaatgagtgtacaaatatgcactcgtcaattgactcatttgttgaatcttcaaaagtttcttattactaaaatagcacaatttataatgcccaagataagtgtcatcatgggactcaaactctcaagaataatcaaatgagaaatcttatgcaaagtattccaaccaactacaccacacacttggtggtacaattaatcagttatttaaaaaataaaaaataatttgtacttttgtataaaaaaaaactttataatccttagagatatttaaaaatgggatattggcggctaaactacctaaaccctggt

SEQ ID NO: 331850 - DNA, 586 bp, Cannabis indica
tcaagagtaattactcataacggtaatgaccatttcatttacacaatcataatcgagtcacaacgataataatcgtttcatatcatttccctcgatcattatcgagtcacaacgatgataatcgtttcctatcatttccctcgatcataatcgagtcataacgatgataatcgtttcctattatttgcctccatcataatcgagactgtaacaatcataacattaaccatatacggtgcttagtactattcttacctcaagtccaaagtcaagtatgggggccaacctgggtggaatgatgctcgataatttcgggtcctatgtcacggtaaaggtaaattaataagggtctattccaaaacactgtctaaaaacccgcataaaataacctagggtttttaaccgaaacttatggtgaaaacaccctaaattaaaatacatattttggctctaatttatgtctcatattgtagagctcttcataagcctcaaaacggtatatagaatgtctaaaacgaacacccgagtcaaaagttatggctaaaatacaaaaatcagtgattcctgaaaattgaccatccggaat

SEQ ID NO: 331851 - DNA, 1561 bp, Cannabis indica
acctgaataactctggatattgagccctcatatcagacttcgattcccaaatggcttcctctactttactgtttctccatagcaccttgaccaaagctatggtcttgttccgaaggactttatccttcttgtttaaaatttgaactggttgttcttcatatgataagtctagatgaagttctaagctttcataaattagcacatgagtgggatcttaaatgtattttcataacatagagacatgaaacatgttttggactgctaaaagtgttggaggatgggctagacgatatgctaccagtccaaccttctcgagaatctcgaaaggccctgtaaacctaaggcataacttgccctttttctcgaaacatttgattcccttcatcggagacacccgtaggaatacatgatctcttgcctctcaaacccaaagcacccgtaggaatacattttggtactatcggggtgtagtgaataaggagtggtatgagcttcttcgagaatctcatttctaagttccgcactacctagaaaacaagctttggttctatacaacaacatcccattacttgacatcgtaaaatctttagcttgactagctaaagcctcttctcggatctttaccacttctggatcaattgactgagcagctttaattttgtctaacaaatttgattgcaatgtcaaattattaagttttccactacaaactcaataccagatctgaccaaatcatctactaggtgaggtgaaatctagatcatactagtcacttgcacgggaccctttctactaagggcatcagccaccacattggcctttccgggatggtaaaggattcacatttgtaatccttaaccaactccaaccaacgtctctgcctcatattcaaatctttctaggtaaagaaatatttgaggtttttgtgatcggtataaatttcacacttctctccgtagagataatgccaccaaatctttaaagcaaaaactattgcggcaagttctagatcgtgagttgggtatcactattcatattcctttaactaacgggagacataagggattactcgatcggcctgcatcaaaacacagcccagaccctgtctggatgcatcatagtaaaccatgaacttctctttatcagatggtagggctcataccgaagctgtgattaatctctatttctaatcctaaaaactttcttcacacttatctgtccacaggaactgctgattctttttagtgagttcggttaagggtgttgagatcttagaaaatccctcaacaaattgacattaataaccagccaaaccaaaaaaacttctgacttctgtaactgcctttggtcttggccaatctttgacagattcatttctcccttgctccaccttgattccatccttactgacaatgtgtctaagaaaggacacatgagatagctaaaactcacactttttgaacttggcatacaatttatgttctcgtaatcgctgcagaaccatctggagatgtttttcatattctgcttttgaatgagagtacacaaggatgtcgtcgat

SEQ ID NO: 331852 - DNA, 661 bp, Cannabis indica
tgtttgggtctgagttcaggttcgggttcgggtcccgagtctaggtttgggttgagatccgactccggctcccaattccgttctaggtctgatttggagttttggtcctggttcggttacggttctggatcaaggtccaatttcaatgatgattccaagtccaagtcctagttcaagtctcggtcaacttccgcttttggttccaatttttggtcacaaggtacgggtttgggtccacttttgggtttgggactgggttcatgttcgggtgtgggttcgggtccttgtcagggttcgggtccaagggtgggtcataaatccagacaccgatccaaaccatgggtccatattcgaatcccaatctcgggtccaagtctggttccatttctggtgccggctcatgagctgggttctatgttcaagttcgggtccgggtcgggtagtaggtcccgatcctagttctgtttcccaggtctctatcctgattctaggtccaggtctcagttattgtgtgggtttgggtaccggtctaggttcgggttccggtcttagtgtcgtttcaggtttaggtctctgtctgggttttgatctgggttcgggtttgggttctggtcctggtcctagtcctagttcggtactagttccatttgcgattctgagt

SEQ ID NO: 331853 - DNA, 710 bp, Cannabis indica
tctctctctctctctgtctctcgcaaaccctcttgcttttcaaagtttgtttgttgggtgaattgcttgaatttggccaaaagtgaagctttgagattgtgaatctttgagcttgtaattgaggtagtttttctattgtttttatttgaaattcttgctgagttcattatggaaaaaatatgttttgggttgttttgctcttgatttgcatgtaagaggagtgagtgttaattttgattagattaatgttagtagattcatgctaggaacttttatgatgatattgattatcttgattagttaaggtgtgatttgaagctttaatttctggggttatgttctgaaatttgtgggcaaatattattgatttaaatgctttgataattgatattcaacttggtgattatggtgagattgcttaatatttcctttttgtgtatctttggtatcaagttagcttggtttattttaatttaaaaatctgagtttatgaatggttttgattgaattttgcgtatggtttgattgaaattcgaatttatggaaaagttagcatttttaggccttaaaatggggtttttgggtgttctgaacccagtccccgcgacgggatttttagccgtcgcgactgagtttggcagtgagaaagtttatttttcccaattttgttttggccataacttttgactcgggacttcgtttgggacgtt

SEQ ID NO: 331854 - DNA, 503 bp, Cannabis indica
aattcattcagccttgaggtttgggtttgaattgtccaacaacgaggccgagtacgaagcgttattggataggctgagattagcaaaggagcttggtgcgaaagtaattcattgttttagcgactcccaactagtagtcaaacaggtattgggtgagtatcaggcaagaggattaaatataccagcttacctctcccaagtgcaaaaacaactccaacaatttaagtattactccatagaataagtacatcgtgaacaaaactcgaatgtcgatgccttagcatggttggccaccactaaggaggatgatcattcaacatcgtcctagtagagttcctccctaaaccgagcatcaatgtggaggagaacgaggaggctaatatggagctggtcgatactcaaataatgtggatgactccacttattgattacttaaccattgggagtctcccttctgataatattgatgcaaggaagttattgtataaggtaccaaggttcac

SEQ ID NO: 331855 - DNA, 616 bp, Cannabis indica
tgcggtgtggtttgaaccgcatattaacaattcaaaaccgcaaaccgcaccacaccgtgcggttcaggaaaaattcaaatcgcgatcgcaaccgcaaaaaaattcaaaacccaatttttttgcgatgcagtgtggtgcgggcaatttgagcagtttgatgaacacccctatataatatatgtgtatattatatgatttttttttagagatgatccaatataatgtttgatgtttttttaataaattatttttttactttggggggattcgtgttatgatttataaaatactcaaaaaatacaaataatcatagatttaattatgtatctaaaagtgctttaatgtaaaaaattctaattatattttatagaacctttgctaaatcaaaaaaagaagaaattaacgagatgaggagaagtactaacctgaagccattgttggagattgtaggaaaggttatgatcttctaagaatacactatttctctaaagtattttctgtgatgggggaagaagaaaatacaactagtgtttctaggggacctctacctatttttagactcatcttagaatgagtttagggtatttataatttggcccctcaacaaattataaat

SEQ ID NO: 331856 - DNA, 541 bp, Cannabis indica
taacaaaatcatactcatattattcaatcaaacacatatgaccaaaccataaataaaatctccacatgacaatgttctaatgtgaaacataaacataactagaaacgcaaatgtctagtaattataaaattatgcatcattttgcaacatattaaggatatatatagtagtttcatctcatctgatattgcataaaatactcgcatcaatggaagttctttaactaatatgttggttgcttgaatacattgcattggagttaggccactaatcttgcttatttctgtgaataaattggtttgcatctgagctgcatccttatcgcatattgcatcaattattccttgaaacttcgggacaatattagatatagaatatgctaatgcaccaacgtttgtagaaatatcatccataaccttagtttttttattcttcccatgttgttagttactagtagtactatcattagatctacgacgcatatttgttggtcgctaatattggctcaggtgttctccaaaaattctttatggcagcgaat

SEQ ID NO: 331857 - DNA, 674 bp, Cannabis indica
taccttgtctttggagacataaaaaatcagtctttaaaattttgaaagtgggctggctactacaagtccactgaataatccttataataccaaaaatttctttttggcagtacttaccattcatgtatttacaacactcataaaaccaaacttgaaatacatgaggacaaccgatcaaagtatataatacactcgacctctttcctaaactcttcgtctttctaacactttcaacccaactgtaaagcttacccttcaacgacgaaatagtcaattcaaaataactctgtcccaagcaaattcatcatacctactagtgtctacaacattatgcttagtaccactaagcaaaaatcattcaataaaataaagaactgccaacttaataacatcctcattagaattaccctacctctttgtagtaaaacattccctaatagattctttagttatagaggtggaggtcagccaatatttcaaacaaaaactgttaacatcttgcttaaaatccaacacactaaagtcacattcacattctaaatcggctatcaatgcaaactcttcaatgctaaatctaagcctataacaccacgaatcataacccgcaattcaacatctttaggctgttgaacctccctcaacaacaacccatgaaaaacttgatgttgcacttt

SEQ ID NO: 331858 - DNA, 536 bp, Cannabis indica
aaattatcatcctttcacttgaatgatgaaaataagattcgatgtccatgtgtttcatgtatgaacttatactattatgacttggagacgattgagcgccatatatttgtaagaggattttatacaaaatatgttttatgggagttccacggggaagatatcacagaaatacacgaggatgaagagaatgcagaatcaatcgttgaggaagacaacacattatatgatagtgatgatgaagatgatgacgatatgataccagcattagaggatttagctaatcaatctcatagaaatagtgattttgtgaaccttggagattcaaatggcgacaacaatgcaaggaattcattacctaacttatttgctgaagctgaaaaggagttgtaccccggatgcacagtattctcgagcttaacatttattgttaatctaatgcacattaaagtgatgtgtgattggagtaacaaatcatttgatctgttgttggacttactttggaaagcatttcccaaagacaataagattccacggtc

SEQ ID NO: 331859 - DNA, 1217 bp, Cannabis indica
aaagagttttatttagggcataaaacccaacagttattacatgttactaatcatttttgtgtgttttgcagatatggccggcttgttgcgacaaacaacctaccaggagaaagagggttcgccttctaccgcctctcccatggctcctcctggtaaggttaggaagactaaccctcgcctggctattgatattcacacccctattgctggatcgcctgcctcatctcggccgcttcctcctgactccgcatccgggtccgccaatgatacaaccctcattggttcgacgtccacaggggccgagtcacttgctgcgctgcccttagagggtcgttgtcaggctttatctacgggtttgaagggggcacatggccatattgagggccttatggacatcatggacaagaccatgtctaggcttgattgtttgccccctgcccagatcgttgctcttggatgccgcgagatgattagggtaagtttctcctacttgtgaaaattctttccttttaccattatctaacatttatgtaatgatgtgtaacaggctgccaccattacttcttatggtcaatctagggttctcgccctacaagaggagcacaacaagcaaggagcagcctcactccaacttgaacttgatgccctccgccaggaatactcccagaagattcgcgatctagaaacttctgttgaaagggttactgctgagaaggagcgtttcaggggtgagcttgaaagtgagaaggaggctcatgccaaggttgtcgaggaaaacaacattaatgccaaggagtgtgagaagctagctgcggaggtgaaacagatcggagacctctccaccgatgttttcttcaaattctggctaaacaacaagaaggctgactttaattatctgggtaagaacatggaaagtatgctatcttattgtcgcaatcgtgaggaggcagaagccagggagaaggcgcagacagcttgcattcaggccgattcatacctcaactttggggttgaggcaacagatgactgtccccttaatgacttacttgatggttcctattgatgtatttttacttttacagattttatgcccactagtactcttcagagattcatgactgtccgggcagtctttaatcccgtaactttacttttgagacatttgtgtctttaactttttacttggccatcggggcctttatctttatatatggttt

SEQ ID NO: 331860 - DNA, 767 bp, Cannabis indica
ttcttgtcctccaaatctgatcactctctttttattcttcatgactcatcttcgattactctagttcttgtgtatgtcgatgacatactgattactggaagcaatcccaaaacagtgactgatatcatcactcatcttcacaatactttttctctcaaggacctgggagagcttaagtattttcttggaatagaggttacaaagaacagcaatggtcttgttctgactcaatcaaaatatgcaaaagatctgttgcatagagcagatatgcaagatgccaatcccattgccacaccaatgatcagtggacaaaaactctctgcacatggaagtgaacactttgctgatcctcagatgtacagatcaatagtaggggcactccaatatcttacaatcacaagacccgagttgtcctacagtgtgaataaagtttgccaattcatgcaaaaacctcttcaatctcactggttagctgtcaaaagaatcctacgatatgtggctggcactttacaacatggtctgcatctcaccaaatcttcctcactggaattaacagcctactgtgatgctgattgggcttctgacattgatgacagaagatcaacatcagggtttgctgtatttctaggacagaacttaatcacatggaaatctcagaagcaacacaccatctcaaggtccagtactgaagccgagtatcgaagccttgccaatgttgttgctgaaattgcctggcttcaatctctgttttcagaacttcacattca

SEQ ID NO: 331861 - DNA, 749 bp, Cannabis indica
gactctcgggtttcttgcaaaaatttaactgctccttcagctcgaagagccttatcaaccatttctgcataagttgtggtatcatttgttgtaataaccaggtcatgcctgatcttggcattcagcccagccaaatacttttctttcttgctgaaatctgttggtacgatcccggaggctaacttagccaagcgatcaaacttggttgtatattcagtcactgacataccctcaccttgtaccaactcaacaaattccttccgctttgcactgcggaccgcctcattataatatttggcattgaacaattcccggaactcttcccaggtcattctggtcacatccctggtgagggataccatctcccaccaaatcagggcatcttcttgaaattgaaacgtggcacatgccactctatcatttccgaccactcccataaaattcagtattctttcgataacagtcaaccactgttcagccttaagaacatcaggacctcccagaaatactggaggtgcttgctttctgaacctctcatataaaggctccatgcggttaccagcaacatgttgctcagctggcaccgcaggggctgcaggaaccgcagcaggcggttgcaggggaggctcaacaggagcatcccgttgcctaagtcgtcggatctcttcttcttgttgctcaattctagtttgcatctcagcaaacctttgctcccaatcaaccggggcctgaggtggattctcctgtcc

SEQ ID NO: 331862 - DNA, 1084 bp, Cannabis indica
gtgtttgctgtattttgaatttttgaattgttgttgtatatcatcttttagataaatcttttataatatggatccccgaaacacctttttactgccgttataatgtccgtttttagtgttttattttgattaaatttttattatcctcacagtttttaataattaattaatatattagtattaaactagtttataaaataacacagtggcgtccctatagaatagggcattacactccatcagcttataatgcgatccttggccgaccatggatccattccatgaaagttgtgccatccacataccaccaagtgatcaggttcccaaccaagtggggagtgaaagaaatatggggagcccaaaaaactgctcgtgattgttatcaatactcactaaaagagaaattgacaacattatagcaactacaacagtctagtccgacctttgcaccggatgaacccagtatggaagacctagatgatgtgtgcattagcaaggagttcccagaccataaagtccagattggaacaaagcttacacctgagtttcgagctaggctgatcgaattcctaatcaaacgccatcactgctttgcatggtcccatgaggacatgacaggtattgattctaacattattgttcacaagttgcaggttgaccctgattacccaccggtcaggcaaaaaagacgtaaatttgcacccgatcgcaacaaggtgataaatgaagagatacaaaaactaatcgacgtgggatcagtcagagaggttgactatcctgactggttagcaaacgtagtagttgtgaagaagaagaatggaaaatggagggtatgtatcgactttactgatctcaacaaggcatgtccgaaggattcgtttccacttcctcacattgacatgatggtagacgcaacagctggacatgaattgttgagtttcatggatgccttctccggttataaccaaatcttaatgcatcccaatgatcaagaaaagacatcattcataactgagcgagggactttttgctacaaagtcatgccgttcggactaaagaatgcaggtgccacgtaccaaaggct

SEQ ID NO: 331863 - DNA, 716 bp, Cannabis indica
gttgctaccttccaatcatcttcaggttggttttgtcctggatataaaaaatatcagaatcgaaaatcacagaaataggaatgttcttagtcatatagctggtggagattatattatatttaaaatctggtgcatacagtacatcagcaagaacgattttgtcatttaaaacaatactgccactttgctgaacataaagacaattgctatttggtaagatcagttttgtagcaggtatcttacataaacattggaagagtttaatgttagcacatatatgtcttgttgctcctgagtccataatccaagaattatgtaaaggagattgagaattgtgtgatagtatgatacctgagtttcctgatgaagtagatggatcggggttattcataccagattgctgtgaggcaagcaaattaagcaattgttgatattgagttgtggttagttgaggaaatagggcctgattttcttgttgactgctgcaattttcttcactggtttgtacctgatttgtattggcatctttaggcttgttcttgttaaacccgtggatagccatgaattttatagcatctctcgatagtgtgtcctagtatattacagtgagtgcaaaagggtcgattcttcttcggaggttgagtctttgaagtctgattatcagtcttttggcctgcacttttatttccttgaaaggcaaatgccattgcagggtt

SEQ ID NO: 331864 - DNA, 708 bp, Cannabis indica
gcacgatcaacaacatattttggttgttccattgagtttgaatgtagctgataatcattttttctagtctaaggagcgtcatagtttctgctcggtgtgtaatgcatacaagctgatacaatctcagaaaggaaattggattgtaactaattcttttgggttctggtgcaagctttagaatttgaaggtaccaccaaaagctctcaatttggtatgcagggtacttcaaattgttttcccgccttgacttaattaagtagtagggtcccagttcaaatcatgtgtccagtttgtcaaaaaggtgaggaaattattttccgtactcttatttcttgttcaatcgttgcacaatattgacagaggcttttggctggggttagtgttaggctatttttagtctatattttggatcgattttatgttctcttttcactgttttaggatggaattacgcttgttttctatggttttaggtttttaggaataatagaggcctcgggatgcaaaagtccagaaaaagacgagctgagccaagaaaaacaccaatttgaggcgtgaatgcacttctggtcgcggctagattagtgtggccgcggctagatcatgaaggcagaaagccaaacttttcaagctccagtcgccgcggcgacttatacccttgccgcggccatataaaaactacagaagcgtgattttaagcatctatct

SEQ ID NO: 331865 - DNA, 565 bp, Cannabis indica
gcattgaagtccttggtgaactttggaagatataaggaagaacgggccagtagactcaatgagtgatttccttgaccgagttgaaggcttcatcaagctcgaggaagccattcaacgagcagaaggtgaacaaaagtcgggcaagtcaaaggctccttccattggaacatccgcccagcttcccaactattccaataattcaagctcaagtgtcaatcgttcaagcaacaaccacaagcaaggaaagggaagaaaggaaatttcactgataaatccagacagactccccaagagaatcataccaaatacactgcattcactattctgactgaagatatagaaagtgtatatatggcaactcagtcgttgatcccgtaaaagaagctcgagcccatgaagaaagatgccaacaaaagggacatgacgaagttttgtcggttccacggagactacggccacgacactaacgaatgttacaatttgaaacgggaaattgaatttctaataaagaacaatctgcacctgcagaagtatgtcaagaccaaccaagatttgctacctccac

SEQ ID NO: 331866 - DNA, 750 bp, Cannabis indica
tttttaggagcattgattcatcagttgatgttgcacaaaatcaaatctgacaagccgaacgaggtacatttttacttggcgaagaagagaagtagatttggtaggatggagtttggtttggtgaccagattaaacttgttgcctggactactaaggaagaaattgaagagaaaggaagtttggactggttgattatggaatattttaacggtaatccttccaacagctttagctaactgtgtagagtttttgagagctgcacagaagttaatgatgtctaaaagttggggatggccttgtttgttatgggtgccctcactggtaaggaggagaagactgtcgttcctccttttgtcataagaatggttaacaaccttccattcttctacgagtacctgtggagaaagatttcgtacaacaagctgatagaaacttgtaataaagactacttagatgtgaagaataagatgcttaagaagcttgagaagggagttagtcagaaggaggctaaatactcatcttacggctatactgtagcgttgcagtattggccatacgaggccatcctggagctaggcaacgagtgtgcagtgaagaagttgcatcgctttctgagaatggtgaactgggagagtaagctgaaaatgacacttgggaaggacgaagtgatacgattatttactagaaatgtaagttttttacgctttatatttaattcatgttaatttccatctattaatatatttgttt

SEQ ID NO: 331867 - DNA, 926 bp, Cannabis indica
aaaatagacatttgtactacctgtacctcaaaagccacataagaaaattgttttagaaaaataaaatataattaaatagaatattgtaataattgtgataattatgcaataatttttactagcaaaaaaatttcaagatgcaaaaatcataaagaaattagaaggaaaaaatatctatttattttgaaaacaaaaagaaagtgtacttgaaaaattacattgaagcccctactcacgggagaaaaataaattttaaaactaaaattaaaagattttatgatttttgccccataaagtgtgacctatgtataattgtgcttcttgagtttttcaacccattaaaaaaatttgttacaattttcttttttttcaaatcggggcttgagcgatgagtggccgcctaaacaaccatgtcattatttcatttgtcacatgtcataaaacttgacaaaatgataacttttcaacattgtgaatagtttagagactattttaatatattgagggacacaataatacataatgcataagtcataatggaagatggaatatgcatgataattctggcttttggagaaagttttggtacttgaaacttcctcctaaagttaagaatttgctttggagggctgttaccaattgtcttccgactctagtctctcttcaaactaagcgggttcatgtttacagtatttgttctttgtgtaattttgaacccgaaaccacttttcatattatggttggttgttcttttaccaaagcttgtttggagcgagatttaggtctgctttttcataatggggatgaggattttggtggctggtttgaggatttctgtaacactcatttgactgagaatattgagaagctggcaatgattctttggagtgtttggggggccgcaatgatttactttggaatgataa

SEQ ID NO: 331868 - DNA, 587 bp, Cannabis indica
gacagtgcaagtgttcttgtgattaccaagaatgacagggacaaggtgtggattattgactctggatgttcctttcatatttgtccagataagagttaattctctaactaccaatcaagaaatagtggtactgtcaagttaggggataaccattcatgctccatacaaggaattggaactattaagttgcagctcgataatggaaaagtagtagaactgaagcaagtaagacatgttcctgatcttaagagaaatcttatttctgttgcaatgcttgatcatgaagggttcaaagtaaagattgaaaaggggctgttaaaggtgataaaagggtcagaaaagcttatggaagctatcattgacaatggcatatatgtactgcaaggatgtatcaaaagaagtcaagccaattcagttctaaaagttcctgatgatgtcactctcaaatggcacaggaggcttggacatatcagccatggtggtctaaaagttttgagtaagaaaggtgtatttggcaaagaacagatcaaggaattagatctgtgtgagcaatgcatcatgggaaaggctaccaaagctaagtttgg

SEQ ID NO: 331869 - DNA, 536 bp, Cannabis indica
gtgtcaacctaggtgcggccctgttatttgtgcccaaaacttgttgtttttcctctagaggacccatttccctatttttgatgaagaatgattcaatacaaaagttggatcttcgatcagatgcttagaaggcgcccaaattaacagattgtcaacgtgggtgctgggtgctctggccccaggccttgggtgctcaaaaatcaacttgctctgaatctgatcctaatgtctcaaatatgtttatggtatgtcaagtcgatgtctcaatgcaagtttaggccactttgcactaagacggtcccagaaaatgaaatcctagcaaaggatgtcaacctcggcaccgggtggaaaccctaggtgcccgggttagcttctaggttgcaggttcatgtaattttagctcctgtaccttgtgtttgattgctccatgtcttcatggtacagaatactaaaagatagtgagttggattcaagttattaaagtcttaacttccatcccggagatcccagagtcaaccttgttgggttttatgccc

SEQ ID NO: 331870 - DNA, 1313 bp, Cannabis indica
aaaaaaaatatgtgagagtaaatttatgttctaataaaaccattgatggaattctgattggtgactctgatgatcgttcctctaataatctgccttgttgtgattcatagaatattttcatattctcttgaacgattcttgcaacattattatcttggtccttccttagatcttcaatgattttctctaatttgtccaaacgttcttcttcaatctctttatgtttggatgataattccactgagatcttttttccaggtgtaggacctaaacctcgtaaccaaccgtattttccttcacctaacacctgcctatatatagcagcctcatcaactactagtagcaagccatcttcaaattgaataagtttatctcgtcgcaactcaaccatttcattctacaataacaataaaataatgaattattacttttacaaaaacgattaaataaaattactaacttttaaagttaacatacatatttttccttggctatttcgttgatccatccattctcaatcgtataatgagtttttcgaaacatttcgatctctccacacttcatagtttgttgttgtacttcatcacctatgctttgttttgatttctgtaatacatttaaataataaataaaattaaaatataataatattttaatgctattatacgaaaaaaatactacctcttcatgtaagtattgaataaaggattttgttccaccagaatgcataaaagaaacttttgctctatttttagaacctgcagctgactttttctacataacatatttcatgtcagtattaagaatttaaaagtattaaatgtgtacaaattgaagaaatattatgataccttccattcttcattagaaaaacagtttttacacatccattcccagtcttcgtctgttagcaccaactttttaggtcgattttctaatggatttttaccttcctcgataagagatttgtatttactgtggcatttgttacggtagcccctatatctctcttgacaatagtgattgcaaatagtttcgaggtatggatcttttttaaaatctatgtcaaagatgtcctaaaaaaaagataattattaaatgaattataaaattatagctttatgtacataaaaattgtattataaatatgtataccatgatgcgagcatatacagctttcttatcttctggaggaattttggcccaaccactatactgaagtggagcatgatgacgtacttttacaccaacagtgtttccaaatatagttgcatttggcccatacactctaagttcacctttcctataagaaa

SEQ ID NO: 331871 - DNA, 680 bp, Cannabis indica
acaatcatacatacaacatgcatgtacctcatatcacatgcaagatacaattcttacctgattttcgacttcaagtgtgctggccgacctgaacggaaattctcacgctagatggatgccctaatcacattaattgtaacacagatgagtgactcgctaaatcactttccggggatttaaactttaaactaaaagttcccctatcaataaataacatggcaataccctaaatctctcaaaaatgggaaaaactagggtttcaaaacctcccccaaccggcagaccggttcccaatcggaattccagttctgggtcaccaaccggtcgatcggttgccacaggtcccccagaaccggaattctggttctatgctaggaacccaaaaaattcttcccttgacctaaaaatccaaccaaactctaccaaaccttccagtatacctgtataatgtatatacaacataattcaaccagaaaatttcactacaaaccactaaatcaaaggatgccattaaagcccaaaccttgagcttgaaagctcaagcttgctcaataccctcaccacagctcaaagctaataaccagagctcaaaatcaactcaaaataaacttagaattcaaaccctaagcaaaccccaacctaacagccactatttctcaacttcataacctcaaactcaa

SEQ ID NO: 331872 - DNA, 806 bp, Cannabis indica
ataataatcaattaaaatataaaataaaattaatttgatatttgtttactatatttttattttagttttttaatggtattataatacttatgaaattggacatgaacaaaatattgtcgacaactttaaaaaaacataaacacaacacacacaaccttaatacatgtttaaacatctaattaacaaccaacaaacaactgtataacaacacaaaagcaatctaaatacatatacttatgacaattaaacatattattattttaatattacttggacaactaaataacaatattttaacaacacaataacaacctcactttaatatgcaaattaaatagatttgaacaccacattgtaataacaaaaataaaagctacaacccaatataaaaataaatagatttcaacaccacattgcagtaactttttgggttctcacaatacatacacaaccttaatatatgtttaaataatattggattaaaattgaacaacacacaaacaatcttaatacatgcttgaacaactatgtaacaacaaataataaacaacatgataacaactcctctttaatatgcaaatttagactcctcaattggaaagttttcactaacaattgttcactcttttgcttcatagaatcgcctctccataatcaaacataagatgaattctctatagtcattagtgcttggagctaccccaaggtactgataaagcatagagctggccaagcacacgccatcatcaccatactcgccagatgtaccacctaattcagcatagagttaactgcatccatttctt

SEQ ID NO: 331873 - DNA, 557 bp, Cannabis indica
taaacaatattttttatgaaggttctatctttcatctcaccatcatcgtttagtatgatcaatcattcttcttttgtagtgactcgagagatagcaacatataattgaccatgggtaaatacttgcttagggagatataatccaatatgtttaagagattgtccttggcttttatttattgtcatagcaaaacatggtgctaatggaagttgtcctctattaagcatgaatgaccattttgatttgttgggagacatgataattcttaggattgtgacgttttcaccaatatttattccaaaaataatgttagctctaatggaccatttcccaagatgtgtaacaatcaatcttgtgccattgcataagccttatgtttgatttctaaggagcattaatggaacaccttccttaagtcgaatgtcgtgatttggtatgccattaaatttcaaattatgcaaaatggtcttgctgaaaggataaatagaacttttattgaaagagtaaaagggaaagctaaagggtgtctggtttagacccttttggggagaagtctg

SEQ ID NO: 331874 - DNA, 632 bp, Cannabis indica
aattcagcatagagttaactgcatccatttctttcttttttaaaaaaaaaataaaaataaaaaatagagagagggagagagagagagagagaaagaagttaaaggagatttggtatgtttagaaaaagaaaaataaataggaaagaagaagaagaagaagagttagaaaaatagtgtgatgagttagaaggtgtagattaagatgaaaatgaagatgattatgtgcatgtaatggttgaagtacatgtgttaaggtgatagctaaggtttcgacagatggaatggaagaactgaaggtgtaatttgaattttcttgcatgaatgctctgttctcttactgttctatatgatattatattatataagagttgggtttctattttatctattgctctatgccttttttttttatatattaaaaaaccttctctatctcaaacacattttttattgattgaaatacttcaaacacaatcaagtttacggttctcattaatcaatgacgcacatcatttaacctccatctaacacacttaaaacaacacccaattcaactttctcacacatctccatataaacacaccaaatcctagagtcgtaaaaggagcattttttaagacatttcatcgaac

SEQ ID NO: 331875 - DNA, 947 bp, Cannabis indica
atggtcattggacaagagaagtaatccattttggactcataatttctacttctacgacttttcagttttaacatataagtatatcaagttttttaagtcattatgtttaatatggattggtttaccatcgtttctttcacattaacttttttcattatattgtctggtaataaagttttattttttgttattttgtaggttgttttgtggaggacctacaattacagagaattttctgataaattttattttaaatataatctgtttaatattgatttttcagcagttttaaattagggtgctagtttgttgttactagccaaagggtaaagggtaatacctttggctagttattcttagaaattttgttgttttttaatttattagtattgttgagcttgtgttttaggttgtgtgttaaattctaagtttgttttttaattttattttgaagattgccattctaatataactgtattttttagttttggtgttattatgttttttcagtttcgctacttctgacaacaactattataatggaaaggtattttttaatgtgacggggagttgtttgaagacgttatagttttattgtctaaatttccgggggcagttttatcctatgttgctcgctatttgtattatgcagctcatggtttgacaaaatatgcccttcggttagacgatgagctatcctggttcgagaagatttcaccgccgattgtggtttgttgcattgttaatcatgtgtgactctgttcaccgcgtcaaaaaaaaaaaataataatcaaggggttttctactaaacctcgtggtgaaaacaccctaaattaaatacatattttgtctctaatatatatactacattgtagagcttttcacaggctttaaaacagtatatagaatgtctaaaacagacactcaagtgaaaaattaagaccaaa

SEQ ID NO: 331876 - DNA, 623 bp, Cannabis indica
tttgataaaatagacaaaaataacgtttatggtattttcaaaattagtagtatgtttgcagttattattttcaaaaaatattagttcttttcttagtgtaaaaatatttaaaaaatttgattagacttaattggttaataaatatgtgcttttcttatatagaattattggtacttattttgtatttttaagggaagatttatatttattttattcatttaaatttgatttcttagtcaagaaactgtgtataggttgtagtgataatgtttatcatgctttcttatttatataaggtaactttactgaaaaattgtccaagttcaatgtatttatttgaacagactgactttttttttgggaagattttccatttgatggttgttggtttcttgattcttcttcaacgaactaaagggtttttaaagtgtataaagacacccttaggtcgttggttttgatcagctctcttcgcgtatcatattcttaatttttttttttcaaattatagggagtgtttctttattttgtgaagaactcgagtcgaacaagttcttatgtaacaccctaactagcataggcgtattaacatgatttttcaaaacttataatattacatacaa

SEQ ID NO: 331877 - DNA, 434 bp, Cannabis indica
aatgagttttatttatggcataaaacccaacagtgtatagaccggaagatcgacttcctataaatgcgagttggtcctaagaaccctgcagccttgataaaccaaaatagactcgcatgtctaggttctatcagctcgtcatgcgatgtccacaaaaggcgactacctaaggacgcagacatcctaaacataatcataaatctacgagtttaacatcagaatatgaacagtcaattcgcagattcagaagacgcatatgttgatgaatttagtaactgccgttcatttattaatattaacgttgtttagtttaattattgtaattcaatgtgtaaaaacggattgacaatgaatgcaatccccgtataactgatcggacacctgctttgtatataaaggggtgatccaccgtgaaatggcacctacgaaactct

SEQ ID NO: 331878 - DNA, 774 bp, Cannabis indica
gccctagcaaagttccgaatttttatgctggcagcatcatctccgagatagctgccgaaggccggaaccagctggatgtaatgtaagctgaaggacctaagggaacgggctccggaggaccagaacccatccgggaccgacctaggaaatctcctaagtttgaaaaataaaattccttcaaatgatctccccaccgggtcgagggcatcctaaacctataaagacgctcgtcgaaccctacgggcctaagactggcatactcgccaacagaaggaacataatgaactaccaaaggagacttaccgccggcgccggaagtgctggcaccaggagccccagtattcggctcttgaaccaaaggctgtggcctgggagcccttctctccgttgaatccccaatgtgaaggggcttcccggcaatcgcctgactccttctctccaccgggctccccacgcgaagtgtcttcccggaagccgcctgggccttagagtacgccttctcctgggccttccggtagagatactcctggtacttcttctctgccgtggcaatgatctcgtcccggaaggtcttctccgcgaccggcgccctcacgttgggacagataacccgggaaaggttagagtcctccacggattgatgcggaaggatgagttttgccttcctgcagttctccgtagtgaccagacccccgacgtcaagatcggcccagtcgtaagaggcaaaggcctgggctctccgaagaaaggcctgagtaggtgcagtccgttcat

SEQ ID NO: 331879 - DNA, 548 bp, Cannabis indica
cacttaagtaaatgttcttttgtttcgtacttaatatggtcatccgacctagtacgtttactggtagtattttcttaagtgttccccgttccaataccttagtactagaacgagatgtattttttcatcatacttacccagtttatatgctcctgattctagaacttcgaccacctgatatggtccttccaaattttgtcccagcacacctgtcgtgctgtctttggtgttcagaaatactcttcttaggaccatatctcccataaagaatttccgtgctctcacttgtttgttaaaataccgagctaccttttgttgatgggctatcaatttcaagttcgctacgattcgtttttcttcaacttcatcaagtgatcctgcgaggagtgcatgattggcttcttggttatatgtcaatcatctatgggatggcggttcgagttctacgggcagcatagcttcatatccatatgtcatggcaaatggagtctgtccagtcgttgttttctaaattgtgcggtacgaccataatgttgggttttatgccc

SEQ ID NO: 331880 - DNA, 1033 bp, Cannabis indica
ttcctacgaggaaaatatttatggagatttattaatcgtatatataactgtcggcgcttgaagatattgcccatttgataagataatcacaaccctatacaatttgattgggtatgaatataacaacaagcccaattctatttgttggaagcccattcgttatattgtgtatttggttattcaaagcataattaatggagaacagaccaacttttgtccattcaaattggaggccttaattctcgaagtccaaatgttcggcgtgaccaaaagcaagcacgaaatgatgtttggaattcaactcccaaatgcttccagaaaactcgctattgtatttctatttgcaaatgggcgagccctacgtgtgctcatttttttgcaaaattatctaataagttcgcaattatgcttatgtactctcaaagaggcaagctcaaacacttattttttgtatactaaaataccaagtatatggcaaactcgcgatagtgctcgattatttttacccattagcacatcgcaaatatggccaatgcctcgcttaggcaccactccgattcaatcgggcagcacaaacccaaaaggtttgctggctaacgtctcagaaaaatgaaagaatcgaaccctactcaaaaggttcggacgatgaattaattaccaaaggcaaaagacttttttgtctcattttagggcccgatggcccacttggtaaataccacccgcttatatatcgaatatataaaagtaaagaggcactgtacattagaggaacgagaaggaatcaatcaatgctcggacgctatatgtgcgaatagcccaacacctacaatttaccaggtgcactttctcctttattttaatcaagtccaatactttggtcaaaataatcattttatatttgatacattattattcgttcacttctaagagaaatagaaatgcatctgaatgcatggtgagctatatttttacatgtgctcattttatttgcaaaatggagtgaaacatgacacttatttcttgcataattatt

SEQ ID NO: 331881 - DNA, 1189 bp, Cannabis indica
agattttgtaactcggtagcatctccgatggtcgtttgggtgttggttccaggcggaacagttgtgttatgaatgccctggttgggtgcggaactgttattccaagtctcttgcacaccaggcgcgatttaatctataggagttgttacaccattccccaagtttgccggctgtccaggattaacccttgtgttttctgggttctgcaatgcaggatccaccctctgtgaatttgctggatcagtcaggcctctgcgagtatggaccatcgttagattttggataaataacaattcttgattcttctctcaatgaaagcaccaaaatgttgacctcacttttagccaacgacaacgagtctgatttagtaagcgataagtgatttatagcaatcgatatataataaagcaatataaagacacgagaattttatagaggttcagccccgagcagttcggtaatagcctaatcctcgttatttgtattaacttaagaacaaggagaaaggttccttttcttatagctcttacaacagtatctctgaatatgtattcttagatgatttctttagggtatagtctcgactaaactgtttgtgaccttttgcccaaagaacatgcatcactgtttatagggctataagcttggagaggaagtctttcccctcttcgttgcaatggatataagccaaaagatcgtgggattaatgctgagtacaaagatcgtgggattgaggcagaatacactgatcgtgggatcatgtgtatgccatatccctgcaatctgatccccaagttatagggatttcgctgaagactcacaatgcgaaagctggattcgctaagtgttggttgccttgcacggattgatgattgctttgctctgggcatgtcagcgaggcatcctgctcggactgttccctccgggttgatactccaagtggattccacgtgtcaccattatgcgatgccacgtcagagtgcaaaaattgggataacaccttcaaacaagggtaaatatgtcattcacacacaattttaaacccaattaatttttagattattcaccaataattaaagtgccaataatgcaattaaaattgcatttcgaaatacccggttgtgactatagcgagccaacctgtcaaaatacacatgaaaaatacaacacaggcatactatataataat

SEQ ID NO: 331882 - DNA, 1297 bp, Cannabis indica
acccccaagcaaggcaggtcgtggtaattcatttctctcaactaggcttcaagtagtttaccggcacgaacgacaagaccatcagcaagatagggcgttttgctgatgagtacttcatggtgaaggatgcgggcattacccggactcggttccaacagattccaacatatcaccgtcccccctcactcttgctcttagggatagagctcaaaaacttgcccagctgctgggaaaagaccagaatattatccagttgacctccgaggataacttcttgaggtacgggctctatctcgaggactttactcctaagtttgtggcggggaagaagaggaaatctggtgctggccggactgaacgagctcattagaagaatgaactcatttaacttaggcgcgaagctaagttgaagggaggtccaagagccaagcagtatgctcaggagcccttgaatcctgaagatgaagctgaggaagagcaggtgactcctctgaagaggaagaagaaactcccggcctcgcccaagcctattgaacatgtgattcgcataagggagcccatttcacctgttcagccatcccctcccatgttcagaaaaaggaaagctgtcatgtctgaaataagatcgatgtcaagtgatgatggacttctgagtcttgttcgggcagtcaccttgcatattactttatcttgttttgagctttttgactttcatgccttgtgtttctgatggctgtcttctaaccacactgtttttgttctgtgcagacatgtctcggcaaatatttgaggctctgaagaagagaatgggcgtaagctctagcgcctgtcctccgtccaagaagcgtaagggcggcaaggggtcctctactaaggaaaaggggccttccggggtggtcattgatctttccgaggagctgactactgcaaaaccctctacccccaaaactgtcaagtccaaggaagctggaccactaacggttgggtctgaactggcaaggagtgatcctgaacgggtgcgggcacctactccacctttgccagtgcttccagggctaaaatgggcaaggggatgctggcccattacatgaaccggctagttcctgaggtcagtgagcaactggctggtgctgataatgactcttctttggatttgctggtgggcaaagtcttgaaggagttcaccagggtaagcctttcttgatacttccctaatcttccatacttagctcaatatgctaaagttttctttttgtgcaggtcggtctgaagttggcttacacttactcctgggcta

SEQ ID NO: 331883 - DNA, 735 bp, Cannabis indica
ttcacacataaacctacttaggctaaagaaaaattaaggaagaagagtaaggagagataccttgaatcacaacacacaatttccactagaaattcctggaatcactaaaacaactccaatcctagctgctgccttgaagaatcgaaagaaagaaagagagttgtgaagagagagaagtgttcttcctaaagccttttccttaaaacctaagtaaataaattctatgatttttaattatattcatgacttaatattcatctactaacattaacaaaagacaaaaagtctaagaaaagactaatcatgcccttgactaacaaatgcaatcttaccaacacaaggggcaagttagtcaaattccaaaccccgacaaaacccagtatttcaaaacctaacaatgataccccgctaataataatattctaaaataaataaaatgcgactctctctaaggcccaacgtcactttccaccgcttccgagcacaatcacgaacattaaaaaatttacataaatagcataataaacatatatgaacttaaataaattgcacaatatacattttataaataataattaaatctcatgtataaaccctaattatttaatactccaaagtattaatcataagaggtctttacaagaatgattaccttaccattggttcccattacttattagtaaacatgccattaatgttggtgataatggtggaggttactcatagtaacaagta

SEQ ID NO: 331884 - DNA, 732 bp, Cannabis indica
caagtttttttctatttttttgaatcaacaaaaaaaattcttaataaatacagttcctataaaaaccctatttcgactaacgaaacaaatccaaatataactcagtttatttcgactataaaaaaatcaatttctaatcttaataagtcacagactttttatgacttatcttatttgtcacaagcatatgtcttttataaattatcacaaccccccttttttcacttttttaatttatataagtcaaaattaagatctgtctttcaatatcaatataagggaacatctttttttcttaagaatggaataaaggattattttgttggaacgcaggaaatttttaattccgaattaagacatagaaaccccagcaattatggaataaatcaatggaaaaattggttaaagggttattatcaatatgatttatctcagtctaaattaatacccccaaaatcgcgaaatatagtaaagaaaaactctatagttcaaaataaacatttcaagaaatttgattcaaacgaaaaaaatctattaattaactccgaaaaacaaaaaaaaaatgttaaaaaacaaaataaatatgatcttttatcatataattttattaattatgaagataagaagaccccatctttttatgaatttccattacaagaaaatcataatcaagaggtcctttataattacaaaaaaaataaacaaaaaatttataatatgttgatagatatt

SEQ ID NO: 331885 - DNA, 929 bp, Cannabis indica
tgtaacagaaaaatagaaaaaactagtaaaaccagtaaaagtaactaacttatactaactaactcttaacaggccccttcaagttggagcgtagaaatctcgaacgcccaacttggatacaatatctttaaagtgacttggaaagaggggtttagtgagtatgtcggctaagttggctttggatggaacatggctcatgcgaagaacaccttggttaaccttttctcgaactgtatggcaatcgatctcaacatgttttgttcgttcgtgataaactggattttctaatatatggatggcagcattgttatcacagtgaagagtggaaggtagtgtcatgttgatgtagaaatccttgagaattgaagttaactatgtgagttcacaagttgcatgagccattgctcgatattctgcttctgcggaggatcgagagatggtttgttatttcttagacttccaggagatgagggattggccgagaaatatgcagtagcctgttatagaacgtcttgtgtcgaggcatgcaccccaatctacatcggcaaaggctttgagctgaacagtgtcggttggagaagcataaaagaaaaggccttatcctggtgagttctttaagtaatggagaatgcgtgtggcagcttgcatatgagggagtcgaggggcttgaagatactgactaagtttattcacggcaaaactaaggtcaggtcgtgtgatagtcaggtataggagtttccctatgagactcctataaggggtaggattgtgaagtaattcccctgaatcattacttagtttgttattaagttccatgggagtagaaaccggtttagaactaagacatcctgaatcttgtaaaagttgtagagtaaagggtctttgtgaaactgatatcccttttgaacatcgagcaatctccaagccaa

SEQ ID NO: 331886 - DNA, 717 bp, Cannabis indica
tgattctggattcagttttgggtctaagtccttggttctgatcctggtcagggttcgagtttgtaattgggtttgtgtccaggtgtgtacaccgatctggttgtaggtttgggtctaggtaaaatttcaggtcctgagtgctggtccaagtttgggtctgggtgaggatctctgtcaagatctaggtccagcatttcaatcctagtcttgttattggtccgagtccaggttcgtatccgggttccctatctaggtccaggtctgtgtttggatcgggtcctagatttaggtcctggtccgggtctcagttccggtctgggtacacgaccctgtctgggcccgagttccaatctcagtttgggtttgaggctaggtctgtgtgcggttctatgtctgggtctgggttctggtgacggtcctagtcttgttctatggtcctggttcgacgattcttgttcaggttctaattttgggtgccacatttaggtctgggttgggtttttgttcttcgtctgggtttccgtcctagtctgagccccagatctagacaccgactactggtctgttcgaggccccattacccgaatcccaagtcaagatctggatcactgtcacaggtctcggtcttgttctggttcaggtcccaggtccgatttctgagtttgcattcaggatcgagactggggtgcggttctaggtcccgaccctggttctgtg

SEQ ID NO: 331887 - DNA, 690 bp, Cannabis indica
tggtaaaatattcccaacagcaacaaggtaccaaaaccactcgataacacagcactaggtctattcaaatttccaattactctacttgaaatataggaatgtgtcacaccggaatcaaacaacagtcgaaaaaagtaccaccaatagaaagctgacctatcacagtggaaaggccagcatcggcctctgcctgggtcaaggcaaatacccgagtaggaacaagtgtatcatccttcttttattccgatcgcagtagctgtgggcaatttcttttcatatggcctactaccccacactgaaagcaggccctagcttgacactcgccctgatgacatctcttacaccttggacattctggataggtctgccaattctcgtttccaccacgacggagaccttggttactttgaaacctcttatttggtcctatagccaacggatcattgggccttttcttatggtcattaggtcagcatccttacccgaactagcactagacgtctgcttccatgaatctcttcttgcacaatttcttttctagatctaatcttctacaccctcagcagcaagggccaactcaaccacctaagcataggtttgaacaaacctaggttgtttggcagcaacaatcacatctctagcaacgtgttcttctgatccccggatgaatttagctttcctagcagcctc

SEQ ID NO: 331888 - DNA, 939 bp, Cannabis indica
cctccgatcgagtctccaaggtcaccaaatctaaaaatatttttattccacaaaaagctcacattatattcacacattctatataaatttatgtaattaataaattacgcttatttatctacttatgaccaaatttataatttatgttgaactagattagtaggattataatcccactcattactatttgattaacccataatatataaattaaacattaattattcacaattagattttttaaaaattacagagagatcgtttattggtttgactttctaaatttatctcttactattcatatatatatattgatatcaataaaaatataagaaagaaaggaaggaaaaataataaaaaaaattaaattaatcaagaaaatatttattttactttaccttgaccattaataaaattccgactctaggacatttggtcaatcctaaatatctcgaaatatctcgataattctaaaactaaattatctcaatagtcctattaaaattactatctaaaactgttgtgaattttttttgcctctcatcagtctcaagttaaaaatatttttattctataaattactcacattacatcaacatatatatttcaaataaatcttcgtaattaataatttatggctttttataaacttagggattttttttttaattcatgctaaattagattagtaggatcatatcccactcattactctctaattaacccatatttagattatatgtcataattattcataattagatttttgaaatattacatgtacaatcatcatccgagacaagattgactctcgattagtaagcatttacatgttttagtactttatttaaaatagcatgatagggagcatgtaacgccctaaataattaggcacgctacccaaaatgattatgaaaccctaatcccctaaccgggatt

SEQ ID NO: 331889 - DNA, 1004 bp, Cannabis indica
ttaaatttttaataattagaatttaaattatagattgattattatagatattagatattttgaataaatattttatactaatattattaccttaattaattaaggtaaagaaaataaaggaaaatttaaatatttaaggtgaacaagaaaaattatttaatatctattaattaaagtatataaattataaaaaaaaaattaaagatataacaaaatatcataaataaaaattgatattatattgaaaatatttaattaatggaggtaaaatagtatctataacaataataaaaaattcaaattatttatatagtttaaatttagggcttagataaatatcataaagggcttgaatctacaccttgaattaagatttggacttgaattgtatattgaaatattattaaaacactttacaactaaattctccatattcatattatttagagattaaaattgagtctaaaattacaaaaatatgttttgataccagaataattaatggtaataaataatttatatagagtttatattgtttaataattttatggctacaacaaaataaaattttccatactcatattatttgagattaaaattgaagatataaattcattggaactaattaatatataaataatattgttacttctttcatatttaattgtccggtgtgcctttaaaaactacaaattctattaatatccttatatttctaaacttgttagagtttgactcaaattatttatttctttctttatttatctatatttgtaaagttacaatttctttttgggtaattattaattatgggaaaaggaaactcttggttgccaagttttgaaaagtcttcttaaggaagctttggaatgtcttggtctccaagctgtcttggtgctcaagttttgtaactttataaatatgtgttttttgtgagagagaggggggggtgtgtgtgtggagagaagaaaatagtgagttgtagaaagagaagtgtgtgagtt

SEQ ID NO: 331890 - DNA, 533 bp, Cannabis indica
agccagtacctttctctttctaattttatattttgctaatttttttttagttatccttagatttataggttcaatgtttttttttttctttttctttttaaaaattatccatattattaattttgattgataatgatcatgaacaggtgaatgtgtaagtgtattaatagtattatgttattagaacctttttattttaattttttctattgtgatatgaataaatattacatcatattatttataaattattattgttgttattgcagtacttagtatcatgttattagtctgttttagctttctctattgtcatattaataaattattaattcatcatatttttcacaatattgttattgtatgttgttatggtagtaatttagtttgttttatttagtaagaaaacctattggtagggatagtgatgactacaagtgaaatattatgatgagaacatctttaaatatgatcaagtgacgactataagtgagatacagtgatgataacggttttgaatcatataattttct

SEQ ID NO: 331891 - DNA, 714 bp, Cannabis indica
aattgtaattggatatccaactttttgtaattggattggattggattggattgattcagttcaattggattggatgatgcccacccctagtttatagtagttcactccttgtatcgcgacagtaatggaactacgtctactttgcgttttatttctcacgagatggattacagaaaaatgactaagattggatgctttaatttctagagagagaaactaaagagatctaacggtaaaaattaacttctgaggttggttgtcaatttttggagtttgagttgccttggcgggacccgctccaagtaagttgcaacttaaattctaactctcttggggtaaaatttgaagtcgataacttcagaattataattgaagtgtgagacatgacttgatagatcattgaaatagattcaaaatacaagttgaattaggttaatcagatcaatattgagtgagttatgaccattttactaaaggcttttctgggcatagtgcccaagttgacatgtgatgtaaacctggatgttggtgagtggaaaaacgtgtcagggatgtattttttgatgcctatgtgatattttgacatcaagtgttctgacgaagctggtcactagttctcagagatgttgttgttctgcagaaatgggagactgaaactattcgattttcgagtaaatcaccttgtcgaaaaagtaaaaatatgaagttgtgaat

SEQ ID NO: 331892 - DNA, 1376 bp, Cannabis indica
agtaaatcaccttgtcgaaaaagtaaaaatatgaagttgtgaatttgactattttgacttcacaactttcaattattataaaaatctagatgaacggtcgaggcagaaatcagaattggataagcagaacccagcacaccaggccattttatcaatgtgttgggtgcttattttggagcttttaggatgtcattttgccacttccaaggttcttgaacttgaggatgaggtctcctacctcgtttttgaccattttagagagaatggtctgagcagagttatcaattgagtgatcgaaaccagcataccaggttgattgtcaacctgggcgctaggctcatattgaatgcccttaggattgtatttttctccccaagtttacttgtatctttattatttctgatgatgggaaagattcccaaaacacatttttagaaaaactgactggaaatagcccaagttgacaatatgtcaacctaggcgctggacccatttctaagtgtcaacatgagcgctaggtctagtttcgggccacctaggagttccgtttgatccctggaaatagttgaatcttaatctttgcaaaaaatagagaatatgcctgaaataatttttggaaaactccttggagaattggcccaggttgacaaaatggcaacctgggcgttggtcccttgttttggcacgcaggatgggttgtctcttcctcgaaagtacttgtttccctatttttgatgaagaaaaagaagatgcatgagtaggatttttgatctgatgcttggaagtggcccagattgacaaatttttaacttgggcactcgaggtgccctggtgctcaaaaatgaaagtttttcgaatctgattctgatacctcaagtaggtttgtggtatatttagttcatgtcccaatgcaaagtttgacctattcgcactaagacgacctcaaaaattgaaatcctagttggggttgtcaacttgggcattgggtgaaaccataggtgcccaagttgatttatgaggtgctggttcatgtattttcagctcccgaggcctagacttggttgctccatgtcttcatggcttagaatactgaaagatagtgagttggaaaggacttattgaaatcctaacacccattctagagttctcggagtcaacctgggcgcagggctaaggaccccctcccaggtcgactgctatgactcgggactactcaactccgagatgttatctttcttgccacatgtcaaactttgatgtccacatcaccagggaaagtttttaggttaatagttatctaagggaaattgttggtttaacgattctttttatttttcgttaaagttaacggttaaaattaacactattaaattaat

SEQ ID NO: 331893 - DNA, 802 bp, Cannabis indica
gagacattaattccgctgcatcaatgtaaggttttcttaactttatatgtgcttattttatcgttttagaaagttcatacttaggatgttaaacaacatacttgtgagtagatctaagatcctggtaaaataatttccaacagttctatgagtgttacataaataattacaagggcaacttcacttatatggaagctcctttgcacgaggatatgattgcttggagcaaaaactattttcatccaaagtggtagatgaaggtacttcttcattccctcctatctaggttgacagggtcggccaagcagttgtcgaggcttcttttggccagggctttactggacaggccactaatgtggctgcccatcctggaaatcttgctttagagcctctagttgatcctgctttagagcctcttgttgtcctctctgacgtaactttgaacctgccgactccaaccattattcctaaagacatttgaagactttacttttttcatgcttttattttgcactttttattttattcttgtatgactctaacactttttacatttgaaaagtgaacgaccaggcagtctttaatcttagctttatcttcttttagttttgagcacatagctgattgggcaacttttaatcccgaacttatgcattttatgttcaccttgaagcttgacatttgcaccaacttaaccttcaattttttgcttagaaagcttcaattttcttgcttaagtatttttgtgcttgttcgatgatgtgcggtgtgggtgcccctaagtgatcgagcagacttatgg

SEQ ID NO: 331894 - DNA, 803 bp, Cannabis indica
catacgccgaaaagcataagtaccgaaaggacatgtaaaagtggtcttatcttgatcctccaatgcaatctcaatttgataatagcctgaatagccatcaagaaagcaataaaaaggatgcccagccacacgttcaaggatttggtcgataaatggaagtgggaaatgatccttacgggtggcagcattcaactttcgataatcaatgcacatgcgccaacccgtcacagtccttgtgggaacaagggcccctttgtcattttcaataacagttacacccgatttcttaggtactacctgaattggactgacccatttgctatcagccactggataagcgatgttagcatccaaaagtttcaacacttcagttttcacaacttctttcatggtggggttcagtcttctttgaggatctcttcgagggattgctccctcctccaacttgattctatgggagcaaattaaagggctaatacctttaatatcagcaaacgtccaacctattgcaggtttatgcttctttagtagcttgactaattgcatttcctgtgaaggatcaagtttggacgagatgataacaggaaaggtatcaccatctcccaagaaaacatgttttaaaccctcaggtagttgggctagcttaacagtgggaacctcttcagtagaaggttttggcttttccctttcaccaggtagctcttcaaatcgaggctgccaaaactttgctcttccgttttgtgagtctttataacaagaaatttcattaattgactcattaaaaccagaactttcagaaactg

SEQ ID NO: 331895 - DNA, 362 bp, Cannabis indica
gaaatttgcattttacccttgggtagtgactgatcgattttccttagtggtaaagtaaagcttgtcattagggttgtcattgaatcttcgatccgtgtcaaagctttttgacctactcctcgttgacttttagggatatacttaaaggttcgtttatggttagataccttcaagttctcctctttggactgaggagatttcacaagggatagtcgcttaatttgtggagagttttgtatgactgagttttcgtgatgtttgctctcctcaggtttccctttcaagatggtgacattagctggcttgtaaaattttgaatcagcataattcatgtaaagcctgcttagtttaatttggaaatt

SEQ ID NO: 331896 - DNA, 1590 bp, Cannabis indica
ttttgttttgtttaatgaaaaaagtttttttttttgtttttttggtatattacctgatcgatctaaagataagtcaagtaaaggattattagtcctcatcgacaaatatccaaattttgatacctaataccccatagatagttccaactgtataggaacagtaatcaattttagctcgaatggtttgtaggggtaccctaccttctcggatccattcgacacgtgcaatttcttttccgtcgatacgccctgcaatttgtatttgaattccttttgtacctgcttgttcagttaattcaatagcctttttcattgctttgcgaaatgaaactctattttttaattgtccggctataaattctgctagaatattagggtgtccataaggatttgctattcttgtaatagcaatgttaagtttccggttcatcgaatgtagttctttttttacattcatctgtaattcttccattttttgggggctattaataattttgggaatcccatatagattatgacttgaatcaagtcgatttttttttgaatctctatccatgcaatcccctcgacactagaagatattttcatatttttttgtacataattcttgatacaatttcgtattttttgatcttcttgtagatccttagaataattttttggttgtgcaaaccaaagagaacgatgaccttgggttgcaccaagtctgaaaccaagtggatttattttttgtcccacaatccccgctagtattactatacatataatgtatacatatactgaccttatgaatattaaatcttatataaatataaaaaatatatcatattcatataatatattaatataaattttctttttctacgtctaagtctttcagtacaatagttatatgacaagtgtgtctttttattggatagccccgtccccgagcttgcggttttaattttttcacagtgttgccttcgttgacctcagctttactaataattaaagtagcttcgttgaagcgcatattgtgagtggcgtttgctgccgcggaataaaccaattttaaaattggataacatgctcgatatggcattagttctagtatcataagtgtttccacataggaacgtccacgaatctgatcaataactcttcgcgctttgtgagcagacatagatatatattgtcctatagcatatacttctgtagatcggtttgtccttttcttctttatcataaggttcactcctcactaatgaacgataagcatctatatttcattttattattattatttattaactaaatattaactaacgacgagatctattatcattttttgcatgtccccggaaatttagagtgggtgcaaattctcccaatttatggcctaccatacgatctgttatataaatgggcaaatgttcttttccattatgaacagcaatagtatgcccgatcattgtaggtataatggtagacgctcgggaccaagttactattatttctttttccgcttttgtgttaagcatattcatttttcttaataaatgattggctacaaaaggatttttttttagtgaacgtgccacaattaat

SEQ ID NO: 331897 - DNA, 927 bp, Cannabis indica
atcttgaaccttaattagctcgagatcttctaattgtgcctttctgactctttctaatagattagattgaagtgttaagttatgcaactttccaactacgaactcaatccctgctctaacgatttcagaggctagttgagcggctatcagaaccgtgttgcaaacctgcccagggccctttctactcaaagcatcggccacaacattggccttcccggggtgatacagaatctcacaatcataatctttaaccaattccagccatctcctctgcctcatgttcaaatccttctgggtgaaaaagtagttgagactcttgtggtcactataaatctcacatttttcaccgtaaagataatgccgccatatctttagagcaaaaaccacagcagcaagctctaggtcatgagttggatagcgctgctcataatctttcaattagacaagaggcataagctatgactctgtcagctttcatcagaacacatcccagacaaatttctcttgatctgatggtaaagctaacaccggggctgttatcaaacgctgcttcaactcttggaaacttgtttcacacttgtctgaccacacaaatatctgatttttcttagtcaattcggttaggggcatagagatcttagaaaatccctcgacaaaatgtcgataataccctgctaaaccgagaaaacttcgaacctccgtcacagactttgccctcgaccaattcttcacttactcaatcttacttggatcaaccataatcccattctttccaataaaatgccccagaatgtacgtatcaccctgacccaaaagtaggcttaactaacaaatcaaagaaaacgaataacactcttgagattgaacctaatcatatcaggattaagatcatttgatctaggataaacatgtgatattgaattgaat

SEQ ID NO: 331898 - DNA, 655 bp, Cannabis indica
taaataaatgctttttttaccctagattagtgcaatctgttatgaatttaaatttaaattaatatctttattttattttaaatctttcacttaatgtttgttactatacgtgttttatttttcagataagttaaagttaatatttataaattattgttaattagcctcttgtttcttgtatggtttttgcactaacactgccttttaactaattcagatattacgaattggattcgcaacatcgaacagcatgcttcagataatgtcaaaaagatcctggtaggaaacaaggctgatatggatgaaagtagaagggtatgctacttttcattgcgacttgaattctggcttaaagtttattttgacttttttctgtcattatttgatcatattacctcctaatttgtaggttgtgcccaccgctaagggccaaggcacttgctgatgagtatggatcatttcctttcaaccaattatttttttcctctttcatttattgatttattctccctctctctctgatttttttttctctttttttcattctcagatttgaaaatgaaaaatgagaatagcataataagagtagcttgaggaagaatttttgttgttgcaggtataattctgttgtattttttttaatctatagggtttg

SEQ ID NO: 331899 - DNA, 531 bp, Cannabis indica
tacattatatacatataatcatgaaataaatcatgtgaaccatgcaacagaaaatgttatttctaatctttattaataaataaatctgattatattgaaatgagttttatttagggcacaaaacccaacaaatgtgtatgcgtaatatatgcatgctgattatgtgattcgtatactaccaacactagtgcggtagcagttttgagtgcattggtacaatgtatgatgttcaacgagtacaatacgatgttaccaacactagtaaggttaagtgcgtagtgtatgtggtacaacacttagtggtactcaaggtacggtacaaaccctaccagaactaatacagcagcggtacgtagtgcactttctatagtggtcgtaccttagttacgaacgttcatactcatctgataagccttgtagataggtgtatgggcacctagatataagtcggtaatacatatatattgtatgttatatgcttttcttactgagtttgttgactcacagattttgctttcatgtgtaggtaaa

SEQ ID NO: 331900 - DNA, 1218 bp, Cannabis indica
attttaaattttccaatccaatctaatccgcacaagtgcggatatccgcactttgcggattggatttgattagatcgtgcagattggattggatcgactattttatgaacacccctaattctacacacaattctcatcctcgagacttgtaccatcgcagctagaagaccttgtcgaagttaaacaacgacaaggggaacctctaaaagactatattcagagatttatggctgacgctaccaaaatcaaaggccttactaaagaaggcaggtatacggccacactgggggacatactcccactaagcaacttctggaaggatatcaggaggatatccactaacaacatgaaggagttcctcgatagagcagacgactttgccaaattagaagaagacggctttgtcaacttctaggcgggacatgtcaatagcaggcagtcacggagcaccgaacagcctcttgacccactaggcacgcaggtaggaaacaataatactgcccaaacctctagtggtaaaaatactagaaacaagcacaacaccaacaactttgggaggaacagtagcgaaaaggggaagtttaacacttctcccacgccatagaagaacaaggaggagaagtatacttacttcactctcctaacaaagaagcctaaggccatttttatggccacttaggggacagtcccataccaaatgccctttctaatcagaagggatatgggcaagagggacatggaaaagttctgtagataccacaacgacttcggctttgacactaatgagtgtcaaaatctgaagagggagattgagtacctgataaggcgtaacaatccccacctgcattgttatgtgcaaaacgaccaggacatccaatgccagcacccatagcaggacatctgggtgtcataataggcggcccccacattacttcagaaagctagggagtgctatgctcagacactcctacacgagcccaaaggtatgatcctattcctagctgtagaagattggagctctaatgtaacaccctaactagcctaggcgtgttaacgtgattttaaacttgttgtgcagctcgttgctaatcaacgaggttaatcaaaaacatgattaattaaaatttgcttatttaattaaaaacttataatattacatacaaaatatttcgggatcccgtttacaaaatacttcacaaaagatttctattcctttac

SEQ ID NO: 331901 - DNA, 896 bp, Cannabis indica
acaaaaattttagaattggggattagttgcaaaaacctagctacttaaggaggttataccacaaattactctatattggtatatatatattgttgacctcgcttttagccaacgacaacgagtcgaatttagtaagcgataagtgatttatagaaatcgatatataataaagcaatataaagacacaagaattttatagaggttcatccccgaggagtttggtaatagcctaatcctcgttacttgtattgacttaagaacaaggagaattgttcattttcttatagctcttacaacagtatctttgaatatataattcttagataatatctttagggtatagtctcaactaaactgtttgcgaccttttgcctagtgaacataaatcactatttatagggctagtaagcttggagaggaactgtttcccttctcgttacaatgtgtataaatagaaagatcgtgggattaatgctgagtacaaagatcgtgggattgatgcagaatacactgatcgtgggatcgtgtgtacgccatatcactgtaatctgatccctaagttatagggatttcgttgatgactcacaatgtgaaagctgaattcgctaagtgttggttgctctgtgcggattgttgattgctttgctctaggcatgccagcgaggcaccctactcggactatgccctcagagcagatactccaagtggattccacgtgtcaccattatgtgatgccacgtcagagtgcaaaaattaggataacatttaccccaagtctgtacgggacttccaaagttgcgtgtagacttcatctgagttgttcctgcctttggatggggacacatgttaagagcgactgtccgagactcgatgtaaggctgattgcgcgtgccttt

SEQ ID NO: 331902 - DNA, 707 bp, Cannabis indica
aagaaccagtcggttcatatagttggtgctccttgccctttttggcctctcgaagcaccggcagaggtggagtaggatcctgcacctgttcagatccgctcctgaccagctcagacccacccttcggtggttcgacctgtctgagcttcctccccgaagctccttggacttatcagcttttggggtagaggggttagcatttatcagctcctcggaaagattaatgacctctctagtaggcatcttttccttagaagaggacccctcgccgcctttagacttcttagctggaggagagcgctagagcttccgcccattctcttcttcagagcgtcaatcatcttctgagacatgtctgcacagaacaaaaacaacatgattagagaaaacagacatcagaagcataaagcattacagtcaagaagctcgaaaaacaagatgaagtagtatgcaaggtgactgctcggacgcgtctcgaaagtccatcatcacatgacatcgctcttattttagacataacgactttcccttttctgaacactggaggggacggccgagcaagcgaggtgggctccctaattcagatcgcatgttcaataggcctgggtcgggctggagttttcttcctcttaagcggagtcacttgctcttcctcagcctcatcttcaggattcaagggctcctgagcatattgcttggcccttgca

SEQ ID NO: 331903 - DNA, 725 bp, Cannabis indica
tgagagaagtaaaaagtaaaaagtgaaaagggttccccccataatcccttatatagtacatgtgggacccctccttcacttgctctacatacacaacaaagaaacaaataaagcagttagtttactatagaaaatgagatcagagactctagacaaatatttcaaaaggcttaaaatgcaacaacttctattcaaaataggctactatagttccaattgattgaactagtaagtccctatccgtataaacattagcacaaagacttaggggcaaatgctatcccaatatttgtccagttgatgtgacattgcttacgtgggcaaaattagtgcgatgtgacaatacaactcaccaacaagaggccaagtcaacaccttagcaaacgaggacccgctcaaataggacatcaagtgacaaaccagctttcccaaagaagctggttggccacccctagtcggccatatggctgtccagcctttgaacaacaccaagactggccagtctgcttcctacagatgtctggccggtcaagagaaggcctgtcaggattttttatgcaattctacatgtggaatgtgagttgggctacgaattgggccctaacaacccaataaaatagctaaaaaatatctatgtttaatggtattttgatattttgtaattaactaatttaatataaaaatatcttagggttttagttataaattaggatttaggctttcct

SEQ ID NO: 331904 - DNA, 1444 bp, Cannabis indica
tgatgcttggctctgccaggccgtacccaccaaagtaccacccccagtttctcaatttcactatcggaagctaacttagccagacctcgttgagaagttcccagactattgctacatatgcaaccatcttttctctgcacgtctgatattctcccgacacctagtttactaccagttgtgaatcgctgtagacttccactctttcggcccccacggttttttctaatcttagtcttgctatcaaatattcgtattcgacctcattattggaagccgagaattcgaaccataaggccgcctggagtcgaactccgttcggggatatcatcgccacccccactccgacccattctcgttggaggcaccatccacaaataccttccatgccaggactggcgatgtgggtatgttagcattagcttctgcttcgtggaactctgtgatgaagtctgctagcacttgcccttttatggaagtacgaagaatgtagtgtagatcaaattggcttagctccatctcccatttgagaagtcttccagacgcttcgggcttttgtaggccttgccagagcgggtggttggttaatactttgattgagtgagcttgaaaataaggtctcagctttctcgaggccactaggaggcaaaaaactagtttttcaatcactgggtatcgcgtctccacccctatcatgtgcttgcggacatagtacacatgatgttgagttttttcctcttctcgtactaaggccgcgctaacgacattctcgaagacagccaagtataggaacaagtcctctccgagaatgggtttcaataggattggaggtttggccatgtgctccttctcctcgcgttggaccattcaaatttctgacatttcttcaagatgttgaagaagggaatgcatttttcagtggaccgagagataaaacggctcaaggcagcaacttttccggttaagctccgcacatctttgtgtttcttgggggaaggcatgcttaggagaccttggattttctctggatttgcctctatccccccctggctgacaatgaagcccagaaacttgcccgatttgaccccgagagtgcacttcttcgaggtaagtttcattctgtatctccggaccacttcgaagcattcttctaggtcatccacgtggcttccgtatgccttcgacttgaccagcatttcgtccaagtatacctccatatttcgccccagaaggcctttaaacatccggttcaccattctgcgataagttgcaccagcattctttagtccgaaaggcatgaccaggtagtagtataccgccttatcggtcctgaagctagtgcactcttgatccgcgatgtgcatcttgatctcgttgtacccggcgtatgcgtccatgaaggacaataacttgaatttggaggtggcatccaccatctggtcgattc

SEQ ID NO: 331905 - DNA, 517 bp, Cannabis indica
ataaaagtaatatttaaattaaattttgcataaacatcgcttatttctccaaaaaattacagagagattatcagccattaaatggagaatccagttatatgtagatccaaaacgacggatgagccaaagtacaatcaattcaccattcaaactgccgacggatgagcctaaagtacaatcaattcaccattcaaactgctgagccgatgaaagattaagataacgtttcactatagttttatttttcataaggttttctatattgaaattttaactaataattcttttctcccattttaagattatatttttctattcattttcgttacataatatttagtataaatttacttaaatttagtataaaaattccaggatgaaaagtgcaaaataaaaatattacactattcttttaatcgtagtaaaagaagattagaatcaactattatggtgacttttagtttttttttttttacaatttttacaattacatatatagcgactaacataaaactat

SEQ ID NO: 331906 - DNA, 784 bp, Cannabis indica
acccttggttacccaccactggcacaggtgctggtggtaatccttgatcaactggggcaaccggatgccttaaatgttgcaactcttcttcttgacgaagtatgatactttgcattccttgaaacatctgctgccaatcagcaggaggattagaattgccagcccccgcaaatcccccgaattctgcagaggtggaggcggtgccggtggatcggttcgggcaaccccgggctctacttgctcgcgctgtggtctagatgattgcggagggtccataattagcacccctgtaatcaacaaccccagcgagttaagcgttaatatcacacttacgaacatattgccttaaaccctaactcacctatttaccccatataaatattcacttgatcaattagcatttaaagcatggcataacataacaaatatataatctagatgttgcatactacctaaaatggaaagcagtaaataaatgatcacacaaacagtaaagtatttactatcaatacttactgcaccatgagtcgagcttgtctctgacgaggatgtacatgttcggccagtctataggaggtttaaaaacattggcactctgataccaaattggaacgccctaaataattaggcacactatccaaaacctttatgaaatcctaatcccctaagcgggattactaataaccatagcgcggaatttaaacttttttaataaatggaatggaaataaaacttgtaataatttaaacttttttaacatttgggatcccaaaaatatttacaa

SEQ ID NO: 331907 - DNA, 583 bp, Cannabis indica
aaaattcttgtgtcttattattgctttcttatatatattctcattatgacatatcgtttattgattatcaaaaagactcattgtcattggctaaaagtaaagacaacattttggtgctttcattgagaagagaatcgcagatcgctcttttcgacattcaacacaatggtacaaactcgtagaggcctgtctgacccgcaaattcatagatgttggatctgacattgcaggacccagggagttcaagggttccacccgctgtcaatcctggacagacgggaaacgtggtgaatggtgggacagctcctgttactaaaactacaactgttgtgcaagaggctgggaagaacagttccgcacacagccagggcgttcataacacgactattccgtcaggaaccaacgcccaaacgaccatcagagacgcaaccgaattgcaaaatatccgtgttgtgctcggactcatgcagagtcataacaacactctgcatttgatcaagatgaactgcgtgctgcagtaaatctcgcgttttatgaacagaggcgtatgttcgctgaatggagagacaaagagatggaggca

SEQ ID NO: 331908 - DNA, 915 bp, Cannabis indica
taccgagaactaaataaactgactacaaggaaaaaataacctttacctaggatcgattatctttttgatcagcttcaggggaagacggacttctcaaagattgacctctgatcgtgctatcatcagttgagaatcctagaggaggatattccaaagactgctttccacactagggatggacactatgaatttctatcgagatctatcactattatatttgtttaacgaatgacaatcctttgggatttgtcccattaaaaacaacaagctgagttagaccaacaatgaagcttcgaaatttatactataacaataataagagaaaactacaagattcaatataaattcatacacattcagaaattatcataaattcagcatgtaataaagacatgtcaaaatacaaaacaaacacattttaagtaatttccaaggtttccaacaaacttatgtagtgtcccgttcaggcgagagtcaaagatactattcattgaatagagtagaaaactcatcaaaaattgataccattttagcaaccttttatttgatcaagataagaattcagcgttgtctaatttaggtgagagtcaaggccattctatcttatgagcttccaccattgtttcatactttgtaagtcctactcttagcagccactttacggtggacgttaatcagaataaaatacttacaataatacttatctttcgagattctacgacattaaattgctaatgaacgaacaacaattaggaatatctcacaaaaacaagaattgtgtagaaccaacaatggagatcgaatgtccttataactaaagctcattatttaaaagtctattttcatttgatatttattttaatctattcatttgaatatatatttatttaattttccaataaatattatgaaatt

SEQ ID NO: 331909 - DNA, 560 bp, Cannabis indica
gctgactgcttggattttcttcttttgtatagaaatcatgcctagatagatttgttgagatgaagctgactcggaggaggagaatatggagcatgaaaatgctccaaaattgatcctaaatgatagtccattaaagacagaccaacacattaacaatgatagacttgtgctttttattgttattatatttcatccacgtgacgaggttaatgcctcatcatgcacacttgtatttacatagtttctcgtcgagacacagatcaacagttagtacattttcatctcgcataagactgtctagttagtcgagttataaacatactatgctaactatgttcgtaacgagttattccatgtcaagtgtacttacgattgtgtgtttgagttcttcattcttcccagatggacacgtgtcttcttctaatgtgctcaccgaattttgggtataacactaggtttatcatagatgaaaggaattacaaaatttaccggttacaaactatttatatgatctattgacaattgaactttgattaaaattagatcattagatctgtcaa

SEQ ID NO: 331910 - DNA, 828 bp, Cannabis indica
tgggacatagcaagcaaaaaggattgcctctttgtaaaatggatacacatgatttatctgaaggatcaaaactggtggaactacacagctccacaagattgcagctggttttggaagaaaatagtagcagtaaaagacagattcaagcagaaaatggacatggatagcttcctacaacagagatatcgggttaaacagggatatcatgacttatttcctgaacaaccaaaacttccatggtgtaatctggtttgggataggttaattattcccaaacatagattcatactatggctagtattttggaaaaggctaaataccaaagaaagagtaagtagatatcaaagaattgacacagcttgtgtcctgtgtggcaaggaagaagagactagtcaacatttattttttaaatgtgaatatagttcaagctgtctgcagcaaactaaagacttactgcaatggaaaacaacagcagaagacatcacaaaattgttgaaagcctgccatcattcaaagagtcttactgcaacaagaaaaagcatggtgaacacagttgtggccagccttgtgtaccacatatggatggccagaaatgaagctctatggaaccagcaactgtggctgacctccacggctgtacagaaaagcaaacaactcagcttgctaaggattaaagccttccctcctaggaaagcaaaggatgaagacatggattggattgtgaaaatataaaatgtatatgattaaagttagtgacaggaaatagcttgttgagatgtaaattgctgtgatgtaaagtttggtttgagcaataaaataccttattca

SEQ ID NO: 331911 - DNA, 535 bp, Cannabis indica
ttcctctaagtgtattaaagaacagtaaacacttgtcggttgaccttgagataaactgattgagtgctactaccctccccgtcaaacattgcacttccttacgattcttcggtgattccatgtatattagggcctgtatcttttctgagttggcctctattcccctttcattaaccatgaagcctaagaactttcccgacgagaccccaaagacacacttggtgggattgagcttcatttgatacctcctcaaggtggaaaatgtttcatctaggtctttaatcaagtcccccgccttttttgatttcaccaacatgtcgtccacgtatacttccatattgcggccaatctggttggcaaagattttgttgacaaatctctgatatgtggccccggcattcttgagaccaaaaggcatgactcgatagcaatagagtcccctatccattatgaagaatgtgtgttcctcatccgctgggttcatggggatctgattatagcctgagtatgcatccatgaagcatagcacttcgtt

SEQ ID NO: 331912 - DNA, 1621 bp, Cannabis indica
aaaccttctgcacggtcaaggaattcactcgtcgagtcgactggtccattcttccttatgtccttccaaagctcaccaaggacttcaatgccccccaagtatcgtagacaactttccgtcctcagttactcatgaaaccttagtcgcctccgtcatgaatctgctgatgtaggctcggagaggctctcctggtcttttctttacttcgaccagatgtcctaggtgcaacagaagttggcgagaggaggaaaatcgggcatggaactctgaggagaaagccttccatgagctgaacattccgggcgccaacttcaaataccattgttgggcggcttctggcaggaaaaactctgcaacatagatctcctcgtattccttgtgatccatttgcatctcgaaatacttaaagtgggacaaaggatcttcctttccagtatacatcttccaggttggcatcttaaacttgtggggcaactcccgaatattgatctcgggggagaaaggggttccacgtgcttgatccaactcgagatcgttgttcctctgaccggcaaggccttggtacatattttttatttcgtccagatgtgcctgcacggctagactaacctgtttggcctcttggctgatctgagtcacatcatcatctttttgagcgggattttgaatgcgtgttctgggttgcaccattagcgtgtcaagctgatcgtccactcctctccttctattgagatcgtttctaagatcatgattcctccccaacctatcaaatatggaaatgcctggttgtcttagtgactggctggtttggcctatttgctgaccggcaccataaacttggttggagttattgggtatgacttctcccgatgaattattagacaaggactgcccgcctaccacttggcccacaagtggaacctgtgaccggggattcgacgactgaccatttatagtctgataggcttttcgtatcaacacagtggtttgccgactgcaatcatcaatgactgcttgctgagcccttaacgtttccatctgcttgtccctctattcgacaaacatgcacctctgctcttcaaacgcgagattcaccgcaacacggagttcctcttgatcatgatgtagggtgtttgtacgaccctgcatgattccaatagcagcacagaggttcaagatttcagtgtcatcactaatggttgtttgaacaattggtagcaggcggaacgagtgtgttatgaatgccctggtaggttgctgaataggtattcctagtcttttgcacaccaggcgtgatttcatccacaggagtcgtcacaccgtgacccgcagttgatggttatccgagatttacggctggcagaacccttgtgttttctaggttctacagtgtaggatccaccgcttgtggatttgctagaccaaccacacccctacaagtctgtaccacaatcgtacttgtgattaaattcagaataaagagcgatccttgattctgctctcaatgaaagcaccaaaatgttgacctcgcttttagccaacgacaatgagtctaattttgtaagcgacaagtagtttaatatgaccggttcgactgatcaggctgatactgtaacacgtc

SEQ ID NO: 331913 - DNA, 523 bp, Cannabis indica
ttaccaaacgccaccataataataaataaataaaaacgaataatttttagcaaaaaaataaaaaagaataataaaaattattaaattataaattaaaataatatattagtcaaatatatatcataaatatataataaaataatttatcatatttacatttaataaataattacaatagtaaaataaaaagatttgaataatataaaatcatttatgctaaataataatttaaccactaatttaatacaaatattaattttttaaattaatgatataaattttttagtaatttaaaaagaatatataattttattatcatattatttctcttaaaattaatttaagtagctattgtttaattaatattattttaaattttgaaagcttacgtatgataattcaaaattatacatttttactaattttaatgaataagtttttgataaaaaatctataagtaaatttgtaataattcttttattaaaattcttattaaatttaaaatatattaacaaaatcaaaa

SEQ ID NO: 331914 - DNA, 769 bp, Cannabis indica
gaaattctgggactcaacctggagaacatgggtcaccaacaaggtactgccaatgttcttcccaaaccaatagggaaggggcacatacaaaccccagtggggggcacacaacgaaccacacctaagggagaagaatgggatgcgaagaggcgagtgttacctcgaggcgcacgagaactcacaaccgatcaatgcgaggaggagaaagtacttgtcgcaataatgattgagaaagtacatgcacaagtaaaactacaagtcactcaaggacaaggtccctgagccagatgaggttcatgagtaggacaaagtccgtgagttgaacgaggtcagcttgcaattacaatcaaccggatctgcaagaacacttgaattatgaattagaaaaaacctgatcttcgccaacaactcggtccaaagaaaggggatccaatccaagagttggaggataagtttagaaggtatcaagtcgggaagcaaagaaaataatctagacatgactcagatgaggaactcgagccataccatccaggcatcatgaatactcctttcccccagtgattcaaaaatccccacgtctcgtcatatgatgggaccactgatccagtctcgcatttgaataatttcaatacaataatgcgagctagtaatgttacaaataatctacattgtattttgtttcccacctcactagttgaagtagcaagcagctggttcaataaatttactcatcactccatcacttcttgggaatagttgtctaaggact

SEQ ID NO: 331915 - DNA, 868 bp, Cannabis indica
aaaaaaaaaaaaactaaaatgaatacatgaaagaaaactaaaaaattttaaggtcactccccaaacttaattgacacatttcccaatgtgacactaaagattaaagaagaagacttatctggggtgcctcccaagagcgatgtcgttaacgtcattagcacttaactaacagttaaaatagtttatgcatgccatataaaacctttaatacactaactcaatatattccataagcttgcaatactcactatgctccacaaatataaatagatagataattaagaatcaaaaggtttttctaaacatgtaatgataggtttaggtacaagtagataaaatggtcatttaagcttgtctataccatcagcttctccaatcaaatcatcccataaatttttctcacaaacaatctcgatatctcttttttttctaatttaatgagagattattttttttctcaaaaacattgcagcaactttatttttattattttttcttttttttttcgaagttgacacttgttattagattttttttttttcaagttgttgtcaaattaattgttttcattctctcaatttcagtcttattcccgtacatatatcaaactttctattaaaattctcccaaactaaaaatccacttatggtataattaggatcaaattttggataataatagatttatcttgtttaggctccaaaatgtgtagaaacaaagaataaggttaaagctcaaaaagggtaactaaggtaaaaatttcaaggatgacttgaaaggcacaatcgatccaaagaatgtctaaatcactttcctaatcatgcattatttattattttgcttctaataggaagcaagcaagttctag

SEQ ID NO: 331916 - DNA, 604 bp, Cannabis indica
attgatgctatgtcgatatcctcttaagaaaggtcatggatgacgattatcgacatgttgtcgatatcatgtcgattgaaaagtaaattaactgtaaagaccgcctaaggttaatattttggattattaaataattaggatttaagcatgagatttaattcttattaataaaatacatattgtggaaatatatttaagttcatgtatgtttattatgctatttatgtaaattgctctatttctgtgttgtgttcggaagttgtggaaagcgacgttgggccgttagagagtcgtattttgtatgttatagcattttattattttccgggcatcattgttaggtttgatagtatcggagtttcaccgtaatatttttatgactaaaatgtccttagaagtctttcttaccaaatctttggtatttatttatggggtaattggtcttttagtttttattcttttattcttattattattttcagcctaataactaaggtatattaagtaataggaatagatattatctttattcatgaaaaagttagaaagccctagaaaactatcactcttcttcaacctccctctctctcttgctctcgatttt

SEQ ID NO: 331917 - DNA, 572 bp, Cannabis indica
acatataatatatatataaattggagataaaaagagaagtgtttaaacagctggagttccaggctcttggttcggttcttctgagccaactggaacaggaggatcaattgtttaagcaagagaagcattagcagcctggtcagaagcttggccggaagttgaggcagccgcccctttcccaccataagcaacttgggccgcacagtactcaaggtacatgtccttagcatcgcccaagtagtcgaaattggcctgcgaattagccttccagaaattgaggaagagctcgaggccggcagtctccaaagcattgaccttctccttcaatatattcgcctcggtcaccttggcgtccctctcatcctgaagactgttaacttcaggagataagatctggatggtctcctcaaagcgatcagtagcctcgaggtcctttgttagcacggagatcttcttctcggcaccaaaaagcttcttgttggctttgcccggctcatgctgaacagctcgagtttttgccctggcctcctcagcttcctctttgccaagtctgcctctgccctcaaggtgtc

SEQ ID NO: 331918 - DNA, 693 bp, Cannabis indica
ttaacggcaaaaaagttcagggggcacgatttagtacatgtcaaagttcgggagaaaaaattacgaattagcctatttttaatatattttatttatataaaaaactagaaagttaatgagagaaattattaaaatattatttaaagaataaattaatactttataacactcaaaatagtacattaaaattaatcttttttcataacacgagatcatgagctttcatgtggtacgagcacaacatgcaggacctgacaccacacgaataattatgaacttgtacacaatacaaaaaatataaactttatcccaacacgacaaacatgaaggcattacacaatatgaatgcacgaatatattagcatgaaagtgcaacacaagcacaaattaaatccgtaaatacctatttctatatattttttattgaaatgtcttatatatacatttttcagttaaacaagttaagatttgttccttaattttttttttgaataacgttccttaatttttaattacactaaatttgatatttttttttaaaaaaaaaattaaaaatataagataaattttcatataaaagaatgaggaacataaaaaatttaaaatcttgttttatataatcgaaactagttttttgatgaagtttcttgatgttaggttttttttggcaatttagttgtcaaaatataattt

SEQ ID NO: 331919 - DNA, 791 bp, Cannabis indica
gaaatgggagttgcttttatccataaggaagagaactctaaagaagttgatttgtctgaatcttttacagatgctaatctggcccttctggcgaagaattatgctcgattcttaaagaacttcaagaaaactaatcctagcaataaggaaaatacttctggaaggaacttccctggtcctaacagacagtctcaacaatcagaaaagaaaggaaaagggattcaatgtcacgaatgttcgggttttggccacatacaggcagaatgtgcaaatactcttaagaaaaagaaggccttggctgttacatggagtgatagtgaagaagaagaggcgagtgatgaatctaaggatgataagtctgtaatggcatttatggtcagggaatctgtccctgaagaagttgagggagatgacactttgtctgattctgaatcaacagttgatgagaagaataaggcttatgaggaaatgtttgcacaatggagctatatggctaagagagtgaaggaactacaggatttgaacaaagctcttgatgatagtaaatgtgaactagaagataaactcaagaagctgacgttggagttgtgttccaaagatagtgagatatacaaattgacttctgaacttgtgagagctaagcaatctctttctcatgttccctcgggcactgctgccctgaatcaagctctccaaaatcagaagccgtatggagacagaacctctattggatacaaactgttatacaatcaaggtcatgatttgactattgaagataactcagcttcatc

SEQ ID NO: 331920 - DNA, 985 bp, Cannabis indica
ggcatcgcataatggtgacacatcgaatttggagtatctgctcggagggtacaatccaaataggatgcctcgctggcatgcccagagcaaagcaatcagcaatccgcgcagagctaccaacagttagtaaattcatctttcgcattgtgagtcatcaacgaaatccctataacttggggatcagattacagagatatggcatacccacgatctcacaatcagtgtattctgtatttatcccacgatcagtgtattctgcattgatcacacgatcagtgtattctgcatggatcgtgcaatctttctatttatatccattgtaacgagaagggaaacacttcctctccaagttcacaaccttataaatagtgatgcatgttcactggtgattacagctcaaatttgtatattttaagtctttatttatgtacgtataattaatataaattaaatattccttatcttttaatagtaaaatttatttaagtggaaatatttaatttattttaattttgtgatatttttcagatttgagtatattgttataagttaaaataaattcttaagccccaagtgtacaaaaggccaacatgaaggaatgactttgtggtcttttacttgaagacataaatatgtatatgcacatacatacctacacccattaatttccaatctaaagttgggttttactttcttaagatattttatgggaccacgtgagttgaagccaaatgttgaccgagtccaacacacccattttccccatcaacaaatggtgcctcttaccatgaatgtggtatttaaacgtgaccaactattcccacattctccatctgttaatgcgcggatccatgttctcctttcgttgaaaaatccatgccactaactcaatacattatacacgaaaaatatcaactttgagaggaggctttcactataaataggacccaaaaattaatgaaaaaaggggtatcagattttagag

SEQ ID NO: 331921 - DNA, 592 bp, Cannabis indica
tatatataaataatatattattattttattaaatataaataaatagtgatccatgaatttctcataaagtaagaatttagttatataggcacactttatatagaatagatatagaaaacagacaccacttcttctactgctgaaaacttaattattttgttacacgtgtataacgttttccataacaaatttttttgaataaatttccgtaacaaattaaaaaaatatctattctttttctttactaattttttttaaaaaaattgttaaaaacattattttttttttaaaaaaaaagaattacattaatttttatgttcaaagatatttttttacaccaagatatttctttttatatgtttatggtataaaaatattacaaaaataataaaacaactacataaagtataatattcaaaataacatataaataacaattagttaacaagagtactataacataaaaatatattcaaagaccgtattttttataaataaaatcgtaaaaaatcgtaaaaatatttaaaattttgtacaaacatatttttgtaatttttttattgttttatgtatttgtaaaataattcctaat

SEQ ID NO: 331922 - DNA, 716 bp, Cannabis indica
atagcatgaacatgagttcatgacaactcagaatttaggccgatttgctattgatcatcgttataatatgaattaggtctttctgataaacgacatgttataaagacatcttcattcatatcgatctttgtcagatataatatctattatatacaatacattcacttagatatctcactacatcagtaatttgaaccaagattacttgcatcttagaatggacatcaatgaaccgtactagaaaccgattaaagattccataactttaatatgttgctgattgttttatatatatctaagtgatcttagttctttgtatagttacaagctacaatctcatatatgaataaagaattttttgatatttaatgtaaattatttaataataaatattaataatttaacattcaagcatatatcaaaatgttcaactctttattaataatcataaatgtctttataggctttttaggacataaaccccaacaatctcccattttctctaaaagcaaactgggcatctcccttagttcatatgaccaataaaagattttacttgtagcgtctttatgaatagatctgccaggttatgtttcaacgcgatctgcaagactgtcatatcacctctctctattataactcttagtagatggtactccctctcaatatgtttgcttctcttgtggctcctgttggaatttattttaccaggatct

SEQ ID NO: 331923 - DNA, 512 bp, Cannabis indica
ttattcttttatttttaagtatattatgttaaaccaagaaatgcggttagataggcacttttaatatataaagatatattgatgatattgatgagaaaattctctttcgtagtaagaatgcaaagcactaataaatattttagggggcacccatagtgattactacattctgtatttgtacattttttttttaaaaagtcgtatttgtatagttagctttaattagtcttataaacttgcaaatctgatataaaataatagtaaagtcaatttataagtagaccaattataaaaaaataagcataacaagaggctatacttattagatctgtaataattaaatatgttaaatttgaatagttagtagagatatttatataatttgttcttagtgatatataattatggttttttttattgttctgatcttattaaaggccacttgcagctacacagttaaaatagtaaaaaaaaaagaattgtaacaaaattactcagatgttttttttttt

SEQ ID NO: 331924 - DNA, 648 bp, Cannabis indica
tttaaaatatcttaaatatcaaaatatcaaatcttataattaaataataaataattattaaagaagttaacaaatttttaaatctgaccataataggaaatatttaaaattggaaacattgcaaaatagaaatatttaaaaattgaaaaaattccaaattgaaaatatttaaaattggaaacatttcaatttagaaatatttaaaaatggaaaaatgaattttgggaaacaatcccatgaaaaaattgaattttggggaaaaatcccacaaaattcgatttttgggaaagggctgccgaggaggctgccagtagcccctcacgcgcgcggacggagtgtcatggacgagaaacctcggcgggagcagggtcccgtgtgcggcagacttcggcgtctgcagggtgcacacccaggctcacgcgcgcgcggatgggatggtgaccgaagcacctgggcgtgcgattgagcatccatccatacctgaaatccaattttttcaaaattcataactttttgatttttcattggaattaagttccgtaaaaacaaaaattgcttaatttttcacaaggaatccaaataaaatattttaaaaaatcaaaaaatatttttcatggaaaaaggtactgtacaacatcaacattcatc

SEQ ID NO: 331925 - DNA, 788 bp, Cannabis indica
tactggtttgaaaccatcagagtctgctgccaatgctttttctcctctacttttttcgttttcatcacccattgttgctgtgtttgcaccccagattttttcctacaagcttcagcagtgtgtcccaatcctttacagtgtgtgcacaaaattggtttccactcgtatttaactcccacagaagcaataaagccatgctcatcttcaaattcgatcttttccacaagttcttgggtcatagacacttcaactaacactcttgggaaggttagcttctgcctatgcttggttacttcatctaccaaaattggttcaccaatctctcctaccaatttgaatagagtgttttgtccccaatacttcaaatcaagattttcaagctgaatccatatagggactttgcgtatatcctcctttctgaaattcaggtcaggatgccaagccttcataatcactggccttttgttgaaaaaggtatagcccccattcagaacagagtccctgtcctcagaagttgtaaatctaatcaagaaaattccatatgaaatgagcccaaccttatctactttttctttccaaattctcctaacattataccgtcgtacttcgtcttcaagaaggtgccatcgatactcaaaacaggacgacaaaaagaaaagccccttatacatgcaccgagtgatataaaacagtacttgaaccgctcatcctccaaatacaagtcagtaatggtacctggattcttctattctagcatgtacaagcatccaggaagcttcatgtatgaa

SEQ ID NO: 331926 - DNA, 53 bp, Cannabis indica
gatgtgtgtggacactactcatacactaaggatttcaaaattatcaaggaaga

SEQ ID NO: 331927 - DNA, 837 bp, Cannabis indica
tactttcaccactttgccatttcatcccaagaacactttcgagagaaaattccagaaaccatagattttttattgctatttctccgtcgctgtcagtctgcgttctatcgtcgatcaacaccaacccccagttttcaaccttcatgtaagtcttctgggtactttatgtttttgttgttcatgtgcatgttagggtagaacttttgggtaagtgcttgatttttgggaaatagatttggcgaaaacggtcgcatggtgcatataccctcttcttatttgtgttttattacttctctttcttctatttttgcaatagacccctctgtcgaaagattacttaggatatgagacagtttttgttcccatgttctatgtttttcattctccctctgctatcgctgcttttgagatattttcctaggaaaatccctagaatttccatctttggcaaacatccgaagggggcctctttccagcggttaggggacccccattccctcttttaacactagggtttggtttgggggctaactgctggatttttccttttacggaactaaatgtctaattctgcgtccgaaaccaattcttcccgcaagggggcagttactcttgctaccctagaggaagtgatgaagggccctgtcgtcaaggagaactacacttgtcgatcgaatggttgggaggtggatgaacttcgctcaaacttgacttgcgcccactagttggaaaagattgtgaccgtggttggtaccaagccgtccgcttctagggtttttcaccgcctgctcgagaggaagagacgcccaaccacaactacggtggttttggagcttg

SEQ ID NO: 331928 - DNA, 824 bp, Cannabis indica
aatctcggaggacaggagaatgcatcaccaaaccgtacctataagtgacattatgacaccaattcaatgagacaaactctaaaacgatgtcgagccaaccaagctgccatggtttcttccttgtcagaagaacttgatccaattcagtctgtttctgctgctgctggggtagattcaactgaagctgatgacaactccgagcaatcccgcgccttgccatgaaaatcattagttggaatgcatggggtttggggaatccgagtgcattctgtcgtttgcgtttgcttgtcaaagagcaaactccccatgttttgtttctcatggaaacaaaggttactgttcattctcttactcgttttaagcaatctttgaatttcaataatgggttagaagttcctaggacggggttgaagggtggaatcatgttgttgtggaaggatattgtggatgtaactcttctttcaatgaatatagattattttgactgttatttatcgtgtgatgatggaccccgatggcacttatctcttgtctatggttttccggaaactgaaaataaaaagcacacttggacactaattaaacgattacatgatgtttctcctcttgatccttggatggtgcttggtgatcttaatgaaattttctctcactctcataaaaatgggggacctttaagacctgacgcacaaatgagtgcttttagaactactttggatcaatgttgtttgaatgaattgcctttttttggtgatgattttacttggtctagaagtaggaaaaatcatgctgctcttaaggaaagattggattggtgctttgtg

SEQ ID NO: 331929 - DNA, 1026 bp, Cannabis indica
ttttttacttggtgtaataagcagttaggagatgaaagaatctattcaaaaattgatagagttctggcaaatcctatttggcttgatgagcatccgaatgcggaagttatttttcagaatgagggcttgtttgatcattctcctgctgttctaactgtctcggcctcttttattggaggcaagaaaccgttcagatactttaggatgtggtcttcgcatcctgaatataataagctgattcgagataggtggatagagaaggattgtggtacaaaaatgtttcagatagtgaccaagttaaaagggctgaaaccgaaacttaagcagctgaatcatcagtattttgctgatattcctgctgctcatggtaaggccaaaatggagcttgatgattgtcaaaaggagctacataagtgtccattgaatgctgagttacaggttcgggaagctgctgctaggactgaatttgctaccattcaagctgcttatctttcttttctccaacaaaaagcaaagattttatggctcaaagatggggactccaattcagctttttaccacaatagtattcgtgctaggagaagtcaaaatcaaattctttctatcatggattctaatggggtaagagttgataatcctcatcaaatttctactttgttcttagagtactataatcagattttgggaagcaaaatggtgaataggaaatcggttttggaaggagttatgaggcaaggtccgattttgtctagccagcaagccgatatgctagttatgcattactcaagagaggaagtcaagcaagcaatcttcgatattcctggaaataaagccccaggccctgatggatattgtagctttttcttccaggataactgggaggtggtgggagaagatgtttttgaagccatcacctctttcctgcattctgggaaactccttagagaggtaaataatacggctttgactctagtgcctaaaagtaagtgtccaaattctgttggggattataggccaatagcttgt

SEQ ID NO: 331930 - DNA, 587 bp, Cannabis indica
tttttagttataattttcgtatttcttttttcctcattaaaaatttatttagtatcctgtctcaaataatattttttgcactttagccctctcacatactttatatccaaagttgtaaacgggtgattgttgtgctaacccaatacatatattttttgggattttaaaaatacgagtcgtgccgtgtcaaactataaataaaaaatatgggtcatgtcatgccataaaataataatggtcgtgtcgtgtcatgcaacaattctatagagtaggctcgacacagcccgcaataggagtgtttgcagtgtgagtagtgcggtttttgaccattttttcaaactaacccgtacatgccggttttttaatttttcaaaccgcactggcaccgcgaaactaaaaaactatagaaatgcacttcaaaaaatggtgtggtgctgtgcgatttatgcaatttctgcggtttgaactatcactaaataattaaactatcacaaatacaataaagtttgagtaacacttgtcaaaaataccataaaacttaaaaataaatatgaaaaaaaaaagtttcaagtttcaacaatacaata

SEQ ID NO: 331931 - DNA, 1060 bp, Cannabis indica
  modified_base (1029)..(1029): a, c, t, g, unknown or other
attcgagattgagttttcaagaggagatgtgacaggcggagcaacgtcagagttggtggcggctgtcgatgatggatcttggccatggtggacggtcggagatggcagcggaagggaaggagcttcactaatggaggcggtgacaatggtggaattagttgttcttggagccatgggagaagagagagaagtggtaatggtgaaggggcggctagggttttatcgagagtagaaggtatatcactaatgagaaaatacttctcttattttcatatattggcaaccgaatatagtggctgctagaaatattatttagggtttgtttacaaagtaaagtgtctacatatacacagtaaaagcaaggcccaatggaccggtattgggccaagagaaaaagcaatttctatttctaataattttcattctattcctttgtttggttgcatattaaagtattagaatatcattccaatgaaatgatctttctaccatttcggtagaatgacgtactattccattttaaaatagaaagaaataccattccaatacatgacgagaacaatttttataattttttattgatttttttaatacattttaaattttattccaattcatattcacattctcattctcattcctatgtttttattcttcccaaccaaacgccacctaagaagtttaatgattagtatatgattttgtgcctcttagtaaaaattagggcttattatcagaaataaatcttagaaaaatattttctctattacggagatatcactattacaaaattaactttttgcgttagttgctattgacactactttgcgtaagttgaaatagagatttttagatgttacgtcagttggaaaccgatgccaagtagcgttagatggaaaccgattcaaataaaacttaaaaaattgtaatagttaatcgaccgaccgatcacatgtacctaaccctaatacaccatatatcataaaaccttgaaatagctaccccctttagctctctctctctctcttntctctctctctctctctctctctctctctct

SEQ ID NO: 331932 - DNA, 453 bp, Cannabis indica
tgttatggcagccaggtcaaggtgtctacataaaagaactggagaataatctatacctatttcaattctaccatgagatggagttatggaagggagtccgtagacatttgatcatgtttcactgatttttgaacgccttaaacaaggagacaatccgcgatcagttgttctaaacaagttggatttttggatccaaatacacaatttgactgcgggatttatgttcgaaagagtagtccgtgatcttggaaactacataggcacatttgtgaaatcggacccaaacaatttcattggtgtttggagagactacttaagggtccgtgtgaagattaatattgacagacctcttaaaaggaagaagaaactcgaacgaataaaaggtattgttgggttttatgccctaaataaaactccatttcaatgtaattcagattattcaatatcaataaa

SEQ ID NO: 331933 - DNA, 834 bp, Cannabis indica
tgtggctgtatgaattaaactaatattggggtatgtttatggtaggttattgagtatgttggagatggttttaagtggtttctatggctatttggtttgatttgttctagttgaagctaaaaagttgagtttcattcacttaaagatatgattttcattcaatgattgaattgttgtgttttagaacttgggatatgttgtattattgtaattatactatttgtgaagtttgggaacaattggttaggtttggagcaagttttgggacattgaagatctgaaattttggagtttctgctgtagtgaaccggaattccggatggtcaatttttcaggaatcgccaattttcgtattttagccataacttttcactcgggtgtccattttagacaatctatataccgttttgaagcttatgaaaagctccacaatatgagatatagattaaagaaaaatatgtattttaatttagggtgatttcaccataagttttgtttagaaaccctaggtttattttatgtgagttttagacagtgtttttgaatagacccttattgatttacatttgtcatgacataggacccgaaatggtcgagcatcgttccacttaggtcggcccacatacttgactttggacttgaggtaagaaaaatattaagatatatggtaatgttatgattgttacagtctcgattatcatcaagatcctggtatgtgttcattaggacttaatcttaatcgaggttaacgatatgtatttgttgtgactcgatggtaatcaaggtaatgatgagaaacaattattgttgtttgtgaattgtttatgattgagg

SEQ ID NO: 331934 - DNA, 764 bp, Cannabis indica
ttccagccgacggaagacagttcgaagaactcccctttcctcttgaaggctattcacttctgccgacaaggtgctgatggtagcttcaagctggtcggaagcctcgaggtccttagtcagctcgactattttcctctcagtggtgaaaagtttcttgttgacttcacccagctccactcggacagctccaagttccaccctggtgtcatcagcatccttcctggccaagtccacctctgcccttatggtgttggacatgacagcgttcttggaggcagcagatttagctcgggaataggtgtaagccaacttcaaaccagcctacacagagaaaacattagagtctaaaccaaataaagaaggattaaaggaaactgtcaaaaaagacctacccttgtaaattccctcaagactcctcccatcagcaactccagggaagattcgttgtcagcgctggccagctgctcactcacctcaggaaccaatcggttcatgtaatgggcaagcatctccttgcctttcttggcctctggatgcactggcaagggtggagtaggagcccacatctgctcagatccgcccttggctagctcggatctgtcctttggtagctcaggcctgtccgagcttcctcgcagagaacctttaaacttagtaactttcggagtagaagggtctgcgatagttagctcctcgaacagatcaataacctcctcggtcagtgccttttccttggatggggtcgcctcaccgcccctagattt

SEQ ID NO: 331935 - DNA, 532 bp, Cannabis indica
atattggggtccacaattaaattaattcataaatgataataaaaattagtgctaattgcctttactaatccatatactagagcggtcattacacttcatatcttttaaattgataactaatcagattgtaatgagttttatttagggcacaaaacccgacactaaattagtatttaattttgatatgcttggtatcaaaattattgaaaattaatcttttacgattgaattttgaaaacttatgtacttaaggagaaaaatggtcaaaaagtgaacactaaattttgacatgcatgattcacatggaattaatagtgagaagttatagcaaatcgcttaatctctgtaaaagactaaagcaagaattttttagggatgggacctaaatcccttagtgttttgctaattgatggtaatctatcttaaaactagtaaatatctagtcttaagttcaataggcaataattaattagtcaatagagtgaatgtggtactcaattttcccatctatgaatgagtacatgtggtaaaa

SEQ ID NO: 331936 - DNA, 555 bp, Cannabis indica
tcagggaattaaacttttgaacatataatcatgattatattccattgtgctggcgacactataatcatgaacaaatacatatattctggacttaatagaatttatacattaaacaatcatgaaataaatcatgtgaaccatgcaacataaaatgcagtttctgatctttattaattagtaaatctgattatattgaaatgggttttattagtaaatctgaagtcattgtgacttggtatccaggggtcctttccactatcaacaagaaaaccatttcaaattttatacctaagtcctttatgtagtaattacttaccccaacaaattcttttccaagtcaaagatggcgagtgacctatgttttcatcaagaaaagaacaatttgaaaagtacctatgcttgagcagtcgacttagcaaggtatcgggcatatcaaagatcctccatgcttgttttgccaaaagtgcttgattaaagtgaacaaatgatcagaatcccataccaccttcatgctttgatttgcatagagattttccatctcttccaatgaatttt

SEQ ID NO: 331937 - DNA, 732 bp, Cannabis indica
tttacttaaatagtaatactttgatttcaactgagtacccatattttgaaaattgttatttttttttaaataaagacaactttagtactttgacttcagttcatttatagcattttattttaaataaatgagggcgttacaaatagtattagagccacagttacattgatcttgaattcacacgaaatacacaccatcgctgcaaaggatcaacttgtcatcaagtaagtatgctttatttgtgttatgtcttatatgttaagtttggttaatttcaatctagtatttattttaggttgtgcagagttaataatgaatccaaacgtagttgagacaattaagggcttgagacggttgttgacatctaacgagagaagtaaacttaagagaataatagaggatatggataaaattaatcaaggcatggggtaattatgaggagagtgtgtgtgttattaatggcactcgagaaatatatacttatgtcacactcactaaggtctgaggaagcaagaactcacctagatcgaatgtggagacaagtgaacggagttgttacatttcagaacataacaagtataaagagtcgtttgagagattcctcaacactttctctgtcttggttgtgcgaatgaatgagcaaggtgtgagaaccttgctcaaccataaactgggggcagaatatcatgattactacattgccaacatcccaaagacaatagttgacattta

SEQ ID NO: 331938 - DNA, 1538 bp, Cannabis indica
ttaaatacttacaacttacaaacattcattcgtaagggaataatgattatttttctcatcatcagtgatacataaccatatatcaataattttcactttaaacaaaattctcactacctttacaaatacaataaaacaacaatatactatggtgtgaaaaaaaggatgaacaagagagtttttttaagctcaaaaggttcatgtataggattaaaagaaagacaagattttaataattaatctcaaattaacaagggaatcaataaatagggtaggcttaaaaagctcaatcgatccaaaaaaaattacttatcatatatcaaaatcatatgtaatttatgaattttatctcaaataattatcaaatatgttctagagttgttgagactttaaatcaaaagttaaacaagcatttatctcttaaatattagcaaatatgataattcaactaatgtgtacaaatttttcataaaaaaatcaagcttcagtagtaattaatcatgagttaaacacaaaaatcatgtgaatctatcattttcctagaattataactataacataattaagaattttatcatcaacacaattattttccacaagaccatgcataagacatcaaagtaaaaacatatatcaaacacgagcaatcattgtcaaaaaaatttcattcaaacaatgctcactaaaataaagaaaaaagttaatataaactataaaaacgattaaaaaataaataactaaacaagtaagaaaaaaaattgaatagacatgacaattattcttccccccacacttaatataagcattgttcttgttaacacaaatttttgttaactatattaaagcctatttcgtgattgatttgcacataaataatagtagtaaaagaagaagaaataacacaaagctttttatgtggtttttcagttaaaattctgcatagtccacgagtctatcttattagatttctctgataccaaagtatggtcttttctctaaaggattttttgtctctatttatagttacataggagcgcaattaattacaatcaaattgatatcccacaacaataatcccctaaaattgtgggatttgattatgtcccacgtaaaataaatacagttattatttgaaaatcacacagctgtgatttatctacttttaccgggtcattgctaacgtggatttagatacactgcaaagtgtatctcactggtcaccttgctaggatagaaacaataatccttccagcgagctggagcttttcccatgtctttccgaggttgataatgtaaatacttccgttttggctattgaagacataacgctccatctgacaatcccagttcttggtgacaaggtgaacttcagcagtcaacattatttgaatgtcagcttctatctgagagaactgactcgacaaagcagtggatctcattgaaagatgtctgaagctgagaaggtaccacgaagataccttcaaatagagagatggatgcctcgctattcgttgcttagattcattcaactgttatgc

SEQ ID NO: 331939 - DNA, 1236 bp, Cannabis indica
ctaattttacaatatctaagtttatttgaattattttatcaaattaaattaattatctaataagataaataatttaaaaataaccaaagaaatattttcaatatcattttcaaatcttataatttaataaaattaaaataacaaaataaactaagtttaaggataaaataataaaaaaaataataaattttccaaattatatgtcaaaatatctcaaattaagcattttccaaatttttacaaaaatatgtaggttatttaaatattttaaatactatttacaaatttctgataagtaaaatgatataaaatatcatttttctaacttataatttatatacaattaaatattcaacaaaataaccaattttgaatttgaatattatggttagaatatctataaaaaaatacttaggttaattttaaatttattaattatttaatttatcatataagataattttaatataatatttacaaattaaaaggataaagttatcttttaatttaaaatataactaatattaaaatatctaatcttataattaaataatatatgaatattaaagaaattaataaatttttaaaatctgaccataatttaaaaataaaataatcaatttttaaatttaaacataaaaatatcaaaaaattaataataatctattaaaattaaatattattaatttaaaatttatatttaagtttaaatgtattaaaaataatattttattttaattttagggtttgaaaattgcaaaaattcgaaatttgtgaaaaatctcagaaaaatcaaatttttggtgcaaagcaccaagggtgccgaccaggaggctgcacgcaacctccttacgcacgtggatggtggattggcagcctcagctgtgcgacaaacctcggcgcttgcagcattcctgtgggcgagatgcagcatccgtgtgcctcacatcgtgtctaagggcagctgtccgtgagcatcagacaaagggctgtctgagtgatccgcgcacggatcaccttgtccgaagccctgcacgcatggtcctcgaccatatgtacccaaaattttcaaaagttcataactttgtcgtttttcattagttacgagttctgtaaaaactaaagttgcttaatttttcacaaggaatccaaataaactattttgagaatgaaaataaaattattttcatggaaaaatttcgtaaatcacatataatcatcaaataacacataaac

SEQ ID NO: 331940 - DNA, 500 bp, Cannabis indica
ttattttttattttttttataatcatctcaaaaggtttggtttagcttgttgttaatccaaaagaaaaaatgtgaggtttagcttgtagtacggagatggcagcgatgggtgtaaagtgcgtgctaagatggcacgttacaagctaagtgatacccataagttggccaagtggtgattaagtggtggcgcatgttgtgctgcatgctggtggcatgctaatgcttagtttatacgatagtggcattttcgtaaatatcttcaattttgtccggaacgggacgggacttggtattcgccatttatttgggtctacaaatacaatggtgcaatcggtttggcgaaactatgtgatttggtatatggttcggccatatgtctacagagccaaaattatatatgttcctggtagaaggctaaaagctcagaatgctctttcaggggtaccctagtgtcagctctgcatcaccccttgcaccttggtgctaagtgagctactact

SEQ ID NO: 331941 - DNA, 576 bp, Cannabis indica
ttttaaaatttgcatccgatccgatccaattatgattggatatccgattctattggatcggttgggattggatcggtcggttagaattggattggatgactttctgcacacccctaccctcgagaccaagtcctcgcatgagaagggttcgttcagctgagtgttgtccaccgaatcagttccactcccttctgcctcttcttcttcctcgcctgactctccagatggggccgcccaatcgtcatccatctcctcgacctagacgtcaagggcatgcctggagtggatgagataatcacgtgctgacaccgtggatttgctgtctcgaatctcaatggttcttggttcaacaagctcctgtaccattctctcgatgtccgcggaggataatggacctagttctatacctccagcagttgcgatctcctcatctgagatcgaggtcgggataaacctatctttcctttggtcctcgtcaccatcaaacgcattgcctcctgagccaagcagctgactatccgacaggtcgctcatctgaaagatagaagatcttttcagcgtggtgaatgtgtgaaa

SEQ ID NO: 331942 - DNA, 898 bp, Cannabis indica
aaatggtagccaaatttcagggaaaacttcctaaaaagttctttttaataaaaagtgcttttaataataacggagggcattttcatcataatccttttttgcaaaaatgcgtcctttgattttagcagttgtatggtttcgagggtcattatgatccgtcttttcatcttccgcctcactccccaccgttagattttccaacctttggccttcttgttactggactttgtatggtagcaaatgctccacgttcctgtagctttttattagcgagccattgagtcgagccaatttgtaaactccaactccaactattgcttcaactacatatggaccctcccagttcgggttgaacactcctgcggatgcatcccttgtgtttgcaaatactcaccttagcaccaagtctccaacattgaatagtcttttcttgaatctcttgttgaagtatcttgtaactcggtgttgataggctgcgttggtgatttgcgacttagtttgtttttcatcaagtagatccaaggacaatattaaaagctcttggtttttttcttgattataaaactctcgtctgtgagtcgatatgttcacttcaacaggcaacattacttccgagccaaatgctagcgagaaaggagtgtgtcccgttgctgttttcttggtaattatatgagcccagagtacttgaggtaacttgtcgacccacctgcctttggcagtgtctaacttcttcttaatagtatcctttaaggttttattaatagccttcacttgtccattcgcctgaggcctgaatactgacgagaagctcttgattattttgttcctctcgcaaaactcagtgagcaagtcgccatcaaattgggtttcattatcgaatactatcttcatgggaatt

SEQ ID NO: 331943 - DNA, 1140 bp, Cannabis indica
gcattggtcagtccaaaagacatcacctgaaatttgtaatgtccatacctagtgtggaaagctgtctttgggacatcctcctctcagattctcaactgatgatagcccgatcgaagaccagtctttgaaaatactgttttccccctgaggttgaatcgtcaattctttaagttttgttggagccattctgaaaggggtcttagaaaccggttctgctctagatgccaaatcattaacaaattaaattttcctctatggtggtaaacctgaaagtttttcaggaaaaacatctaagaattcccgaaccaccttgatgtcttcaagccgaacaaacacaagctgagtggtatccaataccacggtcaaaagctatagacattcatctcataacaattccatagctgttaatactgaaattactaagatccaagatccctgaaccgatctgacaaagacaaacggttcctcaccttctgtggaggattactatcttcctcttacaaccaatattaatgctaagtacttggataagaaatccattccaagtataatatcaaaatctactaagctcatttctattaggtcaacacttaactctctatcatctattttgatcggcatagacttaatccaccttttggagataactaactcttcgccacgcagtagggttccaaaccctaattcataactatcatgcagcctatccaatttactaaaaattctggccgccacataggaatgagtggccccagaatcaaacaacacagagaaataagagttgttgactaagagctgacctgttaccactgaggggctggcttctacatcagcctgagttatcgcgaataccctggatggagtgggttttgctgctgtcttcggtgcctcagttctaggctggggataatccctcttgtaatgcattggcatgccacactgaaagcacccctgccctttacgctcccccagatggtgctttttacgacagtggcactctaggtaagtgtatcgggtttcagtgcctctctgacgattgcctcgaccctggttcccccgaaacctcttgttcttacccgagccactagttgcagtggatgcctttcttttctgatctatggctgagccactacctcccct

SEQ ID NO: 331944 - DNA, 580 bp, Cannabis indica
gcgacatgcgctttttagcatggccctgaagtgacgacgagacacccaccatttcaaggagtccaactaaatcacaacctgggaatatgtcacgcatctttagctaagcggtatacctccaaaaacggactgggagaaactcagtgactcaaggggcatgcgttctcaagcatgaccctgaagttactgaggtactcccaccgtttcgaggatatccaccagccaaagaatacgcttattagaacattagcacatgtcgcaaatggctgggtgtacctaagtatctcaaggaacatataaccgcatatatgaacattagaatactgtgatacacccaccatttgaaagacttaaccaatgttcccacaacaaaatttacagagtacaaaatcctaaagttctaagtgacaatcagaagtgattaagtctctgtgaagcttaggaagaacagacatgcgagtattcgaggtgttcgtccgaatacccgcgtgtattcaaaatatgaagtagcgtctgttcaagcatttttttctaaaatacacggttatgccaattttaggtcattttttctgaaattccc

SEQ ID NO: 331945 - DNA, 757 bp, Cannabis indica
ctttgtatataaagaggtgatccaccatgaaatggcacctacgaattccttgctacagtggactaagcagatcataatctgactgaaccactataattctcttactgttattttccagtttttgttgattgttttcccattcccagtcgagtactcgccattctaggttgaatactcgcacttgtcattacccataaaattctctttgatattaataaaataatataatttggtgttgcgaaattcactcgacaactgatcccctacctaaaattctacatttctgcgctttagatctgcataactcttttgcctactccgagaggcaagcattctggccttaatcttctctatagcctcattagtcagttgcactgattctagacctaagtatttctttttttctgtttcatcccaatgaatggaagatttgcatttcaagccatataataactcatagggagccatccctactgtacttagatagctgttattgtatgagaactctaatagtggcaggtacttgctccaggagccctcaaaccgtaacacaagctagtaaaatgtcttccagtatctgaattgtccttttggactatccatcagtctgaggatggaaagcttcactgaatttcagtttggtacccatagctcgctgaagagtctgccaaaacttagaagtaaacttcggatctctatccgatataatggattttggaacaccatgtaatcttactatctcttttacgtacaactc

SEQ ID NO: 331946 - DNA, 553 bp, Cannabis indica
gttcaagttagattttgggacgagatcctttaagggggggataattgtaaataatccttaactttaatttgcaaattagcagattattagggtttaatcatgaaacttacatattagttatgaattatcagtttacaaagatttatttgaattcagaatgcattctgtatgtcatatatggaatttcataattttgcatgttttgtgcccgacaatattggaacgcggtgtttggctattagaatcacataatagtatttttttttagtatagaggggcaatatagttagacattgggaatatcgggaatagttgagattttagaattgacaaaaatacctctaagtaatttttatgatttttagtgtgggcaagggcaaaatggccattttgctttagggtgttttttcctttagtggacatttgtggaaagaataatttgattcttatctcttaattatttagataaaaccaaaattatatctcattttttgaaaaataagaaattaaaccaaaaagaactctctctctttcaaactctctctctttttct

SEQ ID NO: 331947 - DNA, 550 bp, Cannabis indica
attgtttgacaattcgctaaactgttgattctttcgtgtatagagagtagtacagtagagtttgtaatttttctttaaagacaatgtggcttgtataattggaaagatctctctatatattatatctaaccaaggaaaatgcaacatctgtagcgtatgagagaaatcaaatgacattttcatgtggaatatgtaatagaaatttgaattttttctagaagcatgaaatgaaaccaaccagaaaattgtttcattggatcgtttgtgtgattggtttaggattttgaaaattattttatgtttttgaaaattaaaatggtaggggtctacttaagaattattgattggttgagtgttttcaaaaacaaaatttgaatactattttgagttttaggataaaaaatgaaaacactatttttatgttttttgtgttttcaaatcattgaatctaaaaattctccaattattctcttattttttttattttgagactcccaaccaattacatgttcaattttttaaaactcaaaaacattaaatcacactacaa

SEQ ID NO: 331948 - DNA, 531 bp, Cannabis indica
gaggcagtaaccttttgttcaatataccttaaagggtttgaaacaagatttaatcgtcttgatcaaaatgaagatgccccttctgtctctcgctatctctcagtttttaattctcaatctcttcctttcactagcggaattatcaagcctcttaatcgtatcggtcgtgaaaaagctcagtggtacattcttcaaaattctcctgaaattcaagcttatttagagtaagtttgttacattcctataaattattttattaagtttgtagtttttattctctatttttctctatcgtaccttgacattatcatacttcacagtgaacatttggagaagatcaggcatgaatatcctaatggtaaccacaatgttttgcataggaaaaattttcgtccgtggtttcataagatggtatgatgacaaaattttaaagttttaattcaacaatctatattcctctcatattaatacattttatgtatttagatatatgagttgcacaagactggaactttacaaaatggtgatgag

SEQ ID NO: 331949 - DNA, 1011 bp, Cannabis indica
gcctcttttcgtttgaagaggacccctcaccgcccttagacttcttggccagaggcgaggcactagagcttccgcccattctcttcttcaaagcatcaagcatctgccgagacatgtctgtacagaaccaaaaacaatatggttaaaacaaacatgcatcagaaacataaggcataatagtcaagaagctcaaagacaagacaaagtagtatgcaaagtgactgcccaaacaagactcagaagtccatcatcacctgacatcgctcctatttcagacatagcagcttttccttttctgaagacgggaggggatggccgaacaggtgaaatgggctaccttatgcgaatgacatgttcaacaggcctgggcggggtcgggagtttcttcttcctcttaagcggagtcacctgctcttcctcagcttcatctttaagattcaagggctcctgagcataatgcttggcccttgcacctcccttcaacttagcttcacgcttcagttgaatcagctcattctccagatgagctcgttcggtccggccagcacttgatttcctcttcttcccggtcgcggacttaggaataaagtccttggaatagagcccatacctcacaaagttatcctcggaggtcaactggataatattacggtcttcccccggcagtcgggcaagtttttgagcttcatccctaagagcaagagtgaggggagggcggtgataagtcataatctgctggaaccgagtgcgagtgatgcccgtgctatccaccatgaagtactcatcagcaaaacccccattcttgttgatgggcgagtcgtccatgcccgtcaaccacttgaagcctggttgagacaaatagaagtaccccgacctaccttgcttggggtggatttcagatcaaagaaccaggaaacttcgtgaggagaaggcgtaccccactccttcgaagcatacagggcgaagagggcagacaaatatttaatggccatgggcacccgactaggcaca

SEQ ID NO: 331950 - DNA, 476 bp, Cannabis indica
aaaaaaaaaaaaattagccaaaatggaggagagggcttcaaacataatcatcatgtatctgtcaagcagtgtttgaaggaaactcatcgtagagaagacgataaaaggagtttggaataaattaaaagagttatacttaaagccatcaattgctagctagattaattttctagaaaggttatacagttttagaataatttcttccctttctttaggtgataatattgatagatttaatgagattactgtaacattggctaatataaatcacaaggttgatgaagaaagtcaagccatcattttgttgagatcactcccaatcgcatatcaagaagtcaagacagccatcaagtatcgcagagacatgattgtattggaagatgttcttgctgcacttaagttaaaagatttcgaactacaattggagaaggaatacaagaaagaagaagtgtacttggcaagagaaagatcgttca

SEQ ID NO: 331951 - DNA, 694 bp, Cannabis indica
attctaaagttgaaggtgctatgtttgtatatcttgaggttcaaggaagagaagagttgcttaacttattgctctagtataattaatgttgtagtcttttatttatttattttttaatttataaaattattgtaattctagtataattaatgttgtagtcttttatttatttattttttaatttataaaattattgtaattctaatttcagaagaacagaggttaaatgcatataggccacgtgtcatttacaaaaatatggtattttccttagttctttttagaattgttaatatgactataccagcttcttcggtgtcatttcgttattggtataattaagtatctaatttcatttaacttatgaaaatgatttttaggaaatattattacttaatggtaggacgccacctataaaaggtgttggtcaccactgatgtccaataacaatattttttgtttttatatgtatagagttgtaatttttgccatgaatctaaaattaattttttaatatgttgtgtagtgtagtgctagatcattctcatcaatttctctactcttttcttattattattttttttttttctattttcacctcaaatttttatattatacaatacattaaattctttaaaatacattactatttttttttttcaaattttaatatattttattcattttaaacata

SEQ ID NO: 331952 - DNA, 1172 bp, Cannabis indica
agcacaattcctagtccttatgaaatgttttatggtatctataatgattacttagtcttgagcaagtattttacattaatgttaatactagaatgctatgttgatgacttagtctagaaggaacttaatgtttcagactaagataaaatgtcacaacaagaagtccctaagcaccaatggtaagaggttaaatgcacacttgtgtatgcattaaactagactcctattgttgagtgggagccatcaaagatgtaatcagacaaggaacattagggacacaatcaagaaataaactctaaaagtaacctatatgttagatgataggggtgtatattagaattcttatatctacactcactcaaaacttaatatcaaagatggtggttactctaggggtggaggaattattctagaaggatgtaaaaacttgtctataataattaaagctccactagcgaagctaaataacttagttgttttgcaaggcattaggaagttatttaaattagagaaagttcttaacggttacatctctattcctttttggatagaattagagacacgtcctctgtacattcagatgcacttaataagcagtaaacaattcaatatcactagagcagtatgatgcatataaaaagtcgatgtttcataatgttttatgaacacaaaggaagtaatggtggagaaaacagtttcttaacacagtcttacagttctgttcatttgggtttagtcaaacacactacacttatatggatatcaagacaatagattgattgaaatgtacttctaattttatcttagtgcaagtgggagtttgttgggattttatgccctaaataaaacccatttcaatgtataatcttatttgttatcaataaaagattagaagtcgtttatgtttacatatatttttcatgcttatggtttgatataaaatatctactaaatccagaacatatagttattcacaattacagtgatgtcaacacaatggaaggtaattgtgatcatatgtttcaaagcttatatcccatgattcatcagtacactagatttacactaatgtgatagtcagcgataaagtttacttacaccttggataagtgttatgtcctttccagggtattggtaaagtatgctagtatcagacgtatggagtatacatt

SEQ ID NO: 331953 - DNA, 1813 bp, Cannabis indica
tacactcaactacaaaatctgctaaggcctgccctttaatcgatgttcggggctaaaactaatttcatactggcccaactccactgcccatttgagtaactgtccagaagtgtcaggtttttacagtacttggcgtaatggttggtcagtgtatacctgaatgggatgagcctgaaagtaaggcctaagctttcttgttgctaagaataggcaataagtgagcttttctatcagtgggtatcattcctcagcttcagtgagtcttttgctgatgtaatagaccgtatgttggatattgttctcttctctaatcagtacgacacttatagcatgttccgtgatagccaggtataaccctatttcttctctgtccagacgttttgagagtacagagggttttgcaagttgcctttttagctcttgaaaggcgttctcgcattcctccttccattcaaattttttgtttccttgcaggatgttaaagagtggaacacacttgtctgttgactttgaaacaaatctactaagtgcggcaatccgaccagttaaactttggacttctttagtttttgtacgcgatttcatatctaagagggcttgaattttctctagattggcttcaatacctcgggagttaacaataaagcccagaaacttgcccgagctgactccgaaggagcactttaggggattgagtttcatggtttatttcctgaggactttgaagcattcgtcaagggcatctatatgcccccaaccttcctgtatttgacgagcatgtcatccacatatacttccatatttcgtccaatctggtctttgaacattttatttaccaatctttggtatgtagctccgtcatttttaagaccaaatggcatgaacttataccccgaataggcatccatgaagcttaatatttcgtgtccggctgttgcatccacaagttgatctaatcttgaaagtggaaaatagcttttggggcacgccttgttgaggtcggtcaattcaattcatacttgccattttttgttcagcttgggtaccagtatgaggttagctacccaagccgggtagaaatcctcgattataaagttgtttttgcgtagcttttctacctcttcttttagtgcttggtcgttctttgtctagcatcttctttttgttgagcaggccgaaagtttggattgatattcaaggcatgtgaaattatagaaggatcaattccgaccatgtcctcatgtgaccaggaaaaaatgtctaggtttgctcttagaaattttatcagagctgattttacttcaagcaacaaaccttttccaattttgagtttcctagtcggaacatttgagtcaatttcaatttcttctgattcttccaatggcccaacatttgtacttggctccccaagtaggggatccacatctttgtcctcgccttgggcggctccctatttggcaatgctcttccccttacctaaactctgactaaaggattcttcttttttgaccttggttagggcaatgttataacattcctgtgcaacttgttgattcccttttaggcacctaccccattctttgttgggaacttgacgcatggatgaaatattgatgtaacaacttttaagtcatataaggctggtcgacccaacatgacgttaaatattgatggaacattaagtacaagaaattgtgacatcatagttatgctcttcgaagcttgcccaacagtgaggggtaggcgaattttccctataggtgtaacgctctggtcggagaaaccatacacgggctagatataagggatcgtg

SEQ ID NO: 331954 - DNA, 561 bp, Cannabis indica
taagatcctggtaaaataacttccaacaaacccctcaaacgccgtcggttttggtggccgggaatgctccaaccgatcgggtcacgaaacgggtcgcggcgatccgagttacagacccgcggacccatggggaagtttgttgggtgataggggtgaagaaaaacgacttgccgttttgcctctgtcgggcaaacgacatgtcgtttatctggggtgaaaaaatgtcgtttttagagcaaaaaaaaacgacttgtcgtttgggctttgtcagccaaacgacatgtcattttgcattacctggaaggtccttttttgagcagcaaaacgacaggtcgtttttgaccctgcgacacgtcgtcctccacaaacgacatgtcgttccagcaattaaaaaaaaaaggaaggcgcgtgggggcgcgtgcaaggtcaattttgggccatttttcaccaatttattccatttttaacattctatcattttcacatcttaattttatgcataatattaattcatgaatttattcataatcttagttattaatattatcttgttatggcata

SEQ ID NO: 331955 - DNA, 1232 bp, Cannabis indica
acttgaaataccattgctgtgcggtctccgatagagtggcggggaagattctgcaacatacgtctcctcgtaccccttgtaaatccatttgcatctcaaaatacttgagatgggagagagaatcttctctcccagtgtacatcttccacattggcatcttgaacttgtgaggtagtggcaggaggttgatctctggtgagaagggagttccacgtgcacggtctaactcaagattgttgttacgctgcccagccatgccatgaaacatattcttcaattcgccgagctgagcctgtacggctgggctgacttgattggcattctggtcgggtaggattacgtcagcgtctttctgagtggggatttgagtatgggctccgaactgcacgttcgttgtagtattctgctcgtctgttccccttcttctgtttaggtcgtcccttaggtcatgggttgttcccaacctatcgaacacacaagaacctggctgccttagcgattggctcgcttggttggcaggtggaatggctccattattttccgtggattcgtcgagcatgacccctccatatgaattcgcggacaaggtctgtccgcctacctcttggcccacgagtggaactcgtgatcggggattggacggctgaccgtttgttgtctgggaagcgttcaccgttgggtcatcctcggtttcttctaggggaatgacgctcgacatttgctggcctacagtctgataggctcttcgtatcaacacagtggcttgccctctactcggcgaacatacgcctctgttcataaaacgcgaggtttactgcggcacgtaattcctcctaatcgtgatgtagggtattgttgtgaccctgcatgagtccgagcacagcgcggaggttttgcaattcggttgtgtctccgatagtcgtttgggcgttgatgcttggtggaacagccgtgttatgaacgcgctgtctgtgtgcggaaccgttgtttccagtctcttgcacaccaggagcagtttcagtaacaggagttgtctcaccattcaccacgcttcccgtctgttcaggattcacagcgggtggaaccctcgaactccctgggtcctttaacgtcggatccagcgtcagtgagttcgctgggtcggacaggcctctaagagtttgtaccatcgtgtcgaaagagcgatctgtgatttcgctctcaatgaaagcaccaaaatgttgacttcgctt

SEQ ID NO: 331956 - DNA, 533 bp, Cannabis indica
aagacacaaatgaggtcgggacttgttttgtcgcacgtggctgttatggccaattaattgagccgttttcaactattttatctgtcagttgccgccccgaaattgcagaaattaattctaagtgtcaaagaggcacttagttggataaagaagaataataagtcaaatgtcattttagagacggattgccttttagttgttcaagctattcttagttcggtatctatgacgccttctatttttggtctatttgttcatgattgtcaatttattttatcttctttaagtaatgtttctattggtcatgttaaacggtctgctaacaaagctgcacactgtatggcacgtggtgcttgttattggtcaggtcgtcgttttactgatgttcccattgctcttcagtccattgtatcagcggatgtttctatctaataaagattattttcatttgaaaaaagatagtattatgcacaatttaaaatcataaaattagtgattttataatcaaaacacaaactcataataataatatt

SEQ ID NO: 331957 - DNA, 531 bp, Cannabis indica
tggcgtttgctaacaaggccacactctttagcaacaaaagtgttcaaagaacgttactttactgatagaaacttcctctcggctaagctgggttcgaacccgagttttgtatggcgaagcatctttgaagcacaagacttggttcgtgatggggtaagatggtgtgttggtgatggtacttctatctctgtgttaggggagccttggcttcccgatccactacaccaatggttgtttcttcacacccggcgcttattaacaccaaggttgctaacttgatgacaatggaagggttgagttgggatgaggaaatcattgaagacttatttgaagtaagggaccagcgtttgatcaagagaattcccttgaatgtcacgagcacaattgaccacatttactggactaaggaagctttggggtattatacagtcaagagtgcctattcactgctgcaaaaacaaaaggaaactggtttgaggataatgttgctggtttttggaacaagctatggagtctatgttgggttttatg

SEQ ID NO: 331958 - DNA, 576 bp, Cannabis indica
agatcctattacgaggagtttactactactacacatgatttgtatatcaaggggttgagattatttgaaatgcactttttgttttatattagtgcaagagggagtttgttgggttttatgccctaaataaaaagcatttcaaagaagccttcacggaaataggcctcacggaccgggatctttcaccatgcggttcccagctcacagtgaccaatggaacaacacttatcccaatgggaaaagtgaggctcccagtcaccttgtgcccagaaacaccccaaagcacacgtttgtggtggttgactgcccaacggcttacaatgcaatcctcggtcggccggcccttgtggatttcggtgtagtcacatcaattaggcacttgtgtctaaaattccctactcaggaggctaggataggaaccgtaagaggaaaccagggacaggccagacagtgttacaacgttgctgcccacctacctgttctaatggtccgtgaagttattgagccaagaatggcggaagaagatgagttggatccccgtgcgggatccaaaaaaattatagaacccatggagga

SEQ ID NO: 331959 - DNA, 645 bp, Cannabis indica
aattgcagcaacaatgaatttcaatacaacatatcttgcaagaaccctaaggatcaatagttctaatagaaatagcccgctctgatacaaattgttaaaccaaagttcttgtctaacctatatctttcatatttagattgattttatcatgatttaagcttgcatacaaaaataaaatcaaagattcaacaccagaattttacaagcttcccttgtcttagaaactcattctaggcagctagtgcttgggttccccgaaccaggataataacattcactatattcaaatatgtatcttacaaaaaccaacaatattgtaaacaatacactcttttacaaaatacagtgaatttatacccatacaaaccaagacccttgattggagacacaagatatccttgtgttaacgatgagctctcttcaacacttttcttcaatctgaactcccttcaaatttggtgatgaagatgatattcaaatcccttcagtctgaactcaacatcttcaagctctgatctgcaactttggattaataccaccaagctcaaagatcacctgccatggaacataaagacgaaacaagaagaaagaaacataattcctaatttccgatcaaaaaggttcatcaacataatgttgggtttt

SEQ ID NO: 331960 - DNA, 725 bp, Cannabis indica
cccatgggggactcgcacgcgaagtgtgagtgcatgtgaaggagggagtgcaagtgagggggagtgtggtgtgtgcgagtgggggcttgcatgggagcccgtgagggactcgcacacgagtcgtgcgtgcatgtggggagggagtgcaaggagtgtggtgtgtacgagtggagggctcacacgcgagccgtgagtgcatgtgggggagttcaattaagaaggagtgtggtgtgtgagagtggggggctcacatgggagcccttgggggctcgcacgtgagccgtgagtgcatgtgggggagggagtgcaagtggggggagtgtggtgtgagcgagtgggggtaatcaggtgtgcatgtaggggaatttgggtgtttgggacaagggagtcaaaggtgaggtttcgtgggtgtatttctgagggatgtgcatataaggaaagaagcgaaggcatgtagacgagcatggtgttggatgagagctccaaggacgaggcatgcaaggaagagcgtaccaccacgccttctgaagaatgagagcaaggaggtataagtaatggcgacaacggacttggaaggcctgaagacccgaccaagggtacgccgtaaccactctccaacaccctatacctggggaccaccccacatgcaactagagaccacgtgcatgtacccagagaccatcctcctgcaacgtgcagctagggaccacgcgcatgtacctaga

SEQ ID NO: 331961 - DNA, 955 bp, Cannabis indica
ggtttgcattttaccatgtattttcagatgaattccagtcagtcatacatagatgccccttaagtaattttaaagaataaaactttgtaattacttaatataaatgattctctttattcataactgaagtttaaatatcacatcagtaatgcgagttaaatcatttacttattggtagtagggtcacaaatgctccaggttccagtagttctttattagtgagtcgttgagtcgagccaatttataaactcaaattccaactactgcttcgatgacatatggaccctcccaattcgggttgaacactcatgcggatgcatctctcatatttgcaaatactcgccttagcaccatgcctccatcattgaatagtattttcttgacttttttgttgaagtatcttgtgactcggatttgcaactcagttcgttttatctcaagtagatccaaggacaattttagtagttcttggttttcttcttgatagtatcctttaaggttttattaacagcttcggagccaagatatgttcacctcaataggcagcattgcttccaagccaaatgctagcgagaaaggagtgtgtcccgtcggtgtcttctcagtagttctgtgggcccagagtacctgaggtagctcgtcaactcatttgcctttggcaacgtctaacttcttcttgatagtatcctttacggttttattaacagtttccacttttccattcgcctgaggcctggatactgacgagaagctcttgataattttgttcctctcgtagaattcagtgaacaagtcaccatcaaattaggttccattatcggatactatcttcatgggaattccaaacctacagacaatgttcttgacgacaaagtcgaggacttgcttgcaggttatggaaacaaggggctcggccttcgtccatttagtgaagaagtcgactgctactaccgca

SEQ ID NO: 331962 - DNA, 859 bp, Cannabis indica
gtttttttcgccctttttttgagcttatttgccactatttataattacatagtaggcagttaattacaaagttgaccagaatatgtttacaacaattatccctaaaatcatgggatttgtttacatatcacgaaaggtaaatgcggtttatgatttgaaaatcgtatagttgtgattttcccgcttttactgggtcaaaattttcgtgtattaaacacgtctttaattgttaaatctggagatgtctcgacagaaacttgattatagtgatcccaatagcgagttggggccattcttcctttcgcggtcgacaatgtatgttttgtgtcgatcgcagttatttataaagaaatcttctgagttgccagggttgtgagcctcgctcctattagttggatgaagctataggaagtcttcccatagcgagatggtcatctcgcatacttgttctttgagccaattcgacttttacacttagtttgcttattgcaagctaaggatttttaaagttggtatgtgtcactttctcctgtgcctcgctattcgcatttagcgatgtatggtttctcgctaatacactaagtgccagtttgtacattgattactcgcctaagaccttaaagtcagcgggttacaaatatactctggctcttatgtaattaatgagttattccgtaaaaacctattgcaccgattcacattccctttatcttgacacgtgtcctccagctaaatttcgagtatgacaaagtactataaaatacaaactttaaatgtaaaatagtttaactattaaacgtaatttatataaggaaatttgacattatatgcttaaaaaaagcataaggtgtttttatat

SEQ ID NO: 331963 - DNA, 598 bp, Cannabis indica
ggggttgcaataatttttttctgtggcttagctcttaaaattgacttaccttgattttaggcttcttttggtcaacaattatattccttttttcattttgttttcagtaacgtttgacaacaccacgacttgcttacatgttttttctagtctaatgagattatgaaagtttgattccactcagataattggctgcaatgggctttgtttctcgaatgaaaaaatctattatcatatgtaggggtatttattggatcatattcaatgtttttatgcctatttagatccgatctaattatatattagatgatagattttactatcctattcgatgcaattatgtaggaaatttagcttggatatataggaattaacctctgtaatttcaggttcaagatcacattacaacaaaaaaaatagtaaataaataaaaaaaaacaaatcaagaacaaaaaaccaacaaacacatattaaaacagaaagataaacacagataaatctagataacttccaaatacaacaacatacgagaattatactggttatgaccctaagttcaatgtgaacttggtcatactccagtttgaaagcattgcca

SEQ ID NO: 331964 - DNA, 517 bp, Cannabis indica
tttcacctgatttcttcaagacccaacaagctaagcatatctgtccaataaaggtggtagtgctttcatatgtagcttcttacaaataaggttgagtaagtccaagcaatgcttgagcttactaactggtaacaccttagtgccaatatcagtagggttctcttctgacttctctttctccagctcgattacttcttcttctatcttctcccttatccaaaacaaccgaatatcaatgtgttttgtcttctcgtgataaactggattctttcacaaatgaatcgaggattggctgtcagaatatacccttacctttccaactagaagcttcactcacttatacaaaacaactgaacatattccttctttgaatgcctttatggtcgccataaattctacctctgtagttgaaagtgctactacggattggagttgtgatttccaacaaatacaatctccattagttgaaacacataagaggtagtagacctcctagtatccttgcttgatgtataat

SEQ ID NO: 331965 - DNA, 476 bp, Cannabis indica
tggtaaaataattccaacaccattgacatgggaagtatttatttacatttcttattttcttttttacttcgcactataagtttacttacttgaccgttagagtgccttcagttggcaccaccccggtatcccaaggtttcacaattattctttatctttgtttcgcaggttgttagtgcccacaaatgttcattccgatcattgtagattttagcatctaaaatttggcacccaccgtggggccctgacaaactgactgtgagcaaggcgatctatcatttacgacactttagatggcagaagaaggagagtttgtcgcccaggatcaacccaatgtcaatgaacaacttgccacaataatggcccagatgtacgagatggctgagtgaactggagttctggagcgacaaaatggaaactttaaggaggagaacgcaacatttaggagtgaaaatgccgcaataaaatcacaaatg

SEQ ID NO: 331966 - DNA, 963 bp, Cannabis indica
caggcccttatcttttttagagcatttctttggggtttgaacactttacatttatgcttgaatacatattctgctttttaactttaaaatttttgtctattttacatctgtccgtgtggtatgccttactacccccctgtgacatgaaaattggttttaggtcactcaaatttacaaattttaatttagaggttgcatatacttgtccggtacaaatttacttttcagagcataaacttttattctttcgattattggtaatactttcgaaggtgatcagtattccaggccctaggcaccatgcttccgtccattctttttagcttgtaggtcccagagccaatttcatcctcaatttcatacggtccttcccaattaggctcaagcacccccactctgggttcttgagtagcaaggaagacccttcttaagactagatcaccaatactaaattttctatttttgaccttcgagttgaagtgtttggccaccttcttatggtaagctgccattcgtatttgagactcatcccggagttcttcaatttgatccagcgcttcttgtaataaagccttgtttgttgctggatcgtaaatcgttctcttgtgggatgggaataacatttccaccgggaccattgcctcacaatcgtatgccattgagaatggggagtggccggttgtgattcttggtgtggtccggtaggcccataacactcttggcaattcttcaggtcaattttttttagggtgaccttgaggattttattgacggcttctacttgtccatttgtttgttgccttgccactacggagaagcttttgatgactccgtgttggttgcagaagtcggtaaattcttcgcagtcaaactgcttcccgttgtctgagactatcttatgaggcaagccatatcgacacactatgtttttataacaaagtctagtacttttttagcagttat

SEQ ID NO: 331967 - DNA, 729 bp, Cannabis indica
tgccttaggttcaacttgtcccatgctaatttccaccattttcttgcatcatgctccaaaatttcttggtttctaggtcgtgtctgcctggtatttgtattcatgcaagaagactctggcacatcaggtttttcattccattattttgcaaatccatgggaagttcatagattatcattttgagtctcttgatttcttgtgtttctaggattttatgggttttctccttccattgggatatctttcacatttctaggttgttcttcctgagtgtttgagggatttccttaattattcccttgtctcgtggttttagaaccttgaggcgtcccacttggtcgtcttgtagatggattaggtcgattttgaggggccactccttatgtagcccttgctgtcgtcacttcgcactctaactcggcattcctccagtttgatttagctaggtgttgctaaagttaccaatttgccagttccatcaatggaacgtatctagttggatcataagcatccttacttcacctttctggaatctatatattcaccagtttgattaaaatctctaatgtttcttcaaggatagggagtttcaacagcgttagttctttgcgaagcctaaggctcctttcccggacggtgggctgtcttttcttgctgattctcttcattacgccgagtatcgctgccatgagtaaaaatttagagttgtatttttgaggagggtatttt

SEQ ID NO: 331968 - DNA, 1355 bp, Cannabis indica
actcaagagatcattcactctagagagatgtttattttcatgaagatatttttccactatctgacactaactctccaaattccataaatcaattactctcacattctttactgccctctacaggactacctcaacatcattctgaggagcatgaatctgttcccgaccatgatgccactccatctcacacaatggacattcctcaaagtgtgcatgacatcaacacacatatcccgcctcctgatgaagttccatccacacccagggaatcaataattacttctcctgtcacttcaaaaacaggaagaaccttatctaaacctaaacgtctttcagattacatttgcaataccaccgctactatgtccactgcttatcctattaataaatatctgtcttataataggttaacacaacactttcatacagccattcttgttgcccactccattgctgaaccaaccagctacaaaatggcagctaaagacccaaaatggcaaaaagccatggacaccgaaactaatgctcttgaagccaacgatacatggatcgttgtcccccttcctgatggacatcatgccattggttgcaaatgggtatacagaatcaaatataatgctgatggcactgttgaaagactcaaagctcgcttagtagccaaaggctacaaccaacaagaaggtattgattactttcacacctttgcccccgttgcaaagttcaatacattaaaattactgcttgctattgcagccattaacaattggtctttgtaccaacttgatatcaataacgcctttttacatggcgatttacatgaaactgtctacatgacactcccaaagggatataaaccaaaaggagacatccctccaaatgttgtttgtaagctaaacaaaagtctttatggcttgaaacaagcctctagacaatggtttaccaaacttagcaattatcttttatccactagatttactcaatccctttcagatcccacattattcattaaaaatcacaaagacacttttcttgctcttttaatatatgtggatgatatagtagttacctcaaatgatgacaatgttgttctttcctttaaacagcaactaaactctgtgtttcaacttaaggatcttggccctttgagattttttttgggcttggaaattggtcgatcttcctctgggatttctgtatcccaaagaccattcaccctacaacttttaactgacacaggttatttaggagctgcccctgcttccaccccaatggaacccaatgttcggctctcatccgatattggggaaccattagaaaacccaaaaacctatcgcagcatcataggtaaactcatt

SEQ ID NO: 331969 - DNA, 1133 bp, Cannabis indica
ttttaggtaactttgttagcctatataaacacattattattagtatttggaggagattttcagagctcaaaaactcttaatagcaagcaatctaggagtacaaaaattagatagcgaaattaatcgagaaggctttttcaatggagttttcaacatttttttctctattttcttcttttattcttaattgatatgtgtgaagttgctactatgaacaagagtagctaaacagtttattagggtatagatggatattaattgacattaatttatagttttaacgtgatttaattttcttccaattttctatgtattttattttattcgtacttattctttttaattgcttagccatcaattaattatttatgattttgatatgaaatctgagaagtgagtatcaattatgctatagtgaaataggaacaaattttgatataggacgagagtacccatgtggtttggatagcttataggtttctgtgtttaatgccttttatatatttaatttatcacgagagtagaaaatttgcatgtaattgagatttctatatctgagaaggctataaattacttgagtaaacttgttattgcatagaaattaattataggaattgaatcatgctagaccataatagatagatacaattgaaatcaataactctaatcttcaatcattattaatttacatatcaatttacttacttgtttttattgtttttattgctttatattctagttctagtctcttcttaaccaaatagaagtaaaagtttaattttaaagtacttaactacaatctttgtgggatcgacctaactctttgtgagtctattacttgttaacgatacgtatacttgcacacttatagaaattttagaagtgtgacagaatgtatttttacagctaaatttttacttaggtattaatttgcaactcggagcagtggcagacccaaatttaaagtgacgggatgtaatttatttttagtaaaactttaaaaagaaaaaaaatacttttagtggaatttaaacatttgatctccatcctatatgtaatttaggactaataattatattaaagctaatattatatttttaaatattatcgtttattataaatatatatcctaa

SEQ ID NO: 331970 - DNA, 504 bp, Cannabis indica
tcccgagtcatagcaggtcaacctaggaggggtccctagccttgtgcccaggttgacttcgggaactctggaatagaagttcggattttaataacttaaattcagctcactatctttagtattatgtaccatgaagacatggagcaacctaatccaggacccgagagctgaaattacacaaacctgtaacccgaaagccaacttgggcacatagggtttcacctagtgcccaagttgacatcctcgtttcaatttctaggaccgtcttagtgcaaagtggttaaaacttactttgaaaaatcaactagacataccacagacatgtttgaggtatcagaatcagaattggagcaagttgatttttgagcactcgaggcttggggcctcgagcacccagcacccaggttgagaatctgtaaatctgggtgccttccaagtgtccgatcaatgatcaaacttttgcattgaatttgtcttcatcaaaaatgagggaatagatccttt

SEQ ID NO: 331971 - DNA, 325 bp, Cannabis indica
gccgctagggttaagaaacttagatgacagcacgctaacttacaactcttcaagcagggatctccactaatccattaaccgccggatgcaagttgttggatgatctgcaaggacgtccggtaagaaacattactgacttaaatgagagcattcaagtgttcgttcggaaggaagaagcctgaaaggaaatgaacttgttgaaaacaggctcgagacgtaaacccagcaatgtctcaacagggaccgcttccacgagtattgataactcgggggcttttggtccgaaaagaaaggatggaatcagggaatcgtcgaaggatagaaa

SEQ ID NO: 331972 - DNA, 874 bp, Cannabis indica
tcaaagcttggctaacaccacaaccaaccaccacaacaaacttaattcaacataaaacaacatatgtaacatccagaaaccaaactcaaacacaaacaatagtcacaacagcaaaaacaccattttactattaaaatccaaagttttgagtttaaagctttacacatggttaaatccaactaactaacagcaaaactagcttgaatccactcaattaaacacatttaagcttctgaaaacgacaacaacaactaacagcaaccacaacaccaaaatcaccaagcatgcaaccattttcttccttaaattacaagaaactaaagagagagtgcaagagctatacctaaagcttggatttccctcaaaatctgcttgaattcagaaagaaaaatatcaaacccttgctgctcaaagggggccgaaagagagagtgagatagagagaagaaaaagtgattttctttaattttgtttttccttgaaaatgaaacaaaagtcctttgttttaatcaaataaaacccaattaattaaacttatttcagccaacaaacttagcataaatcaaataatcacttaatacaaagtccactaaaggacaaaggcttatggggcaaaataaccattttgcccctcccacactaaaaggattaaaaagcactaaagggtattttgggaaaactctaaattcccgactaatcccgacattcccaatgtctaacaaaaccgccccgctatactaaaatattagattgtgattctactgagccatacaccgcgttccatgttgccggacaccgaaaatgcaaaattataaaatttcactatatgacatataaaatgcattctgaacccaaataaatcaacataaataatt

SEQ ID NO: 331973 - DNA, 625 bp, Cannabis indica
gattcaaatagtttttgtaaagctttatattttaaggttatgaataaataaatggtttgttttaaaaataatgagatctcatgcttagttatttttcattaaagaagtcttttattgtctttatcttaaatggttttaaacggactagctagtgtgacgtctcgggaaatcggggcgttacaaaccctttggaccgccacaacaacccaacaacaacaataaatattgccaccacagcaacccatcgtaccaccaaaagcacatcaaaccaccaccatcccaccggaccaccaccactgtctgcaaaaaaaaatcagagaaagagaactcgaacgagaaagagagaaattggagctagagttgggcgtgcaagatggagaacgagaagtctcacctttcaaaactccattttcacgaggaagagagggcgagggtggcggagatggtctcgtgctccatcatggccgatgatgagctccaacgccacttgcaaaaaaaatgagaaagagagagttagagtttgagaggttcatgctttatgttgggttgagaagaaaggaagaagatgaaggtgatgatgggtgaagagtgggaattaggttagagagagatagatgagagaggg

SEQ ID NO: 331974 - DNA, 734 bp, Cannabis indica
ctgcaagaaactttttatgatcccatgattcgcacataaatcagtgagggactggctgtcaaattgtttgccattgtctgagactatcttgtatggtaatctgaaccgaaaaattattttctttacaatgaattctttgacttttttggacgtaatgatgggcagtggctcggcctctgtccatttggtaaaatagtctactgcgaccactgcgtattgtaccccgcctttgccctcggataactatctaaacaagtcaattccccaaatggcgaaaggccaaggactttgcatctgagttagttcgtttggtgatgcgtgaggtatctttgaaaatctttgacacttatcacatttcttaacgtaggccttggagtcttcaatcatggtcggccagaaatacccttgccttagaattttcttggatatactctgcccagctgcgtggttgccacagaatccatcatgttcttctgactaaagtcatgcagcttcttcttgtgtaacacacctgagtagtggcatggagaatcctcttctatacataactccttgtacaatgatgtaccgtgcaacctttctcctcattttccgagcttcatttctgttatctgggagttccccagtgttgaggtaggctgctattggcctgatccagtttggggatgtatcaatcatttcaatctcttccgtgcgccggtgatactatatttttcaagaaattggatggggat

SEQ ID NO: 331975 - DNA, 1496 bp, Cannabis indica
tttttgctgcagggttccccaaaaaatttagctcgtcgattggtcctagtttcaggtttctgggtggttgattccctgttagtttagggtattaccatattgagttgtagtagataggtttttggtttaaaacctaagtcccggttgtgatttagcgagtcacttatctatgttgttatctcttgtatttaggagcctataattcgccgagcagttgttccacttaggttgaccggcacacttgaattcagaattgaggtaagattagtataatgatatgcatatgtttatacatgtttagcgtacatgttagttgccgtcagaataacataacagggtatcggtgaattgcacatagagttgcaccgagataccaacagatatatgttagacaaagttagacaaatctatagccatcagattagcatttcagggaaacagtgaggtgtacatagagttgcaccgagatgccaacagatagatgctaggctatcagagagtatgagttatctgctaccacattagtacaactagagtactataagctagatttgcagttagtcatactttgtcgagaacgttcctgactcagttaggattatggttgggtgtatgggtgcctgattataatccgagttagtagtatgttttatgttatgcttttcttactgagtttgtctacttacagtgctatttccatgtgtaggtaagggcaaagctaaagttgaggagccgtgagaacgagctagtgaagattgtacatgttggggcggttaggcctggagcgtacgatcttagggaacatcaaggcttttgccgacagtcgctaggcgaaaaaaaatttgtattagactagcaaactttgtaaaagtattttgtaacgggatcccagaattttataaatgtcatactttatgtttttgattaaataagcaaattttaattaatctcattgattagcaacgagctgcacagtacgtttaaaatcacgttaacatgcctaattagttagggtgttacactttcacccaacatagacagaattccaagaatggatggatcgacaagaatggatggatctctttctctccctcgggtttggttaccatcgtcttactcactatgattgagtacttgactttctctatgtgggcatggcactttttcactaagtgttcaaatatgtgaagaacaatgaaggaggtttgaaatcactattgaaggtgtctctcataaactagttgtcacagaatgaaaactagatttggtaggttgaatagtcaagttgacaagaggatgagatgagaacatcatgttcattttatagtgtttcaactagggcttagggctgaattatatggattaaaaaagaataaaatattgggcaaaaatcacttaatggtcgtacacttaaagggaccattccctagttacaatttcaccattttatttcaaccacttattttctttcaataatactatattttccaattcaa

SEQ ID NO: 331976 - DNA, 478 bp, Cannabis indica
aggaaccttagacgcctcgacttcctgcctcaaaagcaaatatgggaaattaaaagtaatcaagtgcaaccgtcagccgtggagagagaaatttggattttcaaaatattaattgttagagtattaattagccgaaaaccgaagggacgcccagtcagcttcacatcgagtctcgaacggtcatgctcgacacgtgtccccatccaaaggcagagccagttcggaataagtctacgcgcaacctctgaggtcccgtgtagacttggtgggcaaatgttatcccaaatatggcactctgatgtggcatcacgagaatggtgacacgtggactccacttggagcatcagctcgaaataatgagccgagtaggacgcctcgctggaacatccacaatgaaatattcaacgagccgtgcatcgtaatcaacacttagcgaattcagcttgacacatcatgagtcattgttgggttttatgcc

SEQ ID NO: 331977 - DNA, 593 bp, Cannabis indica
tgttatctagacaattggaagcaatgtttttcaccatattgacatcctgaagaagcagcatgagatcatgtttcattaatttggccatggggctttcatcataattgttagactaattaaagttttgtgggaaacttctgattaaaatggatttgtaaagatctttgttggcaatattggtttaagatttttctaacatgactatctagacccaaaaggctatttagattgtcttagcaatttgattatctatccaaaatatccaattagagtttaataattaaaatgatattgtgcactttacttgataggctacattaggaggtcagcttacagcagactttccagggaagccgggatgggacagtattcgtttcaatatcttactattattaacaccatttgatttggatgtagaaaaaatatttttggattgaggcggcaataaaaataactgatactctccagaatttttattacatgtcatgtgacgcatgtcataaaaaaatagatttatacaatcgcgatgaaaaaatcatatgtgacaagccaacatgcggccaagaaggatttcctacaccacggtatattac

SEQ ID NO: 331978 - DNA, 813 bp, Cannabis indica
gtcaaaagttatgaccaaaataataacccaaaaaaaatacaataagctgccaaaaatggccgcggctactaggtttaaaaacccaggaaacccagtttccagccacgaaaatgcatccaaaaataccaatttttatgctaaaccagcccacaatcatagcaaactttcacctagcataaatcaaatataatgagatgaattacacctaattcactctccaacaacaccaaaaactagcaacaaatttcagccccaaaattcaaccaattcaacacaaacccaaacacaactcaagctaataattcaccaaatgaaaagtacctaaataggcattaacatacataattttcatgcttaaacaccagcaaaacacatcaaaatttcagattaaacaacataaaattcaaagctccaacttgagcaaaatcaccaagaactcatattcaagaacttaaacttcaagctagcttcaacctctttttttttctccagcaacaaaatatcaagcaagacttgaatttaaacatggaaattaccctaaaaactcacctagagctcaacaaacaaaatccattacaaagccatgcaatctaagccaaaacccatcaaaattaacatgaattcaagtcacatgcatttcaagaaaataccacacaatttcttgcttttccacataaaattttcagcaataaactcaactaaaaatcagcaagagaaattacctcaagtaccaaccaagatcaagctttaacaccctccaatttcaagcttgaacaccaagcaaatcacaaaattttcaacaaaatacaaaga

SEQ ID NO: 331979 - DNA, 864 bp, Cannabis indica
cccgtacttgtttagtattttaaataattgtgaatgtgaaagtatgttaggaagcatattagattttaattattttaaattgtgttgccttaaagtccttaagagcggtgttaagttttgatcgttgtctaacctgcctggcttatggactcgcaggctaagtcctataatatggacgccccgcaaaatacacgaagtcagggtgatatggttgagaccgaaggcggtcagagaaatccccaaaatcctcatggtcgcggccgtggtcgtggaagagctcagggtggtcgccctgtaaatccaccacaagctcctccggattgggagcagagatttgcagaaatgcaagatcggatccgtcaacaagaggaagagattcatagattgaggcactagggtcctcctgccgtgcctcctgaacaagttgctcaggccgttgcagttccagcggtgccagcggaataaaattattgttggcaaccgcatagagtcgttgtacgaaaggtttctaaagcaagcacctccagtgttctgggaggtcccgatgtaatgaaggctgagcagtggctcatagtgatcgaacgcatacttaactatatgggactggttggtaatgatcaggtgacctgcgccactttccagtttcaggaggacgctctcgtgtggtgggagttgataacccccactcgggatgtcacagtgatgacctgggaagaattcaaggagttgtttaactacaaatattataatgaagctgttcgcagtgcaaagcggaaagagttcaccgaattggttcaaaccgaggcggtaactgagtacctttggaagttattttactaggaacttagatctactcacaagtat

SEQ ID NO: 331980 - DNA, 544 bp, Cannabis indica
tgatgaaactgttttttctttcttctacttctattaatgctgatgaaattaattttttaagtttgtatcatttttagataaaaaaattttgcattgtgtttttttagtatgatgatgataaaactggctttattttttctgttgcttttattgaaataattagtttattttaatgtttatgaaattaatttttaaagttcgtatcgtttatatattagttgttttttatgaaacttgatttattttgtgattcccttggtgatatttacctcacattgaacgctcaaaccaactatggcttttgctaaagcaaataagagattaagggcgtgtttggaaagccacttgggaattggaattggatgtaattggaggtgattacacagtttgacgtgtttgtgtggccacgtaattacatagtaactgtgtaattagaggtaattgggaggcctcaattactctctccaattctcatacctctcatgagaattgtgttaggttttatgccctaaataaaactccatttcaatgtaatctattttat

SEQ ID NO: 331981 - DNA, 1618 bp, Cannabis indica
aattatttgaataaaaaattaattttttttaaagagttgaccgagttgactgagttgaccgggtcaacccgccaacccgctaaacccgaccaaccgaaacccatcaacccgtgacccgccaacccgccaacccatgccctattcgggtccgggttcggtttcaattttttgaacccgaaacccgccaacccgaaacccggtaaacccgcccgatgttcagccctataaagacagttccgattattaataaagagttgatcattttttatatatgcttgaatgttaaattattaatatttatgattgaataatttatataaatattgaaaaatttcttattcatatatgaggctgtaacttgtagctgtacagagaactaagatcacttagctatgaataaaacagtcagtaacatattaaagttatagaatctttaatcaatggttgctagtacggttcactgatgcctgttcttcggtgcaagtaattttagttcgaattactgatgtagtatgacatctaagtgaatgtgttgtatataatagaaattatatattatgaccaggatcgatatgaataaagttatctttatcaaatatgtcatttgctatgaagacctaattcatatcataacgatgatcaatagtagatcggtccaaatcatgagtaatcatgaactcttgttcatgttattagtttctttgatacactcgttaaagtttctcagagaagatgattcttacaacttctaatttgagaatctaataatatagatggctaggaacatgatcaacaattatagaatcctaacggataaaatattggttccctttatgtgttaattctagtactagaaagttgcacacaaattcagatggaatttgaattatacttccacttgtaaattaatggtactaaaggataaagagataattagaaaggtaaaacagtaatttgaccaaaactaattacgaaccaacacataaagggctaattattgaaattgattatatcaatggacactgcaataaaattcagtaaatataattctataattactaagagctcaattctatatttatagtggagtaatcataatttattggagcttataattataggcccatggtcctcgagtcgccactttgaaatattgtcaagggtagggataaagagttctataatgttgtttcggaaaaatctattttgaattggcaaaatagtacttatttatttttataatgaattaattaaatatggaaaaagataaaagttgttaagataaagatagcacaaggtcagccagcctgcatcctacaaatgcatggcctgctaaaatttggccaggcaggactttagtgcacatcattacacgtggacagcaatagactgcgaattaggccttaatagcccacaaagatagaggaaaaatatctagttttaaggggccattcagtcatttatatttactaatttaatatgtaaatatttgcttattttacatgataaaggggtttaagctctcctatataaagagacttaagcaaaccctaaaatcctaagctaaaaaccctaagccttaagctctaagtctgataactcatctcatctctctctc

SEQ ID NO: 331982 - DNA, 616 bp, Cannabis indica
tttttccctatcatatatgagtcgttctaagcaaattgatcgtggtttgactttaaaaaattgattaatcactattttagtttttcttcaaaaattttcccaatgtatacacatattatgggattattaagatctaaaataacctcttacagctcttcaataggttttagctagttatttttatcttggattctgggatctagatcctcatcttccttctcaccttcttctgttaggactaccatcaattgatgattggctttcctgttctgaagttctaatcgataacactcctcagccaataattggtcgcctcggacaactcctactcttgcttgtgttggaaaatttagggacaagtgcttgatcgagcttactgcccctagtccaattaatgcccagcgactcatcaataaattgtatactgattgaagatcaataactaaaaattcctgcatcagcgtcctttataagggtggctctccaacagtcaatgggagttcgatgatgcctaggattgcaatgctatcacctttaaatccacataggctcatcattcaaggcttcaacatcgcatcctctaaccccattttttcaatgtttccttgtaaaggat

SEQ ID NO: 331983 - DNA, 687 bp, Cannabis indica
agcacaaaaagacaaaggcccaatcggcccattttcttccccagccaacatgcccgccacgtggcggtctcctactcgctcgcagcagccacgccaggggcttgtccccttcttgtccatcacgcgcgcgtgaggcgcacgacctcaccctaaacgtgtgtgcgcctcacgcccaagaccgagagtggaccttttttctctccgagccccatcagcccaaatttgcttcagccactttccacgtggcattctctcatctcgccatgtgtccacatgcaaccaatgaaagggtgacacgtggcaggtatggttaaactttgtgtaattgcatttctagccacatgcaatatgtaataagtttaattgtgtattagtccttttacctttctataaatagaagcttaggtttttagaatatagttataggtttcagattcaaacagaaaaatccagagaaaagactgagagcactcagtgttagtttaccgctttcatagttaattttcttatgggtttttaagttcccttattattaaggcggacgatgaaacctagtgtatttaattaagtatttatttttattttgattctcaatataatatatgattatgattttcgcttcttaaaataatttctttcatctttaatatcacgtatttttgatagttagaaattatttatgcttgg

SEQ ID NO: 331984 - DNA, 581 bp, Cannabis indica
ctgtctagtgcatttttatttggttataaccggcgtacgcgtccatgaaggacagtagtttgaatccggaggtggcgtctaccatatggtcgatcctgggcagaggaaaacaatccattgggcaagctttttttagatcagtgaagtctacacaaactcgccaggtcccattaggctttggcaccaggaccgggttggctagccattccgggtagtagacatctcgaatcatgccactcgctaatagtttgtccacctctttctccaaggcttcagcctttactgagtcgaggggacgtcatttctgctggaccggcggcatgtccgagttgacattgaggacatgggtgatgacgtggggacttatgtcagtcatgtcttcttggcacgatgcaaaaacgtcaatggcactcctcaacgtttttattattttttctttttcttccaattctaggcactttccaagccggagtactttggtggaatcgaggtcgcacaccgacacttcctcgacgtcctccattggttctataattttttcggatcccacacggggatccagctcatcttcttcagccatt

SEQ ID NO: 331985 - DNA, 909 bp, Cannabis indica
ttttttcttttaaatttacggttgggttgcttcggtagttttttatgtagtttctatgtgagttgctatacggattttggttgcgatttaggttgctccattagttgctataagaacttttgtgtggaatctcgtaaaaatatatatatataaaaaaaaatccattttaaagtttgaaaataataaaaaaaaccgttaaatattattcgcacaatatttttaataaaattttagatgaaaattagcatgaaaaagagaagaaaaaaagcattaacaaattaaatatttaaaaattattaaagattatatacattgtcataaaaagaaatatgtatcaaaattttagcattaataatttataataaaattgcaattaaaaatgttataattgttattatacaaatttagacacaccagtttttggatataatttagacacaacttttataaaacttaataatgtatttaagaacacttataaatttccacaaaatttcgaatagtttacgattcttaaaaaatatatatattttgttgcacctcacatgaaagtatttttttataattgtattaagcaattatttgaactttattttttgacattgtaaatttatttagactttttttaaaatttacaggtggtcttaaatgactacaacataaataattatgaaaaaaattagactaattcaaaaactctccaaaataccgaaacaaaaaatagatttaccaaaacactcatttaggagtgtactacaaattttctctaaattttgttattttatattatttattttaaatgattacatgttaagaatttagtagtagtatatatcgtagaaaatatctacggtgtaattcttaaaaatgggtgcaccaatacaccctttactgctttaacattcagaa

SEQ ID NO: 331986 - DNA, 839 bp, Cannabis indica
ttcgaaatggttgtttctttttatttaaacttacaatagaatgaatgttgataccatggtgttattaattgaaaaatagcaaatttcatattctattgttatttgtactattgggttgagataattctttctactcaataatggaaaaatagcttgatttgttaatgtagtctctattgggtgttttacaattatgtggttacattattattttattttgtgtttgtggagtattttctttcaaaaaatgaattcatgaatgtatttccttgaaatgacatccctgattatttatagctggtttctttggtgcaaactggacttgaaataacacataatttattgaatagcaacggtaagtttttctaaaggtggtttgttgtcactgtgtttgttgctccctcttctgattaaagttgaggaaactcgctggcaaaattgaactaataattacaattgccaccactgagtaaatctgtcaaaccatttgatttactttttattttgttttggattgattatctttaagatagttaagagattggagtgatgattccataatattcaagctcaacagaccggaatgcaggctcctcttactggtttatattagagacaaatgacacatagttttgaaattatcttgaatgtattctgttttttaagttttaattattgttttatttttcttaaatattttcgttttaattttgtcttgcaagcacggtctaagcttcggcataacactgctgcaatgcaagtgcctattagattggtagaagatttcaagggccttatagaccttgtgcagttaaaaacttactactttcatggtacta

SEQ ID NO: 331987 - DNA, 445 bp, Cannabis indica
cgtaaaaatatctggagttattaatttctaaattttttattagtatttttgtgaagtatttattacgaaaagacttattaattttggttaacaaaaatttgcgttaacaatttggtactttcattgagagccttcgtgataaaaatcagaaaagtccctccttacaaatagaaatctatccatacttctaaggtggataacaatcaaaacgatagaaattgccctgcaaaaaccacacatcaccgtgggaaagagccaatgggtcctcaaagaccccatactactagaacatcacgttcaaggagaatttatggttgtgataatcaagatctaaaaggaatgaatgacgataccaataattctacaggatatgtaactatcaaaacccggaaggaaagaacgaagataccaataaatctacaagatatgtgcctagaagtgagga

SEQ ID NO: 331988 - DNA, 549 bp, Cannabis indica
aggttgtttctttcttggaaacacttgggtttcttggcatagtaataaataaaattatatcgccttgtccacagccgaggctgagtacattgctgctggtagttgctgtactcaattgttatggttaaaacaaatgttgattaactatggatttgaattgagtgttttaactattttttgtgataacaatagtgctataaatatttccaaaaatcctgttcaacattcaagaacaaaacacattgatataaggaatcactttatcagggaacttgttgaaaataattctttgcaattagaatatgttgatactgaaaaacgattagctgatattttcaccaaggccctagactcaagtcactttgactccctcagaaaatctttgggagtttgcattgtctaaatctctcttattcttgtttttgcataatattattaagttattccttgcttgcatctaatcccctttcattctaatttgacaactcatgtttatgcttttggattataattaattaggattgcattcttatcatactttttgaggtt

SEQ ID NO: 331989 - DNA, 1636 bp, Cannabis indica
ttagggcgttacaattttggtatcaaagctgccaagtttgtctaccgaagctcgccaagacatgtacaatcttcatcagagaaatttcggctcacagttcagtaagctcgtacttgtttagtattatatgtgattatttaagcatgttaggaagcatattagttataattgtttattttaatgcgttgccttaaaatccataagagcggtattaagttattttttatcgctatatgacctacctggcttatgggttcgtaggctaagtcctattaaatggacgcctagcgaaatacatagagtcagggtaataagtttgagaccggaggcgatcagggaaatcaaattctgatccccgtggtcaaggccgaagccgtggcagggtttagggtggtcaacatgtgaacccacctgaagctcctccggattgggagcaaagatttgcagaaatgcaagatcgtatcggccagcaagatgaacaaattttgagactaaggtaggagggtcctcctgcaatgcctccacttcaagctcaggttgttgtagttcctgcggtgccaatagaacaacctgttgctagcaaccgtatggagccactatatgagaggtctcgaaatcaagcacctccaatgttcttgggaggtctagatgtgatgaaggctgagcagtggctcacagtgatagaaagaattctgaatttcatgggggtttgaaatgattgggtgacctgcaccactttttagttcctaaaagacgctatcgtgtggtgggaattggtgtccctcacccgagacgtcattgttatgacctacgaggagtttgaagaattttttaatgccaagtattaaatgaggcagtccgcagtgctaagcggaaagaattcttagaattggtgcagactgatggtatgtcagtaactgagtacacaacaaagtttgaccatctggccaagctggcctcgggtattgtgcctacagacttcaacaagaaggagaaggagaaatctagaagctctaaatttgaaaattagacatgacttggtgattactacaaatgaggtgacatcttatgtagagatggttgaaaatgccttgcgagccgagtgtggggttaagtttctacaggagcgctgagtgactccaagtgttggtgggacccccactcttcctactcttgtctatggtagggatggtggtgattccaccactaatcaaaaaagaaaggctaacccgacatctggtggttcggggcagagcaaccggttctgtgggaactaaggcagaggtggacgccagggttactcttaccctgaatgcccatgttgtaagaaatatcatccgggtgagtgcaactggaagacatgcttccagtgtggcatggtaaggcatttcaagaaagattgccctcaaacaaagaaagaagagtagaagccagaggcaaattctacacctgcttgggtgtttgccatcactcaagctgatgctgcagctagttcttctatggtcagcttcctgttaacaactccttttttactgtgttatttgacttgggagctacacattcatatgtggcaacacgggtaattgatcttttgggtaggccatctgattttatggaaagagggtttggaacccta

SEQ ID NO: 331990 - DNA, 616 bp, Cannabis indica
tatagtgtaataaaattaagagagaaggtaaaaatgttgatgtgaccgtgttgttgtatatatgtaataaaattgttgtatttttggtgtaaaaaattcttttgatttaggatttaaaatttgtgctaaatttaataaaaaaatgagtttatgctatatttagctcagtatttataataatgtacaagattctttacaaaaaaaactattttagtgatgattttttagtcacaaaataattttcttgtgcataaatgtgattttttgttacaacaaaaagttacttgtgactaaatataatatttagatataatttgtcgcggatttagttttagtcacaatacgtattatgacttaaaatacatttggtcatagaaaattgtgatttttgtgactactacttttagctacagaacttttagtcacaatataataatgctagtttataattagtcaaaaaaaattcacaatataataatgatagtttataattagtcaaatagcttatatacagcttggactcatatcacactacaagaaatgtcacttttaccagcacagttcgctactgcgctggtaaaagttttttaccagcgcatttcgcaaactgtgctgg

SEQ ID NO: 331991 - DNA, 896 bp, Cannabis indica
aaaaaattaatattttagcaccataccatgacattaacccatccaggtctaggttcgggtatgtgagcaaaatataaaatataatatgttagacaaaaaaaattgtttttgaaaattgaaaacagaattttgatggtttctgttttctagttttttaaaactcaatttttaaaaaacagtttttaaaaatttttgccaaacgactcctaatagtttttaaaactgttttcagttttaaaaagtagaaaacagtttttaaactgtaaaaccaaacagcctcgaaggcgttcaagtggatttttgggttgcgtcgatagtttgggaggagaagctcacatgggtttctagagagggcttgccgcttgtgagtaaagatattcatccaattcaatccgcacagtccctaaaagtgcaaattggataaattattttgaatttattaatttttttaattaaattatctaatatttattaaaaaaaattacataactaacacaaaataaaataaattattattattttatatttacaagaataaattaaaataaataaaatagaaaaataccaattttatgaaaaaaaaaataatatggataaattataaatatatttatacaataatatatattagatttttaaattataaattttttacattaaaatattaattttatctgtgaatcaaattccaatcctcacgtccacacttggattggatgtgcaaattaaattagttgtgacttgtgagttcagaaagagatagagaatgagatatatgttagaaaggtatagagggggaaaattatagaagggatattttgatgagaaagaatagagcaatttgcggcgaaacctccttacgttttaatttttatacacttaatcctcttattttt

SEQ ID NO: 331992 - DNA, 541 bp, Cannabis indica
agtggttcaccaagttcgttatcgagtttgagcttcgggtccatgggaatcttagcaggcttgctgcttgcatatcctgtgtcatccaaaacctgaagagtatattttctctgagagaggaataagccttgtttggcacgggcaatcttgaagctgagaaaatatttaaggttgccaagagttttaagcttgaacttcttgtgcagggagtcttgtagttggtgaagcagtgagagattgggcccagtaatgacgaaatcatcgacataaacaaggagggaaatgaagtgtctttggtgccttttgtgaataatgtgtagtttgcctgtgattgctgaaaaccttcgtctaggagtgcatcggatagctttttgtaccactgtcgagaagactatttgaggccgtaaattgatttgtgtagtttgcacacgaggttggtttatgcattgaaagaagaaggaagtgtgagtcctttaggaagagtcatataaacctcttcattgaggtcaccgtttaaaaaagcattgtcaacatctagttg

SEQ ID NO: 331993 - DNA, 600 bp, Cannabis indica
ctcgctctgaaatctatgagcgaggatgcagcccgggtttggatggcatgtccgtcatgttctatactaattattggcacattgtcggtgatagtgttaccaaaacagtgccaaaagttctcaatgacggtagtgatccttcctctttcaacactacactcatcaccttaatccccaaagtgaaaaagccgctgaacatggctcaacttcagcctattagcttgtgcaatatattatacaagcttttttccaaaaccattgttctaagaatgaagccgcacttaaactcaatcatatcagaatctcaaagtgcttttttgccatctcggttaattacggataatatacttgttgcttttgaactcattcactctctcaaacatcttaagagaggcaagcaaggattcgctgcaattaagcttgacatgagcaaagcttttgatagaatggaatggcactttattcaaagtatgatgctcactatgggattttctccacagttggttaatcttataatcaggtgcatctctatagtttcatactcattccaactcaatgtgtaaagcccgcttagttaatttggaaattagcagttgttta

SEQ ID NO: 331994 - DNA, 618 bp, Cannabis indica
taaggtttaccttatgggaattagggttattccgattattgatttaaggtatttattatatgttgttgtctgacataggacatgggatcgtcaagctttgttttccacttaggccggcatgcatgcttaatctttggactaaggaaagaaaagtgttatgcaccgttttgtgattaacgatatgaatgttatagtcttgattatgatcgagatcccgatatgtgtttgttgtgatttgaatgttaagaaacgattattatcgttcgtgactcgattttgatcgaggtaatgatatgaaacaattattatcatttgtgactcgattatgatcgaggtaatgacacataacgattattattgtttgtgactcgattatgatcgagtaaaagatacaatcattactgttataagtaattactcgttgaaaccgcaaataggtttcttacttatcgttcactttattgggcaacgacagtgacatatatagctcgtagacaacgagtgataagggtgctttatgaagcactgagattaggtgattatggtattgtgtaattagagtgcttaatgaagcactgaaattatgtgtttatgatgagttattggttgtcaccacta

SEQ ID NO: 331995 - DNA, 1056 bp, Cannabis indica
ttttattaaaaaaaactttttaaggggcaattgttatactcaaaatttggccagcactttaaaggaggacacatgtcaaactgggagaatacgaaccaaaaaatataatgatatttatatttgaaaatggaaaactcattaaatgcagaactgacagagtatgtttacaacttgctgactgtaaagtcttacgcgagataaaaatatacaaactgttgcctcgtatattaacgagaaaccatacgacacaagtagtgcaaggtgaggcatcaacctcactacgcatgaagagacatagacgagacattaaggcacgtagcatataatatactatatacaaactaagtacaatagtcgagtgagtccaaacaactaatagcgaggtatccatctcgctataggaaggcgcgctcatagtaccttcgctaatcagctctagacatctttcaatgagatccacaactttgtcgagtcggctctctaaaatagaaactgacatttaaatgatgttgactgctgaagttcaccttgtcaccaagaactacgattgtcaattggagcattatgctatcaagcacagaaacgacgaggtttacattatcaacatcggatagacatgggaaaagttctaactcgctaccaggtttattgttgctatgttcctagcgagacgtcccagaataatatgtgttacaacgtatttaatacacatttagattgacccggtaaaagcaaaccaatcacagctgtgtgatttttaaatattagccgcatttattttacgtgggatgtaatcaaatctcacaatttcaggggatgattgttgtaaaatatcagtcaaatatgcaattaactgccctcctatgtaattataaataggagcaggttacactaaaagaaggaccaaaaaatcattagagagaaagccctagaactgtatcagaattctaataagattgactcgtggactatgcagaattttaattgcaaaaccacgtaaaaaatctctgtgttcttactttttctttattgcttttattttctgtgcaaatctat

SEQ ID NO: 331996 - DNA, 1656 bp, Cannabis indica
ttcatatttagggtgttaataaatatacttgtgagtagatctaagatcctggtaaaataatttccaacatgcccacccatagcaagttagtcctcaatcatagtgtgtaagattgtgaagaatccaaacaacaaaaggagtttcgggctcaaatcttggtgatactctacgacagaaaggatacaagggttagacatctgagcagaaggagtcatttaattccgctacaaccaatgtaaggtttctcataccttttatgtgtttattttcatcgctttagagattcatatttaggatgttaaaaacatacttgttagtaaatctagatcatggtgaaagatatttcaacacatcgggctaagttttcatttcatagcaaagcgtttaatacatttcataggtgatactcagagaaataccatatctccaatctaaaaatcaatatccttacgctttggatttggattgctgttttgtctgctctgagctgcgagcatttgcgctctgattttatcaactgcctcacttgttctttgaacagcttcgagacccaagaactttctctcacctgctccatcctaatgactaggtgatctgcactttctttcatataatagttcataaggagccatctcgattattgcctgatagtttttgttgtacaagaactcgatcaagggttacccatgatccttcaaagtctagtacacatgcccatagtttgtcctctaaaatctgaatagtcctttcagattgcccatttgtttgaggatggaatgatgtgctaaatttcaactgatcacccatagctcgatgtaggctctccagaatattgatgtaaattttagatccctataagaaacaatggactttgtacaccttgaagatgaactttttgtctaacatacagtctttcatactgatcaatggagaaatttgtccaaataggtaaaaagtgtgctgactttgtaaacctgtccactatgacccacataaagtcgtactatcctgtagtcctaggcaatccaaccacgaagtccatggaaatgtcctcccatttccattccaaaagattcagtggctatagtaaacctacatgcctttggtgttcggctttgacttgatgacaagtaaaacactttgcaacatattcaactatatcatttttcattcaaggccacaaaaacatcatcttaagatcttggtacatctttgtccttcacggatgaactgagtagggagtcgtatgagactcatttagaatttctcttttaatgtcaccatccataggcacacaaacacggttcataaactgtagcatccccatatcatctactataaaatcactagtctttccaaccgaaaccctatctcaagacttcactaaatctggatcttgcaactgtgcttctttgattcgttccagaagagtagattgcagggtaatgttagccaacttccccacaacgaactcaatcttagctcgggtcatctcatctgctaaatggctggagatttgctttactgtattcatctggctctgccctttcctattcaaggggtcagctacaatgttggccttcctaagatgataaagaatctgatagtcataatcctttaccaattctagtcaacgtctttgttgggttttatgcc

SEQ ID NO: 331997 - DNA, 615 bp, Cannabis indica
catactcttgggtgacgtaatcttccccctcaaccaagacatcaccgagctcagataccggctctccagcctcattgtagcctccaaagtgcagaagaccgagcaactccctcctccttagcctcggaaggactatcaagacggttgtcatcctggtcttccacctcctacacttcaatgtccccctcatagtcctcttcctcagcaacgggcaggttttgttcggcacttggcaatgtgaaatgtcgggccatgtgagggtcagttgcattaatctttcgcatcgtctattttgtgcgggccatcatcctcctcctggacggatattggtgtgtgtgtcgtgcaacatgcacggttacgtcaggagcagcgattggaatgccaaaggcaccagaacttggacggcctacgggaatagtgtcagcaatacctggtcggacgatatatgtctagttagatggaagatagcatctccaccccttcctaagctccaaaacaaatcgtccgcaaccttctcctatgatctgctcggagtaaaaatggtgttgcacttcaggttctggagtaggtgaactttcactactcacctcccaatcttcaaaactcgagttagaa

SEQ ID NO: 331998 - DNA, 986 bp, Cannabis indica
attatttctttaataatttagtttgataaagcttagtttattctatttcattcaaattaagaaaaatatcaaaaaaatcaatatttcctctcccttctctctctttctctcgggcaccctagaagccagcaagaagctagggttttcttcagcaatttagagcttaattaacaccattgttgaggtttcaatccttagtaagcttcctagctcctccttttgtgttttatttagttttaagctaacttctctagcatgattttgttaaatagggttctgtgaatttagagttgttagattttgtgttttgatgatatattatggttgtctgagctgatttgaagttagtttgtggcttcgcttaattgttagacaaggtttgagttttagaactcaagctttgttctacaatggtgttttgagttttaggggttgtttcttgtttttgttgcatgaattatctttattatgatgttattatgtgatctggaagtttgtatgaagtttgaggttgaattgaagtgagtaggtgggtttttgtttttcctgcactaaaccagaattctatttcagggggacctgtaggaaccgaaggactggttagtccccaggaaaccctacaaaactggaatttcgattggggaacgggtctacaggttggggaatttttgggaaccctcgtttttctcgtttttgcaataattagagtattaccatgtcatccatcggtagggacacttttagtttcaattttaagtccccgaaaagtgatttagcgtgtcacttatcagttgcgaataatgtgatttaggggcttgtaattcatcgagcagcttttctactcaggttggccggcacacttgaattcagaaacgaggtaagattagtataatgataagaatatatgattacatgtttagcctgcatgtttatgaatgcctgtaagttaacatattataatagcgatattagtgtacatagagatg

SEQ ID NO: 331999 - DNA, 723 bp, Cannabis indica
tggatggaacgggaatgttgagatttgggaatcgagtttgtgtgcccatggatgagaacatcaagagagggatcatggatgagtctcatacgactctttattcagttcatctagggtcaacaaagatgtatcaagacctgaaagccatgttctggtggtcaggcatgaagaatgacattgctgaatatgttgcaaagtgccttacgtgtcagcaagtgaaagctgagcaccagtgacctgcaaggttacaacaaccactgaatataccagagtggaaatgggaggacattgctatggacttcgtggtaggtatggctagaaccacgggacaatatgactctgtgtgggtcatagtggacaagtttacaaagtcgtctcactttttacctgtttggacgaatttctccattgaccaatatgctgagttatatgtcagagaaattgttcgtctgcatggtgtcccaaagtccattgtgtcggatagagatctgaagtttacatcaagattctggaaaagtctgcatcaagctatgggtactcaattaaagttcagcacagcttttcatcctcagacggatgggcaatccgagaggaccattcagatttcggaggacatgcttcgggcatgtgtgctagactttgagggatcatgggtaaagtaccttcccctgattgagttctcttataataacagttatcaggcaacaatcgggatggctcctt

SEQ ID NO: 332000 - DNA, 515 bp, Cannabis indica
tgaaaagatagagctctaactcacctacctgacaccttgcaaccaagtgatgtatggatattttggcaaaggcatcgcacctgtcgggtatattagataacccctcatagatggagaaactctaaccacacaaacattggtggtgcagttcttcgtgatcgacgttcccttggatttcaatgcaatgattggctgaccggccctcaatgacctgaaggttgtgatgtctatctacaacttttgccttaaatttccaacaaggcatggagtggcagacatgagggaagacaaatagtttttccgtcacttatctaaggccaaaaaagagaagatgctcgccaaaagtctagaagacgagcctagtaaggggtaatgaagtgtagcccaaggcggcgacacatacatagatcctggctttggggatcctacaggatgcttcagacctgtggaagagttagaagaagtggaagtcgatcacactccccaacataaagactgaacattggtaaaggttt

SEQ ID NO: 332001 - DNA, 509 bp, Cannabis indica
atgtaggtgttttaagacctccaatcattaccttctggtttgataaattctttctaaggattgggtctgctttttgctggtagcaatgtcccactctggttcaggaatttatcatctagaagtcttagagtttgagtaacctatagaatttgccatcccatataaacctaatccctcgaaacccacctccaaattagagcgaaatgatgttagggctaacacagtgagaacccaacaagaagatatctctatcgctacaggcaacttcttgcaagaaatatccgaaggcagaccccgattcttgcaagaagcagcttggccagaaccacctagcgtgtcctttattcctgtggcaaagcctttgtttttatccaatttcacaattgttgggttttatgccctaaataaaactccatttcaatgtaatccatttttattcaatatcaataaagaaacagaagtatttttcattcatttgtatgtttaggttcatcttatcaattgcttgt

SEQ ID NO: 332002 - DNA, 870 bp, Cannabis indica
ataaaacccaacacaaagtcctcacagcaatgttataaaaaatttcctcacacagactcatcccaagtcatagtactaacgtctcaggtctgccccacaatgtcccaccagacacgggcataatcttgtaacataaatgcagtacaatttactcattctgttcccgtcacccccatattatctaagatgcgagggatagtgctcatccactgttcagctttaattatatcagttcctcacagaaacgttagaggttgcagcttcaaaaagcgctcaaatacataatctctatgcggcagtataaaccccaggttacccaccactggcacaggagttggcggtaacacttgttttgttaggagctgccggtgatggttgcctcaactaatgcaattcatcctcttgacaaagtataatacttcgcatttcttgaaacaaatgttgccaatcagcaggcggattagcattatcaaccccggcattatcccctggattctgcaaaggcaaaggcggtgccagtagattgatttggtcaacaccaggctctacttgctcgccctgtggtctagataattgcggagggtccattttcacaaataaccatgtaatcaacaaccccgacgagtcaggcactaataccacacttaccacttgttgccttaaaccctaactcgactatactaatcatggctttcatatcacatatatattagatgctcacatactgtctaaaatagaaagcgataaataaataatcacataagaagttaagggtgcgtttgggatagcttttaagaaagctagaagcacttttttaaaaagctatcattcaaaatgtgtttggtaaaattagaaaactagcttttttaa

SEQ ID NO: 332003 - DNA, 807 bp, Cannabis indica
tttttaataaaagtgtatatcttatattatataaattacatttattagttaaactattttgtatttaaagtttggacattttagtttttaccttaaaatttagattttatagttaataatttttagtgtatttgaatattgaagttaaagtttaaaatctataccatattatcacttttttttattattattttattcaattattttgtgtttactcaattatatttatcttatattaaagttcttaaaattaatttaaactatagtattttttagcctgaaatataaataatatatttttatttttttaactttaattatttgaattctagaaactaaccataataattataaaaaaaataaataaagaacgacgacaaaatcattgggcgggttgaactttttctaaattttcattgggcgggttacgattaaatttttgcaacccgatatttatattgggttaataaaaatatgctataacccgaccaaaccgaccaacgtacacccctatttggtaccctaaaataaaatttaatcaatagaattttattaatttggccaaatggttctcagttatatgtaattaaataattaaatttgaatctagaatttgtaaaattaaagaaaattaaatatattttacacgcgtataaaatataaaatagtcacgcgtaaaatttaatgttcaaacagtctattttacacgcgtataaattataaaatagtcacgcgtgaaatatatattataaaatctaaaatatattataaaatagactattccagttcagattttatagtagaatt

SEQ ID NO: 332004 - DNA, 539 bp, Cannabis indica
gcgcccaaggcaccctgccgtcctgtgaggaactgcctcagcaagctcctcactgacatagtcaacgccctcaaccaggacgaccccgttagcatcgactggctgcccagcctcattgtactccccaaagttagggggttcaatcttttcctctccctcaacagtgggagggctgcccggacgcgcctcatccagctcatcaacctctgggacttcagcatccccctcacggtcctcctccattgggaccgcgaaatcctgttcggcatcgggcagagtggcgagtcgagcaacttggcggtcagaagcgtcagccatatgcgtggttttcttcgtacgagccatcatcctatggctgggtacagaatcagaagggcagttagcacaaagacgatggtggacttcgtgcagtagttgaagcagctcctggtcgatttgatgctcggtctcccaagactcaactgagttcatctacaaaagacaactcacaagatgagtgttggacggagtatcaaacgaaaaacaagcaaatatgccga

SEQ ID NO: 332005 - DNA, 642 bp, Cannabis indica
aatcagttggtagaaatctgttttcgtggtgtaaaaaccattgaccacaaagccattgaggatgctttcttgggtagtaggtggggtttggatgagtcccttggtttgaaaatggttgttttgtattttattcagtgttttcttcttagtaatactcctgataaagaagtatctaggtttgatctagatgttgtggatagcggtcggtgggacgagtattgttggggtagggaatcctttgaattgacaattgattcattcaaaggtagaattcagcatgggattattatgaaaaataggaaggcagagaagggaggccagtatgatggttggtatagggctttgggatgtccttgggtttttacggtttggttttatgaatgctgtcctgctatggtgaactctttctgtaaaagagtttcatcttctattccaaggattctgaactggagcaacaccattgtcaccaaaaatccaactcttcgagacttgaagggcaagatttttgatttgccgttggacaaggtaatttacagtttctttactgtttcttttcagttttatttatgttgttaatttttagttttttaaattgtttttatattttcatattatgtttgattatgctgttcagttgaagat

SEQ ID NO: 332006 - DNA, 1172 bp, Cannabis indica
tggtattatgcttgtgattaagtaagaaagattatgttattaccctaaaataagcggttatatggtctagagttatcaccctagtgattaaacgactttgaatgcaatgccatgttatatattttgagataaagaattatgcgggtaaggcataattaggttagactcggtgatcagaaccgagataaactaatctaaggccttattgtaaatagatgtgtgagagcaacacataggtttatgctaaatagatagtagatgcggtggcatcagtatttatttgaattgtgaatatatggtatactgctatttatactgtcttgctaggcttggctcacgggtgctctactatataggaaggggtaaatcaatttgtgatcagccatgggttcggggtcttggcggtggattgtacatgttcggaccatactagaccacgcaggttgggtctaccagctgatgttttttgtattctttgttttgtcgcttaggtcggcatgtaaaaatgacttgtaatattttgtgaaattttttttgggatccaaaaagttgagaaatcattttaaaatggtttgtaaagtttaaataattataaattatatttttattctgtaattaatttaaagtttaaattctgctcttatttccagtaatcccaaattagtgggattaggttatgtttattagaaaattgtagcgtgcctaattgttagggcattacatatatgttagaagatgggaatgtatattagaatcctcatatctacaccaactcagaacttattagagatggtggttactttgggggtggaagaattatttataataatttagttcctccagtgaagataaataacttagttgtttttgaaaagcactataaagttattcaatctgaagataattcttaactgtttgatttctattctattttggatagaattagagatatgtcttctattcattcagatgcacttaataagcagaatagaattcagtatccctaaaggagtaatacatgtagaagtatgatgttacataatgatttatgagcacaaatgaagtaatggtggataaagtagttgcttgccattgccttagagttcctgttattttggtatagtcaaatacgcaacactttatctggatatcaagataatggattgattgaa

SEQ ID NO: 332007 - DNA, 789 bp, Cannabis indica
tttgaacaacttgactgaacaagtgaaaagtcttcgaaagaagacttgttcaagccttacttcgagagaaagtaagcactcacacatcaaagtcgaaggaagttcgctgtttgatggtgtttcagaaatcagattcgtgaagtgaattacaaaggattacgacaaagatttagaggaagtctaaatttgttaaagtcaattgtctttgtaattatttaagactttactatttaattccattctctgggtgtgactccgtgaactaggagtgttcgaaagaacactgataccacgtataattctcttgtgtaaagtaattttattttctggtgttatttttgcaaaactatgttctatagtaatataattatattttacagttgtgtttttactgatattttgtaaaaatttattggttttgcaaaaatacgatttttttaattattattattattattatattgagataataaaattacagtagagtagggcacactagggctgtacatcggtcggtttgggcggtttatcctatatattttctaacccaatctaaagttcgggttgctaaaatttaagtgcaacccgcccaatttaaaaaaaaaaaattctataaaccgaccaacggtttgggcggtttggtcgggttaacccgcccaaaccggccattttttttttttagttttaaagtcaaaattaacaaaaattttaaaaataaattaaaaatatcacattccaccaaagtacaataccatatatatgactttaaaactaataattaagtatata

SEQ ID NO: 332008 - DNA, 1245 bp, Cannabis indica
ttaatggacgagattgcacatgcctatggatttgatgacaaaattatgagctcaataaggttaacatatttgtatgtatacatatgtgacccagtgagagattgttagaaatttattggggtcacaattgtatatatgaaatgtgtgttgggtcatcaaataaataagtcaaatttatgtggtctattttagaataaagtttatgacttaagggcatgattgtcatgattttaatatgtggataccataaggacaatttctattttgatgaggggccaaatagaaatagtcaataaatattaccaacaggtttgtctgttggtaatataacgggtaatggtccccatttgcatcgtatcttttcactcttgtatccccatcagcaagagaaaaagttttagagaaaggtttcgatgcaaatgggaagatcataccaatcaaggtcattacaaaattgattatatggattctggtacgcttctactaatctatattctattatttgattctcttgaattaattagggctaaattaagttttacagtattcctaacaaaatattgttgtaaattttattctgattaatgatcacccaaatagtgactgcttagaatatggtttacaaagtttgaaacaatggtagaagctcataaaataagaatgatcatgactctcgcataaacggggcaatgttggattcttattttgatcaaataaaaggttactaaaatagtgtcaattttagatgagctgactactctattcaatagatgatatttttgactctctcctaaatgagacattttattttaatttaatttattgaaaacgttggaaaataatttaaatatgttttctgaatatgtgtataaatttatattgaaccaagtaattaacttctgtttatttatatttgtagttgtcaaactattgtttaatgatcctcaccccaattctcttttacttaacgcatttgcaaatgaactcgaaagtacaaagatgactcctggtcagagtatcactagaatataactatgttgggaattttgttgtcaaaagaaaaaatagttcaatttgttctcaacagtttatcttcagagtatagcccatttgttgtatccttcatgatcaacaatttgatctcatctgacatagacaagcttaacactgaattgttttttatgaaaagacaatgtcgaatgcaaggagatcattctctagcacttcatgttggaaattatttta

SEQ ID NO: 332009 - DNA, 1075 bp, Cannabis indica
tataatagtggtatataattttactggcataatacaaatattttaatgtaagtaatataattttattagcatgctacatatatttattattattttttatatattttatgatatatatttattttaaataatatttaattagtttctattttattatatacaacggtgatatataattttgttgtcatgatatatttattttagttgtggtatataatttggttagtatagtatacacatatatgcattagtaatatatgttttttattattattattattgttagtatatatgctttggtgaatgatatatgttatactcgaaattcgactggaggacgcatgtcaagatcgataaagggaatgtgaatcgatgtcgttgctttttatgaaataactcattaattacgtaagtgtcagagtatatttgtaacccgctaactgtaaggtcttaggcgaggaatcaatgtacaaactggcacttagtatattaacaagaaacaatatgtcgctaaatgcgaatagcgaggcaccaaagaaagcgacacgcatcaatcgtgaaagtccttagcatacaatgaacaaactaagtgtaaaagtcggatcggcttaagaacaagtaagcgagatgactgtctcgttatagaaagacttaatgcaacttcatcccgttagcgtcagcgaggcttacaatcttggcgagccagaagatatcattcaagtgagcctcggagaattctttgaggataagaaccgcgatcgacaccaaacatacatcgttgacctcggaaggaagaatggtcccagctcgcttctgagatcactggaactaagtttctgtcgagacatctccagatacaacagctaaagacgtgtttaatacacgattgttttgacccaataaaagtggaaaaatcacagctatatgattttcaagtcataaaccgaatttacactacgtaatatgtaatcaaatcccatgattttagggatgattgttgtaaacatattccggtcaactttgtaattaactgtccactatgtaattataaatagtgacaaacaagataaaaaaa

SEQ ID NO: 332010 - DNA, 953 bp, Cannabis indica
ttattgtccaatattttattcttttttaatccatataattcaactgtaagccctatttgaattactatataaggaacatgatgctctcatctcatccaactgaacttaatttttcaacctaccaaatctagttttcactctctaacaactagtccgtgagagacaccttctaactagttttcaagactccttcattgttcttcatactcgagcctatagtgatagagtgtcatgcccacacatagcaagtcaagtactcaatcatagtgactaagacggtggtaactgaacctgcaggagtgaaagagatccatgctcaaatcttgataatactctgtgacaaaaaggaacaaaggttagaagtctgagtggaaggagtcatattatttttctacaacgaatgtaaggttttctaaactcttatgtgtttgatttcattgttttagagatattcatatttaggatgttaatcaacatacttgttagtaaatctagatcctgataaaatattctcaacaactggcctcatagccatggtaatgatttaattttatgaaatatggatttaaaacgatgaatatgttaattgggttgatttggatgtgttcatgttggtttatgtgttatttgatgattgaatgtgaattacaaaatttttccatgaaaataattttattttcattcagtacataatttatttggattccttgtggaaaattaagtaatttttgtttttacgaaactcaattctgatgaaaaatgagaaagttatgaaggtttgaaaatcagatgcacatggtgctcaattgcacgcaatcggctttagacaagatcctcataagcgcgtgtgtgtggggacaaatcctatttgaaggctctcctagaagctacattcagacacgattgaaggttcgttcgcgcgcgttcctgttgggtcttgtgccctaaataaa

SEQ ID NO: 332011 - DNA, 1028 bp, Cannabis indica
  modified_base (5)..(5): a, c, t, g, unknown or other
tatcncttgaatctgatccccatgtatagggatttccttgatgactcacaatgcgaaagctgattcgcagtgtttgtcgctctgcgcggattgctgattgctctgccttaagcatgcatatgaggtatcctgttcggactatatcttgcgagcagatacctagagttgattccacgtgtcaccatcgtgtgattccatgtcagagtgcaaaattgggataacattttcccccaagtctgtacgggacttctgaatttacgtgtagacttcatccaagttgtctttgcgtttgaatgggtgacacgtgtcaggtgtgtctgttcgtgactcgatgtgaggctgactgggcgtcccttcagttttcaacgaataaatgctctgacaattaatatttcaaaatccgattttctctcaccacggttgacgactgcacttgattgcttttgatttctcatattcgcatttggggggaaccaaggcgtctaaggttcttttgaaatgattaccccttttcatcgtttgcctataaatatagtgagcatttgtccacaaactcattttcaccaaccttccttgctaagtaacttcagagcgaaaagagaggtttttggcttcaagtctgctgaagtgctttcatcaaaattgctcgtttggcttggcatgacttgaatccaaatattcgttccttgagtatgttctcgatttcttttatgtttactttgcacattttactttctgaatgcaccttcgactttgctgtagaagatatgtaggaaaccctaaattttagaaactctgtaattttcctttgtaacgattcatgcgatttcatcgatcgtaatgcttgctttttgaactgtataattcctgtctttcattttgcttattctaagcttcatgaaattttcttccctaactcgcgaagatttcaaacttcctgagttttgacttttcgttggatattcttattctttaatctgttgagtagttctggtcggtatattctcctattttaatgttcgatatct

SEQ ID NO: 332012 - DNA, 1925 bp, Cannabis indica
tgtgatatatgggctcacctgattaggtgatgtggtatgcctggtgacataccaggcgtagttacgggcatcaatgacatatgagtaccaagcataggtacgggcacatctgattatgtgatgcgagactcctagagacgtgtagatacgtgcgtcggtgacatatgagtaccgagaagaagtacgggctcacctgattaggtgatgtgatactgctggcaacatgtagatacgagcatcactgatatgaaaatgcaaggttatggcatagaatgaaaccattgtagggtttcctcctagtgacgtgtatacaacgtcaatgatatgaaaattgacaggctatggtatagaatgaaattgttgtagggtttcctcttggagacgtgtagatacggcgtaagtgatattaaattattatttttatattttttgattgtatgattatttattttaaataatatttaattagtttttattttattatatacaatggtcatggtatatatattttaattgtggtatataatttggttagtattgtatatgttgacctcgcttttagccaacgacaatgagtctaatttagtaagcgacaagaagtttataacaattgaagtaaaataaagcaatataatggcccaggaattttatagaggttcagccccgagcagttcggtaatagcctaatcctcggtatttgtattaactcaagaacaaggagaaagattccttttcttatagctcttacaacaatatctctgaatacgaattcttagacaatttctcccaagtaaaatccttcgaccctttgcccagtgaatatgcatcactatttataggctatgagcttggagaggaagtattttccttcttgttacaatggatataagtagaaagattgcatagtaaatacagaatacctgatcgtgggatttggacagcttgccatatctctgcaatctggtccccaagttatagggatttccttgatgaatcacgattcgaaagcaaaattcgctaagtgttggtcactctgtgcggattgctaactacttggctttgagcatgcataagaggtatcttgttcagactatatcctccgagtaggtactcggagtcgactccacgtgtcaccatcatgttacgtcgcctcagagtgcaaaaatcagagtgcaaaaattgggaaacatttgccacccaagtctgtacgggacttccaaagttgcgtggagacttcatccgagctgtctttacgtttgaatgggtgacacgtgtcaggtgcacctgttcacgactcgatgcgaggctgactgggcatcccttcgattttcggctaataaatgctttgacaattaatatttcgaaatccgattttttcctcaccacggttgacagctacacttgattacttttgatttcccattttcgcttttagggtgaactgaggcatttgaggttcttttgaaatgattacccctttttcgttgtttgcctataaataccagtgagcatttgtccacaaactcattttcaccaaccttccttgctaagtaagttcagagtgaaaagagaggttttctgcttcaagtttgctgaagggctttcatcaaaactgctcgtttggcttgacgtaacctaaacccagacgtttgattccttgagtaagttatcgatttcctttatgtatactatgcacatttgctttcggaatgcactttcgatttcgctatagaagatatgtaagaaaccctaagtttagaaactctgcaattttcctttgttacagttcatgcgatttcatcgtccgtaatgcttgctttttgaactgcataatgcatgtctttcatcttgcttattctaagcttcataataattttcttgccctaactcgaaaaaatttcaaacttcctgagttttgacttttc

SEQ ID NO: 332013 - DNA, 826 bp, Cannabis indica
aagatcactttgatagcgagcagaagcttgtcattttagcttttcgagactaatattgtcttaatcctgatggtgatattctctggggttgagaagatcttcctcgcatgtaaaacatctcttagagagataaatcccttgatgtctattatcttggctcgtcatactatctatactcagtttgaatatcgtataatatacgctaagtatttttaatgttgtcgctttctctttcacgcagcgaggttgaggcctcttcatgaacgcatgcacacatggtttttcgtcaatacataaattagtagttcgtatgtttctatctcgcagaaggctatttagccagccgagttataaacctaccctgggaattatatttctaacgagttgttccatgctaagcgtacttgtcgtttgtgtgtttgagttcttctcgacacgtgtcctcctctgatgtgcttactgaacttcgggtataacagttataattttttggcagtcgtgagtaccttaacatgaattgcatgcaaatacatatgtagcaaccactaattggtccacatcatttacaatttatttattatttaaaaataataacaaaattactaaaatttaaacatttttattaaaaaaaaatcaacattaaagcatgtaaaattttggggatttttacatttgacaccttattttaaatctaatttttaaaaatgacgtgaatatttcttttactcttttctttaagtgtatctaacgtttttatttgttggcattatttcaataacgtgtaatctcaattgcaaaaaaaaaaaaaaaaaaaaaactactatcg

SEQ ID NO: 332014 - DNA, 1094 bp, Cannabis indica
caattctcaaaggattccctaccccaacaatactcgtcccaccgaccgctatccacaacatctagatcaaacctagatacttctttatcaggagtattactaagaagaaaacactgaataaaatacaacacagccagtttcaatccaagggactcatccaaaccccacctactacccaaaaaagcatcctcaatagctttgtggtcaatggtttttacaccacgaaaacaaatttctaccaactgatttgattcctgtgaaaacaacaacttgttgcaatcaccgaaacaatcaattccagtaatcaaataaaattcctcagcactaaaccgtatgcaacggccagcaaccttagcccaaaactctttaggattgggctggaaaacttccctcaataatagactatgaacaacttggggatggaaaacaaactcaggcatatctagaaaatgaccaaattgagtctcacgaaacatggacagtaaattgacagataaagttttcttaatattatcaatgacagaaaaaagactagtgcaaacacatttagatctgtaataatcagagggactaaatttgtagtcccagacctgcaacataaccaaaatggcaacaataaaaataaattgtgaataatcaagtatagcaactataataaaactataacaaaactaaaaacaaactcccaaacagaaacaaccatacaaatataaactgcaaacatctgaaatcgtattgatacctaaaaactaacagcaaacaactatacctaataaaaatcccaaaacacatcaaacataaacatattaaactataaacaaactaagaggaaactacaaccaactgattacacacactaaaacgaaaacataagtttcaaaaatatctaacaataaattacaaacacatacagaacctaaaacacaaacgaacactgtaacgaaagtaaatacaatcaaattaaaaagccaaacccaaaaaagaacaaaataaattgatcaaacaaaattaaagacctaaaaaatcaaacaacatcaaacgaaattttaaaagcgaaaccctaaaatttcacaaactagaataaacaaaaacgc

SEQ ID NO: 332015 - DNA, 752 bp, Cannabis indica
ccactatccaaggttttctccatggttgttcaacaagggcgccaatgttgtcttcgcaataccgacattgttgttgctgcccctgccaaactgaaaccgaattagccttcttggaacaggaagcctcgccatacatgttccaattgccttaaacaaggtcacatggttgagaaatgctattttctctatggttttccatctggatatggtgacaaaaagcgaaacacgcctactgctccggcaaactaagtttcggccagtcctgaggcccctgttgctggctcttctcaactacaacttagccagcaattgatctccttactcagtcagcaaatccaaaacgctccatccaccagcggcaatcttcctgtggtctctaacgtctttggtaatgataattttttccctcttttttatggattgtagatagtggagctactcatcatatatgtcattctcttcattttttttacatctctaaacactaatcatgttgctaatattgttactttacctaatggtcatcagattcacataaacaaatctggcaccgtaaaaatatttgataaactaacattgaccgatgtgttatatattccagaattcaagttcaatttattttatgtgaatgcttatcttgaacattgtcataataaactcacatttagttttaatcaatgtttgattcaggatccctccctgacttctacgattgagatagctaagaaagttggccaactatttttctttga

SEQ ID NO: 332016 - DNA, 553 bp, Cannabis indica
ggtcccagatttaggttcaagtctgggtctcaattgtggtctaagttcacgaccgtgtccgagcccgagttccagtctcagtttgggtatgaggctaggtttgtgttcgattctaggtctgtgtccaggtcctggtaacggtcctagtcttgtactagggtcttggttcggggattcttgttcaagttctaattttgggtcccaggtctaggtttggattccggtttgtttctttgtcttggttctggtcctagtctgagtccctgatctagacaccgactactagtctgttcgaggccccactacccaaatcccgagtcaagatcaggatcactatcataggtctcggtctgaatctggttcaggtcaaaggtcccatttctgaatttgggtttgggatcgagactagggtgttgttgtaggtcctgaccctggttctgtgttcttagtctggttccatatttcggtctcagttcaggttcgggttcggatcctgagtccaggttcgggatgggatccggggccgactcccaattcgggtctaggtctgatt

SEQ ID NO: 332017 - DNA, 652 bp, Cannabis indica
ttttttttttaaaaaaacatcttcatatcctttgaacagaagtctattacttacttattttcccaaggttcaattactctcagtgtcggccttgctttcaattttatgaaaatgctatatttttcttttgagaaatgctaaagggcactatcagtggctaacattttcttacgtgtcaatatcactattactgtaattaagtattgagtcccatataatttaatataataatttttatggaatatcgctaactaatcacaaagcaatatattaaaaaattactagataccactagtacctaataataataataatagtctcttctattctatccacaaaagtctcaaaactttcaaatactatttaagtggcttgttagtgtgatagttgtagactaatttgcctcacaagtttaatattaattattacaaatttatatttttttcttactctaacacgttgaaaagtcaaacttttaaagactatactaatcctttaagtctctatttttgaattacacaaatgtcctttagttatctattaattttgaatggttacaatatttttatataacttgttataatggaatgttattgttgacgcggtttttcgtcaacggatctaagaagatcgtaaaacgagcaagatgaac

SEQ ID NO: 332018 - DNA, 915 bp, Cannabis indica
ttaaataaaaagagctttttaattattacaaagggtatttttgtcatgatcctttttctgaaaagacgcatgtcctctaattttggcagttgtgcgatttcgaggtacatcaacattaaatgaccatctttaccactttctctttgaattatgtccgtaggatcaaacctttctctgatctgacgaagctaatatctgagtgtaaagtaagaaaaaaggaaccacctttgcattacttcctccattttagaaagtcagagaaacccttaagcttcttcgccaagaatcactattgagtctgtctgaggacttgcatgccatctctgtccttgacattttttcaacgagtttcctctgacttcatcttttcacagtgatcctcgctacgtttaaagatttacggacaaagtaaccagtcattgccccaagccctaactccaaaaagtaagtttctttcttccttcacatgcttgctacattgcgttaaattgctacttagtttgtttctatcgttgtcatcttatttggttttggtagtttttagggttaaactgtatttgggttcatactagggttcaggctatatgtaggttatttcaggacctctaactcatcaccttcgggtttgataaaattctctccagggattgggactacttttttgcctccagcaatgtcccactctggttcaggaatttatcgtccaaaatttttagaattttagtttcctacagaatcaaccatcccatataaacccaatccctcaaaacccacttccaaattagagttgaacgatgctagggttagcgaacacgaagtgagaacccaccaggaagatattgctagttgctacaggcatttcttaaaagaaatctctgaaggcaaatgccgattcttgcgagaagcagaatggtc

SEQ ID NO: 332019 - DNA, 914 bp, Cannabis indica
cctaaatcattttccaagcaacatcatcaaggatttcgctttaagagagtaagtcacacaagttctattccatgtcaagcaaacattccacaaacccaagtagaataaaagtgatactatccaaagatcaatacttcacatttatatgaatttttttttacaaggcatccaattccattcaaagaatttatgaacaagcacacggtttaaattttaatccattgcacaaataaacaacatcagttcaatcaatatttcggctcaattatcaacacatgaaacttaaacaaaaaactaagctaaattaatcaaaaacataaacttaaaaatttaaatccctcccccaaactaaaagatgcacattgtccctaatgtgtgataatattctaggtgagagagacttacctgaaccctcattagaaggggtttggtggaggtggctggtcataaggatataaacggggtggatttaccaagtaatcaggctcctcaatcccatcattcatccttgtgatcagtgaattcagctgctgcacttgattctcgtcaaagacactactctgcgccatataagtttgcatgtgaatgttctactgaataagataactcaactgatcatgtgtgtactgcatggctgggtcaagagggccagcaacacgttgtggtccttcttcaacatgctccttttcacgttcaggaggatttggggcttcttgctgtggtggagctggtgtttgaccatgtggatgtggtgctttaaatctaaacactgttcccatgtcaatcatgcactatggagcaaccttattatcataggagtattgtggcaccccatatgcctcacacaaataagtgataatatcagcgagaccaagcctgtaacaccctaactagcataggcgtattacgtgatt

SEQ ID NO: 332020 - DNA, 532 bp, Cannabis indica
acattaagccaactctgagaacacatcgccctatcaagcttagcctcgatccaattagaagtatcccgacttttctcccacgtgaaaggatgcccaaacatgtccaaatcacataaaccacattgttgaacaacctcctggaatccatcaattagccatgttgggtaaggattaccaccaagcttctcattttgatgaagaacattattgaaatcccccataatacaccatggtgccagtgaccgagcatggagagtacgaatgagagtccaagtttgttgtcttaagctccggttcggctcaccataaattccagtaaaccgaaagggttggtgcccttcaaaagtgaccaaacaatcaatatggttcttagagaaagagtctattgccacttcttcgttgtttttccaaatcaaagcaatcccaccactatgtccttgggcctcaacagtaaaagaaccttcaaactttaaactagtgcacacataatcaatctttttttattactcaaagtttcacatagaaaaataac

SEQ ID NO: 332021 - DNA, 924 bp, Cannabis indica
aagaagtctagaggcggtgagtcaacaccgtccagagagaaggcaccggttgaagctgttatcgatctatccgaggagctaaccgtggtagactcttctgctccaaaaactgctaagtccaaggtgtgtcgaggaggtagctcggataggcccgagcagtcgaagggcaaatttgagcagatccgggctcctaccccacctccatcattgcatccagaaaccaaaagaggcaaggagatgctcacccactataggaattggtcggcccctgaagtgaatgagtagttggccggagctgacaatgagccttctttggagccgttgatgggaggagttctgaaggagtttacgaaggtgagtctttcttgacaatttcctttaatccttccttacttggctcaaattctaacgttttttctccgtgcaggttggtctgaggatggcttacaattattctcgagctaagtctgctgcctccaagaatgttgccatgtccaacaccatgagggcggaagtggacttggccaggaaggacgctgatgaagccagggttcaactcggcgccgtccgaatggagctaggtgaagtcaacaaaaatcttcttgctgctgagaagaaagtggccgagctggccaaagatctggaggcttctgaccaacttgaggctgccatgacctacttgtccaaagaagtgaccgacctccaggaagagaccaaggaggaggagcttagcgctgaggtagagaggctcaaagggaaggtgaacgccttgaagacagccgggctcgagatttttttacgacttttggaaggccctgaggcaaattttgattacttgggcgaggccaaagacatgtatctcgagtactgtgcttcccaagtggcctatggagagtccgaggcaaccacttctacctccggtct

SEQ ID NO: 332022 - DNA, 904 bp, Cannabis indica
attaatcttcctcaacccacacttccaagacccctcctcgtcattctagtcgtacaagtcccgacaaccgtttgaccagtcgaagaactgtttgtaacgtactcgtcctcgtcctcgtcatcagcatttgtgtcgaagaagtctcaacggccttagctctgacgtcttccctagctcagttaagccaagatttggatctgtcgagatcatttccttgccatcacgatttcagagatctgtgttttgaagattttttttttttgagatggcaccagatcaaatgttcgtctaatagtagtaactataatttgtttataagttttgattaataagtttattgaaaacaaaaagaaagaagtatccgaataaatgattttatatatattttttttttctttagttttaataaatttttattttataaatcaatcaaaattagttttgttataaaattattattttgactaataaaatattgacacattgcatccgaatgaaaaattaacggagctgttaactgggtaccaacaaagtagtttgttttgaagatttaggtatttatgtcactattttttgaatttgggcatttattagcaacaaatcaaacaattaagtttttatgccgtaaattttccttatttttatgaactaaatcttaaataaattctatcttatcatgatgtatgtgtttgtatgccactaatttttgaatttgggtatttattagcaacaaatcaaacaatttaagtatttatgctgtaaaattcccttatttttatgaattaaatcttaaataaactctatcttatcatgacatatatgtttgtaagtaataaaaaattcgataattaatcgtaagcttgcgacatttaattctttagcacaatcattgagtttttatacc

SEQ ID NO: 332023 - DNA, 1478 bp, Cannabis indica
agggatttcctgttccctagtttctggtcgccttctgttctcatttctgtgagaaggttctagttgttcgttctcagggggatcctcagcttccccaggttgttcgtccttagcaatctgaggattctcctgaactgtctcctgcctcctggctcgtgagccacgaggtttgcctcgtggtcttctcaccacaaggtcaggttgatttgcgcattgttctcctgtgccgccctggctgcggctgcctcccattccaactcagcatttcgtctgttcgcttcctccaagcggcgcctgagaaagtgattttccaactcgacgattggcacgtatcttgtaggatcataagtgtcatcattatcatgttcagtaggttgagggcctccaagatcgggttcttcatcccctgctcctgggttctggccattctcatgctgagttattcttgaacgtgtggaccgtgtactagggccaccttcaagttgggtcctcctagaacgagtggacagtgtacttgggccaccttcaggttgagttcttttggaaagagtggtctgcgtagattgcgagttgggaggcctccgggagtccatcggctcttttcttgcacgatgttgggtgatttcttcaagatgagtatccacattttctccgttgtcagccatggagaaagtttttttgtatcaggaggtttttttttctgagcttttttcacgaaggctctcaatgaaagtaccaaactgttaacgcagatttttgttaactaaattaaatcctattttgtgatgggtttatgaataaataataataataaaaggaaaagaaataacccaaagcttttttgtgtggtttttcatgtagttaaaattctgcatagtccacgagtctatcttattagatttctgatacaaaactagggctttttctctcaatgattttccgtccttttttcagtgtatcctgcccctatttatagttacatagaagggcatttaattacaatcagactgatatcctacaacaataatcccctaaaattatgggatttgattacgtcccacgtaaaattaatgcgattattatttgaaaatcacacagctgtgatttatctgcttttaccgggtcaacgtgtacgtggattaaatacacctcaaagtgtatcgtgctgggacacctcgcttggaacatagcaacaataaccctggcagcgagttggagcttttcccatgtccttctgaggctgataatgtaaatctcgtcgttgctgcgattgaagacataacgctccatctgacaatcacagttcttggtgacaaggtgaacttcagcagtcaactgttggaatttattttaccaggatcttagatctactcacaagtatgttgtttaacaccctaaatgtgaactttctaaaacgataaattaaacacatataaagctaagaaaaccttacattgatgcagcggaattaatgtctc

SEQ ID NO: 332024 - DNA, 2220 bp, Cannabis indica
gaccagagacacgaacctcgaccgaaatcggaatctgaaaaacccgtcacccagactcaaactaagactcagaccgcgaccacaacctcgacccagaccaggacccaagacccgaggcttagacccaacccataatcggtgtctaaatcaaggaatcggacctagaccagacccagacccggaccacaacccgaatccatacaagtagtcgaactagactaaacatgaggtgggagtttggatttgtgaccaagactcggacctgaacccaaacacggacctagacctagacaaggactcggaccagaccaacacccaaaccttaaatcataccatgtgacccgaaattgaagccgagacttgaagcggtcccttaaaccctaaaccctaaaccttaaaccttaaatcctaaaatttttacacatacccctaaatccctaaacactaaacccaaaaccctaaatcctaaaccctaaccttgacacgggtacaaaaaaatacccataacgagattggatcgcagtccccaaacccagacccggatacagaccctaacctagacctagactcaggacctaaactcggaccggaacccacaccagaacctcctctgggacctagaatttgattagaacccagagcacaatccagactcgaactcgagaagggactaggactcagaccaggacctggaaccagactaaaacctgaacccatacagtgacctagacttggacccaaactcgcgatccaaacccgaacctaaacttggacctagaccaggacctaggatccgaacctagaagggggacctaggcccgaaacttggactaaggatccggacctagatgggggactttgacccaaaactgggccccaaaaccaggaccgagatccaaaactcgaccccagactcgagacacgcgacacaaccttggactcgaaacgcaagacctaagtaccgggacacaaccccaaacctggacctaaatacattcatatgacggggcccaagaccttggacctaaactggaaaaagacggagatccgaatctagacttgaggtttcagcctaacccgtagtaagtgtttgaatcccaaacctggacccgaatctgtacccagaccaacacctagacccagactgggatccaaacacgatctcggacccggaataggaatcaaaccaggtctcggactagaacccagacgtgggaagtagcaggacccaaacctaaacacaaactcagactagaacccataccgagactaggacttggatcggcacctgttactttggacctaaacaaagaccgggacccggagcgagactcagacccagaccaaaaaactggggctggacgcaagacctaagaaccagactcggacttgggatttgaaactcggacccacactaggagtgggacccaaacgcaaactaggacctgtactcaaaccacgactcaagaccataactcgaaccgaaacacaaacttggactcaaatcgggacctaggacctggacatagatgggggacccaaaccccaaaattgggaccccaaactgggaccaaaacttgggcctcaaaacttggatcagtatcaaggacccgacccaggcccaaatcatgacctaggtcccacctcgggacttgggatctgggactcaatccttggacctgacccgtagtcagtgtttggatcagggaattagaacagaacccgaacccaaactcgaactcaaaccaagtctcggacacatacccaaccttagactctaaacgagaccgaaatacggaccttagcctcccctgaacccaaatcaagactcgaacccaaactcagacccaaacacgacccgaactcgtaccctatgacttgaaactggaaccgaaaccagaagcaggacacacagccagaccctgatcgaaattcgagacccgaaactagaaactgaaagagaactgcaagaccaggacccggacccaaacctaaaaccaaactcagacctagccccagacccaaaccaagaccgaaatcgggcccaaacacattcgtgtacccagaacgggaccgagacctagacccaaaccaacaccaggacctaaacctgggacccaattccaaacccagactcggacctagatagggatctggacacgaacctggactcaaacccaaacaagccctagaccgagattgaaactcgagaccttgatt

SEQ ID NO: 332025 - DNA, 1366 bp, Cannabis indica
gtaaccaaaaagttttctattacaaggacaagaaaggaaattttgaaaataagtccattcaatggacttaacaaaacatcctgatcctagtgttataggttttagattatctaaacctatggctcatgctatgcctggtaatttacttactctggagcaagcaacttactttagtaagatgctggagcattttttttggaaatctatagaagcttcttgacttctaattatagattttatttatctaaggaaaagtttcaattattttagaaaagataaaggccaaggaaagaattccttaggatcaatagtgggtggtctcagatatgcagatataatggtgattaaggaaatataatggtggaggaaaggttgtatagtatacaacttgtcagaccctattacagagagaatactacatactataattgatctgcatatcaaggtgttgagattatttgaaatacactttctgttttatattagtctaagtgggagtttgttgggttttgtgccctaaataaaacctatttcaatacaattaaatttactaattaataaaagataaaaattgcttttatgttgcatggttcacatgatttatttcatgattatacttaatgtataaattctattaagtccaaaatatatataaatatgtatatatttgttcatgattatagtgtcgtcagcacagtggaatataatcatgattatatgttcaaaagtttaattcccatgaattgtcagttcactggatttagactgacatgataatcgacgataaggtatacttacaccttggattagtgttatgtcctttccagggcattggccagtatcagatgtacgtagtatacattggaagggatcgatattgatctcggataagatatcataaacttaccgttatatctttctaagtaaatatcaagggttgatcttaagtctatggatcttaatcctgatatggttaggttcagcttagttgtattatttatgttctttaagttgttcgtggaagctaattaatagttctcgcagatattcacatcttaagaacatggtagttatcatagatatggaatttatagcttttataagtatttaaaagtaaaacaatgatttccttcgaccttggttgaataaagataaatgattgagatctcattttagtaattatattagtttactgaaatatcatttataggtagctaagtgtttttaaggataaaatatattgaagggtagaatgtaaaatttgtccatattcaatatgaatcatctatagaggatctttgtacgattaggtatgtaaccaatggataatcataacgtatctatatcgtggtacatatagagtcgt

SEQ ID NO: 332026 - DNA, 674 bp, Cannabis indica
tagtattttttggatcggatcgaatccatccaatattttagatctagtatgtattagattagactgtatccatccaatccaagagaaaaagagtaaaaatttaatgttaattttcatatatacatatagatttgaggtataaccagggccgaccctgaaaatatatgggcccaagaccaattaaattttggggccctcaaaaaaatatcaaaaaaaaaagtattatgggatttgaacccatgaccttggacattatgtcatccacctcaaccaactaagctatgaatatttgttgcttataatacacttaaattttacttaaataaaagcctaataattttttatttttttattttgggcccccaaaaaatgtgggccctaggcacgggtctagcccgcctatgcctagggccagccctgggtataacaatataaaatctaagtactcatccaaactaaatgaaaatactaattagttcgattgagtgttggatgtattggatttttagacaccacatccaccatccgatctgatccaattggatatttaaaaataacatccaatctgatccgatcacaattggatatacaatgtttggcagttggttgtaattggatcggtcggttcttattggattggatcgatttatacacacttcagataacatattctt

SEQ ID NO: 332027 - DNA, 705 bp, Cannabis indica
caacaaggcttcaacaaatttcataatgaagataggagggagagtcaacatcatcactccaggaaggactctgctgcaatcgcgaaagatagtgatgactgctccacagatagagagttgttctccatctcagaatcttcaatgaacagggagtggattctcaattctggatgcacttatcacatgtgtccaagtcgagaattattttttgattataaattagctggtggaggtaaagttctaataggtaatgatcattcatgcaaagtcattggaaccgggaaggtagccatcaaatagtatgatggcagaatcaaagtgctgacgatgtaaaggcacatcccagagcttagatgaaacctcatatccctaggtgcgcttgaagatgaaggatacgaatacaaatccattcacagaagcttaagggtcaccaaaggttctttggtagtgatgaaaggagaaaatatcaatggtttatatgttctccaaggagaaactatctcagctggagagacaagtttggtgaaagggctagaatcgaatgtgaagttgcagaatcatagacttggacatatcagtgaacaaggcttcaaagaactgcacaagcaaggtataattgaaaatttaaattcttgtgccttaccattttttgaagattgtgttttagggaaataacatcagttgaagttcactctggcaaggcac

SEQ ID NO: 332028 - DNA, 949 bp, Cannabis indica
gcaaggttgcaaacaaagccccgatggtgtcgcacatgctctttgcggacgatagctatctgtattgtaaggcgaatgataatgatgtccaaagagttcagcaattgcttcgggtctttgagatggcttcaggtcagaaggttaactttgcgaaatcttcagctttctttagcaccaacactataagtcaggacagagatcgtatatgtcagactttgggcatcagggaagcaggggaggatagtaagtatttggggctgccaagtactttgtctaggaataagtctgctgtgtttggctacctgaaagacaaagtgaggaagaagattcaaagttgggatgggaagttattatctagagcaggaaaagaagtgttaatcaaggctgttgttcaagcactcccttcgtatgctatgaatgtgttccagttgcctcaggatacttgtaaggatattgagagaagtatgtgtaatttctggtggcattcgaaatcgtcccaaaaaatggtattcattggcttagttgaaaaaatctgagcaaacataagggagtaggtggtatgggtttccgagatcttcggaactttaatattgccttgttgggcaaacaaggatggagactcataactaatcctgagagccttgttactcgaatattcaaagctagatatttcccaaagggttcgttcttatctgctgaagtgggagccaatccaagctacatttggagaagtgtattagcatcaagagatctaattaaagtgggtatgagaaggcttatagggtcacgggattctgttgctgtcctaaaggagccgtgacttattcatgatgatgatccattcatttcatcaactcacccagtgctgaataatgctaaggttaattctctgatgaaaataggtgtgagggagtgggataaagaagttttggaggatgtgttgaatgaa

SEQ ID NO: 332029 - DNA, 1299 bp, Cannabis indica
cttgctaagtgctaataatttcttaatatgattttgttttaaaccttatttgatttctatttattgttatttgtagtatccaacatgacaatgaacaatcccatggtgtcactcttgactgataacaagctcaatggagctaactttatcaaatggagagagaacattaacattgctctcattggtgaaaatgccctgtttgtgttgactgaagaggctcctgagcagccaggagagaatgcaaccaaggcagttaaagaaaagtttgagcattggcagaatgctaacaataaagctcgatactttatgttgtctagcatggttgacaccttgaaaacaaggtttgcaaacactctcacggctgcagaaatcatgaaccagttaactgaactattcgagatggcatcaattcaagctcgctttgaagcgactaagaattttatcaatgcacgaatgaaacctcatttgtgcttgcctgatcaccttctccagatgactagttactttgaggaagctaagaatcatggagctattatagatcagacaactcaagtgagtttgatcttgaacagtttgactccagcctttctgcccttcacttcaaattatgtcatgaacaagttggggcttgacttccacgagtcaatcaacaacctttggacatttaaaaatttgattggaggaccacaaaaaggaagagctaaagctcctaattctgggactgctaatggataagactgaggcaaacattgactctacttcaaaacccaataacaagaagaagtggaagaatagcaagaagcctgttcaagttgtgaaaacagttagaaagaaaaaggctactaatcgcgatggaaatccaaaaggaaaatacttctattgcaatgaaaagggccactggaaaccccaatgccctaagtttctagcaaagaaacaaggtatttctttctatgcaataaactcatgtgttttagagaattattatccccttgggttattaattctggatctactaaccatgtttgtttttcttcttatttcagctctagctctagctgcttacacttggattgctatcctagcaagttgagtcgaatggctggacaaaagggtggagattgtccaagattgaagatgaagctcagaatcttcttttaataatttttgaattaattgttttaatttatgaacaatttgatttcaattattggtttgagatttttattccctatttcatttttatgcagacaattcatttttttttttttgtagaatattaataaagttttctcttttagt

SEQ ID NO: 332030 - DNA, 1813 bp, Cannabis indica
gagttctacttgcatagtatacgacgaagggcttcccttcccttcgttgaccaaggacggcccctatagcgtaattgctagcatcacacatgatctcgaatggcaagttccaatcaggtggttgaatgataggggcagaagtgagtttggtgacaagtgtttggaaggattcctcacactcgggtgtccagttaaacaccacgtcttttgccaagaggttcgacaaaggtcgagctatcgtcgaaaaattctggatgaacctcctatagaatccagcatgcccaagaaaggatcgaacatccttaacagtcttgggggcgggcagctttgatatgagttcaatcttggattgatcaacctcaattcctcgttgtgaaacaatatgccccaagactatgccagatggcaccatgaaatgacacttctcccagttgagtaccaagcctttctctttgcatcgtttaagcacagcttccaaattgagaaggcttgattcaaatgaatcaccaaagactgtcaaatcatccatatatacttccatacaattctcgatcatatcactaaagatactcatcatgcagcgctggaaggtggctggggcattacacaggccaaatggcatacgccgaaaggcataggtaccaaaaggacaagtgaatgtggtcttttcctgatcttctaaagcaatttcgatttggtagtaccccgaataaccatcgagaaagctgtagaaaggatgacctgccacacgttccaagatttgatcgatgaatggaagtgggaaatggtctttacaggtggcggcatttaattttctataatcaatgcacatgcgccaacctgttgtgaccttggtagggatgagttctcccttatcatttggtaccactgttactcccgatttcttgggaacaacctgagttgggctaacccacttactgtcggcaacaggataaagtatcccgtaatccagaagcttcaagatttctgtctttaccacttccttcattggtgggtttaatctcctttgaggatcacgtcgtggtatggccccgtcttccaatttaatgtgatgggagcaaatcaagggactaatccctttaatgtcagctaacgtccaaccaattgctcctctttgctctgtgagcacgttgataagttgttgctcttgagttgcattaagggtggaggatatgatgacagggaaagtgttgtttgctcccaagaagacatgcttaagttccttaggaagttgagccaagtttggttgaggagcttgtacagtggatggttttggtgtttccctatcttgaggaagtccctcgaagattggattccaaaacatggttcttttggtcggtaattgattgatgacttcagggttgatttcagtattacccgactcagaaatctcagaaatttcaaagaggtcattgagatgagtggaagtgtattgtgcttctacctcttctgaaataagtgtatcgatcagaaatgattggaaacactcatcgttatcaggtggttgtttaccaatgttgaaaacattcacctctagagtcatgttcccaaaagagattttcatgagaccattcctacaattgatgagtgcatttgctgttgcgaggaatggtcgtccgagaatgatgggaattttggactctaagttgacttcagattgagtgtccaagatgagaaaatccacagggtaatagaatttatcaatttgaatcaagacatcttcaactattccccgaggtttcttaactgatcgatcggccaattgtagcaccacagatgtgggcttaagttc

SEQ ID NO: 332031 - DNA, 674 bp, Cannabis indica
ccgatttggattgatacaagaactctagatctatctcagacatctttatattttatgaatttaaaaattgatattaggaggttttagttttctgcgatttcaattgtaattcagggctgaattttagtttcgaactagtttttctgccttattttgcataaatccgaaattttatgtgtttggatttcttccggtcttcttctcaggtgaagtttgcctggtttttttttcggttggcctgctaatttagttgccagaagttctcattgtttaagaaggtggttagtgaggctgaatggttagagcaagaggtagttttgtaaatttttgttgctgggctatataaatatttatagggcctgcccaatgtatttttgtaatatttttttaccattttagtatatacacgaaaaaagctcttttttactttttttttattgaatttattttgtacaagtttttttacttgttatttgtttcaaagaaaaaaaggaatactatttttaggttaaaagaaaaaataaattaaaattcaaaaaatgtaaaaaaaaaaatataaatccataaaaatatgtaaactttttgtctatttttttgaatttatgaaataatttcttttttctttttcctttcaaatattaatcttgtagaattttatttttgaatttttattt

SEQ ID NO: 332032 - DNA, 487 bp, Cannabis indica
aataatatataaatattaaagaagttaacaaatttttaaatcttaccataattggaaatatttcaaattggaaaaatcgaattttgggaaacaatcccatgaatatttggatttttttgggaaaaactcacaaaaatcgcaatttggagtgggatgcccaggaggctgcaaaagagcccaggatgcgtgcggatgaggaggttgcagcctatctgctgagaaatctcagcgggctgcagggttcctgggcaatacgcacgggcgggctgcagggtgacctcgggtgagtcacgcgctcggatggggcttccagaccgagtgcctggtgctcataggaatgtcagtcgggccgggcccggcccggcccgccacaaacccggcccggcccgacataactttggcccggcccggcccggcccgactcctcttttggcctagcgggtcaagcccggcccgagataatcgggccgggttaggcccgttaccc

SEQ ID NO: 332033 - DNA, 698 bp, Cannabis indica
tagattgtgttataaagatcttgtgtttggataagaagatatcgtcagaggggatcccttttcacatatgactaatgccttttatatagtagtagagcttacaaagctgcacttaaagatttcccaaaatagtagggaggttacgacaaatatttgaattacagagagaatatctcctataaacttgggttgttatttgctgatggagagtcctatcttcatgagcattttgaactggtctggagttgtaggcatgttgaaggcaagatggaaggcttggagaaaacacaagtgctggtgcattctcgtagctttggccggctagccttgttgaaagctgcccagtgcatggaagttgtccctcttggccagccaattataggtctggtcaggaccttgctggcaggtaagggtatttagcaatccatggatacctcagcctgtgtcatttcgacctattactagtctcactggcgaacccaaagaaggaccagtgtgggcttaagcccatgcggaaaaaaatatttctttttacttcttaactaaaaaaaaaaaaatcttttaattattttaattgcccacaagaaatgcgcaacaaaatgggagatcaacagttgaatgatagtttgacagtttatctcaaaaaggatgtattcaatgctattgacaacgagcttattattcatcgttttcaaaac

SEQ ID NO: 332034 - DNA, 762 bp, Cannabis indica
gttcttgatattagatgttccttaaacttttaacgtaatgctgcgccggctagccttgtatgacttaaaggctggacatcgatattccactcatgcctgaagtttccaacaaacaatggggtagggtgtcgaagaggaaaccaatagtctgctcaggaatgttataaccttacaatggccaaggctaagaaggaagtatcctccagctagagcacaaaaaagggaaaaatcatttccaagtagggaacttcacaaggcagggatgaagatgtggatccacgactaggggacccaagcaacaatcttggacatgtggaagagttagaagagatcgagatcgatccaaatatcccgaccagaaagctaaagatcgaaaagggtttactggaagaagtaaaatcaaaattgataaaatttcttagagcaaacctatacgttttttcttggtcggatgcggatatggttggaattgatccttctatcatttaacatgttctgaatattgatctcaacttctggcacttacaacaaaagcgaaggctactagatgagcatcatccctaaatgaagacgtagaatgcttttagccaacgacagtgagtctatttttgaaagcgacaagtagtttataacgatttaaatatagtaaagcaatataaagatacaggaattttatagatgttctgccccgagcagtttggtaataacttaatcctcgttatttgtattaacacaagaacaaggaaaaaggttccttttctt

SEQ ID NO: 332035 - DNA, 710 bp, Cannabis indica
acttggtaaattctagatctgcttattagtagctcggttacataggaccatggtccccatactaattgagacaaattgcttgtaagactcagttaattgattttagttaatcaattataattctaaaattagaccatgtctagtttgtgcattttcactaagatatgacttgattgtgaagaaataggattttagggtttatttgttaattaagagactttatagagtctaattaataaatattataaatgacaattttatttgataattattttaattattaaataaataggtttggcatttatggggttgaaagtacaaaaagtggtatttatgaaaaatagataaaatagttgagaaaaatggcaaaaatctaactagtgtatggcccacttcatggcaggccactaggtgctatttttgctttatttttatcattttttattccaaataaatcaaccctaaccctagatgaaattagtataaaaagaaagctatggtgtcattatccaaataatgcttcaaaagctaaaacctagttttctttctctttgacaactaggtttatgagctttcatcttcttcctttcttcttctaatttcgaaatcatatagccatctttacaaaccaacttcaagccttagtgattgagtgcatgcccacacataacaagtgggtcctcaatcatagtgtgtaagactgtgaagaa

SEQ ID NO: 332036 - DNA, 1047 bp, Cannabis indica
aagaaaggggaagtacgtctggccaccctagaggaggtcatgcagggccctgtggcccaggaagggtacaagtcccgtgccaacgggtgggaggcggctgagctccactctaccttgacctgcgctcaccagctggagaagattgtggtggtggcaggcatcaagccttcgacctccgggacctatcaccggctgcctagggacgaggagacacccaaccacaattatgggggttttagagcttggagccagacccacccgatgtccggagccatgcttcccctccggactattttataaatttccttgtatttgttggccttacgccgtaccaactcattccccaagcctaccgcctgcttttaggcctttttattttttacgctgcccggagctggggctcgcccagtccaacagaaattttgtatttttatgaactagtttccatccctaagaagggggacaaatttaaggacagtttttatggccttcgggtgcatcctttgaatgagggcccagtccttttcaaccattagaagcacgtgaaggagtatcgcgaccgcttcttcttctcttctggtttccaggccatggattgcccggagcttctcacggaatgggttaggatccctccctatatgaggaccgcgcctactcaaattttccttcaatgggccaagaccttctctacgtacgataagaaggccctcgatgtcgaggagttggtcacgacagagaactgtcggaaggctaaactaatatcggagaaccagtcggtggatgacttcaacctgtccaaagttatctgcgcgaatgcgaggactctgacagcagaaagggcactctgggtagacatcatcgccacagcggaggacaagtaccagaagtacctcttcaagagggaacaagagctggcctatatcaaggcccaggcggccgctgggaggactcttcgcctggaagctccactggagcagaagacccgtaggcccaagcctgtggtcccggtcccaaataccagagctcccgatgccagcacttcaggtt

SEQ ID NO: 332037 - DNA, 722 bp, Cannabis indica
cccccttcggtttcttcaagttctgaagaagaagaacctatggaggtctcctctgataaatccgtgtctattccatcttcgaaagatctccctgaagacattggagcctcctctgacaatgaggaaactgaacttgaacccgagcctcctttccccaaatctgctccaacacctcctcgtgcatcttcatcaaccaaggcatctgctgctgccaaaggcaagcagcctatgaagaattctcctcttggtaatatctctccatctcaagctatcaattctcgattttactttcgtgataatgagcgtgattggaatatttatgctaccccaaagtttgaaagtgaaaggaattatgatttgcatgctcatagggtatatggaattgttaagtttgttcaataccaccaatgggaaaatactctcactggttttgaagggtatattgaaaatattgtcaaagaattttatgccaatttgactaatgacatgcttcatgagaattatgagttctttggtaaagtctatgttaggagacattggttttcttttactgtcaaggatattgcagtggctttgaaataacccgaaggtgtacctaatgctattatgtctatggatcgccatttgatgctcactgaaattactggtgcataggttgaatggaaatctggggagagtcttcgaattacacatctcacatatgctcatgcctctctcatgag

SEQ ID NO: 332038 - DNA, 1022 bp, Cannabis indica
agtcatgaggtatggaatagattcaatattcctaggcatagattttgcttgtggattacaatctaagatagacttaaaactagagaaagattggacaaactcaacatcattagagaagactactgcttgttctgtaaggatcatcttgaaacttcagagcaccttttcttctcttgtacattttctactatttgtctttctcaagttaaagcttggctaggttggagagttgaagcaacagatttgagcaggctgtgcaggtggctggaaagagcaaaattaagcaggtttcggaaggcagttataactgctgcagtggctgctttggtgtaccatatatggaaaaatcacaatgagatgctatagaattcagggagaatagcaaaagatattgttgtccatgccacaatggaagatgtaaagaatagagtgctgtgtaattggccaaagaaccacaaaccagctgataccgactggtttgcactactatagcatcattcctttttgttttcagggtcagttttctttttgttgcagctgtgaaataggcgctgccactacttgtagatatatatatttatacaaggaaaggaagaaagaaagaggataagttgtgtaattacaattgattgtattgtatagaaagaaagcaggtcttcttattgaagatgctaataggctgtaaatgttttttagagtaatgaagtacatgattgattgattaaaaaaatagaataaaattaaatatccaataaaataaaatgataattaatatcatttatctgattttataatttaatttaaataaaataacaaaattttgaaagttaacaaaatatctagttagatttttaatattttctagattaaaatgaacttattttaaatttcaaataaggtcattttataaaattaattaaataatctaaaatatataatatctgaccttaaatttaaaattaagataaaataattaaatttaaaaaaataaaggcaaccaattaagcaaaatatcagatttt

SEQ ID NO: 332039 - DNA, 859 bp, Cannabis indica
tattttatttttatttttaaggtttgaaaattgcgaaaatttgaaatttgtggaaaaataccacaaaaatcgcacttgggtgttgctgcctaagagggctgcacgtgcagcccaggaaggctgtatgcagccctatacgcccacagattgaagggtgatgtagggtgccagaccgagaattctcggcacctgcaaggtgtgcatgggcagatgggcagggtgtcttgtccaagcaacgcgtgtcttcagacacgatttgtctgagcatgcgcgcgcgaagaggtgtcttgttcgagatgcctggtgcgcatgagcaccatctctacaccattaacacccgattttcaaaccttcataactttttcaaattttatcggaatcgaattccgtaaaaatcaaaattgcttaatttttcacaaggaatccaaataaaatatttttaaaatgaaaataaaattatggaaaaattctgtaattcacatacaatcatcaaataacacataaactaacatgaacacatccaaatcaacacaataagcatatttatcgttttaaatccatattacatgaaagtaaatcattaccatggctctgataccaattgttgggaatattttaccaagatctatatttactaacaagtatgttgaattaacatcctaaatatgaattctttaaaacaataaaataaacacataagggtttaagaaaaccttacattgattgcagcagaatataatgactcctttcgttcaagatctctagcccttgattcctttctatagtagagcatatcaagatcagaacctagatttctttctctccttcaggtttggttaccaccgtcttactcactatg

SEQ ID NO: 332040 - DNA, 636 bp, Cannabis indica
aatataagcgccaccacgcataactctacatgctaactactgtcttacctgatgtctcgtaatagtagagattccaaatctccgggtgctcctgaccaggtgctagtaatcctagtcacaataccgggatttacacaaatagggttaatccctaaatccacttctacaaaatataaaattggcattcaaacatagataatcacatagctttccaacgatataaagaacgccccaaacggagtcccgagtcaaaagttatggcaaaaacaaaaacttaaaaaaaattaataaacttccattatcatggtcgggaccagacctatcatagtcgcgaccactgggtttaaaaacccagaaaactcaattttcaactacgaaaattatgcccaaacacatccaaacccaaaccaaaacttagaaccatcacataggttttcaatcattaaacagagagtctaaaacaccatttcatgcatcaaacatcagcaaaaactctcaatttcagctggctcaaacacacaaaaatcaagcttttccaacaagaactcaaacacaaaacttgagcttcaaaccaacaaaattctaatattttccagcagctcataaccaaaaaaaaacatgaattttcaacctaga

SEQ ID NO: 332041 - DNA, 985 bp, Cannabis indica
acaaacggttcttcgccttctggttggaagattaccatcttccttttacaatcaatactggctaagtacttgaacaagaaatccattcccaatataatatcaaaatccactaaattcatttctattaaattagcactcaactctctatccttaattctgatcggcatagacctaatccaccttttgaagatgactaactctctgccaagtagtagggttccaaaccctgattcataactattgtgcggtctatccaatttactaaaagttctagctgccacataggaatgagtggccccagagtcaaacaacacagagaaataagagttgttgaccgagagctgacctattaccactgaagggttggcttctgcatcagcctgagttattgcgaacacccttgctgaagtgggtttcgctgcagtctttggtgctttagtcttgagttggggacaatcccttttgtaatgccctggcataccacattggaaacatccctgccctttacactcccccagatgatgctttttacaactggggcactcttggtaagtgtatctggattcaaaactagcctgacgattacctcgtctctggttccctcggaacctcttgttctgccctgagccactgaatgcagtaggtgcctttcttttctgatcagtagccgagccactacctcccctaataaagcctgatgtaggaggagtaagagccccaccaacaacatgagtccctcgagactctaaggtgccctccactgcgccctctgctcgcaatggcttacccactatatcagcataggtggtgttgtcattagtagtgatcattaagtcgtatctgatcttcgcattcaacccatccaggtatttctctttcttgctaaaatcggttggcacgattcctgtagccaatcttgccaagcgatcaaactaagtcgtgtatttagtaaccctcatgttttctttctgagtcagctgagtga

SEQ ID NO: 332042 - DNA, 529 bp, Cannabis indica
ggaattgtttactcggacccccgtcccatccctggctcctatcttgtgtgtatggtcccccctactttcatgcgaagaaacagttttggtcggatcttatgaaactgggagataagtttggcggaccttggttaattctgggggatactaacttcgtgttgagtaattcggagcgacaaggttcttcaggaacagatcaattcattccttacatttcaagccttgttaactctcgggggctgattaatctgactattcaaggtgaccaattgacttgggacaatcacagggctggtagaagccatgtgaagtctgccctagataaaggaatcgttaatggcgcctggctagacttgtttcccaaaattgtgctttgctcctctcagacgtgtaattcagaccatcgtccattatgtctgatgactaatggaatggaaggaaggtttaaaagaggtttcaaatttgaagaagggtggacgagagacaatcgaagtcgcttggtggttgaccaggcctggaattcggtctt

SEQ ID NO: 332043 - DNA, 480 bp, Cannabis indica
attaataaataatataaatgatttttttttataattaattataattattaaataaatagttttggcatttataggattgaattgaaaaatatggtattattgaatgaagaacgacttgttgaaataaagtggcgaaattataactagagattggtcctttgcttggctggccattacgtgtatttttgcccaatattttattcctttttaatccatataattcaaccctaagccctagttgaaacactataaaaggaacatgatgctctcatctcatctacttgacactttgtcaaagtaatgtcatcttgactattgccttcaaccaagatgagagagttcctttgtaacaccctaactaacttaggcgtgttagcgtgattttaaatgtactgtccagctcgttgctaatcaatgagattaacgaaaaacatgattaattaaaattcgcttattaaattagaaacttaaagtattaca

SEQ ID NO: 332044 - DNA, 661 bp, Cannabis indica
aaaagtagcgaaccgggaaaaatgttgtaggttgttctccttgaggagctgagtttagtggtgaaaacctctcgtcaaatggacgccggaggtgactggaaaatccgttcaaagtttgaaaccccaaactttgacttgcgatcctaagctaacggcagcgagagaagcggcgctgcttggggggtgaggtcgccgacactaggaggtctgagtggtccggcgcgtgaggtcggacgatggccggaggtgggtcgctggagtggtggtggttatggtggtttgtgggctatcttttttgcattttgaagagagagtagaagagaaagatagatagatagatagataaagagagagagacgattaatgggggtgttgctactgtttcttttgttttgaagttttttttttaaaatacatatatatcatgtaattatttattatatataatatatatacactcggtttgactcggtcaaaccgagtcttcacaacttgtattgattttcttgatctgaataaggcgtgcccaaaagattgttgtccactacccaggatcgaccagttaggtgaagcaactgctgggcacgagcttatgtcatttatgggtgcatattctggatataaccagataaaaatgaatgtcccagatcaagagcataca

SEQ ID NO: 332045 - DNA, 504 bp, Cannabis indica
agtttattatctgccatacttttagtttgcgagtagttatattttctgccttgcaataacagttataatctatttcgagcaaacttgaatatacttttaatgattttataactttgtatatttttgattgcttatatgaatagttagaatgtctgtaaataaactaggtttcagtacttttttcaagacaccttgatgtctcatttaatactttcctatacgttgcccttgattttgaccaaaatacgtggaccaaccggatgatgacacgtagactgaaggggtttaatgttaagataattctgctaagtctcttttgccaaagggatcagccttcgacatgtctcccggagaagacgtgtgagtctcacacgcccccggagagcaaaggtacaacgaagcctcttcgggaggtgtcagatcctatctgaacagtcacctcgcatttagtgccgcatgggagaaggcgtattgaaattggcatatgtcttaaagtctgacggc

SEQ ID NO: 332046 - DNA, 549 bp, Cannabis indica
tagaagtttatcctcccagactcgtagtacccagatgcaccaaccaatttccattcgttcctacagactccaggttgatgaagaatttgaagggaagattggcatggtttcgattgaatttgaggaggaagttggcgtggtttctatcaaagaaaccaaccaacttaaggccctatcctgtgccaggagatctttgcgtcagcctctcttcagtgttgagtgatttcttgaggttgggagatagatctcggcttcaggtaatgggatctttcgatgatgaggagaatagggtttgcacagagatcaaggctctctacgtgctgacggtctttctcgtctatatgtagccggtctttctccaagctatgtgtagacggtctttctctctcatcctttgcttaggagaatgactcaatggtttgcccttagtgccatttttgtagccagtcttaagttttccttatcttaaatgccttgtactatttttattcgaacttaatacaattacatttgcttgcgttattattcacaatgtaaacaattatattt

SEQ ID NO: 332047 - DNA, 640 bp, Cannabis indica
tcttcttcttctttaatttagcaaaggttctatagatttgtgatttagggttttctatattaaatcactttaggaatatgtttagatctgtaatttatatatttcttaagtgttttataaaccctaacaagtggtaccagagccatctttgttgaattaattgaagatctaatgatttgttttatgaaatttggggattttaaaaattagggttttgatttttgtttgaataatattatgccttaatattttgggttttagtttcaatgtatatttatattgaatctttggttgattttcggcgtgaaaaattttgatttatgaatatatatatatttctattggtgttatgtatcattgaattgaatgtgatgttttggtttcctctttactgtctgtcacgtttacatacatatatattgactacaatttggtaagacaattacatttttttcttttattgctctcaagattataaaatatatatgtatgggaataattatttgggcctgccccgactatgcatatggctcataaacaatatatattttagttcaaacaatttaattcaaattttggtgttggttatgactaatattttgaataaattaattgaaacaatatgtcgccaaagtgacct

SEQ ID NO: 332048 - DNA, 1009 bp, Cannabis indica
aaaataagataaaaaatgagaaaaatggcaaaattgcaaagtgggagcccacattccatggccggccactagggaagaatttgccacttattttttcattattttaatgctaattaaatctaacctcaccctaagtggtttcctatgaataggcagtgatggctaaagggaaagatgatgcatctcattctttttgtaaaaattttgagcctcctctcctatacaaaaccgaaaccctatctctctcttcgtctcttcaaaacagaagcctcatagtgaaaagagtgagtgccgacacacatcaagtggtactcaatcatagtgtgtaaggctgtgaagaatccagtttcaagagaaggagattcggactcaggtcttggtcataccctgctacagaaaggacacaagggttagagatctgagtgtaaggagacattatactccgctgcaaccactgtaaggttcctgatactttttatgtgtttatttcatatcgttttagaagttcatatttaggatgttaataacatacgtgttagtaaatctagatcctggtaaaataattcgaacaactggcctcaaagacattgtaattgatttactttcaagaaatttggactttaaacgatatatgtttgatttggatggtttcatgttgatctatgtgttatttgatgattgtttgatgtttgcaaattttttacgaaaaataacttgaatttttttctggaattatttttgttggatagtttgggaaaaattaaacatttcactttttcatagaacttgatttctatttaatttgaattagttatgattttttgaagttttgagaaaagataggggtggtgtcaccccatacgcccgcagatccgagcgatcactcggtcacacgcgcatcagacacgaggttgtccgagttttctcggtctaaagcctcagttttgtctaaaacctgggctctacgcgcctaccaaatacatttttttttcaattttcttcaattttt

SEQ ID NO: 332049 - DNA, 666 bp, Cannabis indica
tgagcataagttctcaagtttgcatgagaaaatatcgcaagagaattcaacccttagtccgaatgattcattaggtatttatattgttaatagaattgtatttagtttctcttttccctctattggaaaatttacattgaattacataacttgggctgtctcatgaagtccagcccatgaaggagatgatctactaactaggcagattagatatagctgaattggtcaaaatcgtgtcctataattgtgggcaattaatcatgaattaattggtagatctttatttaggaaatttcctcttttagcttgatacgatcttttgtcgagatctgaagagcatttatttctttatttgtgcgcaggaataaaaaaggaaactggattggtcttctaggaacacgatgtgttactcttcaggtatcacgatactagagttgcttccagatttgaacttactggcgaaagagcatctgatcacagagctaaggtacgttcctaaaaggtcctatacaacttgggcctaatctaaattgtcttccttgggccctattgggggaccgttgatgccgacttggattcaacgcgtcccttgccagaaatacgaataacatgatcgttttatgaatttcatattttaggatgttagattatttatgtgataatcaa

SEQ ID NO: 332050 - DNA, 606 bp, Cannabis indica
atgttactggacttacagattttgtacatatattaaaccataaacataataactacatgttaacctaaatcacttctaatctcttattgatagattaacagattagattgtaatgggttttatttagggcataaaatcccaacaggtccatatgtaatcaaagcagtagtaggaatcggagtttacaaattggctcgactcaatggctcgctaataaagaactactagaacgtggaacatttgctaccctattaccagttaataaatgatgtaactaacattactgatgtaatattttaacttcaatcatgaataaagagaatcatatctattatttaagtaattacagagctttactctttaaaattacttaaggggcatttgtgtatgattaatcgaaattcatctagaaacacatagtataatgcaaaaccataacttagaaaaacaataaagtttttgatcaaacctttctgacaagaaggggatcaaaccactgatcaagcctttctgacgagaaagggattaaaccactgattaaacctttctgacgagaaggggatcaaaccgtcataactttttcgtttaaacctgtctgacgagaaa

SEQ ID NO: 332051 - DNA, 514 bp, Cannabis indica
gttatgctgtcgaattttttttagaaaataaaaaggaatatgttctttgttatgattattatttgcctgctttggttatagtgaaaagagccatgttgatcatgttcggtgcatattgttgtttcacgacctagtctctgtgccatcataggtaaatcaggtgtgcactcacctgtaggtgaaagatctagaatctatacagggagtgaattaaatctgagccctgatactatggtggatatctgatgcgactacccagtttcggatgtcattttgtatgattggtattgagagctaggggtctagtggacgatgtgatatgcatttgacgtttgatttgtgattatttgtggtctctatttatacatattgatactgatgatgagatattttatttttataaagctaaccatgcaggaattttattaaaccaagggtcctttgatattagttgttttcctactgggctttataagctcaccccctattttctctcattccaggaactcagttt

SEQ ID NO: 332052 - DNA, 1491 bp, Cannabis indica
cttcctcttgaattttcgaaacactaagcatttcttcacaaaataaattcagccattagtgattgagtaagtgcccacacacatcaagttggtcctcaaatcatagtatgtaagacggtgaagaatccaaacacaaggaaggagtttcgggctcagatcttggtgatactctgctacagaaaggatacaagggttagagatcggagcggaaggagtcatttaattccgctgcacccacagtaaggtttctcaaactttatatgtgtttatttacattgttttagaaattcatatttaggatgttaaacaacatacatggtagtaaatctagatcctggtaaaatatattctaacaaaaacggggtgagagaaaaccgcgttttgaagcattaattacgtcagagcattaattagccgaaaactgaagagacacctggtcagcctcacatcgaatcgcgaacagacacacctgacacttgtcacccatccaaaggcaaagactgctcggatgaagtctacacgcaacttcagaagtcccgtacagacttggggggcaaatgttatcccaatttctgcactctgacgtgggattgcacgatggtgacacgtggaatcaactctatgtacctgctcgcaagaaatatgccgaacatgacactgcatacattcgctcggacgaattcctcttagcagggcagtgagcaatccgcacagtatgccaacacttaacaaatttagctttcgcatcgtgagtgaccaaagaaattcctataactttgggatcagatcacggggatgtggaaagctgtccgaatcccacgattggtgtattttgtatttactatgcaatctttccacttatatcaattgtaagcaaaagggaaatacttccctcccaagcttataaccctataaatagtgattcatagtcactaggcaagagggtcaaaaacttgtctaagaatctgtattgagagatattattgtaagagctctaagaaaaggaatcattctccttattcttaagtcaatacaaactatgaggattaggctattaccgaactgctcggggctaaacctctataaaattcgtgtgtctttattttgatttattatattagactacttgtcgcttggccagttcttggtcaatattttttcccttatactttcccctaactctctttttttgacctccacttgaacatgcatcagccattctacaaatacaagctacgaataattaattaatcatactattaacaaaagaggcatgtatttcatttaatcaacagaggcacgaaaataccaggtcgtgtacgatcgttggatgccatgcacaaacagatgcaccctaatattatcgggagtctcgaagttcacattcaaacatctcatgcaagggtattgtcgctcaccatatttctacacaatataaaaagaggaaatttaaataaaagttgaaaaagtgtcctactccaccttgtcact

SEQ ID NO: 332053 - DNA, 1314 bp, Cannabis indica
ctgtgtaagagaaacgatgaaactatagatttattgttctgtagatcaatgtgcaattgctccttgaaacatattgcatggaccttttacaaacaacatgtgagtagataacatttccaaaaccaacaggcaatagtaaaaatgagatgacatctagaaggtgctagatttgctatttctatagagaataaaagctttcgctacgcactaggctacagtgggaaaacaatgtaaggactttccactctatttaattacacttatatgaaaaatcaccattaagtgaatttagtttgctttctaattctgttttgattcttttttgttttgctttgattttgaggatatctcatcccctctatttttactcctatttctatctttccacccttaaatatacaaattcttggtacataatatacttgagagattatcgtatgggggagttgttttaagttttgtattgatagattatcctatgggttttgtattgatatgttactgtaccacaaatgctagttagtaaattaattggcagcaaacgtagaagaaagctatgcagaacggcgattttagcaacaatttgggctgtgtggttggagagaaatgctagaaattttgaaggggttgaaagttcagaagcggatatgtgggagaaagttaagttttgggcagctacttgggtatttaagaccagattttttaaggatttgtcttttctagatctatgtagagaatggaaatcattgatgtattagaagtacctgtcttttctagatttatgcagagaatggaaaacaattttataaaggcagtaggtggctttgattagtttttttagtcctcttctggggcagttttggagagtgatatttgtcttaggacttttggctttgctttgaattgtaaccatggttttcctccgccacaagtgaggctttttaatatataacggggaggatcatatctaagacaagaggatcttttctcttttttctaaaaaaaaaaagaagtattttagtggcctagcaatttttctttagcactgctgagtgcaaactgttattggctttatttgtttatgggggatttttctaaccaaggttttcctccaccacaagcgaggattttcaatacataaagaggagggtcctatctaaagacaagaggttcctttctctttcaaaaaaaaagatagattatcctatcatatgggggtgttgttttaatttttaagagaagacatgtttgttttcaatatagctctgtaaccacagttttcctccaccttaaatatactcaaaaaaaaaaaaa

SEQ ID NO: 332054 - DNA, 1114 bp, Cannabis indica
aaattaggaaagttttctgtctgtgaaaagtgcgtactggcttcatcagcaggatagattctcggcccctactcctatctggaaagacctctggaaacagaaaatgcacccaagattaactttgtttatgtggaaaatcctgaatgactgtctaccgacccttggaaaactaagcttcctaaacatttcagatagatcgtgcattttttgcggcgaacttgaagatacttatcacctggttactcaatgcagcataaccagaggcttatggttcaaaagcatctggggattgaggctagatactttcaattggaaggaggtaaaagattttggtgcatggtggactgaattggaagatgtggacctcaaaatctttgctgtctgcatctacgaagttctttggttctggcgtaattctatcagaaacaacaacaagcagtggagtatcgaggagattttcaaagactgttcgaaacgagcggtcgaattctctaatacaccttctgacttggaggacaatgttaaggaacctatgatcatgaaccactccacagacataacgggttatcatgttttccaggtagatgcttcagttgcagacggcaatgctggaattgctgcagtctataaaagagattccaatgacacagaagacttccttgttgtagatcacttgagagtggaaaatgtcctacacggggagcttgctgcaatctccttggctctttcgactgcaaaacaacttggtatggaaagagtggctatccaatccgatagcaagactgcggttacaagtctaatctccaattcaatgccgatacaatggcattcctatcctatgttttttgattgtttgtcgaaaaagaaacaatttacagatgttgtgtttatttcaattagtagatctctcaatgttgttgcggactctcttgctaactgggcccgagttcaaaggaaacagttacaaggagcgctaagggaagtgacccccttttgcggccactagtttttcttctccttggtcttaatgcattttaattatcaaaaaaaaaaaagtgatatgatttttatttgattaaaattatgaactgtttgaatttctaaattagtaatt

SEQ ID NO: 332055 - DNA, 1080 bp, Cannabis indica
tatctaattagatttaaattactcaaatattctatatgagtttcaagtcacaggaaagaaaaataaagctacaacataattttcaaaatatttaaataagtatctaaacattataaccgtataagtgatctatatatagctataactaatggtttaatttataactaattgactttttttaaaaaaaattaaaataatacctttttgatttaaaggttgagagtggaggagatgttgtagacagagatggagatgcaaaaatttatctaaatgtttgcttttgggcttagatgcatacgggaagcccatttaagttttactaaataagtggactaggttgctaaaataaaatttcacataaataattttatttaggcccaattagaattgggcttattcaatgaattagcttggggctgtccagatggaattgggagaggttaacaagaaaattcttgctttttagaagaaggtggccgagctgactaaagatctacaggcttcttaccaacttgaaactgccattgcttccttgtcaaaagaagtgatccgcctttaggaagaaagggaggttcttcgagctgacttctgcaggttggaagcagagaagaagtctaaggaggaggatcttgaagctgaggtcaagaagtataaatccgaggcagagcagtagagagttgaagtggcgaggcttggagggcaagtgaatgctttagagatagttggtctcgagatcttctatgacttctggaaggctaatccctaggcaaacgttgattacttgggcaattccaaagacatgtttctcgagtattgcgcttttcaagtggcctacggggaacctgaggcgaccacttccacctttggccagaatgttgacgtgccctccgctcagacaaatgatccttcagctccaactgacccagaagacccgtacaaagagcttgggactccagccgtttgaaattttctttttctatctcttttttatctgtccggccataaggccttttttaagacaaagctactaaccaagcggtctttaaacttggaattatttttcatttttcaaacaacagg

SEQ ID NO: 332056 - DNA, 576 bp, Cannabis indica
tttctttaaacatagtcgttctttaatctgctgcgtactcctggtcagcatatttgtttgtttttcgtttgatactccgtccaacactcatcttgtgtgttgtcttttgtagatgaacccaggtgagtcttgggaactcgggcatcagatcgactaggatttacttcaacttctgcacgaagttcatcctcgccttcatgctagtcctccttctaccgaaggaaattttcctaacctcgtacccagccataggatgatggctcgtacgaagaaaaccacgcgtttgaccgatgcttctgatactcaagtggctcggctcgccactctgcccgatgccgaacaggatttggcagtcccgatagaggaggaccgtgagggggacgcaggtctaggaggttgaggagctagacgaggtgcgtccaggcagtcctcccgctgtggagggagaggaagaggttggacccccctggacttcgggtagtacaatgaggctgggctgccagttgatgctgacggagacatcctggttgagggcgtggactacgtcagtgaggagcttgctgaggcgattcctca

SEQ ID NO: 332057 - DNA, 635 bp, Cannabis indica
ccaatcaattcccacttacaagagttgttttaaactctccaaaagcttttgtcatcagttagatactatgatggcacagttttggtggggttcaacggatgataagaaaaagactcattggaaaaagtggaagtttctttgcaaaacaaaaatggaaggaggtctggggtttcgatcttatgtccattttaaccaagctttattggctaaacaagcttggcgaatcttcctcaatccaacttccttgctgtcacgtatcctaaaagctagatattttttaaatactgattttctctcagcaaacaaaggatacaattcttcactcacttggcaaggcattgtttggggtcgtgaattactgattaaagggatgaggatgcaagttggaactggtttgcaaataaaatgtactgacccttggattcctgggcagtccacatttacaccagcagctttttctggtttgacacatgctgttgtagcagattatatcactgatagccatgaatggaacttacaattgcttcaacgtgatttctctgttgtggacatagacaagattctcacaattccaatatctaccactgctactcaggattattgggtatggaatcacacaacttatggggagtaca

SEQ ID NO: 332058 - DNA, 540 bp, Cannabis indica
ttcactctgtttctatttttttttatatgattatatttttattattttatctatattctctgatcagaaattaaatcaatctctgttttatagtgtagagtttttttgtcaacagttgggaattctatcatcttgagtactactaattgtgctaagtaattgacattgaatcaaaggcattgttgatagtgtaaaaaaatagtgtaaagttttttgtaatatgtgaaatatgtaagtattagagtttttttttttttcttttgtaataaaatagatgatttctatgctttttatttcagaaaaaattaaatgcccatcacgcctgacccatgtggttctaaattgtatccttaatcttcctcactattaaattaaaacgtagaaaaaagaactcgagaggcagccattttataccagactttcaatctcaaccctcaaaattcaacttgctaaaactggattcgaagtaatctcaaccgttggatcgcacccacaattaaattaaactaaatgcaagatagcgacttattattatctatt

SEQ ID NO: 332059 - DNA, 526 bp, Cannabis indica
taacctaaagggtaattagtaattttaaataggggttttgtggctgcctaggtgagtgacacttggccacttagtttcatcttaggttaaggatgggaaatgcattactctcattttggaaaataagaaaattgatgaaataaaccaaagaaaccctctctttcctttctctctctttgtaccaaccaagccaaggggattcattgctggattttgtgttttcagcaagggttggaggaggaatcaatcaaggtaaaccctagttgctctctagttatggtttttattaagttttagttggtttcaagaggtgattttgtgttataggggctgttagggttaggtttgtttagagtttgaattttagggttcatttgagttggtttcaagttcttgcagctggttttaatgtgttgtgttggatttatgcaagtttgagctttgagttcaaagctttgatctctaatggcataaattgatttttttatgtttttctctgaaatactggttggattatgttgtgtat

SEQ ID NO: 332060 - DNA, 1404 bp, Cannabis indica
ctccttgcaggtccatttgcatctcgaaatactaaggtggataagggatcttccttcccagtacacatcttctacgttggcatcttaaacttgtggggaaattccaagatattaatcttgggggagaaaagggttccgcgtgctcggtccaactcgagatcgttgttcctctgaccggccaggcctgggaacatattttctaattcgtccaactatgcctccatggttggactaacctgtttggcctcttggccgatctgagttacatcagcctcattttgagtgggattttgagcacaggttctaggttgcacaattggcgcatcaagctaatcgtccactcctctcgtcctgttcagatcgtttctgagatcatgattcgtccccaacctatcaaatacggaaatgccttgttgtctcagtgaatgattggtttgtccaatttgctgaccgcaccattaaccttgttggaattactagacaaggtctgccgcctaccacttggcctttagatgggacctatgactggcgattttacggctgaccatttatagtctacgaggtattcatcgctggatcttcgtctgttttgcccaaggggatgacagttatgggctgttgcccagcaatttgataggcttttcgtatcagcacactggcttgctgactcgatcgtcaatgactgcttgctgagcccttaacgtttccatctccttgtctctccattcggcaacatgcgcctctgctcttcaaaagtgaggttcaccggagcaccgagttccacctgatggtgatgtagggtgttggtatgaccctgcatgattccatgagcgtcatggcgattctacattttagtgtcatcttcaatggttgtttgaacattggaagcggccagaacagttgtgctatgaatcccctggttggctgcggaactggtattcccagtctcttgcacaccaggtacgatttcatccacatgagttgtcacaccgtgacccacagttgatggctgtccaggatttacggttggcggaacccttgtgtttcttgggttctggagtgcaggatccaccgtttgtggattcgtcggatcaaccacgcccctacgagtcagcaccacaatcataatagtgattagatttgaaataaagagagatccttgattctcctctcaatgaaagcaccaaaatattgaactcgcctttagccaacgacaatgagtcagatttgtaagcgacaagtggtttaatacgagtatagtgtaattaaagaaaataaagacacttgaattttataggggttcaaccctgagcagttcaatattagcctaatcctcgttatttgtattgacttaagaacaaggagaatggttccttttcttagagctcttacaattatatctct

SEQ ID NO: 332061 - DNA, 657 bp, Cannabis indica
ttccagagattatcaagaggaagggatgcgttaataagtagaaatttataaggtattgatatgagtatatattaatgggtggtgtagaaaatagtgaatcgaattgtgtatagaatagtacatattaatatacaaagttaggagactaaacgggaaactactaattacaaaatatgaagctattaaaatacaagttaccctaatttctttacaactaatagtctaacactccccctcaagttggagcatagatgttaatcatgcccagcctgttcaaagataatcaacccacaccccattcaaagcctttgtaaaaatatctcctagttgttctccggtcttcacatatcctgtggagatcagaccttgttgaattttctcaggaacaaaatgacaatcaatctcattgttcttagttcgctcgtggaacacgggatttgaggcaatatgaagagcagcttgattatcacaccacaattttgctggaatagaagtcttaaacccgaactcagtctaaagctgataaatccatattgcctcagacacatattgtgccatagctctacattctgattcatcaccggatctagataaaacattttgtttcttactcttccaagagaccagattgcccccaacaaatacacaatatcctga

SEQ ID NO: 332062 - DNA, 660 bp, Cannabis indica
ataagtggactactcctcccattgctatttaattttgagataaaacctcatccattttatctcaaattttaacacgtgtcataatagtaatttctttattttttttaacattaacccataaagcctgaaccaaatattttctagaaaaatatttttttgaaagttatttgaatttcattctattttttttaataaaaagccaatttttaaaattttacccaatactccataaaagctaaagacaacccttgacaatagttacaagtttagaattattactagaagagaattacgtggcgagccacgtaaatattagttttattttaagttctagggttttttgtttaagaatttagcgactaattgtaaattatgttataaacgatatgttttataaaactaattgttaagaatgtcataattgtgtatataaacctataatatagacattgttattcaaatgttttatgttataaacgattttttttatatagagtttaaattttatattgatgattctaatttagggtgggtattggtgtagtttttttaatttaaaaaagattgtttaattttttagtttatttatttatatatttttgaaagttaacgggagatcaaacctatcgttaaatttaacagaatattcttttattttta

SEQ ID NO: 332063 - DNA, 961 bp, Cannabis indica
atgaatgaccctactgaccaacaagaatgtttccagcgtgctttgtcctcactcgcacgcttccttggaaaacttcccaagaggtcacccatcttgaaattaccccaggtcaagcactcttaactttggagttttttcgtgatgggctatcaaaaaacaagatgcaccatgttgatataggtagtaccaatcaatccatttaagtccttttcaactgtgtagtcccatacctactcagtaacagagtcatcccacttgaccttcccctggcagtgtgggattgcatagcttacctgatatttccccttacggatcacaggactactggctgtcacaatttgttcttctattataaattttaatgattatatttcacccttaaccaaaattcaacttaattatttctaataaaagagtagagcttaaaattatctatccattaagacttaaataaaaaaaaaatcaacttaagaacgtaccaataactatatatgcctaatttattaaacctcaaacatacactcttcttatactccttatttatgaatataagtacaactaatcaaaaataaaacttaaattacgtaatatagcaataccttcaaatatttccttaaatttctttccaaaaatatcccattgatcgaatcctacccataagacatattcttctgaacacaaataaaacttctagttacactaaatatgtaacgcaacataaaatatgtaaaactaacatgaacatattgacaaaaacttacagtactgtaagtcgagcttgtctcgtcgcaataaactttacatgttagggctaaccacattctttaagaacgtattgctctgataccatattgtaacgtccccgctttaagcctctattgggtccttacacccacagaataatggctcttatacacgagtatgtcactttggctgcttcctggattgatgactgacccta

SEQ ID NO: 332064 - DNA, 1114 bp, Cannabis indica
cccacccaaacttccataccatcttgctttttatttccacctaatatgccaagtctcggtgtcaaactcgacattattcaacctttgccaacttttcatggaatgaagaatgaaaatctatatgtgcatattagggaatttgaggaagttgttgacactttctatgatcgagcaaccatcaatgatgttgcacgcttaaagtttttcccgttctccttgaaggataaagctaaaagttggttgtattctttaagctctaggtctattagaacatgggatgaaatgaccaaaatattttttattaaatatttctttgtccataagaccaacagtttgaaaagataaatctcaacattttccccaaaagacaatgaaacgttctatcaagtttgggagagatttaaagatctcttaagtcggtgtccacaccatggctatgagggttagggaattgtcagctacttctacgaaggcatcacaaatcgtgagcgccaattcgtagaaatgatgtgcaatggtgagtttcttcaaaagtaactcgaagaagctcttgagtttctcattgagcttgttgaaaaatctcacacatgaactagtccaagtgctgctgaaagcaccaaccgaaatcgaccaacggggatttaccaacttcgggaagaggacagcttaaaggcccaagtcgaagctttaaaaaagcaaattgtaatccttacgactaaagatggccaaaaaatgtgcatggttgcccaagcacaaacaagaccactcgaaccttgtttcgtttgtagagaaaatgagcatttaacgaaagattgcttagtttacaaagaaatgagaggggttcatgaggagcaatgcaatgccttagggtaatataaaaagtcattctctcatacgtacaaccccagttggagaaaccacccaatttcagttggagagataactctaaccaagctcaaacatctggaggacaatggagaaatgagcatcaagctcaacctccaaaggcatatcctacgcctcaatacaatgctcaacaacaagggaactcccttgaaagcactattcatgcattcattgaggaacaagctaaaatcaatcgccaattaaagga

SEQ ID NO: 332065 - DNA, 570 bp, Cannabis indica
tgccgccagatcttcaatgcaaaaactaccgcggccaactctaggtcatgagtcgtgtatcgctgctcataatcctttaactgacgagaggcataagcgataacccgatcggcttgcatcagtacacaccccagaccctgtctggatgcatcgcaataaaccacaaacttctctttgtcagaaggcaaagctagcactggagctgtaatcaacctgtgtttcagctcctgaaagctagcctcacatttatctgaccacaaacatcgctgattcttcttcgtaagctcgattaagggtgagatcttagaaaacccttccacaaactgacgataataaccggctaaacccaagaagggtctaatttctgtcaatgtcttcggtcttggccaatccctgacggattctattttccctggatccaccttgatcccatctttgctaacaatgtgtcctaagaaagacacctgagatagccaaaattcacacttctttaatttggcgaaaagcttgtgttcccgaagccgttgcagaaccatcttaagatgtaactcatgctcctcttctgattga

SEQ ID NO: 332066 - DNA, 514 bp, Cannabis indica
tctctctaccttggccgccactctctctctctcttcttccttcatatttcgaaaccccttagtgataaaataatttccaacagagacaacatgcaataggagaaggaccccaaacatcagaatgaactaactcaaaaagaacactagaacatttattgactcaaggactcaaactaacacgatgatgtttggcaaactgacatgactcacaatctaaggaagactacttactatattggggataaagtttcttaagctaagaaagggatggatgacccaaacagcaatgagccttaaaagcagaagcaacacatgaacaagtaatagaggttggtggaagtgggtcaagaacataaacgccacaagattcatgtcctttaacaataatcttcttcatcaaaagatcctgaaaaaaacaatgatcgagaaagaatgagatgcaacaatttagattacgagtgagttgaataacataaagcaaattaaaggaaaaataaggtaaatgtaagactga

SEQ ID NO: 332067 - DNA, 570 bp, Cannabis indica
tactcaaggtgcggtccataccctacttacactagtacggaggtatactgagtgcatgtggtacatggtacatggtcgtatcctagttggaacgttcttactcatctgttaagccttgtaaataggtgtatgggcgcctagatacaggtcgatataatatgatatgttatatgcttttcttttagagtctttcgactcacagttctgcttccatgtgtaggtaaaggaaaggcgaaagctgaacaggagtgagtttgagctcgaatgaggttgtacatgtcatggtggcgtgacttggagtgttcggtctcgggacatctggggttaatattttgtagtcgctgtgcgacctggttatgtattttgagtattttgtataaaattttaataacgggatcccagtacttgtaaatgattttgtaaagttataagtttaatatttaatacaaaagttttaatttgacacgattttcgagtaaattctttggttagcaaagatagcactgtaatttaaaaattattgtagcgtgccttagcattagggtgttacacacacacactctctctctc

SEQ ID NO: 332068 - DNA, 776 bp, Cannabis indica
cctttaggttgcctcctgcccctagttcccgaatctcgaggttggcctcgcgattttctctctccaggcaggttgattttgggtattatccccttgtgtcgccctggccgtagctgccacacgctctaatttagtattacgccagtttgcctcctccaatcggcgcctaaggtggcagttttctaactcgacgattggtatgtaccttgctgggtcataggcgccatcctcatcaactggattagaaagaggtctgtcattgttcatcctagacccttcatgcatagttcctagattctgggttttccttgggcttatggtccgttcaaatgataagttgaaggatccctagggactcattggctcttttccaggactgtaagcagtttctctgtgagggttatttcttcattgtcagccataaaggggattattatttttttttatgtaaggaaggtttttctgagttttttcacgaaggctctgaatgaaagcaccgaactgttaacacagattttcgttaaaccatatatgagcctaaatggtggtaaacttgcacagaaaaataaaacagtaaagaaaaaaaagtatgaacacaaatgttttttacgtggttttgcagttaaaattctgcacagtccacgagtcaatcttattagaattctgatatagttctatgcccttttttcttatgatttgtccctccctttttcagtctgccttgcctctatttataattacatagttagacagttaattacatagttgactgatat

SEQ ID NO: 332069 - DNA, 977 bp, Cannabis indica
agttcctgacaaagaatggggtaaggtgtctaagaggaaaccagcagtttgctcgggaatgttataacgttgccatagccaaggataagaaggaagtatcctctagccagagctcggacaagggaaaaaacatttctaagtacggaacttcccaaggcggggataaagatgtggatcctcgacttggggactcaagcagcaatgttggacctgtggaagaactagaagagattgagatcgacccagatattctggccagaaagcttaaaatttgaaaaggtttgttggtcgaagtaaaatcagcactgataaaatttctgagagcaaacgtggacatttttgcctggtcacatgaggatatggtcggaattgatccttctgtaatttcgcacatcctaaatattgatcccaactatcgaccagttcaacaaaagcgaaggctgttggacaaggagcgagctctagccctgaaggaagaggtagagaagctacgaaataacaacttcataattgaatctttctacccgaattcggttgctaatcccgtactggcacccaagaggtttgtgtattgatttcacagacctcaagaaggcgtgccccaaagactgttttccacttccaagaatcgatcagcttgtggacgcaacagcagggcacgaaatattgagcttcatggacgcctattcagggtacaaccaaatcaaaatgcatccaccggaccaagatcatacaagtttccgaacagatttgggtctatattgctataaagtcatgcgatttggtctcaaaaatgttggggcgacataccaaagattggtaaacaagatgtttaaagaccagatcagacgaaacatggaagtatatgtggatgacatgctcgtcgaatccggaaggttgggggcacatagatgacctggacgaatgcttcaaagtcctcaagaaagacaacatgaaactcaatcccttaaagtgct

SEQ ID NO: 332070 - DNA, 820 bp, Cannabis indica
gcaggtctggaaggtttggtagtgtttagggtcgatttgagggtgtagtaaatttttgagcttatcctgcactgaatcggtccaacggtttagggggacctgtagaaccggtcgaccggttggtccccaggaaaccccacagaaccagaattccagttggggaaccggtctaccggttggggcatttttgggaaccctagtttttcccatttttatgatatttacagtattgccatgttaatcatcgataggaaaacttttggtttcaagtttaagttcgcgaaaagtgatttagcgtgtcactcactagttttacaaataatgtgatttaggggcctgtaattcgtcgagcagatgttccactcaggttggccggcacacttgaattcggtaacgaggtaagattagcataatgatatgcatatgtatttacatgtttagcgtgcttgttagttaagcttgttagattacattataataacgatatcgtatgtttagtattatattggatatcgataaatgtatgttagcttaaatactatttgacaatatcacattggtacgactagagtacgactagcgtatcgagtatagactgatattatggtaaatattattgtactacttgacagtgtcacatcaatacgactagagtatgactagcgtaccgagtataggctgatactatggttagtagtactgtcgtacaatcgttcttgactcagcaacgtgttggacacggggatagggttatggtttggtgtatgggcgcctgattataatccaagttattgctgtgttattatttatgcttttctta

SEQ ID NO: 332071 - DNA, 524 bp, Cannabis indica
gtttttatgagtgaaatgttgtttagcttgctatagttgctgtagttgtttgttgttgtattcagaggcttagatatgagtttttatgtggatttatgcttgaattagtagctgttggttgtttgagcaagctttggagttttgaactcaagcttggctcattaatggcaaaactcgtttctgtgattgaagctttgttttatcatttggaatatggtcattggggtctaattagcaggagtggatggttgcatgaagtttggggttgagttggttaagaaatggaattttgaaaaattcctgcactgaacctgaattccggttcagggaggcctgtaggaaccggtctaccggttggcttccaggaatttttccagaactggaattctggttgaggaaccggtctaccaattggggcaaatttgggaaccctagtttttcccatttttgtgttatttagggtattgccatgttgtttatcgataagggaacttttagtttctagtttaagtcctctggaagtg

SEQ ID NO: 332072 - DNA, 522 bp, Cannabis indica
acagggtccaatctgtaacttttgcaaaacacagggtctaaaatggtatttaccctataattatcctaattatatgtgaaaatatctcaaataaatattttttataaatgtctcataagtaaaatgatataaaatatcttttttctaatttatgatttataaaaaataaactgtttaataaaataaccaattttaaatttgaaaatattatggttagaatatctataaaaatatctaggttaatttaaaaatttattaatcatttaattcatcttatatgataatttcaatataattttttaaattaaaagataaagttatcatttaatttaaatatgcccaatattaaattacctaatcttataatgaaataatatataaatattaaagaaattaacaaaattttaaaatgtgactataatttaaaggggttatttcattgttatacttcaaaacaattttttttgtatttttacgaaattctacatagaaatccctattgcaactagcgctacaactact

SEQ ID NO: 332073 - DNA, 536 bp, Cannabis indica
tcttgtcctcaagtcttggaacaaatacatatgtcttgttctttctaagtgagcttaattcatcatccacagcccgagaccactccttcttgtactttccatttaaagcctcttatatactcaatggtttttgtatgtcacatgaatgatctattgacaaagcataggcaatcagatcagcttctacaaaccttgttggtatatgaatttctcttctggttctatctctagcaagctggtaatcagaaagatctagttgttcctcagtctcatcttgagctgtatctgtactgtcattcttctcacttactggttcaaaacctttgagctcaatttcaaactctgccaaatcttccctcttgccagatgaatctgcatcaggtaacacactgcctttctcggctttcaaataaggaaaatcattttcatcaaacacaataattctagaaataatcaccttaggcttcacatcctgttttatgtagattctataaccttttgtgcctataagatatcctagaaacatgcctttgaca

SEQ ID NO: 332074 - DNA, 302 bp, Cannabis indica
aaataatttccaacagtaatttgggccgggcagaggccgaagaagtctgccacatccctgaagtacttatgcaagggcatcagcaccccttgctggccgtgagcccccgaccaggcgcacattcccttaccagggtttgtggcctgattgtcgtgggcgggaatgtagcagtctagttcgcccagatacccgtcctggtcgagactacagaggcgtgcctccgaaatcttggaaggaggacttacccacctggcgcccaaggcaccctgccgtcctatgaggaaccgcctcggcaagctcct

SEQ ID NO: 332075 - DNA, 268 bp, Cannabis indica
ggaaatcttacagtgggtgcagcggaatattaatggctctttccactcagatctctaacccttgtatcatgtctgtagcaaagtatcaccaagatttgagcccaaatgtccttctcttgaatgtttaggttaggatttattaggaattaaaataatagaaaaattaaatggaaattcccataggagtggtcggccatagtaatgggccccactttagaatttttccactttatacaaattttccttatattctcaaaaatgtcatttt

SEQ ID NO: 332076 - DNA, 620 bp, Cannabis indica
aaatctaatccaatccaatctgtaataatgcggattggatcggttattttttttttaatgttaaaaattatttaatatttcattaaaaaattaaatgtaaaaaaaaaccctacacacgcaacagtaggtagcacaatcagaatttaagtttaacaaacactaaaaaaaattattatttattttctaacaacacattacactctcataaaagtaaatcatgacagttaaaatattacagtaatattatattatatattattactagaaattaaaataatattatatatattataattttttaaaatatataattaagtgcggattggattggttactttttgaggtcaaacaccattcaatccacacaagtgtgaatttcaaatttttcaatccaatccaatccaatccgtacaagtgtgaatatctacattttgaggattggattggatcgtgtagattagatcggatcgtgcggattggatcgaatcagatactttatgaacaaccctaaccgtggccttacttttggctggcggggatgagatgcagctctttgcggagctggtagggatgccgcacaaggagacacacacacacacacaaagagagagagagagaga

SEQ ID NO: 332077 - DNA, 541 bp, Cannabis indica
aaataaatctagatattttaaaattagtttcaatttgttaaattttgaaaagatatttaaggttgtttttgcaaccctaaattttcaaaatatttggttagttaaaatgatattttaattatattagtattttatttcacattttgttacatggacatttttgttatgtttaattatgctgacctcgcttttagtcaacgacaactagccgaatttaataagcgataagtgatttatagcaatcgatatataataaaacaatgtaaagacacaggaattttatagaggttcaagcccgaacagttcgataatagcctaatcctcgttatttgtattgacttaagatcaaggagaaaggttccttttcttatagctcttaaaacagtatctctgaatgtataactcttagataatatatttagggtataatctcagctcaactgttttcgaccccttgcccagtgaacatgcatcactatttatagggctagtaagcttggagaggaagagtttcccctctcgtcacaatgcgtataaacag

SEQ ID NO: 332078 - DNA, 1111 bp, Cannabis indica
atatataacataacttttatatatataaacgtagttagttgttaataataataataataataataataatataatatattaataataataatattattaataatgataataacagtataataagataataatatatattaatagttattttatcgttttttagtcattaagaatttttacttctaaggcactaaactaaatgacgcatactcttaattgttctaatacatatattatcaatttatcacaatattcccattaattctatcaattaaatctattatgatatttctagccctcgatcgagtctctaaggtcgtcaaacctgaaaatatttttattccacatataattcatattgcattcacatatgctatataaatcttcaaaatttataaattacacttatttattcacttatagtaaatttaaaatatatgttgaactagattagtaggatcataatctcacttattacctaattatcccaaaatataaatataaaccctaattatttatcattaggcttatcgggatatcacaatcatcccatccttataagaattttgtcctcaaaatttatctgaataactcaggatatagctcccacatctgcgactctaattcccaagtctcttcctcaacttcactattcctccataggactttaaccagagggatcgttttatttcggagtactttctcctttttgtctaatatctaaacagattgctcctcataagataagtctgtcttaagctcaatatcaccgtaactcaaaatataagtcggatctaacacgtactttctcagcatagagatatggaagacattatgcactctagacaatgcgggtggtaaagctaatcgataggccaccaagcgtattcactccagtatctcaaaaggactgatgtatctagggctcaattttcctttatttccaaatttgcgcacccctttcataggtgatactcggagaaaaatagggtctcccacttgaaattcaatatccccacgctttggatcagcgtagcttttctgtctactttgtgaagcaagcatacaagatcgaatcttttcaatagccaactcaggtccgagataatgt

SEQ ID NO: 332079 - DNA, 693 bp, Cannabis indica
tcaagtatttgtcaaaacttgagagtgtaatattgtgtacccattattattgttatagtggaaggtttaccgtgatttttatttgccacgagtaaattcttggcgtgcatttagtgttttgattattattcgtaaagtactatgtacactagaagatatccaaaattctaaatatgctctatgattgcagctttgactgatctttcacatcataaaagaattttggagtccccattatttttttccgcaaatattgatcctgaagggaaattagaatactgtccattattcccaacactattttcactatcagcatatacatgtaataattttgatagaaccttttttcacttctagtgctattgatattgtagtaacctaaatcttttttttttatgccattattatttattccatttttcacatgattagaaaataataaaagagatagtttcataaaaacaaaaaaaaacaaaaatatagttgtatgaaatattaaatatttttaccgttttaagattttatttacatagaatatgatctattgatgtatttttatgttatactcatgttattttgttgttgatttttttgttatttgtatactattttttatttttttgatgttgttatgttgttgttttaatgttgttttatttttactttcatataattttttttaatgtaattttt

SEQ ID NO: 332080 - DNA, 533 bp, Cannabis indica
gttcatttgcatgctagggtagagttcttggttaagtgcttgatttctaggaaatggctttggcaaagactgttgtgtggtgtacatcccctctcttatttatgttttgttactctcttttcttttttttttttttatttcgcaaccgacccctctattggaagattacttgagatatgggacagttttcgttcccacgttctgcgtctttcattttccctctgctttcgctgcttttgagatattcgcacccgatgcttgcttaggaaaatcctttgaatttccatcttaggcaaacatctgaagggggcctctttccagcggttaggggacccccattccctgttttaacaccagggtttagtttgggggctgactgctggatttttccttttacagaaccaaatttctagttctgcatcgggaaccaaatcttcccacaatggggaagtattggaaattattttaccaggatcttatatctactcaactaagaatttcaaaattcaagaggaagaagagagagagggagt

SEQ ID NO: 332081 - DNA, 1578 bp, Cannabis indica
gttccaatgcctcataactcagagtatgggaccagtctgagacatatttttgaagcattgaaacatggaacacatcatgtaaagctgccagcgttgggggcatagccaacctgtccgccacttgccctatcctctcgaggatctcaaaaggtccaatgaacctcgagctaagcttccctttcttaccaaagcgtttaatgcctttcatcggtgatattcgaagaaacaccttgtccccaatttgaaaatcaatatcccgatgctttggatcagcataacttttctgtctactctgagccgcgagcattcgtgctctaatcttgtcaaccacctcacttgttctctgaacagcctcgggacccaagaactttctttcacccacttcatcccagtgaatgggcgatctacactttcttccatataaaagctcataaggggccatcccgattgttgcctgatagctgttattgtaagagaactcgatcaggggaaggtactttacccatgatccctcaaagtcaagcacacatgcccgtagcacgtcttctaatatctgtatagtcctctcggattgcccatccgtctgaggatgaaatgccgtgctgaactttaactgagtacccatagctcgatggagactttcccagaatcttaatgtaaactttggatctctatccgaaacaatggaccttgggacaccatgaagacgtacaatttctctgacatataactcagcatactcgttaatggagaaattcgtctgaacaggtagaaagtgtgctgactttataaacccgtccactatgacccacacagagtcaaattgtctcgtggttctaggcaaacctaccatgaagtccatagtaatatcttcccgtttccactctggtatgtttagtggctgcagtaactctgcaggcctctgatgttcatcctttacttgttgataggtaggacatttagcaacatactcagcaatgtcattcttcatgcctggccaccagaacatggcctttaggtcttgatacattttcgttgaccctcgatgaactgaataaggagtcgtatgagactcatcccttatctctcttttgataccatcatccataggcacacaaacacgatttccgaatcacaacattcccgtttcatccactgaaaatcactagtctttccagccgaaaccctatctcgggtttttaccaattatggatcttgcatttgcacttctttagttctctctaaaagagtagattgcagggtaacattagctaacttccctacaacaaactcaatcatagctcgggtcatctcatttgctagttaatgggagatttgtttcactgtatttatctctgtccctttctgctcaaggcatcagcaaccacgttggctttaccagggtgattaaggatcttacaatcataatccttcaccaactctagccagcgtctttgtctcatattcaagtctctttgggtagagaagtatttcagactcttgtgatcagtgtatatctcacatttctcgccatataggtaacgccgccaaatctttagcgcaaataccactgctgcg

SEQ ID NO: 332082 - DNA, 843 bp, Cannabis indica
ctttctagcggttaggggacccatattccctcttttcacgttagggtttggtttgggggctaactgctagattttccttttttcagaatcttattactctttgagaaatgtttgtctctacattcgaagctgaatcctccagccaaggagcggttaccctggccaccttgaaagaagtgatgaagggacctgttgtccaagagaattacacgtgtcgctccaacggttgggaggcggatgagcttcactcaactttgacctgtgcccatcagttggagaagatcgtgattgtggccgggattaagccttctgcctctggggtcttccaccgcttgcccagagatgaggagacgcccaaccataactatggtggttttggagcttggagccagacccaccttatgtccggagccatgcttccactttagcactattttataaattttctagtttttgtttgccttgggccttatcaacttatttcccaagcataccgcctgctttcaggcttgtacattttttatgtagccaaaggctgggcttcacctagcccagccgagatttgatactattacgaacttgtgtctgtccccaagaagggggataggcttaaagacggttttttaacactccgggcccatctggctaatgaggttcctgttccttttaattttcaaaagaatgttaaagagtatcgtcaccggtttttcttttcttctggcttccaagccgtggaatgcccagaattgctcacggagtgttttagggttccttcgatacaccgcactgcctctacccaactcttcctccagcacgccaaggtcttctccacatatgacaagg

SEQ ID NO: 332083 - DNA, 642 bp, Cannabis indica
aatgctaccattagagatgttcttagtggtacagtcaatggaaaaaagaagtgatccattttgtgctcatggcttctggataaacgacctttaaattttaacagataagtatttcaagtctttttatttatagaatgttttacattataataaggattattttaccatctttcttttatattatctattttttcattaaattatgtagtaatagagttttatttattgttgttttgtaggtcagttttgtagagggcctacgattacagagactttgccgataagtttaattcaaaaattgtctcttctaatacatattgtttcttggtgttgtttgttttctcaggtagtatttcaatattataagccgaaactttagctttttcgctatcaacaaaggaagagtattttttaatgagctggggtactgtttgaggatgttattagttttattgtctaaatttttgggggcaactttatcccatgtggctcgcgatgtgatttctgcagctcatggtttggcaaagcatgcccttcaattagacgatgagctatcctggtttgaggaggtgccatcaccaattgtggattgttatatcgttaatcatgtgtgattttgatcactacgtcaaaaaaaaaata

SEQ ID NO: 332084 - DNA, 547 bp, Cannabis indica
catacaatatagtgtcaacaaaatactcaaaagatttaggtagagagcttaaaagaatgataccttgatcttcttcatcgatcttgacaccaatgttgttcaattcaagtatgatcttgttgaattcatcaaggtgttttcttagctcatttgattcatccatcttgtttgtgtagagtttctttttatcctagagaccaatggctgtttcttcatcatacacttctcgaagaacctcatctcctaaagaaagtaatacggcactgtgagccttgatctgtatctccttcactttctttttgtcttcgatttctgcaattgcagaagtgtcaatggcctctgagataccttgatgcaccagtagggctttcattttgattctccaaagcccgaagtcattttctccattaaacttatcgacttcgaactttgccattgccattcttgaaactgtgatcaaccgattcttgatcttcttgagctacacaagctctgataccatttgttgcggattaatagacctgatcaagatcaccataacaacaaa

SEQ ID NO: 332085 - DNA, 534 bp, Cannabis indica
agtcagcctcacatcgagtatcgaataaacgcgcttggcacgtgtccccatccaaaggcagaagcagctcggatgaagtctacatgtaacttcggaagtcccgtacagacttgggggcaaatgttatcccaatttttggactctgacgtggcatcagatgatggtgacacatggaatcaactttgagtatctgctcggagagtacagtttgaacaggatgcctcataggcatgcccaaagcaaagtgatcagcaatccgggcagagtgaccaacacttagtgaattcaactttcgcatcttgagtcatcaaagaaatccctataacttggggataagattccagagatatggcaagctgtccaaatcccacgatcagggtattctgcatttatcatgtaatctttctacttatatccattgtaacgagaagggaaatacttcctctctaagctcatagccctataaatagtgatgcatgctcactgggcaaagggtcgagagattttaacctagagattgttggaaattatttt

SEQ ID NO: 332086 - DNA, 739 bp, Cannabis indica
tttaaaagcataaaaattaactctataacatagagttatcagaaagggaagctttctttgtttggctaaaggacaaatatagcaaggttcaacattatgtaaatttttagttttacaatgtaaagaatcactaagcaaatctaaacatttattagacaaatgtcctaatcttttattccagatttcaacagaggtgattgcattgatagaaccggttgtggtgtccaagaaatagagaccattagtcgtttcacctctgccaatcgtcttcttggtgtgtatttcctgtataagagattcattagcaaagaatttgagagcaaaatcattgtcttgagttagacaactaacagaacaaatattatattgaaaagaaggaacataaagaacccgctttagaatgagattatggccaatgtccacattaccttctttgtgaaccaaaacatgattgttgtttggtaaaattaatttagttggattaataggatgaatactttgaaaaagtttcatatccgaacatatatgtctagtggcacccgaattcactatccaagacttaattttaggtaacaaggtactattggacaagataatacctgaattgtttgttgaggttccaggatcggcagcaggctgatttggtgtttgagcagcaagaagattgaggagctgctggtattgattcgatgtcagctgaggcagcaaggtgttgttgttgctggtaccgatttcatct

SEQ ID NO: 332087 - DNA, 567 bp, Cannabis indica
attcatagcaccaatgcaatgccctcttagagtcaacattgatcagttacatgttaacattagccctttgacttttaaaagcatttaatcaacgactcaatcaatccactactaagaccaaagaaaatggcaaaaagtttaaaaattcctcgagtttattactttctaactcccagtttttgacaaacaatgagcagataacttagcatttttatttacataaaaaactatcttactggtcctgcaatttaataaaaccagtaagtacattacttaatatagtttgtttaaggtctttcttcttttcactgtgaaagaccataggaagagaagagatgaaggtgacatgtccatgagtgacctcttcccaagtttattatctgatagtcctcacttaataaaatatggctgaggaaaaccgtggttacaatacaattgtgacattgggtatgtgactaatcttgttccagtactcattcccacgagagtactttttctccaccaatggacatccttgtgtgtataaagtggtgagggaggttggaaacccttcttctgacaatgtct

SEQ ID NO: 332088 - DNA, 542 bp, Cannabis indica
tcaaattgaaatctcaaagaataatgaaacttgaagccttctggtacaattaatattacccctgcacccgatccctgctcattggatgctccatctacatataacttccaagtgtccacatctcgatgatcaagcagaatatcttctgaagttataccttctattaagaagtctgccaaggcttggcctttgatggacgttcgagggcgatacgttatgtcgaactgcccagttcgattgaccattttatcaatcttcttgaagcatctagttttgataaaacttgtctcaatggttgatcgattaacacctttatggggtgcgcctgaaaatacagccggagcttacgagactcgtggactaggcagaatgcgagttttcaaggaggggatatctagattctgcccctagtaactttttacttacatagtaaataggttgctggtgtttaccctcttctcgcactatagctgcactaatcgcatcttccgagagagccaaatagagaagtaacgtctccccagttattggttttgccaaaa

SEQ ID NO: 332089 - DNA, 2284 bp, Cannabis indica
agggacacccagtcagcctcacatcgagtctcggacagtcgcgcccgacacgtgtccccatccaaaggcaaaaacgactcggatgaagtctgcacgcaacttcggaagtcccgtaaagacttggggggcaaattttatcccaatttttgcactttgatgtggcatcgcataatggtgacacgtggaatcaacttggagtatctgctcggagggtacagtccaaacaggatgcctcgctgacatacccgaagcaaaggaatcagcaatctgcgcagaataaccaacacttagcgaatttagcttttgcatcgtgagtcatcaacaaaatccctgtaacttgggtatcagattacagggatatgacatacacacgatcccacaatcagtgtattctgtatttatcccatgatcagcgtattccgcatttatcccacgatcagtgtattctgcacttatcccatgatcagtgtattccgcatttatcccatgatctttctactatatccattgtaacgagaagggaaacacttcctttccaagttttacagccctataaataatgatgcatgttcactggacgcaaggttgcaaacagttttgttgagactttaccctagagatattatataagaattcatatttagagatactgttgtaagagctataagaaaaggaacctttctccttgttcttaagtcaatataaataacgaggattaggctattaccgaactgctcggggctgaacctcaataaaattcttgtgtctttatattgcttcactatatatcaattgctataaatcacttatcgcttacttatagcttctgcatctgcctgagttaatgcaaacacccttgttggagcgggttttacaacaatcttctgttcttaagttgtgggcagctcttttgtagtgtcctggtaacccacactggaagcacccttgccttctacactcacctagatgatgctctttacaactggggcattctgggtaggtgtatcgagtttcagagctaccctaataattgccttgcccctggttccctcagaacctcttgttctgacttgagccaccagatgcaataggtgcctttcttttctagttagtggtcgagccactacctcccctactaaagcatgaggtaggaggagtaggagccccaccagcgacctgagtccctcgagactcctgagtgcactccactgcacccttagctcgtagtgcctttcccaccatatcaacataggtggtgttgtcatcagtagagatcattagatcatgtcttatctttgaattcaatccatcaaggtatttttatttttgtactcttgactgcttcattatagtacttcgtattgatcaattcttggaacttttcccgggtaatcttagtaacattatgggtcagggataccatgtcccaccatactagagcgtcttcttgaaactgaaatgtggcacaagccactctgtcattgccggtgacgcccataaaattcagaattctagtaataaccgttacccactgctcgactttcataacatcaggacctcctaggaagattagagctgcctacttgcggaacctttcatacagtggttccattcggttcactgtagccacttgtcctgcctgcacagcaggggcaggagctacctgtatttctggagcagggattgcaggagcaccctgctgtctcaagcatctaatcttatcgtcttactcgttaattctagcttgcattgttgcaaacctattttcccattcttgggcagcctgtggtgggttaacatcgccctgaccgcgtgccctgccattagggcctctacctcagccacaaacatttgggggaactaaactcactgaccgccactagattcgaccgaattaccttgactcttcgtgtttcacctggcatccatactactagaacaacctgcgtaaccaagagctagtctggtcagtgttgggctttgtgccctaaataaaactctatttcaatataatctttatcatttgattatcaataaagacacataagtattttcatcacttatttagtgtgtcatttggttcatgttatcatttatatgtttatttgatttataaattcatccaaacccttatcgcaataatattcttgtttattgtgtcgtcaacgtagtggaaagtaatcatgattgtgtgattaaatatattcatagatttatcagtacacagggtttaactgatatgataatctacaacatagttgacttgcaccttggataagtgcta

SEQ ID NO: 332090 - DNA, 1110 bp, Cannabis indica
tgtgttgtcagtgtgaagaagtactccgatgcggacaacatcttatatccaccgatggatttttctttcattgaaatttccgagaagatgtggttctacgagcttcatgcttgtggtgtttttctgcgtgacagtgtaagaaactggtttctttttattattttctatgtctatgatatttgagtctatgtttatggtcaaaaaccggtttctgatgatgtgtttattgcatttctgtagcatttggatgtggtgttctattacctcaggaaaaagattaagcaagacaatattttggaacagaggattaccactactgattgtttatttgatcaagtcatgtggaattcgtacaatcaatttttgaaatcgggttctaatccttctaggattgactttgataatgtcattcctagatacatggttggtgagtatttgttttgtaatactccttgggtgcttactgaccatgttcttatgtatgtcaatattcaaaagcacaaacattggatattggtccattttgacatcaaggagaggatgttgaacatatataactccatgtctggtgctgtcaacaagaaacgcgctttggatcatgtcaaagcttattcttctatgctgccgttttatttggagtatcttgatgtgtattcttctaggccggatcttaatttggatcaaggtccatattccgttgggaaaagagagcctttgaatttcaagttcatagatggtcttccaagtcaagtcaataggtaattctgcctcttttcatcatatatttttttaattgaaactagtttttatgtttggttctgtttatattttctgtcaggttttgttttgtttggacagaaactggtttttttactggattttttttttgttttattgcagtgactgtggagtgtttgtcattaaatttgctgaatttttcattcgtgggaaaattcatgacattccagctaacatgtctgatttggtagccgtatatagagatgatattgctgtgagcttgtttattcatgctaagaggaaacaaattggtggttatataacggatgatgaagtgatgaaaaagggcaagaaatcaaaggataaggcaaa

SEQ ID NO: 332091 - DNA, 500 bp, Cannabis indica
tctatcaatgatttgctcaaggctcaagaaaagtctctcgtttctgcttaagttgttgagaatgctcttagtcttgatgaacctcttatcatggaccttcctcgtcgtgataaggataatttggcagctatagatcgtttgtccatatctgtcactaacaagacaaaagattttgaagattttaaggcggaggaagcagtaattactgcagcagaactagccatacaacaacaacaagcttagtttgaagccaaaaaagcattgtttgaggcaaatctttctagtctcaatgattccttgaaggagcaacgacatctcattgaggagataagtcgatcaaaggaccaagctagtgtagaaaaattccatgaagctgagagagcgaaagcaacactcaagattcaaggagaagaaatccagagaagacttgacgctttaactttgtttcttcagatggactgaagatcttataattttgcttctaaaactttttagcttta

SEQ ID NO: 332092 - DNA, 1115 bp, Cannabis indica
aaagcataacaaaatgactaatcttatgttgggtccgctggtggtaattagtcaatgttaagatagtgtcattttgttttttatttctatataattttattcatattatgcataaatttaccatttaaacagtgtttcttatctaaatgagtccatgatagtagaaattagaatagtagacctactactatactacacatacgtctgaatgtgaaaatgagtagtcgagagtattcagagagagatcaaaataaacacttaaaatgagtagtcccttagaaagtagtccaaatcgaaactagaataccaccaaacattaaaactaataaacccaagccaccaccaccctaacatactaaaaaagtacttgatcagaaaccagattaatcttccaaagaattataaagacaataccccatgtatcaacattccacacatatagtaaacatgcaatgttgcaataacaatagacgatgcctgaagtaacagataataaacagaagatatcaataacccaagaaccaaatattcaactttataccgagaaacatctaacatagcatcaagagcttccaacaaaataaagtgaatgaattcatgaaaccaacttccttacaaacgaatcaaaatacatctaattacatatatacctgaaatagcccaaagagcataattgttaagcttagtacaatttgcaattttcaaagaactcaaacacttaaaagctccaagtcatccattctccatcaacataattttaatctctgagatcaactttctccacaattttcttgaaaattctgagtgaaaaaacagaaacctatatcaaaaatcatacctttaaactttgataatatatcaaaatataatctttagagaaaatcacatctagatctgattaaaagatgagaaaaataagactattttgttcttcatacttgagtgatgaagggtagaggagacgacgagagagaagacgtgaagaagagcttcggctaggtgagaaggcaggcatttgagagttcgtttctgcttctgccattgatccacgttgtgtttgctctcataagttgtagctatgcaaagtttgactagttaggtctcttcttccattg

SEQ ID NO: 332093 - DNA, 692 bp, Cannabis indica
tttcttcaatcacttctgaatcaatttatttttttttcttctcctcctcagatttggtatatctgttcacttgaaacgggcctactccgacgtcaacctccctcagatctggtcgagagagtcgtcgaacgcccaagtggatgaacgaccccctcacactttgaaacctcctgaagccaggacctcgagcctcgatccacttctctctcctagatcttgacgttcgtggcagcccagagcctggatttggttgtttcctctctctcacgaagttctctccttcgcatctctgctcaagctctgatgaacatggtgatgggttgtttctttttttgaaggcacagagagagagcgatagagaaagtttcacctagtaaaagttagggatttttgtaattttaattttttattttatttaaaaaaaaaaattattttaaaatgggttggtttttggtggccgattaacaacatcagggctgaagtgcggctggttgggatcggttaagaatgctaccagtcaggatggatgtggttgacatttgaatgattatttttaagttattaaatgattagaattggcatttgaatggttaaattagaaaattgacatttttgagaaaatgggaatgaaaaataacaaaatgggaaagttgcaaagtgaggcccaatttccttatatgggccgcccacta

SEQ ID NO: 332094 - DNA, 1235 bp, Cannabis indica
tataatatgtgtcgaggattttttttcataagttcgagtctatgaatctcataaaacattagaggagtcaaagtttgcaaacaaactcctacaaactcctgttaatactttcattaaaaaatttaactacacactaataaaataatttgtagattactaaatactaggcacatatattttcatgtcacatatattttcatgtcattcaaaaccattcccaaatttagggaatttttttaaaaaaaacagaaaaaacaacaaatacacttaagttgacaaaaatagaataagacgaaacgacaaactttcagaacaccagtcaattttcgtgggttgtcgtttttcctccaaaccgaaaacaatgactctgctttgctttcctcaaatcaaaacaacgctcctctcattttttccttaattttttattatttaattatttttttctagttattaattttcgaattcatttcttacctgaactgacctgacaagactacgtgtttgaaattaccaatgacccagatttgacacgtgttcaaatattaaacccagtatacccagcttatttgcacgcccagataaatagtaattaattaattaagctgcgtttaataatatttcgtttgctattatgtgatattatattgtattatatttaatataatataatattgtattatatttaatataatacaatacggtgtaatatagtgtacaaaacaaacctttagagtatctttaatggtagtatttttgaagatgctctatatttttacatcatccaaaatataatattttattttatttttcttctatatcatttttgacacctttaattttaaaaacactctaatggtataatattttttaaaaatattattattataatatcacatattattatatatataattttttttctttattaaactattatatatatattgcacttttaattttttattttataaaaaaacatagcatcaatgccattgtgtgccatcaatgcaaattttaaaaataacattcttttatctccaatggtataacatccctatattttgccacataagctttccacctcatcaaacattctccaaaatattacgatgctcttaatggtaatgtgaaacattaccttgtttgtttggagggtttagccttagaatattattcccctagtaatataactacccttgagaagggtaatgttcataccttaaaaaaggatagga

SEQ ID NO: 332095 - DNA, 674 bp, Cannabis indica
aatggtttaaattgattgaattactcttcatacaaaatatttatttctcttatttctttattttcaaattaaatcacaaaaatgtataaataaattcataataaatatatatgattgatatatatatatttttttatcaatgatattatacttgtaacaattaacaccaatgtaataaactttcattcaacaccaaaataatcttatatattttttttttatttggggatcctcttatttatcatgatttttgtgatttcattcataagtttcttgatcttttgcccgtggcctctttaaagttgattttagtaattatgtagagaatctggtttaggaggaacaaaaaagttcataataataaggtgattgctccagatattattattttttggggttgtgattttcttgctgattaccagagattacacaactctcctagttcttctcactcggtgggagcttgtcgtcccctacaaatgcttcttatagttttgtctgggtgccgcctagtagggggacagtgaagatcaatgttgatgttgctctgaacgctttcactgatagatgtagtttggctatggtggttcgtgactccacaagtgatgttatggtttctgctgtttggcacattttggctgccttctctcctgaaatggtgaaagctttagctt

SEQ ID NO: 332096 - DNA, 904 bp, Cannabis indica
aatccccatgaaaacgacaaaaattggtcatatctctcttgctgacatcatttttcatgggtgcgggcttcttgtacggggataatgactgagtagccatgtacacactttctatatcttctgttaggagggtaaatgcagtatacttggcaggactctcccggggagcttgttcggtcttgccagtgaactttccctttttcccattcccttgcctattatagtttttggaccatttaccacccaagcttgaattgcttgggtaatgggggagctagacagatgtcctagtagaaggagcttttgactggctaggtttttgttcaccctctgctcgctgaatggcttcttcaagcttaataaaaccttctgcgcagtcaagaaagtcaatcatcgagtctattggtccattcttccttatgtgcttccaatgtttgccaaggacttcaatgcccccaagtatcgcggataactttctgtcctcagttagcagtgtaaccttagtcgcctctgtcatgaatctgctgatgtgggctcagagaggctcccttggtctttgctttacttcgacaagatctcctaggtggaacagaagttagcgagaggaggagaattgttcatggaactccgaggagaaagccttctatgagttgaactttccgggtgctaacttcaaataccattgttgggcggcttctgaaagggtgggaggaaaaacccaacaacatacatctcctcgtactccttgcaggtccatttgcatctcgaaatacttgaggtgggataagggatcttccttcccagtatacatcttccaggttggcatcttaaacttgtggggaaattccaggatattaatctcatgggagaaaggggttccacgtgctcggcccaactcgagatc

SEQ ID NO: 332097 - DNA, 639 bp, Cannabis indica
aacaaattgaatttaatattatattgttgttgatcagttcaaaacaaaacataaaacattaaagaatataaatagaatataaatttgtccttttagaaatctttgaacatatattttttttttagtttttatatttttttatagatttctatctaatagaatttgtcgttttttttttattctattttaaaaggaaaggaataaatatataaataaagtgaagtattattataattcttagaatttttttctaatgtctttcgaagttttcgagttgtaaattaaaaattatgcttatttttttttttcgagtcagaacaacaaagattatgccaattttgtattatttatttggcgtataaaagaaactttttgaatttcttgtagaaagagatttacctaaagaaaaagcttttaatgctgcccaatatcctttctttttccaaatatttttacgaatccgcttttttgatatagaagtacgtttttttggaactgccattcaaaaattagaatgaaatatttaattcgtgaattttaatatattttaatataattaatataattttaagtactttttttttttcaattcttttttttttttcaattaaaaaaaggaatcatatcatttgacctatt

SEQ ID NO: 332098 - DNA, 1017 bp, Cannabis indica
ttttcttttctaaagtactgattatttttatttttttaataactgattaattgtaccatcaagtgtgtgatgtagttggctggatgctttgcataaacttcctcatttggttatctttcagagttcgagtccctatggtaacacttatcttgggccttaaaattgtgctattttagtaataagaaacttttgaagattcaacagaatagttaatgtaataaaaaaagttttagaacttcacattaatatgtcaaatatgatgttgataatgctttatgtttctgttaatattttggatatgacatacaaccttaaaacaactgttgtgcaactaatgagttgctcattgcaaagaaggagatgttgttggttgttgttgtgttgctgaccatgttcacacacaatggataccttgtgaagtaaggttctttcaattttattgtatgtagaaaaataggcttagatcgtcatttatcctcaacggttggtatccttctttcacttgatattcagttgtagttgagtgtttttttttggttgcattccagcacttatttcaggttgtgtactagttcttcatatttgtaatctattgaaatgtattggccagtagcttcataatttacataattcgttccttgatcaaactgtccattgcaaaatatgagaaacagaattgtatctttttcttaacaattttaaaattttaagtattgtaagtcaactatgggataactgtcataaaactgtaatgcaacagttatatttgttgttaggcaactaatattaaatcttaaaacaactaataaagcccttatgtaatacaaacataacttaccacaatcgagttttctctaaacaagtcgtgcattgttaatttcgagtcttatttttttaaataataatattgtagtagcacaactattatttaactaataaataaattaattgtaattagaaatataaaatttgaatgggcatcatcatgaaaaaattgtcagtgtttttttgtcactg

SEQ ID NO: 332099 - DNA, 675 bp, Cannabis indica
gcccatctaccactccagcaaacaagtattttccagaaggaaatccactcttgatcaaatcaagggtctttgttccacagaccaggtcaaagccatacccagctacaccctttagagaggtaagtgttttgtatgcctcggcaggaacatcagcaaaatatgattcaattataacattcaaaccagacaaagatgactctagttctgagtaggcatgagtaaatgcttgtaattggtgagaatcaagatccttcacaagggtgggctcatcaaactgaatccaagtggcacctgcagcctttagttcagccacaacctccctgcatagcatagaccatttttggttgacaagatttaatacaagataacattgaaaaaggtaacgcctgataaaaatataatattcttacttgtagactgaaagaatatttccaatgagggaaagaagagagaaggacttctcaacaccttttgctggttttgatagcaacaagtaagacactggaccaacaagaactggtacagtatctaatcctagctgcaaggcaagtattatgagaagaaattaagcatcttatacaaattattaaattgaaaaacgttaccaagcttggttagatcttagaatcaaatgcaatatagagtattctttagtttaatatttctaaaaggaaa

SEQ ID NO: 332100 - DNA, 630 bp, Cannabis indica
aatgtttcctgcgaggaactagaatttcggttgtgcatccggaattccggatggggttctgaaattcccagaaccggaattccggttgggcaaccggtctgccggttgggtgattttcaggaaccctagattttctcgtttttatgttatttggggtattgccatgctttttatcgatagggaaaattttcacgttttattttttttttttttaaaaaaaaatatcaaacgtgaaaattttaatatatatatatactagttaaaaaataggtaaaagttattgagctgtttacgcccctgattccttcgatcttgtgcaagatatttctacagctccaggagatgacaacaagaatgttattgagctttatgctcctgatatctattaccttggatgttgtgcaaggtatttcttgaattattcatctttaatgtaatttcccaagtagtattttgttatcccaatcccactttttgtaatttaagaatatctctaataaagtcttgaagtcttgaaatagtgatgcaattaagaatttgacgagagataatggaattatctcggcattggatttaactggtatattataaataaataaaacaaatactatagtgtaaagaccgcttagt

SEQ ID NO: 332101 - DNA, 679 bp, Cannabis indica
attgaaaaattaaatttgtttactttgttatgtttaacagataacgctcacttcgaatcccgtaatactgcccaactactactccgactcggaaggaagaaagagcagtgaccactttgtcagctctatcaatgagttgaaggagtacttctccaatgagttaaagtctcagttgagatcattttctttgaaatttatggacaaaggagaaggtgtaggtggtattgaccgagagttggaggaggatgctgctggggaagtggggaagaaggcggagtgcagccaggccgtggaggagtccccgttgaagtcccctgtccgttcgaagactaatgttgttggtcaatccgaggaaaatgtggtggaatcagtaactacgccttcactatctgcttcaaaatctgttgaagatgaaggttgtgcacataagacctttgaggatgacgactttgatatagtcgaagtggcgtctttctggaataaaggcaaagccctcgtcaaatcaaagaagacacagtcggagaatgtgcatttaattgaggatgacttcaacgataaggcctacgagcaatttattgagtcgggcagaactgttgtcgggccgttcaagacaaaggaagcgatcccccgtaaccaatatgggttttacaagtttgtttttagcaacacattagatccg

SEQ ID NO: 332102 - DNA, 531 bp, Cannabis indica
gaagcatcgagacatgaaacacgttatgaatcccagataaagcacaaggtagagcccacagataagctacctaacctactttctcaagaatctcgaacagaccaataaacctgggactcaactttcctttcttcccgaatctttgaactcccttcattgggcatacacgaaggaagacaaaatccccaatttggaattcaacatctctatgcttttcaatagcctcactcattctttggacaactttaggtccaggatacctgcgttcatcggcttcatcccactgaatgggtgagcgacacttccttccataaagcatctcataaggagccatgccaatggtactctgataactattgttataagaaaactcaaccagaggtaggtacttgttccaagaaccttcaaaatctattacacatgccctcagcatatcctcaagtatctggatagtcctctcaaatttaccatcgacatgaggatgaaaagctgtactaaattttagtttagtacccattgcttgctataagc

SEQ ID NO: 332103 - DNA, 1024 bp, Cannabis indica
ataagtttgtggttgaccctcatcctcacgagcgtatggttgtggaacatacgcctcaccagccacctctccttcttcctcttgttcgccagtgttcacattctattgacgcgtgcccacctatggcgtcagttatttccataataaccgacgccatatgtgtaataaataggctaaaaactcctcaacctccaaccgacggcataagtgtaattaattttaatacctacgggttttatcaaaaaatcgcctctaaatgtcaatttcaaataaagcgggtattttcacaccctttagcttgcctttttataaatgtgggtgaaacaacagcctctcaagaccaacattgtagtagtggttacttaatttttttagcaacggtcccccaaaaaaatcatttttaggaccgtcgcaaattcttatattcgtagtagtggagcctagatctctttctctccttcaggtttggttactaccgtcttactcactatgattgagtactttacttgctatgtgtgggcatggcactctatcactatgggtttgaatataaagaacaatgaaagaggtttgaaatcactattgaaggtgtcttttctactagttttctgatagagaaaactaggtttgattaggttgaaggcagtagttaaattgtcaaaaaagtggatgagatgagagcatcatgttcattttatagtatttctgttagggcttagggtcgaattatatggattaaaaatgaataaaatattgggcaaaaatatcaactaaggccacttaagggaaccaatctcaagttacaattttgatacttttttgcaaccacttaatcttctttccataataccatatttttcaattcaatcctataaatgtcaaaactatttatttaataattataaaataaaattgccatttatattatttatcaattagaccatacaaagtctcttaattaaaaaattgaccccaaaacttatttcttcacaattaagccattgcttagtgaaaattctttaat

SEQ ID NO: 332104 - DNA, 2058 bp, Cannabis indica
tagtttactaaagtatcatttataggtagtgttatacctgaaactcggctgcacttcgaaagttaacacatgtcctatagtgcaattcacaactcgttgactatatagtcttaagcgagataaggataaaaagctattaaaacttatattgacgaaacacgcggctacctcggagtaaatagttaaagaatatattcattcatccgagtagagtaaatataatcacacagcgacctcagattacatataacgagacgatcacctcgcagtctgtaacaccctatgagtttagctgtgttacagtgcttttaaaaattactgtgcaacctttgctaataaaagggtttatcaaaagtgataaaatttaaactttaataaataaacatatactgtattacatttataaaatttgggatcccgtatctacatttttcaactttacatattcaaaagatgtcgcacaacgactacaaaatcgtgagccctagttgtcccgaagatccaacacgccaggtcaaaatgtctcgatatatacaatcttcatccagctcaaaactcactgccgctcaacaacagcttttcctttaccttaacataacatagcatctgtgagtcaacagactcagtaagaaaagcataaaacgtaaatatataactgacctacgactaagtgcccatacacctatcaacaagtcataaacaatgcaaacatgtagaattgagtctcgaacgttcttgaccatagtataattgaccataataccacatgcacttagtactctagtcgtactagtgttaatagcatcaatccatactataagtacaacaagccataataccacatgcactcagtacttaagtgtactagtgtaggtagcactagttcatgctttcgaaagtataaccaaccataataccacatgcactcaataatctggcgtactagtattggtagcattggttcatactttctgaattgccaaacacatacattcacgatatcaagaggcaatcatatatacactaactatcattctaacggatatgtcatacatctgccaaacataaaaataacatgttcatatgtatgtgtgctatactagtcttacctcaatttttattttaggtgcgtcggtcaaccttagtggaaatacatgcaggtaataaaaggccctaagtaacatttcctaaaaaacaaataagtgttgccctaacactttcggggacttacattgacaactaaaagtatccctattgatatacatcatggaaataccctaagtacatagaaaatactcaattggggtcccgggaaaagtcttaagatggactcccaaattctgcctaaattggatcgcccgaaactcaactatcccattttaaaacttccataactactgaaatcctacgaaaacccatacaaaattttgcatggtatctaaaagcatcacaatgaacatttttcaagaagaaacatcaatcaaattctcaagagaaatcaaactcaatggccgtcctaaaactgcctaaatcggatggcccgaaacctccctgtcccagtttggaaatcctataactcatccaatactgatccaaaaattacaaaattttgtcaggaacctaaaaacataataaaaaacatatttcatgcagaaaccttaatcaaattcttaacataaataaaactaaatggccatcctaaaactacctaaatctgatggccagaaactccttgttcgaattgggaaatcccataactcatctaatacggataaaaaaaaatacaaaattttctagagcaccgaaacacatcatagtgaacatattacatgaagaaagcttaactcaattcgcaacagaattcaagttattacaaccaagttaagtttgagttctttgaactcaaacttgcataactttttcttcaactacccaaaacaattcaaaccacttctaaaaggttctacataaccttaataatcatttcataaccttcttaaacttattcaacatgttctactataaacagccactaaaaactaacaaaaaccctagaaa

SEQ ID NO: 332105 - DNA, 1080 bp, Cannabis indica
gtaaaaaccattcttaagtttttttttcccccttcttagggacagaaacaagttcataaaagtacaaaatctctgccagactgggagagccccatccctgggcagagtaaaaaataaataagcctgaaagtaggcagtatgcttgaggaataagttggtatggcgcaaggccgacaaatacaagaaaattaatgtaataatcctgaaggggaagcatagccccggtcatcaaatgcgtctagctccaagcttcgaagcctccgtaattgtgattgggcgtctccgcatcacggggcggccggtggtacgtcccggacgtcgcgggtttaatgccggccaccaccacaatgttctccagttggtgagggcaggttaaagtagagtgaagctcggtcgcttcccatcccgtagcacgaggtttatacccttcctgggcaacgggacccaccatcacttcttccatggtggccaagcgtttttctcccttcttggatgatttggaactggatgtagacatgttagttctgaaaaagagttaaaatttcagcagttaggccccataccaaaccctaaattaaaaaagggaatgggggtcccctaaccgctggaaagaggccccctctggacagttgtcaacaagaaagccttagaaggatttcctggacaaaattcgggtgcaagaatctcacagatagtgacattacacataagcgaagaaagaaagagaaagggcagaaatcgagaaagacaaagtcttctctgtgcccttgaaggccaacacgtaaagaaaaaatgggcctttacgaaaaataatgtgcaaaataagagtgacccaaacaccagagaaaagaaatctaaacgtgttacgcaaaaactcaaggcaaaaaattcccagaaacttcgaacattaaacccagaaaaacagatgaacagtaaagcatgccgtgaacacaaacagtaaagtgagggatgcgaaaaacttacataaagtgttaagactgggggttgttgttgatcgacgaagaaatgtagactgacagtaacgaacaaaagttgataagaaatctgtaagtgtttgaa

SEQ ID NO: 332106 - DNA, 634 bp, Cannabis indica
tccaccaccaaggagctacgaggatccctagtccaccgagcttcaaagcgaaaaggtcttctggcgttagagactgtagtgacggtattaataaagaggggtcgatggtcaaaattacaggtggtgagagaccgaacgaccgtcttaggaaagatttgcagccaaccattatttaccagagctttgtccagagctgacttaatgtgattaagatcgtctctatgattgtcccaagtcatgatatcccccttaataggcaaatcaaccaacgcatgatggttaattaactccaaaatgaaggggataaattgatccctccccttggacccaactcgctccgagttgctcagtacaaaatttacatcgcctaagattaaccaagggccaccaaatttttcactattaaccatcaagctagaccaaaatttcttcttttcatggaagtacggaggaccgcaagacaacagccaggggctccttacagggtcagagtacacaaaactagtaatctgatttttagaaacattaatactttcaaattcaaagccctctttccaagctaaaattaatccccccacacatcccactgtcggcacaacaatattatgataaaagtgaagtttcttaagggaac

SEQ ID NO: 332107 - DNA, 775 bp, Cannabis indica
ctcaatgtctgcagaagacatcgagcctaattccgcatctccggcagttgcgatctcctcttctgagatcgaagtcgggataaaactatcctcccgttggtcctcatctccatcaaacgcgttgcctcctgagccaagcatctggctatccgacaggtcgctcatctgaaagatagaagatcttttcagcgtggtgaatgtgcgaaaaaacaaagtaagtgacctcacccgcatataaactataaaatcgtcttgggaggatgatttgaattctcacgaaaactaaccatcccaccaagacgcgaaaagtcaggtgtgcgagtagaaggatatcccaaaaaatggctgggtgtatcccagtaacctaagcgacatgcgttttcgagcatgaccctgaagtgactgggaaacacccaccgtttcgaggaacctaactaatcacaacctgcgagtatgtcacgcgtctccaactggcgatgtacctcaaaaaatggctgggagaatcccagtgactcaaggggcatgcgttcccgagcatgaccctgaagttactgggatagtcccaccgtttcgagcaaatctaccagccaaagaatacgcttatcagaacattggcgcatgccgcaaatggctgggcgtatcacaatacttgataactctatgaaaatagagttatttagctctttttgtgcattaaattagttttgttcccaagtatttttagtttattttagtgacttttatttgttttttttagttttgcataaatattaat

SEQ ID NO: 332108 - DNA, 853 bp, Cannabis indica
attattccgctgccatcaatgtaaggttttcttaactttttatgtgtttatttatcgttttagaaagttaatatttagggtgttaaacaacatacttgtgagtagatctaagatcccggtaaaacaaattccaacaatagggtattttgattctgattttatagtatgctaagatagcagaaggtctacatcaggtacatttttctattagttggaggagctatatcttggaaaagtgtcaaacagacacttacaacttcatccactatggcaacataatttgtagcatgttatgaagcatcaaattagagaatatggttgggaaactttgtcactaggctgcatattttagagaatgtagaaagaccactcaagatattttgtggcaataaattagcagtgttgtattccaataataataggagctcacccaactcaaagcatcttcacataaagttcctagttgtgaaagaaagagtgcagagtggacagatattcatagagcacattgggacaaactccatgataatggatttgctcacaaaaagattaccacctaaggtcattcatggacacactactactcatataggtgtattattacttgaggatatcatgatttagtgggagtttatattttatttgctttatgtttatttaagacatttatgtatttggttattttctgatcaaaaataaagtcttcaatttattcacgctgttttgttatgtttaagtttgatctaactttggtttaaggatgaccaattagaattaggcatgttcggttgacattgcatgtaatttccatgctacacatccatgatttatctatgtcatttggctatatttg

SEQ ID NO: 332109 - DNA, 1582 bp, Cannabis indica
accagacttgaagcatccactttcagttcggtaataaaataaaatcaggattgcacgaccgaatcagggcttttaactccagaattatagaggtctgccctaaccctctacagttccacgctacacctcgtagaggtctgccttaacccttatttattaattagaccttacaaagtctctaaattaataaataaattccaaaatttcttttcttcacaactaagcccttgcttagtgaaaatttataaataagacagagtctaattttagaattatacttaattaattaaagccaattaactgattctacaagcagtattatctcaactagtgtggagaccatgatcttatgtaatcaagcttacaataagtagatccaaaatttaccaagtaaatttcttaacttattaattcttcctgactccactatagatttagaattgatctcttaattacatagaacgcactattactaaaagtagacgcaatttgaattatctattatttcaatctaaatagtcaaagatcctctatacatgatctacatcaagtagggacaaatttaccattctacccttcaatgtatttgatccttaaaacactcagctacctataaatgatattttagtaaactaatataattactgaaatgagacatcaatcatttatctctattaagccaagctcgaagaaaattatcatttcacttctatgatttatagaagctatagattccatatttatgattagcgctcccactcaattgaactcccatgttctcaagatgtaagtattgggttgatccattggtcagctttaacgaacaactccaagaacacagataatacatttaaaaggaatttaaccatctcaggactaaggtctatggacctaagatcaactaactgatattgtcttagatagatataacggtaagtttatgatatcttatccaatgtcaatatcggtccagtctgatgtatactccatacattcgattctagcatactttgccaatgccctggaaaggatataacacttatccaaggtgtaagtatactctatcgttgattatcatgtcagtctaaatctagtgtactaacaaatcatgggaaataaactttgaaacatataatcatgattatatatttaatgtataaattctattaaatttacatagaacgcactattactaaaagtagatgcaatttgaattacatagaatgcactattactaaaagtagacgcaatttgaattatctattatttcaatctaaatagtcaaagattctctatacatgatctacatcaagtagggacaaatttaccattctacccttcaatgtattttatccttaaaacactcagctacctataaatgatattttagtaaactaatataattactgaaatgagacatcaatcatttatctctattaagccaagctcgaagaaaattatcatttcacttctatgatttatagaagctataaattccatatttatgattagcgctcccactcaattgaactcccatgttctcaagatgtaagtattgggttgatccattggtcagctttaa

SEQ ID NO: 332110 - DNA, 678 bp, Cannabis indica
tagtcataacttttgattttcctttctcgtcagataggttataaatcaaaaaattacagttgtttcatccctttctcgtcagaaaggtttgatcaaggcattataatgattcgacccctcttccattgaaaatgtttggtcagtgagttataacagtttgacccctcttccatcaaaaaggcttggtcgaggcccttttttttttaaacaatgggtttgcattttactatgtatctccagatcaattctggttaatcatacatatatgcccctcaagtaattttaaagggtttacactttataattacttgtttgaaagaaatgattattttattcacaactggaattcaaaatatttcatcagtaatgtgatttacaatcattaatctcaaaagaacttccccagttcaattacttactttatcaatcttccaggacaatctggttttgatagaacgggttttgataaaacgggttttgatgtccagggtcaatccccaacatactcccacaattgtttcaatattgagggtgaatcccttacatatactggggttctgtgagaccctaacttaggttcgctcggcgaaccttgacatcactcgatgcttagcttgtgggatagcagcatatgagtgaagtgcacctgccagggggcagcaggcagcagcagcatag

SEQ ID NO: 332111 - DNA, 747 bp, Cannabis indica
ggaggttggggaggctttttggacgctagagttgctcatagtagcattcatgagggcggtgtatgtcggtgtaattgtctcgagagtattttgaggatggttgtgggttggtgcattgtttgtgggatcgggttggttccattgtgggaagttttgtgggagggtggatgggccagatttgaagagtcccacttgttgtgtttggccatgagaagggttgatgtcttgggagccataagtgggaaacggaggcatgatctccgggggagcaacacaaaccgcactagccgggttggaagtcatgaagggcgctaccggaggattggcaaagttcagctgttcatgacataacatagcgttagtagaaacttttactttgcccgtaatggttttgatgtcatacctgagctccgggggaaagggagcttcatcacaagctttcatatagtccatgcagcctttgttgtagctatgtcccattcggccacagaagaaacaaatgtcaggaagattctcatattttagctctagccagacaactttgttgatacccgagaaatggatgggtaggccccgagggaggggttgtgcaacatcaaacataactctaagcctaaaatatggtccccatgtttcacgaagggaaggcttgtagagttccaacatatggccgagtgaagaggagacaagagccgccaactcttcggagcgtttgagaaatggagtattgaaaacttgaacccaaag

SEQ ID NO: 332112 - DNA, 670 bp, Cannabis indica
agagcttccttgattccaatggacaatatgaggttgcaaagcaccttctctagataagcttctggcccccaaaacccaacccgtagcagaccttgcaatcaaacccagaccataccgcccttggtcggcaaaaagtgcaccatctacattaactttgataaaagggaaatcaggtgttgtccattgctccacaagtagtgcagttggcccgtttaagtttacatctgtgacattaagtttttgagcattaaaccaatcaacataattaaactgagccagtgccactacctcccccgcatcagggtgtttaaagttccagaccaaatcgttacgatgagtccaaattgaccaacaaaccataccaacctcaagagcctcagccgtattccacgatgccaaacccgcttcaaaccaacttgagaacaacattgcatcaggcgccacagcagtaattgaaaccttgctccagcaactttgagcaaaagagcaccgcaccagcacatgcagagtcgtctcaggagcagcaagacagaacggacatgttgcagcaattggaatatgttttatggaaagatgaaaccgagttgggagactgttggtagaaactctccacagaaaattaagaacctttggaggaagctgtaactgccacaagagccgccagaaccca

SEQ ID NO: 332113 - DNA, 914 bp, Cannabis indica
aagatccgcgaaaggtccgatctaatttctcaaaaggaaaggtccgcggaagggcaagctccctcgagagagtcttggccctcaggaccgagaggactgaaagagcgtgtttttgcatcaggagcctgggaaaagagggaggaaaggtcgaaggcatcccccagttgaattaagacaaaaaattaactagaaacatggtgacttgagaaaccatctcgaagagaaaaagcacgcgataccagtgttaggggacgccttgaatgatggaatcttagcagaattggtgatcctctgcaaagacattgctagagtttcccatagacaaaatggggatgactcagattctgagtgcgaggaccgggagccttgcacccgaaacatcttagaggcggaactccccaaaaatttcaaaatgcccgaaatggcgaccttcataggagactcaaaccccagtgaccatctgtcccgatttaacagtgtgattactgtcatgagggtcagtaatgacacaaagtgtctatgatttccactgacattgagtgggtctgccgaagaatggttcaaaaaaatggagccaggatcggtggactgttggaacaagttacaagtgagtttccgacggcagtttgttgcggtaagaaagattaacctcgaggtcagtgccataacaaatatagaacaatttcccgtggatacgctaacaaacttcataaagagattcaaggaggagacctcaaaaaccaagaaggtggacaacggacaacagctggccctgcttcaggctgggatctatacaggaatccctttttggaacaaattgtggcaggaaggagccgctagcctccaggactttcagaagagagtccaaaaatacattaatttggaagaaggcaagatagtggcttacggagggt

SEQ ID NO: 332114 - DNA, 944 bp, Cannabis indica
gactctaactcccaagtggcttcctccaccttgctatttctctagagtaccttgaccaaagctatggtcttgtttcgaagaatcttatcttttctgtctaagctctgtactggctgttcttcgtatgataagtcagattgcaactcaagattttcataactcaacacatgagcaggatcagaaacgtaccttcgtaacatggaaacatgaaatatgttgtgcactgctgaaagagctggaggcaaagctagacggtatgccacttgtctaaccttctcgagaatctcgaaaggtcctgtaaacatagggcataatttgcctcttttcccgaaacatttgatccccttcataggagacacctgtaagaacacatgatctcttacctgaaactctacatttttgtgtttcggatctgcataactcttttgtctactctaagaggcaagcattctggccttaatcttttctatggcttcataagtctgttgcactgatttttgacctaagtatatcttctctcccgtttcatcccagtgaatgggagatctatactttctgccatacaacaattcataaggagccatccctattgtactctgatgactgttattatatgagaactctatcagtggtagatacttactccaaaagccctcgaaatccataacacaggctcgtaacatgtcttttagtaactgaattgtactttcgaactgtccattagtctgaggatggagagctgcactgaatttcagtttggtagccatagcccgctgtagactctgcaagaacttagaagtaaacttcggatccctatctaaaatgatagactttggaaaaccatgtaatcttactatctcattgacatataattctgcatattgatccactgtaacagttgtttttactggtagaaaatgtgcagacttcgtgaatcgatctac

SEQ ID NO: 332115 - DNA, 2081 bp, Cannabis indica
tttttggaatacgaatacgaaatctattccaactataatactcatgaagaaaaagccgtaataaatgcaaagaagagacatcttttacccagtaacgaagggtttgaactaagatttccagatgaatggggtagggtattagtacatctgatacataatttaaatgggggaatttgtcctcgaaaaaaggaaatgttgaatgaattgattgtaaattataatattttactaattctgtcccttttaaagaagatactaatcgtagggaaaatggaatttccacaacgactgcaaatccctctgatatcatttgagaaaaaaaaaatttgttgtacccaaaaactggattttggtttgaatcattagcggaaataatcaaatgattctgttgatacattcgagaaattaaacgttttacaattagtaaactagatttattgtcataacctacattttccaacaaatttgatttatttctatttaaaccatgatcatgaacaaatgtataaatatactcccgaaagataagtgggtataggaggtcatgttgccaagatctatctagttctaaatatccttgaaattctgtcatttaaaattcaatttgaactgaaaatagagtaggggatttattgggttatcaaatgatacatagtacgatacagtccaaacaaggtattataataagaaaaatatatacctcggaaaaaaaggtaagactcatcaagggactctctatcctctcttttttcacctaatcgatttaggttcattttaggataacaagatggttagaaatcctttatttttacaatccaatcgctcttttgattttgaaaaaaaaaaatctctttatcaatatactgccttcttctacacatttatctccaccacataatggtaatggagtggagatagctaatagttaggactcataaaaaatagataatccactcatgggaaaggcctttcccgcatcaatcactaatatatttttaacgtctaattagatcgggtaatcgttcaaaaatttaagaacaggagctcgttactttttgtttccttataattggaacctctagtagggttctatccatttatttactcgactccattttcactttagttttcatttctttttttttatttgttctctggcaagaattcaaacaaattaaagaaagtttgtggactattatggtaagaatgaaagattctcagaattctctattgatacgacatgctgctttttccattcattcctttcaggatcagtcggggtcttacaaactctattgatagtatagatgaatccgttgcttcatacaaatgtgtaaaaaatgctagccgcacttaaaagccgagtactctaccattgagttagcaacccgaactaaaataattcgaatgtatagatacaatcggaatcctaacaaaaatagaaaattttataatcaattatgcacataataaaaatgaacagatctaatgaaaataaagatatttgtagacctactcttgtctcttatgttattcattattctattttaatcattttaatcaaaaccaaaaaaacttcttgtattacatattacagcaaattcaatcaaccttttattttttgttttttgaatgaaataaaatctatgggacggagataaatagattcatttatccattctccatgatcggattatatttatttgatagactgttgtcaatatgaatgatgaatttaaatgttgagaaaaaaattcaatggataaatggaaacaaaaaaaagatttctcttggattggcactagatagataatcgacatagagacaaaagaaaagggtgtagacgaacgaataaatgaaagaagaagtcgaaaaacctaggtttatttactcacttaatatcaatcaatagaaaaaaatacgtaaaagatataagtcaaagtaaaaaaagtgaatgctttactttttatttgttcatagaatttctatgaaaaacaaccattgatatcacaataatatcaaaaatggaagacaaaattgtttattctcttgatattttttctatctattccatcaataaa

SEQ ID NO: 332116 - DNA, 441 bp, Cannabis indica
agagagagaggggtttcggctagggtagtgagaagaggcttgaaatttttactgaaggaatgagatgcatcctcttttctcttaagacatcactacctattgataggaaaccacttagggtttagttagatttaattagcattaaaataatagaaaaataaatggtaaatttcaatagtgtggccggccatattgggccccattacgaaattttgcaattttctcatttttccatcttattttctcaaaaatgccaatttttccaatttaaccactttaatgccaactctaattatttaataactaaaaattaattattaaataatattgtcatttaatatatttcttaattagactcaacaaagtctcttaattaacaaattaaccctagaaactatttcttcacagtttaaccatttcttagtgaaaattcataaacta

SEQ ID NO: 332117 - DNA, 510 bp, Cannabis indica
tcctttggtcgacaaagagcacgatcatccctcccttcgtaagaattcctaggcccttcactactactccgcctaccaaaaactcgaaacgattcattaaaaccagcaattgctggtttgacagatttggctggttctgaaggtctaggggagtctatgtatctcagagtatgaaacgctgcttccttggttgtagttttcaccaataagccgcgagcttctctgtgcattgagtctttaacaacatctcgtagatcaagagatttccggcttaactgtgcagaaccattcagctggttcgcaggcagatcgctcgatggggtttcaacaagatttgcttggatggattgagatggttcttggtgaacagatgagaaggtagacgaacaagaggaagaaattgaaactcttggtgattctgtggagttccgtcgtttctctttaactactttctttgcattcttttcctacataaaaattttatatagccgttactcttcagcttacccc

SEQ ID NO: 332118 - DNA, 1311 bp, Cannabis indica
gagtgttatttagggcataaaacccaacatataatcctttgtcttactgttgtttccagttttctgttaaacattcacattcccaactcgagtattctctattatatgttgaatactcgcaactgttcttcaagcaatttcttcttgttattaatattattacgaacatttggtgttgcgaattttgctcgacaacatttggcgccgtctgtgggaagcgagaattataggtttattcagttcaagaaagagaatcatcatggctggaaaccaaacaaatggaggtgctaacaacgagtccatcaacatcggaatgatgaacgtgccgttatctggagttaggacgccacctgtggatgtcgttaatggcggagtagggagaggtaatatttgacctctcaatctattccctggaacaactggcccccaagtcggagaaacctccacaccaccagcaacaatgggacactttccacctgtcactccggcagtagtatccgagggaatcgtccaactcaccaccgaccaatataccgcgatctaggatcaactacgcgcgctgcaagccgaggtggatggacagaacagggcccgttacccccctcaagcgcctactactcgcacagataaccctcaggtaacaaactctaggcgtcgtaataatcgtgttcgtagggaacgaagaaccaaccctaaaggtttggacctaaatcagccaacctcgagagaccaatttctgaggtatcccaatcaggaaacacaggttgatgaagactctgagcgacgtaatcctcacagccgaccttcaagaaacaacgacgcagaatcttcctccttgtcctcgcatggtcgcacacctagcagatacacgaggtccggctctctggagacacagtagggaggacgataccgagtccataagggcaatctgcgcaatcatctcaacgctattttcagagcacgctcccgcgctcctcgtgacgaggaaacaccccatgatccccaaatgggcgatcaaggtgtaaacactcgcatgaacccgcctaacgcaccagcagggagttaatgtcccagcaaaccttgctgtagtagtcacaactcctgcagtcgcagcagtcccagatcttatagctgggggaattgatcaaagcatgcttttgcaagctttgaaaatactcgagcagcagagaaagcccatatacaagctacatgggacctctccttttactgcagaagtgcgacaagcacagcttcccaagggattccgattatccgaatccctaaaatataaaggtacctctaatcccatag

SEQ ID NO: 332119 - DNA, 1182 bp, Cannabis indica
ctataataggaaagtggtggatcacaccaaataaggcagttaatcaattactcagtaaatgaggaaactgtttattttggaaagttgagcttcccttttccctatatatagcagccctcctctcttcctcttgcatgcttcatcatacacgaaatatacagtgcaaaaagagagagaatttcgaaatcccaagtgagagagaagtgcccacacacagcaaacagtacctcaatcatagattggaagactgtgaaggatcacatccatctgaaggacattcgggctcagatcttgattatactctgcgacagacaggaatcaagggttagagatctgagtggaaggagacacattattccgctgcacccactataagatttcttaacttttttatgtgttttatttatcgtttagaagttcatatttaggttgttaaatcaacatacttgtgagtagatctaagatcctggtaaaattaattccaacagtgacgtctcgagtgagggacacccactccctccacacgagagcgtcttcttggaactcaaatgtggcataggtcaaccgatcattaccaaccaccctcatgaaattcataattcgctcaatcacagtgagccactgctcagcctttcacatctggacctcccaaaaacactggaggtgcttgcttacggaacctctcatataacggctccatacgattgtcagcaacaggttgttctgctggcaccgctggagctacaacggcctgagcttgttgtggaggcatagtaggaagacactgctgccttaatctcaaaatttcttcatcttgttggcggattcgatcttgcatctccacaaatctctgctcccaatccgaaggagcttgtggtggatttacaggacgaccaccctaaactctgccacggccacgaccgcgaccacggggattctagtgaatttgatttccctgaccgcctccgttctcaactatattaccctgacttcttatatttccctgggcctccatttaatgggaattagcctgcgaaaccataagccaggcaggttagaccgcgatcataaaacttaataccgcgcctaaggattttaaggcagcgcattaaatcaaacaactataaactaatatgcttcctaacatgctttgatattcatatataaaatactaaacaagta

SEQ ID NO: 332120 - DNA, 744 bp, Cannabis indica
tcccattcaaccagcccgacttttattaaagagacaaccggctttcccataagccccggatggacagattcaatgtaagggttcatctcatcaggaagccaaggcttagacaagattattaacgttagaaccatcacccaccaatcgtcgaaccccagcccgaactaactccttggcctcaagcacacttctccaaatataactcggattataccccaaagtcgatgtgagaaaagaccctgacgaaaagtatctagccttgtaaatttgccccatcaagctattcccacaagtcaaaactctccacccttgcttagcaagtagagctaagttgaagtcccttaaatctcgaaatcccataccaccattgctcttgtgtttcgtgagcttgtcccagcttagtcagtgtatgcctttattcttgtttgacctccaccagaacttggtaatagctccctcaatgtcctgacaaattcccacaggaatgagaaacacattcattgtataggccggaagagattgaacaactgatttaataagaacttcctttcctgcacgagatagaaatttattgtcccaagactggatccgcttctgaactttgtccctgaaataaccgaagatgacatttatattcctgccaacagtactcgggagcctcaaatacatactgtgctcagtcgcttcatggatgcccatattagaatattttatttatggaaattattttctaattaaggaaat

SEQ ID NO: 332121 - DNA, 537 bp, Cannabis indica
gaaggcgatcagaacagtaaatacttccatagagcggctagcaaccgtcgaagcttcaaccaaatttcgaagctcatggattctaatggattatggaaagattgggagaacggcttagaggatgtaattgtggactatttctcttctctgttcagtgcttcgcttgtggatagcgacatggtggtgcaatgcatccaaaggaaggtgacatctcagattaatgaagaattacatcagccagttgttgctgaggaagtgaagaaagctattttcagtatgcatccagataagagtcctggcccagacggtatgacaccggcgttctatcaaaagtgttgggagatcattcaaagtgatattgtagccgtggttcaaaaatttgttacttcaggggagtttgatttggcttgtggtgaggcaaatgttgtgttaattccgaaaaagaagattcctgaaagcatggtggatctgagacctattgctctttgtaatgttctttataagatcattactaaagtaatggccaataggatgaag

SEQ ID NO: 332122 - DNA, 900 bp, Cannabis indica
atcctttatcaaactcatctgaactatttcttggtttggtgattccgattgtgtcaactccagctatgtactctgaacaaaattcaacagcttcttctgatatataacactcaaccatactagcttccggtcgatgatggttacgcacatagcttttgagcactttcatattcctttcaaatggatacatccatcttgcccaaactggcccacacaactttgcttctctcactaaatgaaccatcaaatgtaccatgatgtcaaagaatgatggtggaaaatacctttcaaggttgcataaagtcttgactatatcctcatgtaatgcatccaacttgctcatttctaattccttcccacatagttgattgaagaaaatacaaacatgagtcaaacactctctaacctttttgggtaagaccgatctgatggcattggaagcatgttgcattaacgcaacaatcgtgtgatttcatacccattagcttcaattcatccgtatttaccaagtttttaatgttagaagagtatccatcagggactttcatattcgataatgatttgcaaacaatttctttctctttctttgacaaagtgtaacatgcaggaggcaaatataagcgtttacctttctgttcaggtgccaaagattgtctaattcccatttcaacaagatctaaacgacttgataaaccatctttagttttgccgggaatatcaagtaaggtaccgatgatactgtcacacacatttttttctatatgcataacatctaaacaatgtcgaaccattagatctttccagtatggaagacgaaaaaaaattgactttcgttgaaaacaactatttgttttctttcttttttgtgtctttccatacttgaaatctacatgttctact

SEQ ID NO: 332123 - DNA, 798 bp, Cannabis indica
atcgatccctttcttgttccaaaaccaacctgtacttggagaacttgtattgacttttttagatttaaacaaagcatgtccaaaggattgctttacactaccaaggattgaccggttggtggatgcaactgctggacatgcacgagctaatgacattcatggatgcatattttggatataactagatcaagatgcatatccctaatcacgagcatacaagttctgtaaccaatatgggactttattgttataaagtcatgccttttggtttgaagaatgcttgggcaacatatcagcgattagtaaatggaatgttcaaaaaacaaatagggaggaacatggaagtctatgtcgatgatatattggtaaagtcggtgaagtgtgaatgtcatacaaaagtcctcgcgaaatgctttgaaatactaagtaaatacaacatgaaactcaacccaaagaagtgttcctttggagtctcctcggggaagtttctaggtttcatagttaacgcgaggggcattgaagcgaatcctaaaacaattaaggctttgatagagatgccatcacccacaaagccaaaagaagtccaagccttaacagggagaatggcagcactaaacagattcatatcgaaatcaactgataaatgcctagcattcttgaatgtgttgcgaggcaacaaaaaatttgaatggactgatgagtgcgaggaagcctttaggggcataaagaaacatttatcaacacctccagttttggctaaaccaataactagatggactttatacctctacttggctg

SEQ ID NO: 332124 - DNA, 566 bp, Cannabis indica
gttaacacaaattcgaaatctaagctaactagtctacacgtgggagccaagaagaatggagtggaggaggttgataacttgaatgaattcaaatttgagagcattttatatacccgacaaatatgtgattggttcacttgatcgagtctgaaggaagctttaaggaggttattacgttgaaatgacttttagctcattatttaattgatttcataatgggtgtagttagctaaagacttataaataccactctaaactcaaaatgtatcactcacataagctctctctcatcttcattcacacgtaagccaaagaaacgtccctccccatagtctcttgacctcaacttagtcaccctttcaagtatttttcttgtttcatcttctttgaccatacactaccttagccctgatattactatcaccactaccaccattataattatcttttcaacaccatcctataccaccatacgtcatcatcaagatttgggtcattacaaagtgatttggtttgctggctgaaacatagaaaaggatttcaagatttggagcactaatatattt

SEQ ID NO: 332125 - DNA, 669 bp, Cannabis indica
cacacacacacagctccttatcaagcttaaacaccaaaacatatccccaaaacctaaataaaacattaaataacattaccaaagagatgtaccttgatttggattctctaaacaagctggaaactctccaaattcagtcaaaaattccttccccttgctggatataggcagcacgaaagagagagagagagatttctaaattcaccaatttcctttctaagcttctttctattcctagccttcttctttctttccttttctattctttattcttttttttttatattcagcttaaggaataacccacataagacaaaatataacttgccaaaagacctaattgcccctttaaccaaataaaatagttataacccttcaagggcaaaatggtcaaaaccaatccccgaaaattctaacgcctctactatttaacgataataccccgataataaactaaattataaaatgcaactctctaggcccaacgtcgctttccacagcttccgaacacaatcacagaaattaggtaattaagtataaaatagcataaaaacatatatgatatataaaatatatttctaaaacatgcattccataattattaatacataatccttaaataattaataatacaaagtattattcataggcggtctttacaattatccc

SEQ ID NO: 332126 - DNA, 668 bp, Cannabis indica
tatttgaattttattttctacataataaattatttaatttttttaaatgatttacaaatgagcttaaataataacatacacaataaagaaaaattcgactaaaaatactgcaaactatagttttaaataactacaaaatgcacaattacaagaaaaaattcaattaaaaactcttttgaatgccaaaataaaaggagtaccaaaacacctctttagagggtttactacaaatctttcctataattttatatagtatttagtaaatatttcagccataattatctaaaaaaaaaattaggcataataataacggtcagataaattaagtcctgatataactaagggtcagttagctacctaccctaaaaacaacccttcagctaaggtgtagctaaactaattaaataagtagaaattttggttcttataacttgcatttataattacaaatttacaacatattattctcgagccataccactttcactttgtctaaatatggtaactttaacctcaggtttattcttgttgatcagctcaaagatgcatacatcatttggctgaagagagttgtctcttgcaaatgcatgccatccaccagaaaacctatgctctaatccagaagatgatgatcccttattaatagctaaattcacatgccaatattc

SEQ ID NO: 332127 - DNA, 625 bp, Cannabis indica
gtaattaaaatcacataaaaaatataaatattgtccataccttatagaagtatttttataaataaactgtcaatttatattttccatgaaataattctttaacaaaatgtaaaatttaaatttttatttaataaaacaaaatgttcaaccaataaattttgctcaacacaaactctaaaatggtatatatttatcctagatttaggtataaaaaaatgttaatggtgaatttctatcaaaagtagtataaatcaagaaaaatattactacataccactattagaatattttaatactttgtctcatatattttaatttaataaaattataatggctaatcaattataaagtgttatatcagtaatcaaacaaaaaaaaaaatttgaaaaacctatttttgccattaatttttttttttacaagcgatgttttctttttttttgaaggagaaaggtaaactttattagaatgaactttcaaccattacaatagataaaagatcagcaggagcattactctcactgaaaatacgatctaaatacaaacaagagctacgagcaagacagtgtgcagctttgtttacagaacgtttaacaaaattaatcgtgactaaaggtaaggaagc

SEQ ID NO: 332128 - DNA, 1769 bp, Cannabis indica
tttagggcacaaaacgcaacaaatcagccacctaaagtccccataggtagccagacaccttgaaaagtccttatggccagccaaagaggagcactccctccccaaggtgagcgagtcacccaaagattaatttttaaccgacaaggtgagcgggtggaaatacccaaaagaataatttgagaagtgaaattaataacttctgaccattggatccaccaaactccagcaattggccaaccatgtacaagtaccaaattcagggctggctagccttgtgtataccctttcctatggtaaggccggccaggctctagccgatcttaggctgcagctcaatcaagaagggccaatcaacgaagcccttacaaaaacagatcattatgtgcaagaaaaaatatatcaaatatgaggcatgctcaagggactagttggtccaaaaccttccaaacttgaactttgccaggtcaaggggatcaccattctatgcatacataaatgccttacccttggctaaattcaagatgcctacttggaagatgtacatggggaaagaagatcccctagtacacctaaagtactttgagatccacaaatctccaacaagtatctggagatgtgcgatgcagaatctttccagaaaactctagctaaaatagcacaacaatggtatttcaagatggccttgggaagacttaattcttggaaagaatcttccagaaattctatattcagttctatgcttcaaggcaaatacctgcctgattggaggatcatgtcaaaacaaagaaaaaataagtgaaccattgagggactacattcaacggtttatggctgaggccaccaagttgaaaagcctaataataaaaggccaatatacatccatactcggaggcatcctaccgttgattaacttctggaaagatatcaggagaatctaaacgaacaacatggaggagttccttaagggagctaattgcttcataaagttgaaagaagatgtttggcaagcccagacaagagagcaggtccatgacgaacaaacacagggcctcatagcgccccaagcactatttgacatgctgaccagtgcacacgatctctatcaattctccaacaatgagaattgtggaggcaagtgcaacaacgattgaactaagcaacatattggcaaaagaggtaaattcaacgattcccttatgctatgaagtctaagagagaaggaggagaagtgtgcatgcttcattctcgtaccaaaactcccaacgcaaagcatgcccagacatcccagcagggccaattagcaacaagcacttcgaaggttggcctcaatctcttgtcaggcgcacaggcaggtgccaaaaactttgctgaaacctttaatggtaggacacttagaggtcgtcattggcggaccccatattgcaggcgagaccagtaaagctagggagcgctatgcccagacactctgtcatgagttcaaaagcgacatcctagcaagcgaagaatgagactctagccaaccaaaccttggagagcccacgatctctttctcaaaaggagatcctacctaagtcagtttcccccacaacgatccgtggtcgttactatacaatttgggaatatgattgtagtaagatgcatggttgaaaatggagcctccttcaacattctcttcaaataaacatatgaaaagatgaggctacaactcgctgacttggcaccctacagtcaagtgatgtatggcctctttggcaaaggcatcgcaccca

SEQ ID NO: 332129 - DNA, 672 bp, Cannabis indica
gatttttgtattgatatttaaaatttttaaaaacacttttttcattttgcttctctctctcgatcacttcctcaactcacagtcttccatggctagcttcaccaggtaaatcttactttgccattaacagactactcttctttctctcacttacaaactcacacacacacacacactctctctctcctctctcagtcttggtttgagttttggtcctcttcttccggttgatgttgatgttattgtgccctagatcttgagacttgactaagtcaataagggacgggttctggtttcagctcttttactattttcctcaagattcgaagatcgctctaaggtccgaccacgctgaatcaggtatctctctattgcgtttcctattttggttgttttgtgtattgtttttgttcattattataattggatttggtttttataattatatatattgttggaaatatatgtggaattctgggtttttggttgatttgattgcctttggttgattttggtgtttcatcctttatggttggttattgtatctgctatcttcctcttcttcttcaatttcaatgttctcttttgggtcatcagtcatattctctccagcaattgggttagtcttatttttttgggttttttttttatagctttgatcttttcatagct

SEQ ID NO: 332130 - DNA, 749 bp, Cannabis indica
attatcttaaaataattaatctttaatttaaatatttaataaaaccctttttaaaaattaattttaataattttattttcatatttaagtattcattatattttttttaacagttaagccattcaattataacattacaataaaactctattattttataaaaattaaacttccaccccttcttgctaagtttatcaaaaagacatgttaaagatctataaccaataacaattaataattttgaaattttcaataatacatattaactttcaaacttttttaataacacgtattcaagatcaataaccgataacattaataagtttcaaatctttcaataatctatatttaagatcaataactaatgatggttaataattttaaaatttttgcaattttttttatgattttactccaatcaattgatacatatacagtatatttagaactgcaaagaataaagaataaaacaacttcgtctctctgagaaaatagaattacatgatagatggtggaatcaagtacagatgtatcgagtgtggcgaaaaaattatctttccttaattttataattgttattatattttttttttgaaaaaaaaaataaatcatttgaaccaatcacggactgacacccttatttggtacataaaatattgataataagattgagtgtagaattacatttaattagaggtcattcttattattttttattaattaagattatgggtgtaataattttaaat

SEQ ID NO: 332131 - DNA, 507 bp, Cannabis indica
tgaaaccgtatttttgttgtttttttgttgtttttgtgcatttgtgaaattaacccccttgaaaaaattgcctaaatcaccctcttaagtcatgcatagtttatttatttcgcctcaaatagaaagtaagcaagttctagaatttatttcaaacaaatttccacatgttctaattagcatatataaaccaattcgattactagaaaattacctaatatatttccatgttctttcaagtataaaattgaaattagtcacaagtataacatcaccaagcacacggatttttcaaaataattcatttttcaaatcatgctatctacccactttcaaattgactcacacaaagaaattaattttagaactaagattataaaaaatttaaaatttaagttcacccccaaactaaagtgacacattgtcctcaatgtgacattaaagaaaaaggaaatgaaacttacctgagcaccacatcaactagcggttgacgcccataataagcgtcat

SEQ ID NO: 332132 - DNA, 553 bp, Cannabis indica
ttggagagcttaatgagagactatatggctaagaatgatgttgtgattcagagccaagtaacctctcttcggaatcttgaaattcaattggggaaattggctaatgatttgaagaatagaccacaaggcactttgcctagtgacaccgaaaacccaagaagagatggcaaagagcattgcaaagcggtaaccttgagaagtggaaaatttttggagtcaaatgtggcagtaacaaagggcagcaaggatccctcttcaatccaaaaagagagggaacgaaaaaaaccagcaattttagttgctgaaattcccccagtagttacaacatccgatcagcattctgctgcagaaaagcctttgcaaaagccacctccaccatttcctcaacgattcaagaagtagtaagacaatggtcaattctggagatttcttaatgttctaagcagctccatatcaacataccattattggaagcttttgagcaaatgccaacctctgtaaagtttttgaaggatatttttgacaaagaataggaggcttggcaagtttgaaa

SEQ ID NO: 332133 - DNA, 530 bp, Cannabis indica
ttcctcaaacaaacttttaaattcttcccagatcattacactgacatcccgggtttggcccacgatatcccacgagacgcgggcatggtcttgcaacatgaaggctgcacaattcactctctcagttcccgtcactcccatatatccaggatacgggtaatagtgctcatccactgctcggcctttattatatcaatacctcccagaaaagttggaggctacagcttcacgaaccgctcaaataccgagtctctatgcggcataacaaacccctggttacccaccactggcacaggtgctggtggtaacacttgatcaacaggggcagccggtgccggttgccttaatcgtcgcaactcttcttcttgacgaagtatgacacttcgcatttcttggaacatctgctgccaatcagcaggaggattagcattaccaacccccgcattatcccccggattctacggaggtggaggcagtgccggtggattgggtcgggcagctccgggctctacttgctcgccctgtggtct

SEQ ID NO: 332134 - DNA, 920 bp, Cannabis indica
tgatgagccaccccctccaaattacactggtgcaattatacattgtggcaaatgcaagcaacttggacactaaaaaagaacttgcaagaatgatacaacacatgctcctgctccagcctatgtaatatacttttaacttcaaattcttaaatgcaaattttagcaaatctggtatttatttgtaacttaggtactgtcaataaaataacactcattgcttctatttaaggctcaaagaacaaaggaggcaggccaccaatccaaaattcaatcaaggaaacactcaagagaaggagaaaaagagaaaaagaaaatggtaggaaggctaagaagactgcagaaggtgatggagctgggtcagttgagacaggaaggtctaatagataggctgaagcaacgtttagagcagtattttgacatagtgcttaggaggaatactgtgatgtagtgcacatactgttgtattttgaattagtgtacatgatgcttaccttttacacaaacacttaagtgtttagggcttctaatttatattttttgttatctaatttggtacacattttgatgtaacaaaactcaaagcaaagattggcatagcttattcaaagttttttactaattaaaagtagattacattttgatcaacaaaagtgatacttgatatttttttctcgttttgcaaacccagactgccactgagaacctctcgatctaggtttggtggttttgagtttctaatatattctttttctctttttattcttcctttggttttattttgaatctttaatttaattggttattagtttatagatttaacaaaactaagttttaatttacttatatgccatgtcattatttattagtggcatggcatgcgccaatctgcctaacatggactcaattgagccacgttggag

SEQ ID NO: 332135 - DNA, 569 bp, Cannabis indica
acatgtcgtttactataaagacctgattcatatcataatgatgattaatggtagattggcctaaatcatgttcatgttattaatttttttaattcactcattagagtttctcagagaagataattctcacaacttctattttgggaatctaataatgtggatggttgggaacatgatctacaattatagaatcctaactttctcaacggatggaatgttggttcctttaagtgttaattctagaactaaaaaattgtgcacaaatttagattggatctaaattatactttcactagtgaattatcaatagtaaaggataagaagtaattagaagggtaaaataggaaattgaccaaaaataattacgaaccgacacaaggaggactaatcactggaattgattatatcaatagatactgcagtaaaactcagcaaaaataattctatatttactaagagttcaattccatatttatagtggagtaatcatggaattaataaacaggattatttggttgatgaaattcaataaataatctagtttattggagcttagaattataggtcta

SEQ ID NO: 332136 - DNA, 596 bp, Cannabis indica
gatgcactattgatccggaatttgtgcaatctctaaaagaaatcagatgcccaatcagatgcactattaaaaataaaatagcttatgagaaattcatgggtcaaataaggttctaaattttctttaattaccgtatttctaatcctatttgattatttctaacactatttgatatatattgaattatttttttattgatgggattaatctatgtatgaacaaaattaatcttataatcttaactttttaattcaattaataattatttgtcacgtaattattaagtcttttccctttaattttccttttgttgatgatgctaatttattcatatttttgtgtaggttcggcctcaatgggaaaataaaacggagcacctaacaacgtatctttacagagcaagaactatgagatcaccccctttcattctggggtgacggagggatcgtaccattcgggcctttattatcatgcttttcccgaaggtctggagaaagttgcaatcaataggaaatttgttctatttcttatataaactgaaattttgctactttttttttttttattttacaattttattgtttatatcttattag

SEQ ID NO: 332137 - DNA, 808 bp, Cannabis indica
ttaatgagactttcatttgtcttataccaaaaaacttaatagttgtttggtaaaagatttcaggcctatcagtcttacaacaagtgtttacaagatcatagctaaagttctgtccgcaaggcttcgaggtttattggggtaacgatttcggtaacacaatcggcctttgtagaagggcggcaaattttggattctgttttagtgactaatgaggcagtggaagattactgatgtcgcggtaagagtgggttggtactcaagattgatttcgagaaagcttatgaccaagtagaatgagatttcttagatatggttatgacaaagaaggggtttggtgaaacttggaggaaatggattagaggatgtatctcgtcaacatcattctccttatttgtgaatggaagaacaaggggaaaattcaaaggatctcaaggcctcagacaaggtgacccactctcaccttttctttttacgttagtggtagacgtacttggaaggatgattgaccaagctgtgaattcaagcaatttctcggggtttttagtgggcaaggataagatcaagtcagtcatctgcaattcgcggatgatacgcttctttttgcagatgatgaggcctcacttcatatactagtaagaattgtagaggcattttgtgctatttgaggattaaaagtaaatatgagtaaaagccaagtgttgggtatctcgatgcacgaaagtgtgatggccttgtgtgctaatcagattggatgtgaagtagggaattggcctatctcatatcttggaatgcctttaggtggctcgcc

SEQ ID NO: 332138 - DNA, 654 bp, Cannabis indica
tgagtgggagtaatgagtaggtatcagattaatcaaggaaaggaacattggaagacaatcaagtgaatctcaagaccatgaagaggaactatatgttagttgataagagtggaattgtaatactcttagactacacaaattcaggttcatagactttcttttgtgctagaaagcctattgatgagatcgtgattgctctgggggtggtgcagtgattttggagaagtgtaaaaactgatctggagtctttaactctaccagtgactttgaatattaaagttacaggaaagatacttattaagtctatggaaagttctatacagttcttggcattgtaccaataatttattaactactagtgttgcttcctgactaatagaatagtagttgtaaaatagtaaagaatccagtatcgctagaagagtagacatatagagaggtatttcacaatatcaaagattttatgattgaggatatgtaatggtggaggaaaggttgtattgaatacaacctgtcacatcatattactgatagattactacatacttcacttgatttggatatcaaggtgttgagatttattgaaatgcagtttttgttttatattagtgcaagtgggagtatattgggttttatgccttaaataaaatccat

SEQ ID NO: 332139 - DNA, 775 bp, Cannabis indica
actggtttgatatgtacattggctgcgaagactcgtttgactcatggtttagtaagtgttaattattcgccgattagtgaattatttattgattatttgaattgtctgcttatttgaaatgtgtaaattgttaaagaagcatgataagttttgatatgatataaagttgcttagtatatttatgcgtgtgcggtaatgcttattagcattagttttagttataaagattctaactttgagaaaggaatgatcgcgagtgtactagaaggtgtacttgaagcgatctagtaagaataattacgagcctgctaagctcgtggtaggtggtgtgggtatgaattttccactacataagaccgagagtaaatgcatgctatgaagtaagagattacttgagtaataaggtagtagacctgtgtggttaatcccgggtagcataatgatggagaatgacactaggctgaaccgattggcaaagttttgttaaaatgcagcggctaataaggccgctaggaaggctttaaggtggaacgagtatattgttcagaatgtagatattatgactaaataactaggagttttctagttttatgctcaggtgattgagctaacccttaatgttgagggtacaaggattagatcacaaaggaaataatgtgaagagagagattcatgaaagtaaatgcccagtgttggattggctaaaggatgtggttggttgttttagttgagttaaattgaggtgatttgaggtaatgttgaggattggattgac

SEQ ID NO: 332140 - DNA, 596 bp, Cannabis indica
tatatatatatatatatgttatacccaaaattcggctggagaacatgtgtcaagattaaaggaatgagaatcggtgcaatatcttttatagaataactcattaattacgtaagtatcagagtatatttgtaacctgctgactgtaagatcttaaacgaagaatcaatgtagcaactggcacttagtgtattagcgagaaatcatatatcactgaatatgaatagcgaggcaccagagaaagtgacacataccaactataaaaatcctttgcttgcaatgaacaaactaagtgtaaaagtcagatcagctcgaagaacaagtaagcgagatgaccatctcgctatgggaagacttcctatagcttcatcccattaacaggagtgaggcttacaaccctggtgagtcagaagacttttttataaatacccggaatcagcacaagacatacattgttgatctcagaaggaagaatggcctcagctcgctatacggttaaagaagtgtttaatacacaatagtgttgacccattaaaagcaagaaaatcacaatatacggttttcaaatcataaaccgcatttacactacataatatgta

SEQ ID NO: 332141 - DNA, 1297 bp, Cannabis indica
tatttagccttaaggatttggccgacaagggaatcaggggtggtgacgatacgccaagcctgcttggccagcatggcttgatttgatgaacaatgttacggaaacccaaacccccataaaatttggaagtgcaaagattgtcccattttttccaatgaatcttatggctttggccaagggacccccaccagaatttagacattaacttggtgtaatgcttacaaagagagacagggagtcggaagcaggacatggcatacgaaggaatggcttgaatgaccgcttttaaaaggatttcttttcccgctctagaaaagagattttggttccaaactgaaagctttgagctggctttttgaagaagaaacaggaaagaagaggtttttgacctagagaaacattgagggacacccaagtatttatcaatgaaaggcttgtcgtctaggtgaagagtagccctgaaggtatgacagtcagaggaaatggtattgggagagaaaaggatggagcatttgtggaaattgacagattggccagtagcgaggttataaaggttaagaatatccttgatttccatggccgaggagggagtgacctttgtgaaaagaagactgtcgtcagcaaaaagaagatgggaaatagtgggggcggagcgagaaatggaaatcccgtggaaagagttagagtgggttttagcgtttatgatcccagagaggccttcagcaacgaggaggaaaagatagggtgagagaggatcaccctgacgaattccgcgagtggggagaatttggtgagagagacaattattaatgcggagacgaaaagagacagaggaaaggcagttgagaatgagtgagataaaggggtaggggaagccaaaatgttggaggatgtgctcaatgtaagcccattcaactttgtcaaaagctttttccatatccagtttcaaagcagcccaaccaactttcccatgcttacggttagtgatcgcatgaataacttcgttggcaataatgatgttatcaaaaataatgcgatctgagagaaaagcgccctggttatgggaaataaggtctgggagagtagatttgaggcgatttgcaatggttttggatactaccttgtaaagagtggaacagaggctaatgggacggaaatctttgactcgagaagcgtttttaattttgggaatgagcaccaaaatagtttcgttaacctgcctgagatcagcattggtagtgagagcatataatgccgcctggcagagatccttgccagcagagtcccaatttttttt

SEQ ID NO: 332142 - DNA, 789 bp, Cannabis indica
ccatcccggaccccccccgaaccccgcaaagcctcggcccggagtgacagccgcatttagggtgatattttataataaaattattacattaaattatatgaacttgatatttaattgcactaataataattatatgagacctgattgttatttcgagaattattgttatggtttagagcatgattgcgattctgattcttaaatttttttctaatgggttttagaattgcattgaatttcttagtattgttgtttgacacaacaaacattttttctttttggtcttatttacgagccttcttctcaatacgaaggcgagtgattaaacttttcaaagataattcttttgttttgtgcttgagaatatttttaaattttttcgaactaagaagtaatttgtcaataataacagcaatttgaaattgttcatctaaagacatactttcagaaattattttgtgagtaattttttgaagttcatgagactgagcctccactgacttatcgtcagtcatctagaatttgaagtaacgggtgacagcgtacttcttagttccaccctactcagtgtcgtatttcttttgaagatcgtccctgatttccttagcatttttgtcaaaattataatagtcatacaaatcatcagataaactattgagaatataatttttgcactattaatcattctcgacccagcttgcttctgcttttcatcatccttagaagtatcacaaacaacaaatttatcagtcgtcagaatataagtaacattttttatagtgaggaaaa

SEQ ID NO: 332143 - DNA, 1102 bp, Cannabis indica
agactgtcgtcagcaaaaaggagatgggaaatagtgggagcggagcgagaaatggaaatcccgtggaaagagttagagtgggatttagcgtttatgatcccagagaggccttcagcaacgaggaggaaaagatagggtgagagaggatcaccctgacgaattccgcgagtggggagaatttggtgagagagacaattattaatgcggagacgaaaagagacagaggaaaggcagttgagaatgagtgagataaaggggtaggggaagccaaaatgttggaggatgtgctcaatgtaagcccattcaactttgtcaaaagctttttccatatctagtttcagagcagcccaaccaactttcccatgcttacggttagtgatcgcatgaatgacttcgttggcaataatgatgttatcaaaaataatgcgatctgagagaaaagcccctggttatgggaaataagatctgggagagtagttttgaggcgatttgcaatggttttagaaactaccttgtaaagagtggaacagaggctgatgggacggaaatccttgactcgagaagcgtttttaattttgggaatgagcaccaaaatagtttcattaacctgcctgagatcagcattggtagtgagagcatataatgccgcctggcagagatccttgccagcagagtcccaatttttttggaaaaagctaggattaaaaccgtcggaacccggggctttatcacccgccagctgaaagagagcagttttgacttcatcaaaagtgaaaggagaggtaaggaaagttgattgagtaggggtgagacgtttagagagaccttgcgtagcaaaagtcatagcgtcagtgtgagtgccttgggacgtaaagaggtcagtgtagaactggacgaaagaggtggtaatatcattgatagtggttacttgagagttgtcttccagagttaaagatttaatgaagttggtacgttttcgcggagaggcacggttatggaaatatttagtattcttgtcgaccgcttttagccaatttactcgggagcgctgtttccaaaagatttcctctttgactaaaagggtatcaaaatttttctagag

SEQ ID NO: 332144 - DNA, 576 bp, Cannabis indica
ctttattgatgttgaataaaatagattacattgaaatggagttttatttagggcataaaactcaacacgtgagttgttggaacaagctacaaattaacttttagagacagtttgtcgcgaaaagaaagataaacctcgaagttagtgccctaactaatataaataattacctacataaactttcaaaatgttcatcaaaaggtttaaggaggaggcctccaaaatgaaaaaaggtagatgacgggcaaaagttggctctattgcaggcatggatccgaataggtactcttttctagaaagaaattcaacaagaaggtgtagccagtttgtaagacttccataatcgagcccaaaaatacatcaatcttgaataagctcagatcaccgtgtttggaggatactgttaaaatatattttaccggaatttagatttactaacaagtatgtttattaacatcctaaatatgaatttataaaacaacggaatttaaacacatataaagttaagaaaccttacattgattgcaacggaataatatgtctcctcccacttagatctctaacccttattccttt

SEQ ID NO: 332145 - DNA, 950 bp, Cannabis indica
cttgccattcttaatggggagcaatcagtcaggaagttcaataagtcacatgtggtattgattccgaaagttagtaagcctgggtttgtgaaggagtatcggcctattagtctttgtagtgtgatgtataagattgtgactaaggcggtggctttacgattgaaaggtactttgtctccgttgatttcatcgtttcagagtgcgtttgttctgggtagggcgattcatgatagtgtcatggtggggtttgagctgctacattctttgtttaagaagaataatggtgttcgtgggtttatggcgttgaaattggatatgagtaaggcatatgatcgggttgagtggtgtttcttgcgtgctatcatgtccaggtttgggtttccgtgtcggtgggtggacttgattatggattgtgtgtcttcggctgagtatgcttttttggttaatgggaggcctcggggaagtgtggtcccttcgcgaggtttgagacaggggtgtcctctttcaccttatttgtttcttttctgtgctgaggcactttcgatgctccttcagcaggctgagacgagtggtgatttgatggggtttaggtgttctcgttctgggccgcgggtgtctcacctattttttgcggatgatagcttgatttttggtagagctaatggtagggaagcagagtctattcgtcggattcttcagtgttatgagagggcttctgggcaacaagtcaattttgataaatctgcaatcacattcagtccgaatgttcagcctgcagatcgtactagtgtattgggtattttaggcttgggttcagtggccactcacgacaagtatttggggttgccgactgttattggcaagaataagaagcgcacgtttgctagtatttgtgacaaggtccagaaacaggtgcggggttggaagcggagtttcttctcagcgggggg

SEQ ID NO: 332146 - DNA, 1100 bp, Cannabis indica
gtgccacaaaaatcggctagccggttttagcagggttcccgggcctttcattttctcaattttcgtctttgcggtgcctcggttgggtgtttccccatttccagagttagaataacctattgagagtataacagaacctagggttttggttttgggtttcccgggattagggttttaatcatgtaacttacccggtttcaaaatgtgattagggcatccatctagcacaagatttccgttcaggtcggccagcacacttgaattcggaaatcaggtaagaactgaatataatgtgtgatatgattatctgaatgtatgtatatgtgtgtatatgcatgcttagattgttatttgcactaccaacacttgtatggttatgatacagagtgcattggtatagtgagtgttgtttgtgagtataatacagtgataccaacacgagtacgggaaagtgctgaggtgtgtggtatatcactcagtggtactcagggtacgaaacaaaccctaccaacactcgtacagtgaggtacgttgtgtatgtggtatagtggttgtaccctattatttaacatttatgctcatctgttaagccctgtaaataggtgtatgggcgcttaactacaggtcggaaattatgtgatatgttatatgcatttcttacttagtctgtggactcacagttctgcttccatgtgtaggtaaaggcgaaggctgaacaggagtgaacctgagctagggtgagattgtacatgtcgaagcggcgcgacctggagtgttcgttctcgggacatctgggagttatatttgtagtcgctgagcgacctgtaaattgtgtattttggaatataaagtttgaaaacgagatcccggcattgtaaatatttttaatatattataaagtttagaaactaatataaaagttaaaatttcacacgtttttcaagaaaactcttcgattagcgaagattacactgtaatttaaaaagcactgttgcgtgccttagcattagggcgttacagaggatttatatcatttcgggatagaatgtcgggaatataatcatatgcgttattcaatttcttaagagaaaatagaatga

SEQ ID NO: 332147 - DNA, 1541 bp, Cannabis indica
ccacgagtcaatcttattaaattcttgatgacttttcagggcctttttcttatgatttttttgtctcccttttttgatctaacttgccactatttatcattacatagtaggcagttaattacatagttgactataatctttacaacacttatcccctgaaatcttgggatttgattacatatcacgtagtataaatgtgggtattatttgaatatcacacagctgtgatttatccccttttacaaggccaaaatgatcgtgtgtttaaacacatcttaaatcatagcattctgggatgtctcgacaagaactcggttccaatgaccttgatagcgagctggagctttttctcctatctttccaagttcgacaatgcacgcctcgccgcttttttgttcgaaggcttaacgcttcattttgacaatcacagttcttatttataatgagtaccttagcaatcatttgaatgtcagcttctgactcatcaagactattagtctcactgaaagacatctgaagttaattggtcaaattcacaggagtgtgccttcctatagtgagataggcgcatcgcttattagatcttgagtccacccgactgttatacttagtttgtatataatatggtaagtgtttccacagtcaatatgtatcgcttttttgcttcccaaaggtaacggagtcgatgtctcaccttatgcatccaatgcagtatggtttcttgttaatacctgaggtaacagtttgaatatctttatctcgcataagaccctatagtcagcgagttgcaagtatactctgttacttccgcatttaatgagttattccatcaaaaatgattaccatttcacgcatcgatccagttccccttaatttgacatgtttcctccactgaaatggtagccgaatttcgagtataacaatattagtttactggaatatcatttataggtagctaagtgttttatggataaaatacattgacgggtagaacgataaatttgaccatattcagtgtagatcatctatagaggatctttgactattaggattacaacaatggataatcataacgtatctatatcgtggtacgtatagagcattctataaaacttatataactgagagtgctatgatcaattccaaatctgtagtggcgcaagacagaattaattagttgggaatttacttggtgaattctaaatctacttattgaaagcacagttatataggcccatggtccccttactagttgagataatactgcttgcagacttagttaattgattttgattaataaattataattctaaaataagactatgtcttatttaggaatttccactaagcaatggcttaattgtaaagaaaagaggttttgtggtcaatttgttaattaagagactttttatggtctaattaataaattacataaatgaaaattttatttagtaattaattataattattaaataaatagttttggcatttataggattgaattggaaaatatagtattattgaaaagaagaataagtggt

SEQ ID NO: 332148 - DNA, 422 bp, Cannabis indica
ttatatgcttcaaaacataatgtcccgtgattcatcaatgcactggatttacattaatgtgataatcagcgataaagcttacttacaccttggataagtgttatgttctttccaagatattgacaaagtatgctagtatcggatgtatagagtatacattagactgggaccgatattgatcttggtaaatatattataatcttacccttgtatctttctgatcatgtcaggatcgatctcaagagtattatttgtgttattagagttgttagtcaaagcctaccatttgatctcaagagttcaccaagtctggcttacagccgtattagcagttttttttttcatctagagggagaacgcttcttgcgccaccagcttttgttgggtctcaacaagctcatcaaactgttggaaatatttta

SEQ ID NO: 332149 - DNA, 850 bp, Cannabis indica
ataattctatgttgtcaaatagtacaattcaatatttagagcggagtaataatggaattaataaataatattattccactaaacagttctgtaatatcctgataagcgtaatggtaaataattagagtttatatttatattatgggttaatcaggtaataagtgggattatgatcctactaatctagttcaacataaactttaaattttctataagtgaataaataagcgtaatttaaaaattacagaaattttatatatcatgtgtgaatgtaatatgtgctatatgtggaataaaaatatttttaggtttggcgatcttggagactcaattaggggctagaaatgtcattacaagtttaatcgatagaattgatcggaatattgtgaaaagttgttaatgtaggtattagggtaattaagagtatgtgagatttgacttagcgccctaaaaatatagatttcttaatggctaagaaattataatataattatgaataataaaatttttattaatattattattatattattaataatattatttttattaatatttttattgaaatctaaacaataagattatatataataggctaattaggatttttaccccatgaactttgacatgtaccaaatgatgccccctgaacttttaaggttgttaaaaatgccccttgaactattgagattgttggatttaaggacttttgtctagtttcgttcaattttactatttcagtgattgtttatgtactaaaccatgctcccaagactttgatatctatcaaatcatgcccatcgaactttgaaatctactaaatcatgccccttgaactttcatccatgtt

SEQ ID NO: 332150 - DNA, 417 bp, Cannabis indica
tagatcctggtaaaacataatccaacaaaatcatgatcttagtctattttggaaagttttctttctggtccgatttgatgtagcaaggtcagattctaatgctgcaaataagagaattttttaagaaagctttgtatagctagataatcatgtttgtccctatctttagggtttttatgttctataaatagaacctagagagcagccaaacatttttcatctcttccaacttgatttttcatattgtaaggagagaatttcttttgtgaaaacctagagtgttcaattaggtttcagtctttgattttttttcttatactatccttagaataagttgaagaactccattgaacaagagaagggtctttgagagaagacttgtcaaagtcttacttcgggaggaagtaagcactcaca

SEQ ID NO: 332151 - DNA, 851 bp, Cannabis indica
tcttagtagtacaaattctatgtaactagtggcaaaaaatattccgagataggtccgggccacatttcacaaaggggtactactatcacaaatatgagattttcactattttgattaaaaggattgttagtgcatgagaactactttttatctcaacacatccaatagaaaagtgatgcacaacagtattagcttcgtccccatgaaatttcacgatttttggagatgtgtagggtgagattttaataggacactaacgagtgtaagattaaagaaaaaacttgttaaaatttaccgtgaatagaagaatatttttaattttttaattagggggccattttaaccagatttagcaaaaaaaaaaatcatttttaaataggggtaccactatctgaaatgtgagatttgcactatttcgatgaaaatgactgttagtgcatgaaaactattttttctctcaacgcgttcaatagaaaactgattgacaacggtcttggctttgtccccataaaatttcacgatttttggagatgtgtagggtgagattttaacagaacacagtgtaagagtaaggaaaaaacatgttcaaattttttgtgaacagaataatattttaatttttaaatagggagctattatacccaaatttaacgtgaaaccaatcttcatattcacgtctagtagtacgagttcattgtgaccactggcaaaaaatattccgagatgggtccgggccacatttcacaaaggggtccactatcagaaatgtgagatttcactattcgaataaaatgattgttagtgcatgaaactacttttctctcatcgtgtccaatagaaaagtgatgcac

SEQ ID NO: 332152 - DNA, 1215 bp, Cannabis indica
aatacatgatctcctacctgaaagtctaaatttttgcatttcggatctgcataactgttttgcctactctgagaggcgagcattctgtccttaatcttttttatagcttcattagtccattgcactgattccagacccagatatttcttctctcccgtttcatcccagtgaatgggatatctacacttcctgccatataacaactcatagggagccatccttattgtactttggtagctgttattgtacgagaactctatcagctcgaaatccataacacaggctcgtaacatgtcttccagtatctgaattgtcctttcggactatgcatcagtctgaggatggaaagttgtactgaattttagcttggtacccatagcccgctgaagactctgctagaacatagaagtaaacttcggatctctatctgatataatggactttggaacgcaatgtaatctcactatctctttcacatacgattatgcatattgatccactacaaaggttgttttcccggtagaaagtgttccgactttgtgaatcaatctacccaagttgaaccatgcaatcccatggttctaggtaatccaaccacaaagtccatggtgatatcctcccacttccactcaggaagtgtcaatggttgcaataaacatgccagtctttgatgttcagccttgatttgctgacaagttaggcaccgagatacaaattctaccacattcttcttcattccactcaaccagaagtagggtttaaggtcttggtacatcttggtagtgccaagatgcaatgaatatggagtggtatgggcctcgtgaagaatctcatttctaagttctgaactacttggaacaaacccaagttttaaacaacgaacatcccactatctcacaccataaaatctttggcttgaccagacgaaacctcttctcggatcttaactaactcttgatcaactaactgagtagttttaattcgttctaacagattagattgcagcgtcaagttatgaagtttgcctacaacaaacttgatgcttgatctgaccatgtcttctgctaactgaggtgaaatattaatcatactagttacctgcctgggaccctttctgctcagggcatcaggcactacattggccttctcaggatggtaaaggatttcacagtcataatccttaaccaactctaaccaacgcctctgtctcatatt

SEQ ID NO: 332153 - DNA, 1741 bp, Cannabis indica
tcttacagctcattattataatctattttactagttgccgaaaacctcggtcaacagttattaagtgaaattggtatatccggtctcgaaacatgaagcccttgttccatgtgagcaacacataattaaaatccattacgagaaatagcgtaaagagaactcgaaaaattcaattgataaaattgtgtgctgtaaacatgaaatactaatcaagtttctactaaaattctaaataaacaaaacattgtctaaaactaaaaatttattctgaaacttgaggcgagcttttcccttaacttggagtgatactaatttgccatttccaactctgagctttaactcccccggatttagataatctcaagtttcaagcagctgtaatgaagaacaaacatggttagtagatccaaaactaacaatccaaatggatttttcgttctctaaaacacatgattcaaaaacaaaagtgttacctacgtttcaattgtctagaagtctgggacatctttcttcctgttaggctatttttagcctactttttggatcactttatatagttgttctccttctttattattatttttttttgaatagaattacactttctctctttggtttcaggtttcacacttggaatatatcaattgatcaaatttcgaaaaacaacaatctatagaatagagaaaattctgtaagaaaataaagctgaaacttcaaacataaatttgactatgttttgatccgatattggaaaatgtcaaaacatagaagttttagatttctttttcttctttcccacgcatcttgaatcaaatcatttggagttggtatgagaaaattatgcatattttactgaaagatgccgaggctatcaaatttacttcagtagtcgtgaccaccattttccgtggtcgcgacccttttccatggtcgcgactatggagcaggcagagagcttgatttttgtattttgcctattgttcgcgactaggctttatgtagtcgcgactatgtgcaaaacacggaaattttgggcaattttagagtttcaccgttcagagtttgaaaccctaatttctatttaaggggctcgtgtttgaggagggagggagggagaacttggacccaaaagtgaaagaaggaggtagaggaagcaattttggcgatctggagcacaatcaccaacaagttctttcttgaactcttgatttctattttaatttctgttttagatttgattatggatgttattatggattttatgaactaaactcctatttggggagatgatgaatgttgattgattttatgccatgagttaatattaattgctattccttctttcttgattgtgtatttattcatgtttgtgctaaattccatgtttgagattgatcaccttaggcatgctttatgacctcaatacaaaatctgaaaagtgagtattgagaatgctaaaattgataaactaggttttgatgtgaaacgagagtctttgcatagcctatgggacattgagattattacttaatgcaaattttatgttagtctatctcagagatgcaatagataacatatgatttaggacctaaaagatctgagaagagttaggttaattttataatctgtcattcacataaagaaaggaataataattaggattaacaattaggtaattgaaacaacaggattcctttctctattttctcattcttgattaaacacctttattgctttcttt

SEQ ID NO: 332154 - DNA, 1766 bp, Cannabis indica
tgggtctgggtctgtgttcggttaagtgtcttgatccgattttggatcaaggtccaattcctgttccagggtccttattctggttcttgttcctatttcgggtctcggggttcgagtttgggtttgggtcctggtctaggaattattccaggttccggtcttggtatgattgcaagatctagaaaccaactacgggtcaggtccaagccccaggtcgtgggtcaagatccggatcccaatcttggatcccgctctcatttccattcagatcctgggtcccagtctatgtttgtgtctgagtctgggaccgagaccggggttgggtctttggtctcagtcctagtcctgagtcttgattctggttctaattttgagtttggatccccaatctaggtctgggtcctgggtgcaggtctgagtctcctatcccgttccaggtcctgggttcaggtctaggtccaagtccgtgtcttggttcgagttcgtgtcccgagtcccgatctgagttttgattcagattcgcatcttgatctgggtccgcatcccgatccgagtttgggtctggtaactagtcaaattctagttcccggagtcaaacccagactctgactcggacccttgtctggggtacgggcctgggtctgggccagggtcttggtctgactctgggtctgggtttgagtccagatatgggtcctagatccaaacactgactacgggtcaagtccaatccctgggtctagatctggatcacagtctcgctacctattctagatctgggtcaagttcatatcctgggtctcagtcccagttctcatgcccgtgtcccgggtctaggtttgggtcctaagtctcggtccaaatccaggacccgatcggggttcaagtcttggtccgagtttagattcaagttccgatatcggtctgggtccagaccagggttcgagtctagttcaaagtttaggtccaagtcccaagttttgatctgggtctaggttctgaggcccaggtccaggtcccccatccaggtctgggtcataggtcccggtctgggaccatgttcttgtttgggtcctagtcccagtttcaatttccattcagtgtttgggttcgggtttgagtttgagttttggtctaggtctgagtcctagtctaagtttgggtccggtctgagtctaggtacaaatcccagtgtcggtctgtgttcgagtccaggtcttggtttgggttctaggtgcaggtctaggtctggttttgggacagggtctctatctggatctaggtcccgagttttgatctctgtctgggtttgagtccaggtttgtattcggatacctatctaggtccaagtttgggtttgggatcgtgtcccaaatctaggtccaggtccgggttcgcgtctcggtgtcggtctgggtacgcgaccgtgtctaggctcgagttccagtctcggtttgggtttggtgctaggtctgagttcgtttctaggaatgggtctgggtcttcatcacggtcctagtcttgttcgagggtcctggtcttgcagttcttgtttaggttctgatttcgggtctcaggtttatatcagggtccgggttttgatcctgttccgggttcgggtcctggtctgagtcctagatctggatccctatcacttgtcccggtctggttctggttcaggtcatgggacgcagttctgagtttggcttcgggaccgagactgtggtgcagttctaggtcccgaccccatttctgtgtcccgagtc

SEQ ID NO: 332155 - DNA, 410 bp, Cannabis indica
taaattaaaaaaaaaaaaactctttacctactaatcaacatactcttgagatttgagttgttgagacactttcctaaatatgcaagtaaggttacaagacagctaagattcccaaaccctaaatccacacaaaaatacaacttccaaaagaatttattattattattattattattattattattattattattattattattatctataactttaaaaaggaacaaggtgtgttgtggcttctaaattattttttctaagttgtatgagattcgatatttaattatactaatagcggtatgacatcgaggaaggtgctagacaccagtggtgacttttagtaattctcatttttatacctattttaattttaggataattatataaaacactatttttgtaaatttttt

SEQ ID NO: 332156 - DNA, 883 bp, Cannabis indica
attagataacatgtgatttaggacctaaaagatttgaaaagagttaggttaattttataatctgtcattcacataaataaagaggaatagtaattagcattaacaattgggtaaattaatcaacatgattcttttccctaatttctcatccttgattaaatacctttattgttttctttaattttctaggtttttttctttatttcaaaatctatcaaaattatttatctaccaaatagaatcataagtctaatttagtggtattcagttcaattccctctggttcgacctcacctgcgtgagtttactacttgattacgtgcacttgtgtatagttcataatttttgtaacggtcgtatggtttctcgttaatgtacgagacaacagtttgtgtatctttatcacgcataagaccttacagtcagcaagttgtaaatatactctgtcgattctacatttaatgagttattccatcttcaaatataattacatttgctggttcgtattcttcccaatttgacatgtgtcctctgacgtgctagccgaattttaggtataacagaacagcttctagattatcaccatttgaaagaaaatacagattcaaatgattgttggaattagtcaatcgtgaattttcaccaagaacaaagaacatgttcgaatcatgagtagtatttttcagattcacgatttcctcgagtgtgaattcctcctcctcgagtttgagctcaaccacctcgcgccatgaacaacaaagaaaatcagaacaattaaagagaagagaaagaggaagaagaaggagctcacaagattgcctctaataccatattagctcataagagctaaacaaagtacgagagagagagagagagagagaga

SEQ ID NO: 332157 - DNA, 800 bp, Cannabis indica
aaaatgcctaagttttaagttaaagggcattttagtaattaaccaaatgtgtgatttggtggctgcctaggttgatgacacctgccctttcctttttgagaaaaggattagttggaaaaatcctttattcattttagagaaaaataagaaaagaccaaaattgaagaaaccctccttcccttctctttctctcttcgaaccagccaagaccaagggaattggttgctgatttctagtgttttcaggagggaattcaaggggaaatcaagttgaggtaattcctatacctattgttcttagttttccaagctttggtgttgacttgaaattgtgattttgggttttaagggctgttagggtttggtctgtgtttgattcaatttgtgagctttgtttaagttgattttaggttttggatgttagttttgagctatggtgatagaattgagttagcttgagctttgaaactcaagtttaggtctttaatggcatgtttgatttcattgagtttttctgagaattactggttcgaatatgttgtgtatacactaattaggtactctggaaggtttggttgcatttggcacagttttgagaaagaaatgggatttttggtggaaactggtataaactggtttaccggttttaccagttactgtaaaaccgataaactggttttggcagggttccccgaatatcctgttttctcaattctcgtccattttagtgccttagttgggtgtttccctatttcctaagttagagttatccctaatgattatagtgttgggattttatgc

SEQ ID NO: 332158 - DNA, 689 bp, Cannabis indica
ttaaatgagaagaatctgaagaacgttggccttctttccttggaaaaatttacttgtgattacaaaatacccaagtattcttcgtggcaaaaggtctcggttccagatgaaggggaaagtgaggacttcgtggcttgcgcacactatatcgagagaagtgcccccaggaagaaatagcatcctgaggtaattaatgtgggttgtcacccacagtgcttagggccaaacgtaacaccctagtttctttttgagatattcgatacaatttttatacttggaactcctttctcatagattgcataacacataggttcgatagttggtaccaagaattccatgttcagattagctgtactagttcttactatgggattgccaagcagtatgagactatgttggatagatcgggtgacctagattcaagttgggatttcgatccactaaacccttatgacatatttatgattactggatctagggagtttagtgaatattatagtcctccatcgtcatcttctgaagattatggtaaccttctcaagtgggagtttattccccatttgcacttatctattttgtttaagtgataacggacttctcttgcctcacatatatggatctggatttggagaacatgttcaagagtcctcccctagtcgacaagaagtctaagaagagagttgcccaag

SEQ ID NO: 332159 - DNA, 953 bp, Cannabis indica
acataatttgaagtataaggaagaaaggttggagtcaaactgttcaagatcagactcacttgagttgtctgatccataacagctccatgattctaagcttcttggaaataactcgccatttggagaaggtgatcacgcacgttctgatgaggattcatccgtgcattgatgaaattccttgtcgcttcaaagcgagattgaattgatgccatcccgaatagaaatgcattggtagaaatgcgatctccgactaaaccaaaagaagtccaaagccttacaggtaaggtcgctgctttaaatcgttttatatcacgttcctttgataagtgcaaagaattctttcaaattttaaaaggtaataagaagtttcagtggaccgagaagtgcgaagaggcttttcaagcacttaagtcacatttggggcaacccacaatcctttcgaaaccaatgcccggagaaattttattcatctaccttgcagtgtctgaatacgctattagttcggtactaatccgcgaagaccagggaaaatagtatcgtgtgtattatgttagtaagcgcatgttagacgctgagactcgctacccgcagatggagaaactggcatttgctctggtgatagcgtcaagaaaattgcgaccttatttccaagctcatagcattgaagttttaacaaactaccctttgaggcaagttctggcgaaaccagaggcatcgggaagattgttaaaatggtcagtagagctgagccagttcgacattaggtacaaacccagatctgcgattaaggggaaagccctggcggactttatacttgagttctcgagcaccgaggtggcactcatagagaaaaaatcgatcatgatgtaccaaacggcgaaggatggactttatacgttgacggagcctccaacagcgaaggctccggacggtggtataaaactcataagccc

SEQ ID NO: 332160 - DNA, 605 bp, Cannabis indica
aatgaggttccatctcaaaatcaatcggcaatggaaggagtagcccattgatcttatatatgacaatttatttccacatattagcaatgtgagaccaactctaatagtatttgttgttattgttattaccacaattgaatttgagtttatatgtattttatagagaggaaatatcatcatatatttttaaagcatttggatatatggttcccagctctgagaataaagcttgaaactagaattttagaaactgtttccagtatatagatcaaatggtcgtttaaaataatgaatacaaaacaaagattatatagattaaatgtgtccaccatagtaatattttaatggggtttgccacaagaaatttataattttttttaataatcaatatagaaaatatagaaattatagatgagtttatgtgagtaaatggattaaaaaaaatttaacatgtggaataacacatcataggatattgtagtgtctattagtaatattttacaaaattttaatcaaaaatttaaacaattattttaataaattaattttaattttttttttttgaataaaaatcataagatttattaataaataaattcgttcaa

SEQ ID NO: 332161 - DNA, 511 bp, Cannabis indica
ttttttttttcatttttgaaatatatctaatctcatacatcttattttgagtttgatggcagaaagatgctcttccttggttaacaagctgtcatatgagattgaaaccttaaaggttgaatgtgaccaaggtgtgcaacacaaagaagaagctatcaaagctttgaacgatgccaagtctcgtgctgaggctatgatcaaatagagggtcgaagcttctcttaatgatattgtgtctagctacaaaacttctaccaaggcagaaaaggagcgcactgaaagatataaggtatcttataagaaagcccattcgcgttgtaatgccctaatctatagggatgccacatgtgtgattttataaactagtttaatactaatagattaattaattattaaaaaccgtgataatattaaaaacttgactaaaataaaatactaaaaatggacatcatagcagtagtaaaaaggtgttacatggatccctattataaaaggtttacaaaaagactat

SEQ ID NO: 332162 - DNA, 784 bp, Cannabis indica
ctccccagaaattcgatttgcatattgatgatagtataaggtctatgattagttactagcaattgcctaagtccttctagggaaataccctagtgataggaaaatttcagaatgatggaatggttgtatacttaatataaaccattactagattcatgggtgtcctgatcgtgaacttaagaaaagctagaactgttaacttaggttagatgtttgatagctattttaagtgattaggggtggaccatcctctggtcattaggataagaagtgtttgcttcaacaaatattacttttctaagaaaatgactaagtctgaaaataaagtagcaaagtagaggagatatttttttattattccaatgcgttctattatcttattccatataagatggtcctgctacctatgttgtattgacacaaccgatgagaataatacaacttacgttcttaaatagaaagtcacagtaccttattgtagtgggagggtttcaaggaacttacacatcctgttatggcttgggagacacttgtgattaaaatccattgttagtttaaacaagtaatggaaagtcagaataagaactaagaagcaaagccaagagaattatggttaaaaccattcatatagagtaacaaaaagttttctcttataggacaagaaaggaaattttgaaaaataagtctattcaatggacttaacaaaacttcctgttccttgtattataggttcgagtttacctaaatctatggcttgtggtatacctggtaattacttactcta

SEQ ID NO: 332163 - DNA, 896 bp, Cannabis indica
gttatacgggaccaccccttcgttagcagggtgggcccggaacccataaaaaccgtccttaagtttgtccccctcttggggacggaaacaagttcataaaaatacaaaatttccgccgggcggggagatccccatcctcgggcggcataaaaaataaataagcctgaaagcaggcggtaagcttggggaatgagttgatatggcgcaaggccgacaaaaactagaaaattaacaaagtaatcctgaagaggaagcatggcaccggccatcaggtgcgtttggctccaggctccgaagccgccgtaattgtggttgggcgtctccgcgtcgcgaggtggccgatggtaggttcctgaggtggaaggcttgatgccggcaacctccacaatgttctccaattgatggggacaggtcagggtggagtaaagctcagccgcttcccatccggtcgcccgggacttatacccctcctgggcaacaggtcccagggagacctcctcaagggtagccatgcgcttaccgcttttctttgaggacttggagccagaagcagacatttttctattctgtaaaaaaaaagtaaaattccagtagttaggccccgtaccaaaccctaaattaagaaaaagggaatgggggtcccctaaccgctggaaagaggccccctccggacacgtgtcgcacaggaaaccctagaaggattccctggacaagtgtcgggtgcagtaaattcacagaagacggctttacgcgataaagaaaacagaaagaaaagattctgttctatgccctaagcaaccattaaacgaagaacgtacgaccttctacaaagaaaatacacaataacaacagaggcatgacaatggcaatccaaccactagagcggtaaattcaaa

SEQ ID NO: 332164 - DNA, 571 bp, Cannabis indica
acaatagagaaattccccaattatttgtcaaataacactcttaaacaccttcagtcatcttcaaaattctaagccaaaaggacacttacctaaaaaaaatagtatacataagcacaatcccctattaaaccaacgttctttacctttagactatcttaaaccaacgttctctaccaacgacaattcattttgttaaatgggctcacatgctacgagactatcccttcaaatcccctattacacaataaagcaaccccagatcaatgtggctgagagcatgaattagaataatattcatgacaagaagtagaatattacaatccacagataatattcttaaaagtacacaatacagggaggaaaatgatgcttgagaaagaataaaaaagtataaggcaacaaaatgcaatatcattgtttatagaatatgcagtcatatacttttagtgcaaaaaattagccactccatttgtcgcgaaccaattgcacaattcttccactcccttttccaatgacttatcaaaaaaaaaaaattagcatcaaatattagtttaaatattaatgggatttg

SEQ ID NO: 332165 - DNA, 462 bp, Cannabis indica
gaagaaacttgacgccatgctcgaggcgcgtattggtcctcgcctgtccccgggctctctgtatatatatttttttacctttccttagggccaagattcttatatacatgatcgttttttcatcgatgcatatttttttttctttcaaacctgccctttgggtcaggatatttatacatatgatcttttttgatgcataatttctctttttggacctgccctttgggtcaagatattttactttcggcttgtttttcatctatccatgtggtatgctttagtacccccctgagtggcatgaaaactttgtttttaagccactcagttttatttaaaattcagaggttgcacacacttagacggtacaaatcctttaaacaaagcctaagttacatattttgactattggtaatattttcggaggtgatcggcgttccaagcccttggcacaatggttccatc

SEQ ID NO: 332166 - DNA, 853 bp, Cannabis indica
tttctaattcttggagtcagatttttcattcggttgtgctctctaatttgggatttgctacttcggatcattctcctttgtttcttgaacccgttgcgattaataattttactcctaatcatcgatttcggttcgaaaattcatggttaaaagagcctttctatttggaaattgtgcgtgatgtttggtctcaagaacaaaatgaaagcatctctcataaactcaagctttgtgccgagagactatctacttggggtaaggaattaacaggttctctcaatcaacgaataaagcgtcacaaggctgatttgaagaaactccatggcttacgggactccatttcagttcagaggtatgccgagattaaaaagaagctttatgaagctcttgaccaaagagaaagttattggaagcaaagggctaaacagttttggttaagggagggtgatcaaaatagcaattattttcataaggctgctagtaatagaaagaggaataatcagttgaatgagcttcgcgatgctaatggaaattgggtttcatcggattcgggtttgcaatctattgtagccgactatttcaacaatttattcacatcttcgggtagcgtttgtgcagaagtggtcgattgtgtgtctactacagtgtcagatgttgttaatatggaactttgtcaagcagtttcagaagaggaggttcgaaaagcagtcttccaaatgcaccctgataagagcccgggacctaacaagatgactcctgctttctttcaaaagtgctggccgatcgtgggagataaagttgtaggaaatgtgcgttgcttcttgaacatggaactcttgctgatcattggtgg

SEQ ID NO: 332167 - DNA, 505 bp, Cannabis indica
tgtctcaaagccaaccaatacccaatttccacaacaaacacttgtgaaaaaaatggatactttaccaatttttcaggaaacaaataattaatgtttcaatttagatgataaccatgaatgttgtgtttgatttagctttctctgtttatgtaatgttaaagtacatgctcatttcttataagtatgatttatccaatctgtatcaaaggactatatatggttttccactatttcttatttagttgaactaaagagcaactagtaaggcaacttagtgtgacatatttaggttagtatcttggaatttgaatataattgtatggttgtgataattgataccatgtctacctagatacaaagaacatagattgtaaggatatgcatattggcttgaggttcttaaaatccattttattgaattcagcacaaccaatcatgtatattgattttgttatattttcatattggcaactaatcactattgtagttgagaatgcaagttcaa

SEQ ID NO: 332168 - DNA, 738 bp, Cannabis indica
ggtaattgtctatcataataaggctccattgtcagttcaccaaatctgaggttaacattttggtgctcttagtgagagcattatttgtcatcttgatcattcatcatggttgtaacaaggagaaccactacctccacttcctcgaatcttccttaagatctgatgacgactgatcccaattttcaagttcctccccccactgaaggcctcactgatctaactcatattgtcactccgacaaatcctacaagtcctataaatttagccaataaaactaatcccattgatcctactaacatgataaatcctaataatcaggccttgtcgcccaaaatagatccaccaatagtaactcgaacaaaaggtcctgtaaacacgaaacaacctctacaaaacttaaataggactattccttagtattatttaggcaaaatagggcaaggaattggtgaaccaactattagtgagcctcatgtggacttgggagaggatattgagctggctaggctcaaagaagctgtaggccaggtcacccaaaaagaagaaccacacatttttggttttgttgctttcacccaacagagatgctgttgggaatattttaccaggatctatatttactaacaagtatgttgaattaacatcctaaatatgaattctctaaatcaatgaaataaacacataatgatttaagaaaaccttacattgattgcagtggaatataatgactctttccgt

SEQ ID NO: 332169 - DNA, 553 bp, Cannabis indica
aatatatgtatattttttaaaaaatatttttttatttaggcccctaaaatgagtgggccctaggcgcgggcctagcctgcctatgcctaggaccagccctattgccaggatctgataggtcactataactctaccaagaggaggtcagccttttgcaagttgatgacagctttgtacatcgttttcttatagaggtcaggttcccttagtcgaacggaggcttcttggtctggaagtcacctcttgaccggccagcttgtgcacaaatcctggccggcctatagactcaccctgaccggcctataggcttctcttggtcgtctaatgatgttggtacaactccttgagggctcactctattcggttgttgcttgacggttttgctatatcatgcatggaggccttgttttgctattggcaaggttgtactctgcctgtactctatctttgacttacgtggacatgccccatcaggtgaacaaaatttgagttaacaatatccttataaaatttatattttcattttattctcactgtagaaaatagtgaatcg

SEQ ID NO: 332170 - DNA, 716 bp, Cannabis indica
aggtccttaagccttggtcaagcctattgtgtgctattctttcttcttctctagttttcttgtaatctgtgatacttttatctgtattttgattgtaatcctcctattccctctagtaatgacaaattttttaacaatctaaaagtcatttcgatggcgttagccttcttccaaacagacaattttccatgaagggtcatataatcaaaagaagctatccatgaagggagagcatcaatcaagatcataagaagaagaacatgtggtaaaagattcaagccatccacgggtaagttgttagtttttatggtccatatcagagttataaaagtagaagtagaatttcataaaaaatagtttttacctaatatgaaccataagctcaaagatctcaacataatatatataaatgaaatctaaactactaaaaaaagattatacctcttgaagtctattaggatatccttgtttatttttctatatttatcgaacatccaatccaaaaactttgttgaagaatccacaccttgatcttctaagccagcctcaactttcaggaacaaagtgggtcattagatcttatttggatgaaaagatttaggtattacagtgtctattcaactcatgagaaaatgtaatagagttagggtttttgatctcacacacatatgaataggtgtgtaatgttgggttttatgccctaaataaaactcttt

SEQ ID NO: 332171 - DNA, 660 bp, Cannabis indica
aaggaagacaagcatatccaccgagtttttcacatcaaccgcgacattcacaacatgctcaaaattcctaaccgagttctttgaagagtctaatgcgggattatatggccaaaaatgatgagatgataaaaagtcaagttgcctctcttcaaaaccttgagttgtaacttggacatttggccaatgaattaaaagctaggctgcaaggttctttgcctagtgacacgaaaaatccaaggagggatgggaaggaacaatgcaaatccattcaactaaggagtggcaagcatctgaaaaattctgaggaggaaataaagggtagtggggagcccacttcaatccaaactgacgaaaaattgagtaacaaaactgtccaggaatttgctgataccagcccagttgatacagcaaagggtcaacaacctgacagtcagcaatccgcaccagtatgttctagttctaaaccaccccttccatttcctcaaagatttcggaaacagcagcaagatgggcgattcaggaagtttttggatgtgtcgaaacagctccatatcaatattcccttggtagaagcgctagagcaaatgctgaattatgtcaagttcttaaaagatattttgacgaagaaaaggaggttaggggagtttgaaactgtagctc

SEQ ID NO: 332172 - DNA, 620 bp, Cannabis indica
cctagccgccacctatactctcttcttcttccttgaataatttcgaacctcttagtgatagagtagtgcccacccacagcaagtgatgcctcaatcatagtgaggaagatcgtgaagaaagacattcaacaagaaggatattcagcactaaagaaaggagagaaagagatgcaggttcagatcttgataatactctgtgacagaaagggtacaagggttatagatctgaacggaaggagaaattttattccgctgcacccaatgggtaaaataattccaacaagaatttggtcttatctgtcaaaatggcaaggtaaatttctttcaaaagggggaaaagaaatcctccttaaggctgtgatccaagctatacccacctatgccatgtttgtgtttaaacttctcgactctttttggagttttgtggagagagaaatggcaaagttttggtggggagctaagagtggtgaatgaaaactgttgggttttatggcctaaataaaactctttacaatctgattaattatcaatataagaaatttgaagtgattgatattagcatgaattttacatgctaatggtttaaatatgtttattacatttacacacaaaatcagtta

SEQ ID NO: 332173 - DNA, 578 bp, Cannabis indica
ttaaataattattttattattatcattttgtatcttgaacccaacaactatagttatgggaaggtgtacctatatttaagggcttttaaatcctatatgaatatctacataaggtgggtgaaatcacttgtaaagggaccctgaaattgatactcacgagatcatactcttgagctcccactctcaaattctaaaaactcacttgaggagtgaactcttggagaacataactctcgagaactctcctcaagcattaagatcaataacactccaagtggactagcctattactgctgaaacggggtgaaccactataaaattcttgtgttcatctttggtgaatttactttttcaaaccggtttactttgattaactattccttgtgtttatcttactcgttttacgatcttcttagatccgttgacgaaaaactgcatcaacggtttggtgctttcattgagagcagtgaacacaagtgttaatcaccccttaccgtcacggtgagtactagacgaacaaactatgaggaggaggaccatgatgaccccatgaacgaaggaaacaccatggaacacca

SEQ ID NO: 332174 - DNA, 739 bp, Cannabis indica
atacttggaaaatgccaagacgtaacagttttacttggccatacaaggaaaaccgtgataaaacaaacactactttttatcaattccatttcagaagagcttttaagctcattcctcttatagccatcgaaatcccaacgactacaccatatacgtaccgttcccaatcggtcattatacgttttcataatatacttcactatcaccatttcctagatttccacacaacatacaataattattcaacagtctactcataatctagtgacaattcattatcagatcgaacacttaaatagttctagatacctttaccatgttatacgcatccaagtccaaactctcggtaagagagatatgaccacttcccagagagtagttattagaaattgatacacatttctacaatactaaattaagtctagaattttctacacatttgtagaaaaacatactctaaagttttagataattgtagaataatttagaattttctagacatataaaaatccaatagaacataggcatttctagaaaactttagtctagaagtttctagttatgcatgcttaagaaatatgtagaaatgtatggataaaatccttgaactagaaagatctagaagaaataattctagccataaagtgtaaggggtgagcaactataaataccccatcaaacttccaaattgtaaccaagcttgagtagccaaagtaagtcttttactactagcctacta

SEQ ID NO: 332175 - DNA, 1435 bp, Cannabis indica
tcttcatatcttttttttttgtgggtgatttgctctattattttttcatatgccagcttttctaaataattgtcaaatattggtagattatccactagttgtagccattcaagatctatagccgaagaagaacttggcattattagaaatgcactgagcaaatagataaagcataacttcactctgtctctagtctttgattctctagatatgctatctagagcattggcaacatctgttactttaatagacatcatgttcttgaagtacttttcttttaacttgttcttagaagaaacaagctccatttcttcaggtgtcgggccaccatcagtgtacaatccagatacaattgcaaactcttggagagaaaatctcacaggttttccattaatcaaaaaccataactcatgcctcttttggcaatctaccctcctcaaaactatctggtttactaaggtgccaggaaaaagccctttagtatcgaggtccaagagacgacccaattgggagtaatgtttaaaaacatcctggtcagactttgtgagccaattctttatttggcctattacacttagcgaggatttgatggtaactttagattttgcagctgtattagtagtaatggcacgaggtatacatggaagctctgttgttaatatagttttgggcatctacaataataatgtgtgaaatgaataaaaatacataaacgataagaacataaatataaaaagtataaaaagaattacaaatttaactaaatgaacaaggtcacacgtggtatgaaaatagatagtgcgaccatgtgcgaccctatgcgacctgtgcgaccgtgtgcgaccttagtggtcatttatggttgttcagagtaaattcaagttacatagtgtaaattcaaggtcgttcatagtcgtttagtgcaaattaaagttctttaaaattggttgaagaacataaaataccattatggtcacctagtgtaaattcaagatcatttatggtcgtttagatcaaattcaagttctttaaaattggttaaacaccataaaagaccatgatggtcgcataatataaattcaaggtcgtttatggtcgttcagagcaaattcaagttatttaaaattagttgaaggacataaaagactattatggtcgcatagtgtaaattcaaggtcgtttatggtcgttcagatcaaattcaagttctttaaaattggttgaagaccataaaagaccatgatggtcgcttaatgtaaattcaaggtcgtttatggtcgttcagattaaattcaagttctttaaaattagttgaagaccataaaagaccatgatggtcgcataatgtaagctgaaggtcgtttatagtcgttctatgtaaattcaagttctttaaaattggttgaaaaacataaaagaccatgatggtcgcata

SEQ ID NO: 332176 - DNA, 844 bp, Cannabis indica
aaaattctgcaacacacatctcctcgtactccttgcaaatccatttgcatttcgaagtacttgagatggaaaatgggatcttctctccctgtgtacatcttccatgttggcattttaaacttgtggggcaacgctaggagattgatctcaagtgaaaaaagagtttcgcgtgctcggtccagctcaagatcattgtttctttgtccagccatgccgtgaaacatatttttcagtttgtctagctgtgcctgtacggctggactaacctgctctacattctggtcaatttgaattacgtcagcatctttctgagcgggaatttaagtacgggttctgggctgcacgatcggcgtgacattctgatcgtctactcccctccttctattaagatcattccttaggtcatgggtcgtccccaacctttcgaatacagaagtgcttggctgccttagcgattgatttgctttgttgacgggtggaatgacaccattgatctgattggaaccatcaggtatgacttctccagatgaattactagacaagctctgcccgcctaccgctaggcccacgagcccttaaagcctccatctctctatctctccactcgataaacatacgcctttgttcttcgaacgcgagattaaccgcagtgcggagttcttcctgatcatgatgtagggtattgttatgaccctacatgagtccaagagcgtcgcggaggttttgtaactcagtagcatctcgaatggttgtctgggtgttggttccaggcgaaacagttgtgttatgaatgacctggtggtgcggaactgtattcccagtctcttgcacaccaggtgcgatt

SEQ ID NO: 332177 - DNA, 856 bp, Cannabis indica
gaccttacacaaaaaagaaagggcttcgaatactcccacaaggattggcctacaaaaatttcttcacccaatgggaacaaatcccgaattattttcacctggcaccagatgtattctcaccaatcaaagaaaggctaattcaaaaatcatgtgcaaactctcactcagaattctcaacaaaatgcaatcacccattatggaaaaatgaagaattctacatcgctctcccattcaaacaaaatgaagatgtcaatccgacaaaagcaagccaccccggaatgaatcctgaacatcaaaaaatggccagtgaagaatgcaagcaattgcaatcacaaggactaatcgaagacactgactcgccatgggcatgccatgccttttacgtcaacaacagggcagagcaaactagaggaaaacaaaggttggtaatcaattaccaaccattgaaccattttttggcagatgataaatttcctctcccaaacagaaattccttgttctctagcatctctaaagcgaagatattttccaaatttgacctaaaggcgggattttggcaactaggcatcaaaaaagaagatagatccaagacggcattttgcatcccaaatcatcattttcaatggacagtaatgccctttggtctcaaaactgcgccatcccttttccaaaaggccatgactaaaatctacaatccaatcatcaaccaagccctaatctacatcgacgatatactattgttctcacccgacgacaaggcccatgcaatcctactggcccaatttgcagatatcacagaaaaatatggtatcatgctttctgagaaaaagatggttattggtcaaccagacattga

SEQ ID NO: 332178 - DNA, 572 bp, Cannabis indica
actatttaaaaaatataaagttgaaactaatatgacttttttatggtggttgatttgaactttaaattcaatctatatatatatatttgtctcattattacagttaattaaaaatgaatctaaagataaaaaaaattaaaaaaagtggtcggtttggacaggttaacccgaccaaactgaccaattttattgggcgggttatcattttcttttttcttaattaggcgggttacacttagatttttgtaacccgatctttacattgggttgaataaaatatggcataaactgaccaaaccgacaaacgtacacccctaactcaggcaactgctagtaactaatcaatgaccttttattttcatcaatatgcgacttcgaagttctggggaggtaagtttggatacaatttgaagttcaacttaatgatctttgagctgcataaccaaatatttatccacctttattagttcgcaagatctttaaccactttatcttattagttttcaccatcgctaaatataaaattattaatattaattgcttaaaagagtcttattaaatattcaaattaa

SEQ ID NO: 332179 - DNA, 630 bp, Cannabis indica
gaaaataagatgcaccgtgttgatataggtagtacaaatcaatccattgaagccctcttcaaatgtgtagtctcttcaaatgtatagtctcatacttacacagtcttaaaatcatcacacttgaccttccttaggcagtgtgggattgcacagcttacccggtgtttttccttacagatcatgggactactgactgtcacaatacctaagtttaatttttgacagttacaatatctaagttatatttatggagtttccgtaggtacctgactattaaatgtcaagtcattatccacatgtcattttttattagtatatttaaaataatttttaaataaaaaataaaaatttaatgacctagactaattaggcactgttacgtgactattgacttgacactaggtacttacggtagtttcaaaaataaagcttaggtattgttagcgtcaaaaattaaatttaggtatttatcaacaaccggtagttaaatttaagtatttatgccgcagattactctttcataaaatacctatttaaatttgtacaattttacagtattttttaaagtaatttgttgtataaatacttaagtttaatttcttgttgcagattaatatttaaatttaattt

SEQ ID NO: 332180 - DNA, 791 bp, Cannabis indica
tttttcaatatgcatgacatccaaaccatatcgaacaagtgaacttttccaacatggaagacaatagaagattgactttctttgaaaataaccatttatttttttatttttctgcgtctttcctaacttacaatctacaagttcaacttgttggagaattagttcccctgacagtggcaaaggagccatatctccctcttcgaaaccatcgaatgctttcttcttccgtctatcaggatgatttgtaggcaagtaccgtctgtgacccatataacacatcttgtgtccatttgccaagcgccgagctgatgtgttagggcaacaaattagacaacctttgtaaccttttgtgcttaagccggataaattactacaagcagggaaatcactgatagtccacaataacacagctttcagattaaagaattcttttttaaaaccatcataggcctgaacaccattctcatacaatttttttaaatcgtcaatcaatggttccaatatacatcgatattatgtccgagttgttgcgggccatatatcattaaagaaagcatgttaaatttcctcttcatcactaactagggaggaagattgtacataactaggaagacatgccatgaactatgatgactacttagagatctatgtggatttactccatctgcaaacagaccgagatgactgtgtcttggttcacatttgaattcaggatttatgttgtttacttttttccatgcttgggaagctgtaggatgtctgagttttccatctttcactctcttggtctc

SEQ ID NO: 332181 - DNA, 576 bp, Cannabis indica
ggtaagtactgtaaattcgtttgtgtcgtactgaggttttcggagattttgtccagattgtgtcattttagagattttcgaaaactaattatatttagagcttaagaaaataagagataataaataataaacaaacgagttttttacgtgattcaggcgttaatgatccttagtctacgagtcaatagtattagcctctttgggcaagtgtttaggtattacaagtgtttacagtaagggtttctctattcctcttgtttctcttgggagaaaactctttagaaattttagcagagtgtttgtaagtgaaaattgttcaccctttgttcaaagaaaatagaagtatttataggcacacatgggataaagggcataccctttaccgatctagggtttcgtaccccacactctgctaaggctggtactactcaagagtgatcttaccattggctggtaagaaccttcttcatcgtgtggcacacagttgcagtgagggtattcgtacaaactaggacacacgtcatgcaaaggtctctcctttgcaaagtactctctaaccaggtcgttgggaaaaaa

SEQ ID NO: 332182 - DNA, 456 bp, Cannabis indica
cccacacctcatcgtgtttcacggcccctgcgtaccgtttcagctccttgcaggtagttcctccgatgtggggtcctcccgagatcatgtccactctcccgttgggtttaggcggcaggccgggcatatgctgagcatccccggggggaacaactggagcaaatactcctgctgcaccccctggtgctccttgtggcaaagctccagccgcctgacctgggttgagatggggcaaccgatttttgatccactcgtagaggtgtcccaatcggatcaagttttcaatctcgtctttgagatttttgcattcattggtgttgtacccaatgtcgtcatggtactcgcacctcttagtgggatccctccgggagctgtctttgtacaaaggaggcggcctctgatagtgcgtattttgcctagtagcaaagtcacacgttcttgggagtccgttaactc

SEQ ID NO: 332183 - DNA, 823 bp, Cannabis indica
gtaatgggttttatttagggcataaaatcccaacagtatcttaccagacgtccttgtagatcatcccacaactcacccctggcagttaatggatcagtggagattctcgcctaaagggctataagttgcaagctatcatccaagtttctaaccctggcggtagctgtgctaaaacggcttaagcacatcttaagtgtttcgtcaagctgcttttttatattggttagcgaggccgcttcaggtcacatatccctagcggcttgaaattgcttcttaatatccctggacagctgctcccaagaaattattgaatgacgagtgaacttgttaattcagctactcgctgctccaagaagcaaggtggggaacaaaatacagcataaattgttagtcacattacacgctcgcattatcgtgttaaagttatttaaatgcgagacgggatctgtgtttccatcataggaagagacatgcgggtttttgaatccagaaggaaaatgggtattcataatttctgggtgatacggctctagctcctcgtcaaagtcgtatccagatgatttccctatttcacccgcttgatatcttctgaacatgtcctccagctcatttaactgcaattggattggatcctcttgcttttgaccaagctattggcaaaggtcaggtttcttccgattcaagtgctctcgcagatccggttgggagttattgctggcagatctcatcttactcattaactgcgtcctacttatagactttgtttttaagtggcttgagatttacttgttcccatactctcccgatcattagctcgttgagt

SEQ ID NO: 332184 - DNA, 814 bp, Cannabis indica
atttttgcactctgacgtggcatcacatgatggtgacacatggaatcaacttcgagtatctgctcggagagtacagtccgaacaggatgcctcatagtcatgcctgaagcaaagcgatgagcaatccgcgcagagcgaccaacacttagtgaattcagttttcacatcgtgagtcatcaaagaaagccttataacttggggatcagatttcaaagatatggcaagctgtccaaatcccacgatcagtgtattctgtatttatcatgcaatcgttctacttatatccattgtaacgagaagggaaatatttcctctccaagttcatagccctataaatagtgatgaatattcactcggcaaagggtcgaaagatttttacctaagaaatgttatctaagaattcatattcagagatattgttggtaggtgggatggctccattattttgcgtggatctgtcgagcatgacccctctagattaattcccgaacaaggtctgtccgcctacctctcggcccacgtcgtgactgaggattggacggctgaccgttggttgtttgggaagcattcaccattgggtcatcctcggtttctcccaggggaatgatgctcggcgtttgctggcctacagtctgataggctcttcgtatcagcacagtggcttgccgactacgatcttcaatttctgcatggtgagcccttaatgcctctatctctttgtccctcttctcggcgaacatacgcctctattcgtcaaatgcgaggtttactgcggcacgtaattcctcctcatcgtgatgcagggtattgttgt

SEQ ID NO: 332185 - DNA, 536 bp, Cannabis indica
ttctcttctttggtccacaacttcctatttctcagctgccatagagtgtacaccaaaccggcaatacctgctgtaaaaaccagcagcttgaattttgattccttcaatcttcctagccatttgatgatgttgggaaggtttgtatgcattgttctcattccgagccagcccttgatatcctgcaagtaaatcagtgtgttcggacaagcaaagaacaagtgttctgcagtttcagatctatcacagcagaaaatacatgttgtatctgtgatgattttcattttgaagagtcgatctttggttttgagtcgttgatgcattgcaagccataatatgaagtagtgttttggagcattaagacgactccaaacctgtcttgtccactgaagcttaggtggattttgcaccagcaacttataccctgccgagatggtatactggtgcaacatcatgggctggttactcattttaaattgatccttaagcctcactaaacatctccaataccagctggtttggcttgatgtttcataggc

SEQ ID NO: 332186 - DNA, 887 bp, Cannabis indica
tgtgcatccttgaactccgtttaccaggttcaagacatcagcaacgccatggctgtggtatgtacttgcggtttatctcttcccttgatattttgtccaaggcattcgatcttactcttgtctcctttttcagattactgcggagaccagccgcctttccaagaccatagttaatcatggtttcatcatgtccaaatttgggggcatagacgaggctgtgaggatcctgcgcgacctgtctgctgaaaggcgggcgatccaggaggaggctgatcgaagggaggccctcgcggaggcgaagctcagggaggaggccaaacagagggaagcccaagcggaggcgaagctccaagaggaggccaaacagagggaggctgagctggaggcgaggcatcgggaggcactgaaggcggagggtgaggccgtcgccaaggctatgcgtgagcttcgggaggtcagggaagccatggacgagatggctgccaaggtaaagtccttagaggaattgcaccaggtaacctgaccgtggaggtgaaggagttgagggacttcaaggatcaggccttgaaaaaggccaaaagagaagaactcctaacccctatctcctgtaagcactgtgccaaacgctttgctgatggcgtctacatggcgtggcagtcgaacggccagagcatcaaactcgacttctatcccaagcctgaggaggctcttgccaaatcccgggagaagaagaagaagcttgatgctatgcttgaagcacgtcggggccctcgccttcctcctcgtattgacaaagccgctgagtccagctcatttcatcatgattatttctttttttttttatttacagctatttttcttttcttcaagacaatcttaattatgta

SEQ ID NO: 332187 - DNA, 721 bp, Cannabis indica
cccaagtcttagttaagtgggatctttgtaatccttacaatgattttcgtcaattttaaagagaaatgctaaagggtacgagtggtacctatcaccctcctatgtgtcaatatcgctattggtctaactaagtatcgggtcccatataatttaatataatagcttttagggagtaacgctagccaatcgtaatgcgacatgtcaagaaagtgctagacaccactggtgcctaatagcaatgctcaattttaaatggtgaatcctcatgagattattaaaattttattttcttcttaatgcatttgagatttttcagcaaaaaaattgtaaaaaattctacactcaaatactattaatatattttaaaatacaaggactatttgaatattgtaataataatatacaatttttttaaatgaattatatacaaattcttattttaaaattctattcctggctgtgttgccgtgagagttttgtccctgttggtttggaagctatcttggtagctgatttgatttaataaaatttaatttttttggctaaaaaaaatggcaaaaaagagttgtaattatattaaaaaaataacattaattatctaaaaataagggtaaataccattttgaaccctgtgttttacaaaagttacagattagaccctgtgttttgttaaatgacaaaatggaccctgtattttctaaaatagtaaaaataggaccct

SEQ ID NO: 332188 - DNA, 1301 bp, Cannabis indica
acattgggcacaacaccaatgaatgcaaaaatctcaaggacgagattgaaaacttgatccgattgggacacctctacgagtggatacaaaaaccggtttccccatctcaacccaggtcaggcggctggagctttgccacaaggagcaccagggggtgcagcaggagtattggctccagttgttccccctggagatgcccagcatattcccgacctgccacctagacccaacgtgagagtagctatgatctcaggaggaccccacatcagaggaactacccgcaaggagctgaaatggtacgcaggggtcgtgaaacacgatgaggtttgggaagttactcaactcccagctcaaaggccccggctgatggatcaacccattacattcacggaagaagacgctaaaatagtgcgttttcctcaccatgacccgttggtcataaagacccccatttccaataagatcttggccagagtcttgatcgacaatgggagttccgtgaatctgctgttcaaagaggccttcactgcaataggcctaacagaccgagacctttcaccaagtggttcccaactcacagggttcaatggaacaacacttatccctatgggaaaagtgagactccccgtcaccttatgcccggacacaccctagagcaccttcaagtactgcacgtttgtggtggtggactgcccaacaacctataacgcaatccaaggccgaccggccttggtggactttggtgcagtcacatcaatacgacacttgtgccttaaattcccaacccaggaggctgggatagggactgtgaggggaaatcaaagggaggccaggcagtgctataacgttgccccccacctacccgtgctgatggtccaagaaattattgagccagaaatggctgaagaagatgagttggatcccagtgtgggatccgaaaaaatcgtagaaccaatggaggacgtcgaggaagtgtcggtgtgcgacctcgactccaccaaagtactccggctaggaaagagcctagaaccggggaaaaagaaaaataataaagacattgaggggtgccattgacgttttcgcatggtgccaagaagacatgaccgacataagtccccacgtcatcacccatgtcctcaatgtcaacccgaacatgccgccggtccagcagaaacgacgtcccctcgactcagtgaaggccgaagccttagagaaagaggtggacaaactattaacgagtggcatgattcgagatgtctactacccagaatggctagccaatccagtcctggtgccgaagc

SEQ ID NO: 332189 - DNA, 842 bp, Cannabis indica
tggcagaatttttcttttctttttgtgccctcttttctgaaaaatggaggttgccttctttttgagaacctcttaggttttgtaccatttgcccaacataaatcctacacatggcatgaatctagcctctccaagtatttgctccagccaccactcctagaacgctatgtcatctccacaattgccaccacatttaatgaagtgccatctcatcctttgtccaagcaattttacacagcctgctactaacctatttgttgcagcaaaaacttcactgaatttcagcaaagttaacaacttgactaacttgctattttctttgccaatttatacacaaaagttattgatttctaactaacaacctcaaattacacacataaacataaaacactgatactttcacaaattaaaagaaaaaataactaaaatgacacacaattgcataaaaaacatgtttaaagtgatatcaaataactctttactcaagagttatcaatcccttcagacaagggcgtgtctgaagcttgccccccacctaaccgaggttccttgcccatggaggctgcacgcagcctcgtgtctcgacaacttccacgcgcgcaggggtatgcaatacatacccatgtgcccaaattttatttttgtgatatcttttgattcaaaaatcatttttcattgaaataaaaatcaaattttgttagaattttgtgtagaatccaaattttcaaataaaaatctaattattagaataaaattaatttttattaattttttaattaattaaaattagttttagatattagtagcctttgaatttaaaaatttaatttttccacaaacta

SEQ ID NO: 332190 - DNA, 544 bp, Cannabis indica
gtttttacggaactcaattacgataaaattaaaaaagttatgagagtttgaaaattgggtgtccatgggtgtcgaagcttggtgcacgcacgcacgagaggcttcggacaacacccatacgcgcgcgctcactcagacagcctgctgtctaaagtgcacgccttcagacacgagaggttgcatcacgccgagggaaaccctgttggcgccgagttttgtcgccctctcaccctgcaattctccacttgcacgcgcgtttgtggctgcacgtgcacccctcctgggcagccacctccaaaatccgaattttgtgggattttttcccaaatttcagatttttcaattttcaaaccctaatatctaattaaaatattatttttatcatttaaacctaaatatcaatattctaaattaataatatttattttttaatagattattattattttttgatattttgaggtttaaatttaaaaattgattattttaattttttaaattatggtcagatttaaaaatttgttaatttctttaatatttatat

SEQ ID NO: 332191 - DNA, 597 bp, Cannabis indica
gccagaactacttcttcttgctcgtgttgtactattcgggcatacatctaccgggctttgcctgaatcttcagctatgtgcggacctctaataatgacctgtagatgtccatctactggtggtagtagcaagtcttgcttgttatcgcccctcttattctgatcggccttgacatacttttgcacatgcaaattatttttccttatcaagaattcgatttcctactttagattgttgcattcatttgtgtcatggccataatccccatgaaaacgacaaaacttggtcatatctctctcgctgacatcttttttcatgggtgtgggcttcttgtacgtggctaatgattgagtagccatatacacactttctatatcttccgtcaggacagtaaaggcagtatacttggcaggattctcctggggagcttgttcggtcttaccagtgaactttccctattttccattcccttgcctattactgttgttggaccgtttccactcgagcttgaattgcttgggtaatgggggagctggacagatgtcccagtcgaaggagctttcgactggctaggtttttgttcaccctctgctcact

SEQ ID NO: 332192 - DNA, 652 bp, Cannabis indica
ggtcaggaggattcctgaacaggtgcaggcaccaactccacccatgcccgtgctgcctgaggtcaagaaaggcaaggaggtgctggctcaccacatgaaccggctggttcctgaggtcggcgatcagctggctggtgctgacaactcatctctggatgtgttggtgggcggagttttgaaggagcttaccagggttagtcttttcttttcgacacttcccttttagcttttaatacttagcttcatatactgactttttcctttatgcaggccggttcgaagttggcttatacctactcccgggctaaatctgctacttcctagagtacgactctgtgcaacaccttgagggcggaggcggacttggcgaagaaggaagctgaggaggccagggcagagactgcagctgttcgccatgagttgggtgaggccaacaagaaggatttgtcgctgagaagaaggtcaccgtgctgacaaaggacctcgaggctgctgatcgctttgaggaaaccatggagaccttatctgctgaagttgatcgtcttcaagatgagaggacttctcggcagtaggtcctccttcggctgaaggatgataaggatgcccaggcggtcgaggcgaaccgcttgaaggagaaggttgatgctttgga

SEQ ID NO: 332193 - DNA, 4206 bp, Cannabis indica
gtgagagcaaaatacatgagcggttgaatagggtggaagaaggagcacaacggagaccaagggggagaagagtacaccaaagggggaatgaaaatgaaggagatttcgaaggagtagtttctgatgaagaggttgataggatgtcgacgggtaccaataggaggtatggtgggaatagagaagataggaaccaagtagacaattatttggggaatataaagatgagaatcccagcctttcaagggaagagtgatcctgaagcatacctagagtgggagaagaaaatggagttagtctttgattgtcacaactattcagacatgaagaaggtaaaacttgctgccattgagtttactgattatgctattgtttggtgggatcagttgtgcactaacaggagacggagtggagatcgccctattgaaacatgggaggcaatgaagagggtaatgaggcgacggtttgtaccacctcattattatcgtgatctctatcttaagttgcaaggccttcgtcaaggctacagaagtgttgatgagtattacaaggagatggagatggctatgattagagccaatgttgaagaggatcgggaggcaacaatggcgaggtttttaaatgggttgaaccgagagattgctgacccaatcgagctacaccattatgtggagttagaagatttggttcacatggcaatcaaagttgagagacagctcaagaagggtagttcaagttcgagatcaaggccgagcacacacaagccaagtacaacaccttggaggtcgaactatccaaagaaggatgaccaacccagttcatcatctacaccaaaaccatccactacagccacgccacctcaaggtaaaacaactcaaactaagtctcattctagtgagataaggtgtttcaaatgccaggggcggggacatatagccagccagtgtccaaaccaaagagttatggtgattcgggaaagtggagaaatagattctgaagatgaagatgatcttgctgacatgccaccattggaagatgcttctgacaatgaatatggcccagaatctggagagatgcttgcactagttacaaggcgagtcctgaatttgcaagcaaaagaagaggcagaagaagtgcagcgggagaacatctttcacactcgatgtcatgtgagggacaaggtatgtagtgtcattattgatggaggtagttgtactaacgttgcaagtgcttctatggttgacaagcttgggcttacaacgcttaagcatccttgtccatacaagttgcaatggttgaatgatagtggtgaagtgaaggttacaaaacaagtacttgtttcatttcgcattggcaagtatgaagatgaggtgctgtgtgacgtcgttccaatgcaagctggacacctccttctaggaaggccttggcaatttgatcgacgagtacaacatgatggcttcaccaacaagtactcatttactttccgtcagcgggcaatcactctagcgcctttgacaccaaaacaagtgtatgaagatcaagcgaggttgcaaaaattgagtgacaaaaagaaactgagtgagcaaaaagagagtggaaagatgagtgagaggaaacagaatgagagaaaaagagagaaaagtgtggaatcaagtgagagaaaacaacacttttatgcaaacaaaagtgagattaagagagcattgtgcacaaaacagcccatgattttactagtgtataaggaggctcttttaaatgctaaccaacttgattcttcgctgccaagtaccattgtgtctcttttgcaggaattcgatgatgtatttcctgagcaggtaccacatgggttaccacctattagaggaatagaacatcaaattgattttgttccaggtgcttccatcccaaaccgaccagcctacagaagcaatcctgatgaaacaaaggaattgcaaaggcaaattgaagaattgatggagaaaggacatgtgagagaaagcatgagtccttgcgctgttccagtgattctagttccaaagaaggatggaacatggaggatgtgtgttgactgtcgagccatcaacaatataacggtaaagtatcgacatcccattcctcgtttagatgacatgctagatgaattgcatggttcttgtgtgttttcaaaaattgatctcaaaagtgggtatcatcagatacgtatgaaagaaggggatgaatggaaaactgcttttaaaactaaacatggtttgtatgagtggttagtcatgccttttggattaactaatgcacctagtactttcatgcgcttaatgaatcatgtattgcgtgctttcattggcaaatttgtggttgtgtattttgatgatattcttatttacagtaagaatttgcatgaccatgtgttgcatttgcaatctgttttggaagtccttaggaaacaaagtttatacgctaaccttagcaagtgtacattctgcaccgataagcttgtattcctaggttttgttgtaagtgctacaggtattcaggtggatgaggaaaagatcaaagccatccaagagtggccgacccctacatcgataggtaatgttagaagttttcatggacttgctagcttctacaggaggtttgtgcaaaattttagcacaattgccgctccacttacagaagtaataaaaaaaaatgtgtcattcaaatggggtgaagctcaagaggaggcatttcagctgctgaaatacaagcttacgcatgctcctttacttgctttgcctaacttttctaacacttttgaaattgaatgtgatgcttctgggcttggtattggcgctgttcttatgcaggatgggagaccgcttgcatactttagtgaaaagctaagtggggctgccctcaattaccccacttatgacaaagaattgtatgcactagtgcgtgccttagaaacatggcagcactatttgtggccaaaggagtttgtgattcgcacggatcatgaatccttgaaacatttgaaaagccaacacaaactcaacaagagacatgcacgatgggttgagttcattgagacctttccttatgtcattcggtataaacaaggtaaggagaatgtggttgctgatgccctttctcgcaggtatgctctaatctctactcttgatgctaaattgcttgggtttgaacatataaaagagttgtattctgctgaccatgattttggggaaatttatgctctttgtgaaaagactgctgaaggaaagttttataggcatgaggattttctatttagggaacatagattgtgtgtgcctaattgttctgtgagagatttgcttgttagagagtcccacgggggagggttgatgggacattttggagttgctaaaactctagctatgttgcaagagcatttcttttggccccatatgaaacgggacgttgagcgaatttgtggtaggtgtgtcacttgtaggcaagctaaatcaagagtgcagccaaatggcctttacacacccctacctatccctagttcaccatgggttgacatttctatggattttgtgttaggtctaccaagaagtaagcgtgggagggattcaatctttgtggtagtagaccgattttctaaaatggctcattttatcccttgtcataaaactgatgatgcatctaatgttgcagatttgttctttagggaaattgtgagattacatggtatgcctagaacaattgtatcagatagggatgctaagttcctaagttacttttggaaaacattgtggggaaaacttgggacaaaattgttattttctactacttgtcaccctcaaacagatggtcaaacagaagtagttaataggaccctatccaccttgttaagggcaatcataagtaaaaacattaagacttgggaagattgtttgccacatgttgagtttgcctataatcgtgcaatgcattctgctactaaattttcaccatttgaaattgtgtatggttttaatcctctaactcctttggatttatcacctttacctgtttctgagcatttgaatttagatggcgagaagaaggcagaatttgtgaagaaattccatgagagggcccgactcaacatagaaaggaggactgaacaataccttaagcaggctaacaagggtcgtcacaagcaggtttttgaaccaggtgattgggtatggttacacatga

SEQ ID NO: 332194 - DNA, 763 bp, Cannabis indica
ttagttttagatattagtagcctttgaatttaaaaatttaatttttccacaaactagctatatgtttaattttgaaatttttgattatttttgtttattttaattataagatcatatattacttattctattattaaatttgaaatgatcttattttgatattaaaatattaacaaaatttagagataatctaattaaaattttaaatttgctaaccatatcagattttcaaaattttttatttttgaaatatattttattaaattataagattaggaaaatgttagctttgacattttatcttattagatatttattttaattaaaattttatttttggtaaaataacatgaaattttagaaaaatttgtttattttggtttgaatagaaattttagggtttggtaaccataaacttttcaaacttaagatattttattttatttaattattaaataaaattgataatatactaaccatcaaatatcttatttgtcaaattgtttatttttgttatatttaatttattaaattataagattagaaatataatattacaaatatctaaattttaaattaagatattacattatattatcttattagatatttaattaatttaaattatttaaataaactgaaaaatttgaaaattagttagatatttgaatttcagttagaatttaggatgtttaggagatttgttagtttttaaatatttctaacaacctaaattttaaattgtagttaagatatattttaa

SEQ ID NO: 332195 - DNA, 870 bp, Cannabis indica
ctaaaaaaatagaaaactaaatcaatgtaataaagaaaaatataaccaagcattaatggtgataattaatatagtgattttgacatccatatatataatatttcataacactcccccctttttctcgataaaatcataacacttccccttaaatgtcaataaaaactacatcattaaaaatattgctaaaaaatttcatcaaaggaaaaagagtcgtgcagtgtaaactaactccctttcatttaggcattcgtggagatcttctaatcgatgaagtccaatcttatgagccatcttctcaaatgttgatgttggtaatgactttgtaaataagtctacacgattgaaacttgattgaatttgttgaacaccaatatgcattctcttgaaatgtataaagaagaattcggtaaaatgtgttttaattctataacctttaatataccctccttttaattgagtgatgcaagcagtattatttacatagagtactgcttgtattgatacttcttgattaagtgtaatctatatttttttttgaatatgttatgtcaatgatctcattcccacacattctctacttgctttataaagtgcaagtatgttagcatgatttaaagttgcctcattaaaaactttgtgaggaaaactcagtgagacaaaagctacgctaaggaaaaaagagtgcgatatatattcataattatttgcaagttggcttgttaaaaatcttactaggaaaacaaagtgataagacctgagctaagggaaaaatagtacaacatgaatacgtctctcctcatgcacatatgattcataattattttggtgataatatattcataagattattgttatcacttttaaaat

SEQ ID NO: 332196 - DNA, 1230 bp, Cannabis indica
aaaaaaaaaaaaaatagtgaaataaagaagcaaataaatcaaaaaagaaattaacgatgattaaagttagggcttcgatttcaattgtatctattgattatgacctaatatgattatcttcctattaccaatttctatgcaatagcaggtttactaaggtaatttataatcttctcaaatatataaatctcaatcatatgtaaattttctactctcctgataaattaaatatgtaacaggcattaaacacataaacactataagctatctagaccatatttgtcagtacactagatttagactgacataataatcagtgatagaacttccttacaccttggataagtgttatgtcctttccaggatattggcaaagtatgctaggatcggatgtatggagtatacatcagactgaaccgatattgagcttggataagatatcataagcttactgttatatctatctaagtcaatatccgttagttgatcttaggtcaatagatcttaatcctaatataattaggttttgctcaactgtattatttatgttcttagagttttttttattaaagctagaacggctgaatacttacatcttcagaacatgaaagtgtaatttagtgggagcgttaattatagatatggaatctatagcttctatgaatatttagaagtgaaatgatgatttctttcgagcttgacttaatagagataaatgattgaggtctcattttggttattatattagttcactaaaatatcatttatagtagctatgtgttttaatgataaaatacattgaagggtagaattgtccctatttgatgtagatcatctacagaggatctttgactatttggattagaacgatggataattcctagcgtatttatatcttggcacatatagagtgttctatataattaagagtaacatttcgaatctatagtggcacaaggaggaattaatcagttagatttacttggtaaattctagttttacttattggaagcttgattatatataggcccatggtccccaaacctagttgagataatactgcttgcaaactcaaataattaattttaattaatcaattataattctaaaattgaactatgtcttatttataaatttttcactaagcaaaggcttattatgaagaaagattttggagtttatatgttattaagagactttgtaaggtctaattaataaatagtataaatg

SEQ ID NO: 332197 - DNA, 632 bp, Cannabis indica
ttagaattcatattaggatgtgaatgaaacatacttggtagtaaatctagatcctggtaaaatatttccaacaaagtcatctctgcaataaagtctatggacttagagatgaagaatgacaagttggggagctctaatggtgagctgaacttgagtaggggaaggcctcatgaaaggaagccttggaacaatagaggaaggagtaacagcaaagattcttccaagggtggaagacagggaaatcggaagtctccatcaagagggcagaacgatcctaaaggctgctatcactgtggtaaaccagggcattttagaagagactgttatttttggaagagatgtaacagaggaagaacagatggtagcgatggtgactcaaatcaaggagaaaatcattaaggaaaagggaaagaaacatgaagccaatctaagtgatggctatgagagtggagaagtttacattacagcaactaaattcaaagatgaatggattttagattcaggatgcacttttcacatgactaataatagatctttactttatgatttcaaggaatctaaaggaggaaaggtcatcttaggcaacaaccaaacatgccatattgaaggcgcaggtaatgtgagctttaaaa

SEQ ID NO: 332198 - DNA, 1489 bp, Cannabis indica
agatcctggtaaaataattcccaacaggcattactaacatccagctgttttacttcccaattggaggtgacagcaagcgatagaacaatgtgaacagtggctggcttcacgacagcactaaacagttcagcatagtcaattcttggggtttgcaaatatcccttagcaacaaggcgagacttgaacttatccaatgttccatcagcattgagtttgatccgatgaacccatttgtgtcaatgatatgcatgtgaggttgataaggaatcaatgtctaggtgcgggctttctttaaagcatcaacctcatgattcattgctgccagccatttggaattgtttaaagcttctttaagtgttcttggctctttggggaagagagcttcgggtaaaggatgtttagaagctaaaaacgacttaggtttcttgatgccattatgagcacgagttgtcattggatgagttctttgtacacctgcagcaactgaattatttggagcagatgggttgattggaacgggtgatacctgtggtatagagggttgtgtctgaagtggtaaagggggctgtgtttgagatggtaaagggggttgtgtctgacgtggtaaagggggctgtatctgaggtgatatagcaggtgtagaattattatatgaggaaggttggctacttgatgtaggttgtgggtcgggttgtgtggatataataggattaggtttaacgtgtgtttgggagacatgttgaagatcgggtgagggtgatataggaacaggtacatgatggtgtggaggatgaaaaacagtagcattagaagatgtcacactagtaggaaaataagaaaatgcagtaggtaaagcattggaagaaaacaagtgtacctgtgaattggagtttgttgctgaagttgtggtagcacggaaacaagtttcatcaaagacaacattccgtgctatgtaaattcgtccttgagagttctcacaaagatatcccttatgatgagaggaatagccagcaaaggtgcacatttcagatttgtaatccattttatgagatcgatatggccttagatggggataacaagcacacccaaaggtctttaaaatattgtagtcaggttctctttgaaatagacattcatatggtgtgagaaaatccaaaacagcagtaggtaacctgtttataatgaagacaacactttgaaaagctaaccaccaataagacaagtcaaggccagcctgagcaagcatggtgagacccgtttctgtcacatgtcgatgttttctttcagcacgaccattttgctcatgatcatggggacatggatgtgaaaaatgaatcccttgatctcttaaaaactttgcaaagggccggtattctcctccccaatcagcttgatctctgataccatgtagaaatgaaaaccaatagaaagaggtaaaaaccagagaaaactattgtaagaaacagaggaaatgcaatggaatcattga

SEQ ID NO: 332199 - DNA, 554 bp, Cannabis indica
aaaaaataaaaaaaaaatagaggtaaaaattaaaacaagttaagtaaagtgggtatacaatgtaattgcatctttttatatttatttaggtccaatatatgaaggccaatctaagcccactaattattgtattgttgaaacttgaaacttttttcatatttattttcaagccttagggcatttttgacaagtgttgctcaaattttgttgtatttgtgatagtttaattatttagtaatagtccaaaccgcgaaaaccgcataaaccgcaccgcaccattttttgtggtgtggtttttacgttttttaatttcgcggtgcaggtgcggtttgggaaattgaaaaaaccgcatgtgtgggttggtttgaaaaaatagtcaaaaaccgcaccgcgaacaccactaatagcaagttgattattatttgaaataatcaacaataaaactaggggtgttcataaaatagccaatccaatccgccaaagtgcggatatccgcacttgtgcggattagaaaatttaaaataccgcacttgtgcggattgaatgttgattga

SEQ ID NO: 332200 - DNA, 1137 bp, Cannabis indica
aaatgcccaattttgctaacggccttgtccctagtgcccgtcaaccacttgaagtctggttgagagaagtagaagttacctgacctgccttgcttaggggtggacttcaaatcaaaaaacagctaacctcgtgaggagagggcatatcccacttttaggaggcatagagaacgaagagggcagacagatacttaatgcccttgggagtaaattgggtcagacagaggcagaagaagtctaccacactcctaaagtacgggtgcaaaggcagcaatgccccttgcttggcgtgagcacctgaccaagcgcgcattcccctttcagggtttgtggctcggttgttgtgggcgagaatgtaacactccgattcacccaggtagccatccaagtcgagatcccgcaagcgtgcctcggtaaccttggatggagggctcacccacctgggacccaaagtaccttgccttctatgaggaatcacagcagtaagttccccattggcataatccacgcccccaaccaggacgtcgccatcagcatcaactggcttcccggcctccttgtatcccccataatttggaggtgaacctcctcctcttcctccacctcggaggaactactaggacgaacatcgtcctgctcctcaatctcttagacctcagcgtccccttcatgatcctcctccttctggatggatggatcctgttcgacgctgggtaaggtggtgtgctgggccacttaagggtcagatgcgtcgactctacgcattttcttttttgtgcgagccatcatcctatggctggacagaagacttaatctagaatgcctgtcactcgaagaagttgggctaaaacgaagacgagggtgatcctcgtgcaagagttgaagcagatcctggtcgatttggtgttcacttccccaaaactcacctaggttcatctacaaaagacaacacacaagatgagtgtttgttcgggatattgaacattaaaacaggcaaatatgccaaccaggagtactcaacaaatcaaagaataagaatatccagcgaaaagtcaaaacttcagaagtttgaaatcttcccgagttagggcagaaaattcatgaagcttagaataagcaagatgaaagataggcatt

SEQ ID NO: 332201 - DNA, 978 bp, Cannabis indica
atagagaaactcactttgcttgattctagcaacagaaagttaaggccctatttccaagctcatcgtgttcgggtgtaaactaaccaacccttgcgccagatattaccaaagtcggacgcctttggacggctactcaagtgggcagtagagctgggtgagtatgaaattactttccaatcccgaacagaaatcaaaggtcaggcctaagcagatttcatggtagaatgcacaggaaaggaagaaagcatatcagaaagcaaccccaagccagtacaaataccccagccaagcaacagtgaagacaagtcgacttggaaactgcatgtggacaggttggctacagatcaactatccggtgcaggaatcgcccttgtcacacctgggggcaacacatgcacgctgcaatcaagtttggatttaaagcatccaataacgaggttgaatatgaagctttgattgctggtctaaaactagcccgggaaatgaaggccaaacacgttgaaatcttcagtgattcatagttggtggtaaaccacgtatttggagaatacgaggcttggggagaaaagatgatagcatatttgagcaaaatacatgatcttctagacagttaaaaagcaacactctcagacaaattccaagggaagaaaacacaactgctgacgcgttagctcgacttgcaagtagtgatgtaagtgatagcgcaaatctggttcctatccagttcctcgaagaacctagcatcactggcacagaagagattgaaatgattgatacttccccaatctggatgatgccaatagcgacttacctcaataatgggaaactcccagataattgaaatgaagctcgaaagatgaaaaggaaggctatacggtacatcatagtagagggaattatgtacagacgaggattctccatgccattgctcagatgtgttacccaagaagaagctgcacgacttttgtctgaagtgca

SEQ ID NO: 332202 - DNA, 1655 bp, Cannabis indica
gcgaggtatatgcgagaatctctaacatttatgacacttattgacaaattcatgggtgtctttgtttatggttggtcaataatatccttgtcgaataatcttctttgacaagctctgccaacctgcatggtccccacaaaagccgtcatggatttctttgatgattttgttttcttctgcgggaagaacataccataggagaggcattgaatagccccttctatacgatttgctttctactatcgtgtagtgaggcactgaatataggagttttcgtgcctcatttttgttagttggaagttgtccgttgagaagatagttgattatgggtgtcatccatgtgggcgagctatctatcatctcgacatcttccttttcatatatacttggttcgtttgacatctccacctgaaccaaatttcaattcatccaattcattctgcgaggctagttttgctaaggcatcgacattagagttttgttctcttagtatttgcttgattttgaaataatcaaacttttccaagttcttgcgaactttctctaggtactttgccatttttaagcccttagcctggtattccctgagaaatttatttacaatcaattgtgaatcactatggcatatgagatttttaactttcaacacttcaactatcttcaaaccagcgatcaaggcttcattctcagccttgttattatacgtgtcaaattgaaatctcaaggcatagtgaaacttaaagccttcaagtgaaattagtatcacccctacacccgagccatgctcatttgatgcaccatccacatataacttccaagtatccgcgtctcactgaacaagtagattttcttttagagttattccttctatcaggaaatctgccaaagcttggcccttgatggatgtctgtgggtgataagttatgtcaaattgccccagctcaattgatgattttatcaatcttctagaagcatctggttttgataaaacttgtctcaaggcttgatcagttaacaccttaatcggatgtgcctagaagtaaagccgtaaattgcgagatgcgtggattaggcataaggcaagttttttaagagggggatacatcaattctgcccccagtaacctcttactaacgtagtaaacaggttgctggtgctttccctcttctcgcactattgcaatactaattgcatttttcgagacaaccaagtggaggagtaatgtctctccagttattagtttcgccaaaacttgaggtgttcacaaatgtctttttatgctcttaaaggcctcctcgcattcttctattcattcaaactttttgttgcctcacaatacattgaagaatggtaggcacttatcagttgactttgaaatgaatctgttaagtccagtcattcttcctggtaaggcctgaacttcctttgctttggttggtgatggaatatctatcaaagccttgatcttctcaaggtttgcttcaatgcccctcgcgttgactatgaatcccaaaaattttcctgagaaaactccaaattaaggaacactttttcgggttaatttagcttcatattgtactttcttaatatctcaaagcactccacgaggtttgatgtataatctccactctttatcgacttcaccaacatatcat

SEQ ID NO: 332203 - DNA, 918 bp, Cannabis indica
atgacataatttgaggtgaagggaaaaaaagaaaagctggagtcaaactattcaagatcaaacttacttgagttgtctgatctataatagctccatgattcgaagcactctgccttgtttttggtcagctggaagttgcccgttgagaaggtagttgactataggtgtcatccaggtaggcgagctatctatcatcacaacttcttccttttcacaaatacttggctcgtttaacacctcgaccggtaccaagttcaattgatccacttcattttgcgaggccagttttgttaaggcatgggcattacagttttgttctcttgggattttttcgattttgaaataattaaacttttccaagttcttctgaaccttctctaggtaattttccatttttaagcccttagcctggtgtttcccttggacttgatttacaagaaattgcaaatcgctatggcatataagatttttgaccttcaacacttcagctatcttcaaaccagcgatcaaggactcatactcaacctcattatttgaagtttcaaatggaaatcttaaggcctagtgaaacttgaagccttctggaaaaattagtattacccttacacccgagccatgctcatttgatgcaccacccacgtacaacttccaagtatccgggtctcgctgaataagcaaattttcttgtgaagttattccttctatcaagaaatctaccaaggcttggcacttgaatgatgttcgggggtgataagttatgacaaactgcccctgttaaattgaccattttatcaatcttccagaagcatccgattttgataaaacttgtgttaggggtttatcagttaacaccttaattgtatgtgctgggaagtaacatcgtaacttgtgagatgcgtggattaggcataaggcaag

SEQ ID NO: 332204 - DNA, 566 bp, Cannabis indica
ctaaacttaattaagtgttgggcccgcgagcttaacattagaatatgaacaatcacctttctcgttagaagacgcatacgttgttgcatttagtgaatagaaactgctactcatttattgatgtttacgttaattagtttagttattgtaattcaatgtgtaaacggattgacaatgaatgcaatctttgtataactaattggacacttgctttgtatataaaggggtgatccaccgtgaaataagacctacaaaaaactcttgctacagcggactaagcagaccgtgatctgactgaaccactataatcctctgtcttactgttgtttccagttttctgttaagcattcatattcccaacttgagtactcaccattataggttgaatactcgcaactgttcctcaagcaatctcttcttgtcattaatattattacatacatttggtgttccaaattttgctcgacaatatttggcgccgtctgagggtaatcgagaattagttttattcaagaaagaaaatcatcatggctggaaaccaacaaatggaggtgctaacaacgagt

SEQ ID NO: 332205 - DNA, 631 bp, Cannabis indica
aaatagaaaataaaatacaagaaaagtttaaggtaaagagagcaaactattagcctaatctcaatctctttcattttttgtacttctcctccatttcttcctttttttcttcttcatcctcttgagtttctttgaataatggctgccaataattgtgttcttccctccaaatggtgtaacagaggctaggttatattccccctctttttcacaaaagcatctttcataaaaatctattcctcatgtgccctaggaattttctagagaattcctcacaaatcagccacaatccacatgtattaatgccacatcaactatttttcgccacatcaattaatgaattatcacatcatctttttctacattagtttcaataatcagccctgttacttttgttgcagtaaggttcctgcaaaactttagcaaaaccttgcactttctctattaagccattttctttaccaaaattcaaataaaacttaataattcccactaacaactccaaattacccaaagaacataaaaatacaaaataacatatattctcacaaaatgtgaggacaagaactaaatataagtaaaatacacacaaattaagctaaaaaacatgacaaataactctttattcaag

SEQ ID NO: 332206 - DNA, 673 bp, Cannabis indica
aattaaattttgtgagggtaagttaataggtgcattaattttgaaaattaatttctttccataaacattaattatggatatttgagaagaaaaaataagaagattaattatggataaaatcaagaatttttgttttgtttttttttctttctagaggataaatataaaaatgtcagtaggtccaattttttgtttttttaaattttatttttgtaaggaaagtaggtccaattgatttcataaggaatatttgaaaatgaaaaataggacattgtttatttattccttattttttaaaaaaagaaaaaaactgttttattatttatttattttcaccttttgcttcttcttcaacgttggggttgggtagcctactataacgccaaaccgaatattgtaatatagagagaaagagagagagagactcacagctcgagtgcgtggcttctcttctcttctggctgtgcttgtttacttaaagagagagagagagagtaatatagttagtcgtagtagtgaaagagtcgaagagggtccattgtccaccaccatcaatctacacttgtcttccacccctttgtgttgttagtctctactttactagttctagagagagagagagagagagagagagacagagacagagacaggaggtatttacagatgctctagt

SEQ ID NO: 332207 - DNA, 1066 bp, Cannabis indica
atactgtcttgggatttttttttcttttatactgtaaacactgaaaatgagaaacgaggtctccatcttctacactcgcatacagaaccaccacaacaataccagaacaactgaaaaacaaccattaaatccggtgagatgaagcaaaaacattaaaactattaatattaggacgatcatggtttttctaatgttgtttttgggttgttctactattgtttcgtatgtttaacaattgtaggtttttaattacacatggtaaaccaaccactaaatatttgtttgaggtaaccagaatgaaaaaatcatggacagtaatagtcttaccttccattaaagtggtgaaatctagaagaaccaaaaaaaaaaagaggacagaagctggctgggaaaaaaaacaacataacaaatgcaacaaatgtggaaaactggggcacaacaagagaacaggagaagacatcaaaaaaagaaaagaatgagaacaactaaaaaacaacagtggaacaacaaaggaaaactgaacatatattgcagtatatgatactaaagaaaataacttacgtacaaattttattatttccctattgctattaaaaatagagcagtacaataatattaagaaaaatgtgataaaaaaaaaatgacagaaaacaacattaaaacaataataaaacaataacaaaataagccaagagccatcaaacgatacaacaccaccactgacaaaaatagagctaactataatccagtaaaaaaaaacataattagtaaatacaacaaaaacccagtaaagtttatatggttctagaaaaaataaataaggaaaaaagagaattttttttacttagaaagtttgagttgtctgatgttcttcttcttcctatgtattgttcttcttgaagatattctcatgggatagactctcttcaccaagagagcctccacactcctagcacacccacaaaaactttctctctctctctctatatatatatatatatcttacttttctctctcaaaacccaactaaaaatgaatgaaatgagcaagctttgtaagtttttga

SEQ ID NO: 332208 - DNA, 720 bp, Cannabis indica
agttttttattttattaatttttccttgtaataatttttattggctcacaaaaattttcaaactaagttatttaaaatgaaactaataaattatttttttctgagaaatttacatgctttactaacttttccaattttcttttatttatactgtgacacgctgaatataactttttttgctttttttctttgttttttatttcgacagtatactgccttggttcaaattatgtatgctattattttattttttttggctgattgggacatgggctgttacaaaagtgacaacttatttatttattttaatggatgtaaaaattattatttattatttttaatatttaataattattattttgattaaaaggttgatgggatgtgggctgtcacaaaagtgacatattttactttttcttttatttaaatagatttaaaaatctcacccccatgtctcactattcatcttcttcttcatctttatcttctagctttttacataaatctcacccccatgttctaatattcatcttcttcttctagttttttttttcaagaacttattgtgaagtgagtggtttctatttttttttcaaatttgtagagtttttttattttttatcttaaacttccctatacatttcccactttttttgttggaattcttctataaatattgtttttcctcattaacaatggttgttaaccgatcttcatccc

SEQ ID NO: 332209 - DNA, 1131 bp, Cannabis indica
tattccattgtgctgacaacactataatcattaaaaaatacatatgttctggacttaatagaatttatacattaaacataattatgaaattaatcatgtgaaccatgcaatataaaatgcgatttctgatctttattaattagtaaacttgattattttaaatgggttttacttatggcacaaaacccaacaaaacttcctcccctagggaagcaaggtgcgcagagattgatctttgaccgacgaggaccgagagggggtggaaacacccaaaatggtgattcaagaagtgagaccgatcacttaaggaatctagatccaccaaactccaacaattggtgtgatttacccccagtcaaccgaggagtcacaagcggtcaaatcatgcccaacgtaaatctggcggaccaaggatccatcataggcggctagaccctgccctttccaagactagtcggccatggaggagcactggttgggcagggtctggctgcccaagcacaacaaccaggtgtaagcatggctggcctaggccaactcctgtacctgggaatggtcgggcacggtctgtagggcatggctgatcttcaccatacactctcccaggtatgaatagccaacccctagcttttcaaatttgtagcctcctcaaggagggccagtcaatgaagtccccacattaacagatccttctgtgcaagcacattagaccaactcagggacatgatccagggcatagctggctcgaagcctttagacctcaaacttgatcagccgaggggatcaacattctcggcatatataaatgccctacctctgccaaagctcaaaatgctggtatggaagatgtataccgaacgagagaacccactggctcacatcaaatacttcaagatgcaactcaacctccaaaaggtcactagtgatgtccgttgtcgcttattcccagccatactgtcaaagacagccgaatagtggtactttaaactcaccttggcgagattcaactcttggactgagttctcacaagaatcatatacacaattctcgtcctcgagacttatacgatcgcagttgaaagaccttgtcaaagtcaaaaaaagacaaggggaacctctgaaagattatatt

SEQ ID NO: 332210 - DNA, 939 bp, Cannabis indica
gcatgctttactgttcatttatttttttctgggttagatgttgagcttcctgggaatttttgtttgagtttctgcacaaagcgttagattcctcttcttttgcgtttaggttacttcttttcaccaagtttttgttggggaaccattttcgtcccacgtaatgacactttagggtttagagcagactttgtcttctcgtattttttaccctttttccttttctctcctttacttttttggtaatgcctcttgtcaaggaaaaccttttgaggtttcttttttggtaagtgtccggagggggcctctttccagcggttaggggatccccattccccttttgaattagggtttcgtttggggcctgactgctggattttttcaatctttttcaaaaccaaaaatgtcttcatccgattctaagtcttcaaagaagggagagaaacacttggccaccctggaggaggttatgaagggtcctgtagcccaagaagggcacaagtcccgcgccaacgagtgggaagcagccgagcttcattctaccctgacctgcgcccatcagctggagcagattgtggtggtggcaggcatcaagccttcaacctccgggacataccaccggctgccccgggacgaggagacgcccaaccacaactacgggggctttggagcctggagtcagacacagctcatggccgaggccatgctccctctccaagactatttcattaatttccttgtatttgtcggccttgcgccataccaacttattcctcaagcttaccgcctgctttcaggcttgttcattttttatgctgcccggagctggggctcgcccagtccggcagaaattttgtacttttatgaactcgtttccatccctaaaaagggagataaacttaaagatggtttttacggcctccgagcccatcctttaaatga

SEQ ID NO: 332211 - DNA, 430 bp, Cannabis indica
cttgaaccccattctttccaattgtcatttaagtcttttaaccgcagtgtctgattgcttcgctttcttgaacttgcagaagcatgaaaatacttgctatttttgtcacccaaatgaagccaatgttactttgatctttgctttcagtaaatctcttgttgggcaagaatttacaaaaaaaaatgtattgttcttacatcaaagtcggcagtggagtattggtcattagagcctctcatagtagacaacttttcttgcttttattcaatctcttcttaaaattcccagtgagttcataaccccaagaagaaaaatttgcagtgcatttttttattttatccgacagaggaagatggtaatgctcctcccaacaattcttatcaatttgcatgcaaaatggctcacgtgcccaggaattttcataacgaaa

SEQ ID NO: 332212 - DNA, 581 bp, Cannabis indica
tctctggtgttagggtcactcttcttacacattattattttttgtaaaggcccatttactctttgtgtgatggccttcaagggtatagagaagactttgtctttcttgattttctgcccctcctcttcctttttcttttatgcgcaatgtcactatctgtgagatttttgcacccgacttttgtccaggaaatccttctagggctttcttgttgacagtcgtccggagggggcctctttccagcggttaggggacccccattcccttttttgatttagggtttggtatggggcctaattgctggaattttaactctttttcagaaccaaaatgtctgcatccggttccaaatcttccaagaagggaggaaagcgtctggccaccttggaagaagttatggtgggtcccgttgcccaggaggggtatagacctcgtgccacgggatgggaagcggccgagcttcactctactttgacttgcccccaccaactggagaatatcgtggaggtggccggtatcaaacccgcgacgtccgggacgtaccaccggccgccccgtgatgcagagacgcccaaccacaa

SEQ ID NO: 332213 - DNA, 743 bp, Cannabis indica
ttatttatataaaatatattagtattggcctgactattgtatatctgaactggaaggaacaaagaatatataaatgaaagttttttttagatggacaaaagtggaagttgaatcaaatagaattttatttggttttatatttattaaatcatataataactaaaaatatttaaaattatacgaattatttaaatgaggagtaatttagtcatactagaaatttaagtctacgaaattcaaaacgatggtaccaaatgtgtaggaattataaataaagggtaccgagtgatcattattaaaaacataaggtattaagtttgtattttaaaaaaatacagggtaccaaatagttaattaccgcttaacaaatttattttagaagaggtagaagtctactttttgacaaaaaaaaaaaaaaagagattttattgcaaatattataatcaaatggtttgaatattaaaaaaattacaatgggaatttaggtaaaaataaaatcatttataaatattaattactaaaaaaagtctattaaatttattaattttaatttttttaagtatatagttaattataattaatttaattctataaaaggaatatttacctattagtaactaggggtgcacatgcgcttagttggctaggttaaaggtgttttaataggctaactcaattattgcggtttggatacgctataaatcattcaaattttttaaatgtacaacccaaccctacttagt

SEQ ID NO: 332214 - DNA, 1460 bp, Cannabis indica
tgtttggcaaactcataaaaatcgaatcttgaaatttttttcctttaatattttttttttaactttctaccaaacagagcccttgtctaaaaaaatatttgctgcatatttgaggcgccaaatctaaaagtgggataaaaagtctttatatatcttttatcccattttttatttttgttaactaaaaaagtgggataaaaagtcccctttcttgtagtgttacgcgctggaaaaagttatttttactagtgtttttaattttgtgctggcaaaagttctaataccaacgttaatttgctaaccctttttgccaacatatcagaagtaaattctattttgctttttttgtgttggcaaaagtgacatttcttgtagtgtcctctgaaggtatgatgctgggaaggaggatgtccatgcggctactggttagatcgctctgaggcagaacaccgagttggctgccaaggatccaaacattccttccaagaggaaaatagtggataggttcgcaacaaaagacggattttagacttagctaggtagaaataggtagcaatgtggctctattatttgtggatgtccttgatcaagtatcaacctccatgagtcaattgaggcaagagaggtgggtcatggccgctagtgaggattttgtgttcctcaatcaaactctccgtcatcaggtctgttaatctatttttggcatatttaattgacaaaaatattttattatttattatatattttcggctggagagtttaatttggtgtccatattttgtgtatctaaatttggaaggaaagttgtctagctttcctatttatagaaattgaggtaaaaatggtaagtttgattacacaatttattattatctaaccagctggtatattctgatcttgtgtaagtttcctattttattagatcagatttcttgaatagaaaaatgaagctaaactttctttttctataaaaggaaagttgcacttactgcccacaattctataggtacagaaattaaaattcttgggctgattgaagatttagtttagggaattttctagtggggtggggtcttgtttacaccgtgtgtgagttgtcagcaaggtgtatattgattataaatacaccttatagcagctaggtttagtacctcttttgaatctttgattttcactcatatctttagaaaagagtcttcgttttgtagagaagtgcttgttcaactcttactctgtttatttgtattttgtatgtcttgagtctgtattcaagactacaaaggagaagacgaacaatgctacctttgagagaaggtttttcaaagctttcgggagattgtttttcaagtcttgcatcgggaggaagcaagcactcttcaaggagattgaagggagttcgagcacttgaagttttagcaagattcgattagaagatagaatacatcaagcttgcggcatac

SEQ ID NO: 332215 - DNA, 1011 bp, Cannabis indica
ttagctacaggcattgctcaatcgagcgtcagcccgttctctatactggtgttgttagttcgcaaaaaggatgggagttggcagttttgtatggactaccgtgccttgaactgtgagacagtacccaataagtttccaattcctgttattgatgagctattagatgaaatccatggagccactatcttttcgaagctcgatttgaaatcgggagatcaccaaatcagagtgaagccttccgaggtgcctaagatggcttttcggactcatgatggacattatgagtttctagaaatgccatttggtcttactaacaccccgaccaccttccaataggactgaacattttgagcgggattgatccgaaccccaactggtgaactcgcaaattttttttaaaaaaaattatattcgtgcgggttggatttttatgggtaccgggcttcgggttgaacccgccatcccgcaatttaaatatattatatatatttttattttttttattacagtttatatatatatattaaattattaattaaaaaaaacaaaacctaaaagataacactaaccaccaaattattatatatagtttttgtgagtttttgggtttgaatttgattctcattattctgtttatgtgtcaatactcaatagttgttggcagaaactacaaaattaaaccaccaaatatatatatatatatatgaaggtattgttgtttataatagtattgatattgtgcatgttttgtatattataatagtaatattttgttgttatattatatatgtttaatttcataaataaaaaaataaaagaaataaaagaaataattatttgaataaaaaattaattttttaaagagttgaccgagttgaccgggtcaacccgccaacccgatcaacccaatcaaccgaaacccgccaacccgctaacccgccaacttgtgccctattcgggtctgggttcggtttcatttttttgcacccgaaacccgtgagcacgaaacct

SEQ ID NO: 332216 - DNA, 747 bp, Cannabis indica
ttagaagaaaataactgagttgactaaggatcttgaggcttctgaccgacttgaagagaccatcgagaccttatctgcagaagtgaatagccttcaagatgaaaggacgtctctttgagcagttctttgtcgggtggaagaggagaagaagtctaaggaggaggagcttatagctgaggtggctaggataaaaagtccatgcattagagacaactggtctcgagctcttttatgacttttggaaggctaacccttaggcaaactttgattacttgggtgaagccaaagacatgtatctcgagttttgcgcttcccaagtggcttatggtgagcccagtgcggctgcttcttcctccggccaaaatgctgatgtacctctcgttcaaacaacagatcctcaagctccttccagcccagaagatccgaaccgagagcctgcgactccagctgtttaactacttctcttttatctttctttttatatatcttatttggccataaggccttttttaagatatcacgaccagccaagcggtctttaaacttggaattatttttcattttacagacaacaggctgtctgggcagcttttaatcccggtatttacgtgcttttgttatctttaatgaatttcattctctgtttataatcatcatgcaattgtggttgttttatctttaccaaattctttgtacaagtataagtgccccccaagtgaccgagcaggcttatgactcttggtcact

SEQ ID NO: 332217 - DNA, 623 bp, Cannabis indica
ttgggtgggcgatgacaacactagtttttggaggaaaatgtggacagtaaagattcccccaaaggttagtaactttatttggagagcagtttcgggtatcctcccaacttgtttgcaacttctcaagcgtcatgtggttattagtcccatttgtccggtatgtcatgaggctgaggaatctacttttcatgctttagtgggttgctcttttgctcgagcctgttggagtagatctttggttagtatttgtagttggtcaggtgatagttttggctcttggtttcaagctctttcggcaaggatcagttctcaagcattggaggaagcggcgatggttgcatggagtatctggaaggcccgtaatgaggttgtttggaagcaaaaatatcctactgctgcatcagtggttttgttggcaagatcattccttgatcaatttcgttttgcacagtcacggacgacaagttcgttgtctaacagttcgataagactgtcttcgcgtgtgctttggactacactagtttctgatcaaatcaaggtcaatgttgacggtgctctatttaatgatgttagccatttttggatgggttgcttagcccataaccatgctggtcaagttctcg

SEQ ID NO: 332218 - DNA, 519 bp, Cannabis indica
atcggcataaccatcagacccatcaaaatcaacaagttcttcatctttagagcttgaagcgtcaaagcgagtatcagatggtggcatctctacactatgagcaagtgggaaggattcaatatgactagactcgtcatgctttgcacgcttcgtccgtttgaaatatgggtcaaaagaatggtcattctctgagccaatgtttgattcagtatcagcatggttggcgctagagacagcatggttggcgctagagacagcatagttggcgctagagacagcgtagttggcaccagtaaactcatgatcttgaggaggacatctcacaaaaacctcatcaagggtggagtaaatttcgcgaatgtcttggatcacatatttcgactcttcctcttcatagggttgtttcaattctttatgaatcttcttagacctccctaagtacggaaggctactcctcacccaccaacgacaataccaccatgtacattgacccatacgagtcatcttaggtatatgaaa

SEQ ID NO: 332219 - DNA, 657 bp, Cannabis indica
actccctatcctcaattttgatcgacatagacctaatccaccttttggagatgactaactctccgccaggcagtagggttccaaatcctatttcataactatcatgcggtctatccaatttactaaaaattctagcagccacataggaatgagtgggcccagagtcaaacaacacagagaaataagagttgttgaccgagagctgacctgttaccactgaagggctggcttctacatcagcctgagttatcgtgaacaccctggctagagtgggtttcgctgtagtctttcgtgcttcaatcttgagttggggataatcccttttataatgccctggcatacagcactgaaagcacccctgccctttacactccccaagatggtgctttgtacaactggggcactctgggtaagtgtatcgggtttcagagctaccctgacgatttccttgactctggttccctcggaaccactttttctaacctgagccactagatgcagtatgtgcttttcttttctgatcagaggtcgagtcactacctcccctactaaagctagatgtaggaggagtaggagccccgccaacaaccggagtccctcgagactctagggtacactccactgcgccctcagctcgcagtgccttacccaccatat

SEQ ID NO: 332220 - DNA, 693 bp, Cannabis indica
acagtttcttcgtatgttgcaaggaaggcttgttttgtgtagaaataagagcagaaattgtagcatttgaagtgtctttttgatattactgccattgcatgagaacatggcatttcgtcatattggaatctttgacatgtgcatgtctttttttgaatgtctactatgtacgaactttttaactcattgactgtatatatggcatggtttgatgtttcaacctggaaagttataggaaggtaactgttaagtatttttcacaggttataatgaagtattgttgaaaagatatattacctgcaattttttactgcgatctaatttgtctttgagttccttttctggtccttttgctagtgttgtgagtgtagcaagagctctatttttgtttgtccaactccatctttgaaccaagcagcgtagacattctagtagtgtgccaatgggtaactctcttacttctttcaaggctgaattcacggattcggatatatttgaggtcattgttgagtaacgcttgtttgtgctataaacccttgtccatttattgaggccaacttcatttgtcaagtaaggacgaattcggttgtctatgatgtctatttctttcatgaatccttcaaaatcagcaagattatatgcttttgctgcacaatagaatgcatctctcagctcatctcctccttttctaaa

SEQ ID NO: 332221 - DNA, 1371 bp, Cannabis indica
caagtgcggattgtttttctttattagaaactcaattttccgcctcagattgtaacatttgttagtgtcgtggccgtagtctccgtaaaaccgacaaaacttcgtcatgttcctttacttggtatctttcttcatgggcccgggcttcttgtacgggattaacgactgagttggaatatatacactctatatcttcagtcagaatagtgaatgtagtgtatttggcatgattctcccggggagtctgttcggatttatcagtgaactttcctttcttcccgtttccttgcttgtggttgttgcttgaacgcttgccacttgagcttgaattattggaatagttgggaagttgggcggatgttccagtggaaggagccttcgttttgctcggcttttgttcaccttctgctcgttgaatggcttcttcaagcttgatgaagccttcggctcggtcaaggaaatcactcattgagtctaccggcccgttcttccttatatctttccaaagttcaccgaggacttcaatgccccccagtgtcgcggataactttccgtcctcagttacccgcgaaactttggtcgcttccatcatgaatctattgatgtatgcccgaagtggctcgcctggttgttgctttacttcgaccaaatctccaaaatgcaatgggagctgtcgcgaggaggagaattgcacatggaattccgaagagaaagttttccatgaactaaactttccaggagccaacttgaataccattactgtgcggcttccaatagagtggcggggaagattctgcagcacacatccccccgtactccttgtaaatccatttgcatctcaaagtacttgagatgggaaagaggatcttctctcccagtatacatcttccacgttggcattttgaacttgtgaggtagtggcaggagattgatctccggtgagaagggagttttacgagctcggtctaattcaagatcattattacgctgtccagccatgccatgaaacatatttttcaattcgtcaagctggggctgtacggctgggctgacttgctagcattctagtccatttggattacgtcagcgtctttctgagcgagtatttgagtacgggctccaggctgcacgatcgttgtagtattctgttcgtctgttccccttcttttgtttagatcgttccttaggtcatgggttgctcccaacctttcgaacacagaagagcctggttgccttagcgattgattcgcttggttgacaagtagaataacgccattagactggttggaactctctggtctgactcctcctgatgaattaccggacaaggtctgctcgcctaccgcttggcccacgagcagaactcgtaac

SEQ ID NO: 332222 - DNA, 686 bp, Cannabis indica
aacctctataaaattcttgtttctttacattgctttactatatattgattgctataaatcacttatcgcttactaaataagactcattgtcgttggctaaaagcgaggtcaacattttggtgctttcattgagagaagaatcaagaatcgctcttcattcaaaatctaaccacaaatacgatggtggtgcagactcgtaggggtcaggttgatccagccaattcacagattgtggatccttcattgcagaacctaggaaacataagggttctgccaactgttaatcctagatagccagaaaacgtgcatcacggtgtaatgactgctatagatgaaatcgcgcctagtgagcaagagactgggaataacagtttcgcacccaaccagggcattcataacacagtcgttccgctcgttgccaacactcaaacaaccattggagatgctactgagttacaaaatctttgtgacgttattggactcatgtcgggtcataacaataccctatatcatgatcaggaagatctttacgctgcgggaaatctcgcgttcgaagaacaaaggcgcatgtttaccgagtggagagacagagagatggaggcattaagagttcaccatacagagatttaaaatcatagtcggcaagctaccgcgctgatacgaaaggcctaccaaactgtaggtca

SEQ ID NO: 332223 - DNA, 574 bp, Cannabis indica
attcctacaacatattacggtatccccaaaataatatttattgagggtaataaccctaaattatgccttcatttaattaagaacataaccataaattattgcttccttactttcataatattctacggtaataatcctaaaccacattaaaattaactcagggtactagtttaccgagtctagcttaatcatgccttagacgcataattctttattccaacatatttatcatggtataacatttaacatcttttaactactagggtaataaccctagaccaaacaactgctcattttagggtaataaccctaatccaaattcttaattgatcacaatcacaatattcaatatgagccccactgcgcttaactctacgtgcatactactatcttacctgttgtccttcaaaagcaaagattccaaatccccaggtgccagtaatcctagtcacacaatttgggattttcacaaatagatttaacccctaatttcacattcataaaatatttacgtggaattaaaattcaaaaaattgcatagatctcaaaaagagctttccaacaatataaagaa

SEQ ID NO: 332224 - DNA, 613 bp, Cannabis indica
tggtaagacccttgcatcttgctcttttagtttcttgaattttagaaagaaatctgagtattgcatgccatttttggtgttgctgctgctgctagttgttgttgttgttttgtgttttataatgctgattttggtaagttagagaggttgaaatgcatgctagttatccttgttctagtttgagaatttttagttcaaaagctatggtttttcaaagtgaaattgtgagttttgttgctgtgtttgttgaggtcgatttcttgtgttttcagaggttataatatgcatgtttaagtaggtttgatctgatttggatgcatgttagttagatttaaccaagtttgagttttgaactcaaagcttggagctttaatggcatttttggtatctgtgtgttctggactgttttgatgctttagtattgttctttggggtatttagaacaggtctggaaggtttggtttaagttgggtttgaattgaatgaattatgaatttttgaaagtttcctgcgaggaaccggaattccggttgtgcatccggaattccggatggggttctgaaattcccagaaccggaatttctcgtttttatgttatttggagtattgccat

SEQ ID NO: 332225 - DNA, 888 bp, Cannabis indica
tgtcgattgtctaattaggcaatgataatgtgaatgtgatatacaagctcacttgattaggtgatgtgatatatgggtgccaagttatggcataggattgcctgattaggcaatgtgatatacaagctcacctgattaggtgatgtgatatatggatgctacgttatggcataggcttgcctgattaggcaatacagtatatgaatgccagaccatgacatgagcttgcctgattaggcaatgcggcatctggattccaagctagaccataggcttgcctgattagcaatgcaatatgtgaatgccagactatgacatgagctttcctgattaggcaatgtggcatatggatgtcaacctagaccataggcttgcctgattatgtaatgaaatatatgaacgtcaggctattgcacgaatttacctgagtaggaaatgtgatatgtggataccgatatttgggttgttcttgtgaggccattgtgataaagtcatgactttaaactaaaattattattaggtttcctcctatcagcgatgcttgtttaggcacgggcggcagtgacatgtgagtggcaagctatggcacgagctcgtctatttaggtgatgcattcatgtcaatgatgcttgtttaggcacatgcggcagtgacatgtgagtgtctggctatgccacaagctcgtttgattaggcgatgcactaccttagtgccaggctttagcataggctcgtccagataggcgatgcaatatatgttggattttgtgccctaaataatacctatttcaatataataagatttattaattaatataagatcagaaatttcttttatgttgcatggttcacatgatttatttcatgattatgtttaatgtataaattc

SEQ ID NO: 332226 - DNA, 686 bp, Cannabis indica
ttttttttttttaaatgaacaaaaagatggattatatgccataatgaattgaaggaaccgacttacatatctatgtaaacctcaatgagaaacctcactttgccagtgaagtcaacagaaacctagtctaattatttaattctatacgacttaatttaacaccaaatttaaaattcaacagcataattgctgcaaaatgagcattcctcaaatttcagcaaaacctgtacaataaatagaatttacgtttttctcatttgcagataagatgcacatataaacagtctcaaacagctacatagtgcataaatatgatccataaaaaattaaacccaaatagtactgtatctgtatacagaacaaccaaatcaacattatttgatttgttcgttctaacttagaaaacgctagactcttgctgcaattggaactttgtaaaacccctcatagagcttcaatcgcgaccacgaaccggaaccacagacgcttcaaacaccgccaaccagggacgagcttcaatcgcgatcgaccactaaccagaactggaaccaaaagacgaacttcaaatgccgtcgaccagggacgagcttcaaaggttgtcaacaccaagatcctgcacaaagagcgagagagagaaacaaataaaagaaaaaaaataaagtagagatgatgacaaatcgaggatc

SEQ ID NO: 332227 - DNA, 551 bp, Cannabis indica
ttgtctaaaactaaaaatttcttgtaaaacttaaggcgagcttttcccttagcttggaccgatactaattcggcattcccaactttgagcttcaactcccctagatttagataatcccaagtttcaagcaactgcaatgaagaataaacatggttagtagatccagaatcaacaatccaaatagatttgtcattctctaaacacacatgatttaaaaacaaaagtgttacctttgttccaatagttcacaagtctgggacatctttcttccgaatgtcctttctctccacaatatgaacatagaagaatatggctgctcatttattctctaattgtttcatttcctagttcaatttcgattctagctctcaaaattgaactgaagtattatcattgtcagaagcaccattctcaattactacagctctccttttgtgcatgtctacaaaactagagggaggcctccttgcaagcaaagtctgttcataagcacgcaattttgcatccagcttgtctacgtcggatgagttaaaattgttgatcatgtatga

SEQ ID NO: 332228 - DNA, 433 bp, Cannabis indica
taagattttttgtagtgtatataacatcatttttttttaatattttatacattttgttaccattttaccataatataaaaattgtgttatatttaagaccacttccaatgaagaactataaatgtgatgtattgctattttttaaaatatttagttaaaatttaaatctaatagtaatgtaaaatgtgtgctaaatttagtccaagctaaaaattgtaccaaatttagcataaaaatagcatgggctaaattttagcccacaataaataccatattttttaattacatctttcctaattattaatactatttattgactttaaataagatatatttagaagttattaaaataatataaataaaattaattattttgtatcttttgaatgagcattaatggtaatattgacttttatagctaatttgcacattg

SEQ ID NO: 332229 - DNA, 744 bp, Cannabis indica
gctgggcttggctcacgggtgctctactgtgcaggaaagggtaagactattgctgatcagccacgagtacatgagttggacgaagaatgtacatgtccgggccatatcagaccaagcgggttggggtctaccagtgttgtatttttgagactctgttttcccgcttaggccagctgaaagaaaaggacttgtaataataatttgtaaatgtttttgggatcccaacttctgtaacttttagattgtaaagtttaaattattacaagttttattttcattccgtttatgattaaagtttaaattctgcgctaattttattagtaatcccgttcaggggattagggttttataagtatcttgggtagcgtgcctaattatttaggtcgttacaataactctcaagctatcgttgtcaaaattcatcccaagtgagttacaaaaataagctccgagtaacccgcaggcaccaaaaaatattggccatcaccactagaagataattttcaccattagatcatcatcaacagtggaaaacaacttatatatatttttcttctatttttttggggctccttcacctataaaaggagagctcccttagctcatttttcacattctgaaaactacccacaagatcagagcttctctctctagattttctctttataaagtttggagttttttgaaacttagtctatggatgtaaaaaccatctcgtgagaaataaaaactcgaagtagatgt

SEQ ID NO: 332230 - DNA, 604 bp, Cannabis indica
gggagtcaccaaaattggccaaaacgataaacccaaacttgtaattcgatttgcccattgagccaccgaatgggctaaaccgttgcaggctctaggggtccaaacgatctcttagagatttaacttacctgcaaaagagaggaacttgtgaacatagtcttgaatattaaattgcaggttgtggatgtcctgggatttggttttcaaggcagccactgcatttaaggaatcacattgaaacactatgttattgtatccaaggtccactgccattgcttcactttcacacacagctgccacctctcccggcagaggatcgcagtggttcaggcggaatgatgcaattctcagtatggtgcccatgttgtctcagaaaacagcagcccccgacgattgattctgccctatagccacgtctgaattgcaagccacccaaccctcagggggggctgccactctgaaggattggcgtggatggaatcagtaggtagaataagttctcggagtctagtgttgatggagttgatggagatggcaatggggttggattttctatcatgaattcgcccattccgctcttgtgttagtctacaagggtggtgct

SEQ ID NO: 332231 - DNA, 1186 bp, Cannabis indica
ctagaactcgcagcagtggtatttgcgctaagaagttggcggcattacctatatggagagaaatgtgatatatacactatcacaagagtctgaaatacttctttacccagagagatttgaatatgagacagagaagctggctggagttggtgaaggattatgactgtgaaagcctttatcaccctggtaaagccaacgtggttgctgatgcctttagcagaaagggtcagagtcagttaagtactgtgaagcaaatatcccaataactagcaaatgagataacccgaggtaagattgagttagttgtgggtcaattggctaatactaccctacaatatactcttttagagcgaatcaaagaagtacaaatgcaagatccagagttggtaaaaacccaagaaagggtttcggctgagaaggctagtgtttctcagtggatgtaatgggaatgttacgattcagaaatcgtgtttgtgtgcctatggatgatggtattaaaagggagattatggatgagtctcatacgactccttactcagttcatccagggtcaacaaagatgtatcaagacctgaaagccttgtttttgtggccatgcatgaagaatgacattgctgagcatgttgctaagtgtcttatctgacagcaagtaaaggctgggcatcagaggccttgagggttgctgtagccaatgaacataccagagtggaaatgggaagacattgctatggactttgtggtagatttacctagaaccacgggacagtttgactctgtgtgggtcatagtggacaggtttacaaagtcagcgcactttttacctgttcggacgaatttctccattgaccagtatgctgagttatatgtcagagaaattgtacgtcttcatggtgtcccaaagtccattgtttcggatagagatccgaagtttacatcgagattctgggagagtctacatcgagctatgggtacacagttaaatttcagcacagcattccatcctcagacggattgggcaatcccagaggatgatacagattttagaagacatgctacgggcatgtgtgcttgactttgaaggatcatgggtaaagtaccttcccctgattgagttctcttataataacagctatcaggcaacaatcgagatggccccttaggagcttttatatggaagaaaatgtag

SEQ ID NO: 332232 - DNA, 326 bp, Cannabis indica
cggagccttcaagcttcccatagagaacagtgtttgtctaatttcctcgtagcctgggatcacctcaagctcagactgactccaaaggggagagataatcatggattaggtagtctaagctttctagagggccctaaggcgcgttttgaaaatgtacacccagaaaaacagtaaactcattaccaatctcttctttattagtaatccacacaccatccttgctcaagatactatccaccgagtttcttctattacgaatcgtaggcagaaatgaaagaaaaaattagtacacttatcaccatccctaatcgaagaaaaccctcgga

SEQ ID NO: 332233 - DNA, 532 bp, Cannabis indica
tcgtaccaatgtctgctcactctcagactccccagggaatcatcactgctgtagcaggtgcgcattataaaaaatcttacttttagtcacaattaacttgtgattaaaaatgaaaaaattgttactaattataaattattattcctacgttgtgactaaaaaatctatggctaaaagtattagtcacaaaaatcaaaatttattgtgactaaatgtattttcggtcacgatacttgttgtggctaaaactaaattagtgacaatttgtaactaaatactatatttagtcacaagtaatttttttgttgtgactaaaagtcacatttagtcacaaatttttttgttgtgattaaaaggttgtcactaaaaagtgacattttttttgtagtggctgctagctcactaggcccttttacccaatcaacctaaacacaaccctttaacacactcaaccaaccttttcctctaaagttggatcgtaagaaactatgttctatggaagacaatggtctccactatcatcaggggttat

SEQ ID NO: 332234 - DNA, 796 bp, Cannabis indica
atgttataaactagtgccttgaaatttatttatacttatctttatttgtcctcgcagagatgacttttctgaagtccacacaggtcctcaaccgcaagccaaaaattggaacagtgacgacatctcccatcgttcctcaaaagagaaagagcgatgtggtggtcacccttatcgcggattcctccaagaagtcaactaagggcacgcaagacaaggggaagaaagtggtgatcgattcggctgtccgagctcgcaacatcttgactctccaagagaagttcgtgggtgatgaatttatatcaaaggtcgacaagacccctgctgaagagctgctgcctcgttctgcggagttggcttcgcagtttattgccatgttttcgagggcctttgtcactggatctaaggaagtcaaacttgtgaagagacagaatgttcagcttcaggaggacatcaagaagctgaaacaagatgcgacttccaaggacaaagagctcgaggaactttgcaaggccaaggagcaagtcgagctcgaagccaagagcgctcagatgaaggtcgaggagatgtctcgtgacttagaggtcgagaaggagaacgggaagaagcagtatgaccaggcggtctctactatatttataccactctttccaaaattccggactttgacttctcaatcctcggagcagaagccgctgagatggctgaggctttccaagccatgtcgctatgcagactcaagacggtggagggaatctatttcccgaggatgctgatgccgcggacaatgaggaagtcg

SEQ ID NO: 332235 - DNA, 602 bp, Cannabis indica
ttgctaattagcctaaaaaaaatataaaagtcacccttgaatttttgaaaaaatagatatgtatataaacaatatcattttctctcaaaataaaaaataaactatatcattgtatattaaattctcattcctttattattttgaaaataatattaagtagatttttttttttattcgtaattgtatttatatttctatgactttcttaagtagaattctcgagttttaaaattattaccttaaattctatattattattatgtatttttaaatatactctttccataaacaattgttttttgaaaaacttaccacaataatttagtatcaatttttcatgtgtatacataatttaaatctactgcctacatcctgattttaacacatttggtttacactgctctgttgaaatactcaaaataggacatgatgtaccttgaaaatcttgaatcgagtgttgtagtattgagaaagctgactggtgaatggaaggcgcactcagttaaacatcttactcttgaccctttgagggaaacattgaagagcttcaggcaaaaggtaaagtccatctcttagagcttgtttggttgtattttcagttt

SEQ ID NO: 332236 - DNA, 585 bp, Cannabis indica
acctgtgagtggaaaaggacaagtatctgaagaattacttggtcctcgaacacagcctcaaaaaataccagagaggccaagtaaaaagggtcgctacgttgcaccaaaaaggacttcaataatcaacaacttttttaagttactcaacatgtgcaaaaacaacaacaatccactttgaggccagcaaggattatttggggttgaaaacgactcgatatggcttccaacaattgacatcaaggaattgtgccaaatgggatttttaggagcccaacctattgcaatctggtgcaagtatgatatccaattcttattaaacttgaaaatttgttttgagagcttgttattaattgtgtgtttttaacaggtttttgaaggaacggttgctagatgttaatggattaagcagactatatgcatttttaaatcctggggccattgcctctgatgctggggattataatgcccgttctcgagcactgcgcaaacgtattcttgaaattgataatccggctaaatggattattgccccctataacaattagtaagtaaatttaaaatttatagtttcataatttataactc

SEQ ID NO: 332237 - DNA, 1197 bp, Cannabis indica
ctagaagatacttccttcttagctttagctatgacaaggttataacattccctagcaacctgctagtttcctcttgaacaccctatcacattctttgttgggaacttaaggcatgaatggaatattgacgtaatagcctttaagtcatacaaagctggtcggcctaacatgacgttgaaggctgacggaacgtccaacagtgaggggtaggcaaattttccctagaggtgcgactcctttgccggagaagccatacacgggctaaagacagggggttaaatctttgagttggagtcccatctttttcatatgtggtcttgaataagatgttagaagaggttccataatctatcatggttcgggccaccatcttgttggctatctggacttccacgaccaacgggtcattgtgtgggaatctaatcttgagagcatcttcatcacgaaatgttatggtggtttcccctacccgtgcgatcttcggcttcctctcttctacggctaggactacttcttcttgctcgtgttgtactgttcgggcatacctctcccaggctttgcccaaatctccagctatgtgcggtcctccaatgatgacttgcagatgtccatctactggtggtggtagcaagtcttggttgccatcgcccctcttgttctgataggccattacatacttctatacgtgtagattatttttccttatcaggaattcgatttgtcgctttagattgttgcaatcatttgtatcatggccgtaacccccatgaaaatgacaaaacttggtcatatctctcttgttgacatctttcttcatgggtgcaggcttcttgtacgaggctaatgactgagtagccatataaacacttttatgtcctccgtcaggacggtaaatgcagtatacaaggtaggattctcctggggagcttgttcggtcctggcaacgaactttccatttttcccattcccttgcctattattgttgttgcaccgtttaccacttgagcttgaattgctcggataatgggggagctggacggatgtcccagtagaaggagcttttcactggtgaagtttttgttcaccttctgctcgctgaatggcttcttcaagcttgataaaaccttctgcgcggtcaagaaaatcactcatcaagtctactggtccgtttttccttatgtccttccaaagttcgcc

SEQ ID NO: 332238 - DNA, 790 bp, Cannabis indica
ttgattttctgtcttaaatcagctggaggatacctccgacttttccccctttccacgagttcttggtgcacggatacgctctttcggttctctcgatcctgaggaccaagactcgctcaagggagcttgcccctctgcggaccttttcctttcgagaaatcatagcggatttttcgcggatcctgtgccttattttttctcccagggatcgaagtagggtttttctcagggttctcctcaaataggtactgtatagggcttggttccctggtcttaggcctctgagtgcttggcgaggattcttcttgtatttcctttagtcctgcggggatggccttgggatgtatatgtattccagccgtttctatagttttttgcatgacgaccattatctcttgcatcctcttattttgttctttttgggcagccaattcggcttcatgatcagccgccttttgccttaagaccagcagtttagtatagctaccttcatcgtaagtgtcgtacccttcgaagttttcttcatattcctcatcgttcgcctcatctcgttcctcagagcccacatttactcgtgaggccacttcctcgccttttgggttctgagtatcctgaggaggacgaggttgacgtgtgttgtttcgagtttccaccattgtcgttctgattctttgactgttgtcttcttaacgatgcttccgacagctctcaatgaaagcaccaaaatattgaccgaggttttcggcaaccaattaaatgagttaatgatgagagctttagaataattaat

SEQ ID NO: 332239 - DNA, 1046 bp, Cannabis indica
tgatgttaacccgccgcaggctgcccaagaatgggataacatgtttgcagcaatgcaagctagaattaacgagcaagaggaagaaatcagatgcctgagacagcagggtgctcctgcaatgtctgctctagaaatgtagatggctcctgcccctgctgtgcaggcaggatcgattgctgcagtgaatcgaatggaaccactgtatgaaaggtttcgcaaacaagcacctccagtctttctgggtggtcccgatgtgatgaaagccgagaagtggctgacggttattacaagaattttgaatttcatgggcgtcaccggtaatgacagagtggcctgtgccacattccagttccaagaggatgccctggtttggtgggacatggtgtccctgacttgtgatgttactactatgtcctgggaaaagttccaggagttgtttaatgcaaattactacaacgaagcggtcaaaagtgaaaaaagaaaagaatttacccagctgacccagaaggagaatatgagtgttaccgaatacataactcagttcgatcgattagctaggtcggcctcgggaattgtatgaaccgattttagcaagaaagaaaagtacctagatggattaaatctaaagataggacatgatcttatgattactactgacgacaacaccacctatgctaacatggtggggaaggcactaggagctgagagcgcagtggagtgcactcaggagtctcgagggactcaggttgttggtagggcccctactcctcctacctccggttatggtaggagtggtagtggctcgaccactgatcagaaacgaaaggcacaaactacacccggtgactcaggtcagaatgaggttctgggggaaccaaggtcaaggcaactgtcagggttattttgaaacccgatacacttacccggagtgtctcagttgtaaaaagcatcatctgggtgactggaaagggcaaggatgtttccagtgtgggttgccaagacattacaaaagagattccccgcagcttaagaaagaggaacaaaag

SEQ ID NO: 332240 - DNA, 442 bp, Cannabis indica
ttttgaaaggactagaggctgggataattgttgttttagagcttggaaggcattctcacattcttcagtccattcaaattttttattaccccttaggatgttgaataaagggacacatttgtcggttgactttgagatgaatctactcaaggcaacaatccggcctatcaagctgtggacatctttaaccttagttggggatttcatgttgagcaaggccttcatcttttctaagttagcctcaatgcccctagagttcactatgaacccaaggaattttccagagcttaccccgaaagaacactttagagggttgagcttcattcggtattgtcttaggatctcaaaacattcctttaagtcttcaatgtgcccttaggccttcttagacttgactagcatgtcatcaacgtatgttggaattatatttatccaggatctt

SEQ ID NO: 332241 - DNA, 673 bp, Cannabis indica
agtcatggtgatccccactaatctacactcaaggttgtgagtgagtgtatatatattattctgttgttatatatatacatattttatattacatgtgttcttatcttcttctatattttttatatataatatatatagtgtatatatattgtatattatcttgttgtaacatttatttaatctctttgttggtccttgtattgtattacaatagagttgtaatatcttgattttcttccattgtaataaaatctctaacacccgcacatgcagtttttctaatttcccaaaccgcaccccagggccagccctagacataggcgggctaggcccgcgccgagggcccacttattttaagggcccaaataaaaaataccttttaaaatatacatattttttaataattcttaagaatacaatttatttttatagtaaaggccaaaaaaatttttttgcctgtggcccatttcatctcagggccggtcctgccacacccgcaccatgaaactaaaaaaccgcgaaaatcccaccacaaaaattggtgcggagcggtttggactatcaccaacaattgaactatcacaaatacaacaaagcttgagtaacacttttcaaaaataccataaggcttgaaaataaatatgaaaaaaaaattaagtttcaataatacaat

SEQ ID NO: 332242 - DNA, 1227 bp, Cannabis indica
tttgggtttgagtttgggaacttgaatcagactaggaccttagacccagacccggatcgagacgcggatccaaatcaaaactcggatctagactcgagacgcgaacttgaacccagacacaaacatggaccaagaccctaacccaggactcggactgagactggagactcacacctggacctaggactagacctagattggggacctaaactcaaaattagaaccagaatcgggacccaggattgggattgggacccaagacccgaccccggtctcggtcccagacccgaacacggactgagacccaggatctgaatcgaaacgagaccgagacccaagattgggatgcggatcttgacccacgacatagggttggacccaacccgttgtcggtgtctacatcttggaatcgtacaaggaccctaacctagaacaatttctagaccaggacccaaacctagactcggacccgagacccgaaatcagaacaagaaccggaataaggaccttggaacaggaattggacctagacccaaaactagctctagacgcgaacccggaccaagacttgtgccaggacctgcgacccaggacccgtgactcgggacctggaccaggtgccagacccgtacaagaacccaaaccgtaacccagacccaaactcaaaccatgacccgaacccaaacactgactgaaacctagacccagacccagacccgtactcataccagaactctgacttaaaaccggggacccgaaccaagattaggactgggacccagacctggacaaaaaccgagacctgaacttggactaggactagaacccagactgtggccgcgattgggaactaggaacgggaccaggacccgatacttggacctgggacttaagaaccaaactgtgacccagacccagaccaggccatgactcgagggaaggaacagtaccgaacaaggaccgggacctgcacttgggtgggacgctaacccagaccgagacctagcaccctgacctgaattggggatccatacccatgactcaggacccaagacccaaacctagacccaaacctggacatgagacccgaaccaggacccaagaaatgagctagaactagactaggatctagatttggactgtggacaggacccaaggctcgaggcttggacccgacccatagtcggtgtctaaatctgggaattggaccttaacccggacccagac

SEQ ID NO: 332243 - DNA, 786 bp, Cannabis indica
aagtatagacgtaggtaaggtaaaaagataatactatttacttagtattgttaaatgtatagttagagcattccgttttcgtttagacacagtgtttcttgctctctcttataaagtcaaatgctagagtattagtggtggtgtcataattttatattattttaattatatatcttgttaattttagaatttttttttctagtgacgtgtacatcaatgtttgatacgtaccaagaaggatgatgtcacggagttgagtagatttaagtcatagcaatcgacttgggaggggaccttagccttgcgccgaggttgacttcgagatttctaggatggaagttcggacttcaataacttgaatctaactcactaactttcagtattctgtaccatgataacatggagcaacctaatccaagccccaagaactaaaattacaagaacctgcaacctgaaagtcccgatgcccaggttgacattcttaactggggtttcagtttctgggactgtcttagtgcaaatgggtcaaaacttgcattgagacatcaactagacatatcacggacatattcgaggaatcagaattagaatcgaagcaagtttatttttaagcactcggggcccgagcacccagcacccagattgacaatctatcaatctgggtgccttccaagtatcatatcagatatgcaacttttgcatcttcttcgtcttcataaaaaatggggaaatagatcctttcgagaaagaaatgttaggttatttttagtattaattttagattaa

SEQ ID NO: 332244 - DNA, 1035 bp, Cannabis indica
cataatgaataaaaacaaataattcaaatcagttataattgaaatataaccggttctgtaacataatgaataaaaataaataacacaaaataactcaaatcagttataattaaaatagaatcggttttattgtaatatctcagaaaatatattgatatattaattggacatattttattaaatatgtgattaattgggtattagagtaggattataatcctacttaaactaattacgagtttattagggaaatatgagtaaatgaataataaagcgcaatttattaattacagagattgtattgtaatatgtgggtatcgtagataccataattcgaataaagtattttcgggcctggcaactgtggaactcgacggagtagtcagaaatgtcacgatggttgaaattgtgttatattggaattataccggactaggttaaaaatggagatatcagtttaaatcgagatagttggtttgaccaaaatacctttaggttagtaaataacttaagttttttttgaatgagggtaaaatagtcattaccaaggttttattctatttttgtcctttagtgctttctatgctgaattagaaagttagagtaaatttatattatgttttaatttgtgtattacctaggaaataagtagattatccaagcaaaaaaaaaaacataacctcattctctcttttctttcaacccgttcgagccctagaattcagcagcaaccaagagtttttttcttcatcaattccaccaagtttaagctgaatttatttaccataggtgctgctcaaggtgtgaggtgagttcttcctctttactcatgaatttcttatgttataggttgagttttggttggggtttatattgatttcaagtatgtgtgatttctggggttaagacatgtttttaggtttgaattggtgatgatttaagcttcgtttgattggatattagggttgttatgcatgaattggaagaaataagatttaaggagtttagttttactcaacaatggtgaagttgtga

SEQ ID NO: 332245 - DNA, 654 bp, Cannabis indica
gaagttgtgattttaagttaattattgctttgagttttgagatatgttgtatacatgttatagaactgttttgtgaagtttgggaataattggttaggtttggaacaagttttgggactttcaagatctgaattttcgagtttctggtgtggtgaactggaattccggatggtacagggctgcactaaccggaattccggatggtcaatttttcaggactcgctcattttcgtattttagccataactttgcactcgggtgtccgttttagacattctatatactgtttcgaagcttatgaagagctctacagtatgagatatatattatagccaaaacatgtattttaatttagggtgttttcaccataagtttcggttaaaaacccaaggttattttatgcagattttagatagtgttttaaaatagacccttattgatttacctttgtcgtgacataggacccgaaattatcgagcatcgttccactcaggtcggcgcacatacttgactttggacttaaggtaagaagagtattaagcactgtttatggttaatgatatgattgttatggtctcgattatgattgagatcccgatatgtatttgttgtgactcgatcttgatcgaaattaataatatgtatttgttgtga

SEQ ID NO: 332246 - DNA, 1014 bp, Cannabis indica
gggtgctcctgcagtccctactcaagaaatacctgtagcttgggccctgctgtgcaggccgaacccgttgtcgcaatgagccggatggaacccttgtatgaaaggttccgtaagcaggcacctctagttttcttgggaggtcccgatgccatgaaagtcgagcaattgctaactgtgatcatcaggatcttgaactttatgggcgtcactagtaatgatagggtggcctgtagccactttccaatttcaagaaaacgctctggtttggtgggacatggtgtccatgattcaggacattaccgcaatgacctgggagaaattctaggagctatttaatgccaagtattataacgaggcagtcagaagtgccaaaagaaaagatttcacccaattgactcacaaagaagacatgagtgttattgaatacacaactcagtttgatcgcttggcaaggttggcctcgggaattgtgccaaccgatttcagtaagaaagaaaagtacctggacgggttaaatgcaaagatcaggcatgacctaatgattactaccgatgataacaccacctatgctgatatggtggataaagcattgcgagccgagggtacagggaagtgcaccttagaatctcaagagattctggttgttggcggggctcctacccttcctacatcaagttttggtaagggaggtagtggcttggccactgatcagaaaagaaaggtgcctactgcatccagtggtttagttcaaaacaagaggttctgggggaaccagggtcgaggcaatcggcaaggtagttttgagacccgatacacttatccagagtgccccagttgtcaaaggcaccatctgggggagcgtagagggtaggggtgtttccagtgcggtatgccagggcattataaaagggattgttcccaactcaagactgaagcaccaaagactgcagcgaaacccactccagcaagggtgttcgcgataactcaggctgatgtagaagccagcccctctgt

SEQ ID NO: 332247 - DNA, 1307 bp, Cannabis indica
ctggccgaacatacataaaaaaagagacggtaaaaggaaagcaattaaatagcaggagtcccaggctctttgtatgggtcaactaggtctgaaggggctggaagatcattattgtgggcagaaggagcctcaacactttgatcggtaggagaggtggaagtggtcgccccgggattcccgtaggctgcctgagcatcgcagtagttgagaaacatgtcttccgaagtgccaagatattcaaagtttgccttgggattggccttccaaaattcataaaaaatcttgagaccagctgtctctaaggcattcaccttttctccgagcctcaccacctcgaacttctggttcttaacctcagcctcaagttcctcctccttagctttcttctcatcctccaacctacagagaagagtccggaaaccctctctttcttgaagactggaaacgtctcgagacaaagaagcattatctacctcgagctgctcgttcgatggcatctcctgcagttccctggtcagcttgacaactttggtctcagcggctaggagtttcttgttcacttctccaagtttttcccgcacagtctcaagctgagtccacacatcttcagcctcctttttggccaagtccgcatccctttgcagtgtgtttgaagtgtcaagatttttgacagcaaccgacttggctcgggaataggtgtaggcaatcttcaaaccagcctgtgcaaaaaaaaggcattaaaatccaaactagtcaaagaggaataaaagaaaaatgttagaaaggacttacccgcaaaagttccttcaaaactcctcctaagaccaactccaaggaaaactcattgtccgccccagttagctattcgttcaactctgggatcgaccggctcacataatggttaagcatgtctctgcctctcttggtctccgagcacaataccaaaggtggggaaggagccttaccttgttcagatccacttctgaccagctcggatttggccttagcctactcaggtccatccgaactctctcctcgggaacttttagacttagtgactttcaaggcagaagggtccacaaaaagttgttccttagagagatcaatgacctcttctactggtgccttctctttggacggagtctcaccacccttagacttcttggccggaggggataagcccgagcttcccccactctcttcttcaaagcttcaatcatcttctgagacatttttgcagggaaaaaatagtatagtcaaaagaaggcatgaaaattaagaaaaataaatgcaagatgaagtactct

SEQ ID NO: 332248 - DNA, 1112 bp, Cannabis indica
agcctgcgtaatggcgaacacccgagctggagtgggtctcgctggagcccttggtgcctctgatctgagctggggacaatccatcttgtaatgtccgggcatgccacactgaaagcatccctgacctctgcactcacccaaatgatgccttttacaactagggcactctgggtaagaaaaccgggtctcagcaccaccctgacggctgcctctactctggttccctcggaacctcttgttctgccccgagccaccggatgcagtggatgttttcctcttctggtccatggccgaaccactacctcccctgctgaagcctgatgcaggaggggtaggagccccgccactcactggagtcctaactgactccgacatacatccaactgcgccctcagctcgcagtgctttctccaccatctcagcataggtggtcttgtcgtctgtagtgatcattaggtcatgcttgatcttcacattaagtccatcaagatatttttccttcttactgaaatcggttggcacaattcccgaggccaacctcgccaaccgatcaaactgggtagtgtactctgtcacactcatattttccttctgggtcaggtgtgcgaactcttttcttttggcacttctaacggcctcattatagtacttcgcgttgaagagttcctggaacctttcccaggtcatggtggtgacatcatgaatctgggacaccatgtcccaccagactaaggcgtcctcttgaaactgaaaggtggcacacaccaccctgtcattcccggtgacacccataaagttcaaaattcttgtgatcaccgttagccactgttcggctttcatgacgtccggacgtcccagataaagtggaggtgcctgcttccggaacctttcatacaagggttccattctgtttgctgctaccactatctcggcctgagcaacaggggcaggtgccaaaggagcttctggcaccggtactgcaggagcaccctgttgcctcaatctctgaatctcctgatcttgctcctctattctggcttgcaattcagcaaacctaacttccccaattctgggcttcctaattggcttgagcagcctgggcagcctatggc

SEQ ID NO: 332249 - DNA, 888 bp, Cannabis indica
caaaataattaatagcctaacttacataagaaaaacatgactgaacttatataaaagatactattaaatttggaagaaaaattatcagatgaagaataatttaataaatgagatatggagatgaagaataatttaataaatgagatatggagatgaaacacataggaatcaatatcaatattaaaaataagaagtacaaagctacactctaacctcagcaatattactattttaatacactcatttttgtcactaaaataagtataaataaaataataataggagagaaaaataaaatagcaaaatgtattttctctactctaaaatctaataaattttacaataaaaagggtgtaatttatagtgaaagttggctctccaaaattgtatttttgtgtaccatttagtgggctaaatggcacaaaaaactgactgtagtggtagaagataatatgggagacacttggcgagatggtggagaaagtggagcaattggtgaatgtgacctacgctcatcagatgattgttgggggagtgggaacaaacatgactttctttgctgaagtccactcccatgttcaaatgaaatgaaatagtgccaattatatgatattgagatgttgtgtgaagagtggactcttgatcacttggataaatatcttgggctttgaccttgctttggcccacttgaagaaacgagtttgtaaaaggactaggcaatttacacgtgattcatcaagaccattatattccttgacactattgttaatttatagtagaaattaaatagtatatggaaaaattataagagttaacatttttatggcataaataaataatgttttggggttatggatattttagtttttttacattaatatatatttt

SEQ ID NO: 332250 - DNA, 575 bp, Cannabis indica
ccaagactcgaaccccgacatgaacttgaatccaaactcaaactcagaattgcaactagaactggaaccgaactaggactaggactaaggcctaaacccgaacccgacccagataaaatcaagacaaagacccaaactcgaatcgagactaggactcaacccgaacctagactgggacccaatcccagaccagaattgggacatggacccacaatcaggatagggacctgggcaacagaactaggattgaaacctagtacccaaacccagacctggacttgaacctaagacccagctcatgacatggcacccaaaatgaaacccgaccaggacccgagatcgagatctggatctagagccaggacttggatcgaacccatagtcggtgtatggatttggggacacagccccggacctgaacctagacgagcacccgaaccaaaactcagacctgaaaccgtaccttgtgacccgaaatttgaaccgaaatcaaaagttgaccttgacccagaaatgggacatgaaccaggactttgacctagaactgtaaccgaacctggacctagacccaaaac

SEQ ID NO: 332251 - DNA, 1074 bp, Cannabis indica
atgtgaatgtccaacctaaagtccactaattattgtattattgaaacttatttttttgttcatatttattttcgagccttaatggtatttttgacaagtgttgctcaagttttgttgtatttgtgatagtttaattattggtgatagtccaaaccgcaataaccgctaaaccgcaccgcaccacaccataccattttttacggtgcagtttctgtaattttttagtttcgtggtgcgggtgcggtttgaaaaattagaaaaactacatgtgcaggttagtttaaaaaaatagttaaaaattgcaccacccacaccacgaacaccgacctaagttcacacacatttatgatttcgagattgtacttccttatagatgaaaaactcatctattatgcccttagttcaaaataatggaaaactcatcttatttttgcaactttagaagactttttgcaaactcatttttgacaactaacatacgaatttgacttcgagcttctcatgatatttttagatcttttcaagagattttcaaagggataagttgataattaccatttttttgggttaattaaccaaaattaccctaaaaagtattttaattaatttgtacctgatttttaattatttttaccaaactacccttgcaacacaactcttttccatctttctcaaagtcaccaaggtctacaatctctacagaatacaaatattgcaaaaatcgctggaattgactctgctacaaccatttgaactacatcatcatcaccgcctctgctataaacaccggcactacgtctccaccatacaaattcttgaaagtaaggaagggtcggcgaagaagagagataaccacagcagcactacttgccgctgcagctgcgcaaaggagtttatggctacggtgtggtttgaacctcaagacggctccgattgctgttgatggttgcgaagctttgagagagaattagaaagtacagattcaaggaaggagaaagtacagatgactacgaagtctagatttatttttttgtcgaaagtatcagaaagagaaaagttaatgcaaatttagaa

SEQ ID NO: 332252 - DNA, 506 bp, Cannabis indica
aatcaccagcactcttaaccaccctctccaacataaaaccagactttagatcatgaagctgaacccaaaaatccattttgtgtagctgcaccaccttcgggtcctctcccttcctcaaacgatggaaaacaagagggcatttgttgaacgtccaggggctcccatccacgaccgattgaacatccaattcgtgatagaattgaaaaagatatctattggtatccaattccctgatatacacaccctttcccggttgccacaacgaggccatcatatgtctcattgcatcaaaatccagtgtcctatacccgtgagaaacttccccaccaaacaccaccgatcatcgaaagcaaactcttctccttcctcctctcctccaatcagaatcccctcttcctcatcatccaaactaatctgagcatactgctcattcagatcaaacaccggttgactacttgaagccattcaagcgaatacaatagatagagtagacttagaacgttgag

SEQ ID NO: 332253 - DNA, 679 bp, Cannabis indica
aattatatattcagagatattattgtaagagctataagaaaaggaaacttcttccttattcttaagtcaatacaactaacgaggattaggctattaccgaactgctcggggctgaacctctataaaattcctgtgtcttattattgctttattacatattattacgacatatcgtttatcacctatcaaagagactcattgtcgttggctaaaagcgaagtcaacattttggtgctttcattgagagcagaatcacagatcgctcttttcaatattcaacacgatggtacaaactcgtagaggcctgtccgacccagcaaactcacagacgctggatccgacgttgcaggacccatggagttcaagggtttcacccgctgtcaatcctggatagacaggaagcgtggtgagtggtgggacaactcctgttactgaaactgcgcctggtgtgcaagagaccggaaacaacggtttcgcacacagccagggcgttaataacacgattgttccaccaagcatcaatgcccaaacgaccatcagagatgcaaccgaattgcaaaaccttcgcgcgacgctcagactcatgctgggtcaataccctgcatcaggatcaggaggaattacgtgccatagtaaacctcgcgtttgacgaacagaggcgtatgttcgtcgagtggag

SEQ ID NO: 332254 - DNA, 457 bp, Cannabis indica
ctctacaagcttatccctacatatcgatttctcctcgatttgaatatgtttttggatttcttccaaagagtaatcccaatttttatgaaggattatcttcctataattttttcaagatagtggtaatttcgccactattgcaccaacttggaatgcctcaggaagttcaatttcgagcactttcaatttattaacaattactcacaactcatgaatttgaggtaaaggaggtttaccatcaagaaattttaaattaaaatattgagaaattaaaaatttcttggtaccttcctcctcgacattgaatttcttttcaaggtaatcctaaatttcttaggcatctttagtgtcggtgtataggttgtaaagcctatccgagagtgagttgaggatgtgtcctctacatagaagattgtcatctctctcctttcttgtgccttgacctcatcggtatcct

SEQ ID NO: 332255 - DNA, 871 bp, Cannabis indica
cttttagcgattgattcgctggttgacgggtggaatggcaccattgatctggttggaaccatcaggtatgacttctcctgatcaattactagacaaggtctgcccgcctaccgctaggcccacgagtggaactcgtgaccggggactgggcggctgaccatttgaagtctgagaagtattcaatgctagatctttgtccgtgtcacccaagggaataacgttcggcggttgctgacctacagtttggtaggcctttcgtatcagcatggtagcttaccgactacggttttcaatctctccatgatgagcccttaatgcctccatctttctatccctccactcgataaacatacgcctttgttcttcgaatgcgagatttactacagtgcggaattcgtcctgatgatgatgtagggtattgttgtgaccctgcatgagtccaagagcgtcgcagagattttgtaactcagtggcatctccgattgtcgtctgggtgttggttctaggcaaaatagttgtgttatgaatgccctagttgggtgcggagctgttattcccagtctcttgcacaccaggcgcgatttcatctatagcagttgttacaccattccccacgttcaccgactgtccaggattaacagctgacggaacccttgtgtttcttgggttctgcaatgcaggatccaccgtctgtcaatttgctggatcagttaggcctctacgagtatgcacaatcgtttttgtggttagatgttgaataaagagcgattcgtgatcctgctctcaatgaaagcaccaaaatgttgacctcgcttttagccaacgacaatgagcctaatttaataagcgataagtgatttatagcaatcga

SEQ ID NO: 332256 - DNA, 951 bp, Cannabis indica
gtcccatcttttcgtaagcagtcttgaacaaaatgttggaagaggctccattatcgatcatggttctggccaccattttattggctatctggacttccacgaccagcgggtcgttgtgcagaaatctaattttgatagcgtcttcatcgttgaaggttatggtcggctctcctgctcgtggaactttgggcttcctttcttccacggccaggatgacttcttgcttgtgctgcactgttcgggcatacctctcccgagctttgcccgaatctccagcaatgtgagggcctccaacaatgacttgcagatgtccatctactggtggaggtagcaaatcttggttgttgtcgttcctctgaccttggttggtcttaacatacttttgcaggtggagattgtttttccttattaagaattcattttcccgcttgaagttgtagcattcattagtgtcgtggtcgtagtcttcgtggaaccgacaaaactttgtcatgtcccttttgttggcatctttcttcatgggcccgagcttcttatacggggccagcgactcagttgccatgtatacactttctatatcttcagtcagaatagtgaatgcagtgtatttggcatgattctcccgaggagcttgttagtatttgccagtaaactttcttttgttcccattcccttgcttgtggttgttactggagcgcttaccacctgagcttgaattgtttgggcattggggaagttgggtggatgttccagtggaaggagcctttgacttgccaggcttttgttcaccttccgctcgttgaatagcttcttcaagcttgatgaagccttcggctcgatcaaggaaatcactcattgaatctactggcccattcttccttatatccttcaagagttcaccgatgacttcgatgccccccagtattacagataactttccatcctcagtta

SEQ ID NO: 332257 - DNA, 522 bp, Cannabis indica
ctttgattctcattttgcttgctaaattttactgttggaaatgcacgaaaaagttgttgtttaacttatgttgtgtgtgtatggttttgatgtttgatcttggtaaatagagtgtgtaaagcataatttagttgtgatatatgtttattgagcatggaatgtgagtttaggtctgaatttatgagttattgattgattttgcagctctgattttagggttgttcttgagtttgtgttggatttgaactcatgttcttgaacttggaattttgttgattttcctcaagctttggagctttggttggatgttgttgattaatgttggaattgatgttattagctctctgttgtgatgatttttatctgtaagaagttaatttagggtatggtttgattaaggttcgaatatatgaaaaagtgagcatttttagaccttaaaatatggttttctgggtttttcgaactcagtggccgcggccagatttatggtcgccgcggccataaacctagcaaagagccatc

SEQ ID NO: 332258 - DNA, 1038 bp, Cannabis indica
gttttttttacttcttaattgttttttttactttggtttttttttttttttgtagatcaatggctcgtttaagtttagcaagaaagcaaaaaataattattgtagtgcagaatttaattgtaatcttagatattattttagcagtgtgtgctattgtgagtgcttatgcattgataaattctaaaagacgtctcaatcggccattatctataatgagagtctacaaacagttagaaaacttacatgatttagtgtatgcaagtgatgtcaattgtgtttcacaattaagaatggatagacaaacatttcaaggttatgtcacatactcagtactaggggaaatttaagaaagacacgaaatgtctctatcgaagagatggtagcaatgttcctatatattttagcacaccaccataagaaccgagttgttggttttagtttcaaaagatcaggaaaaaccataagcaaatactttcatgagtgtttaaaagcaatgattcgctgccaaaaagaattttggagaacacctgagccaatattagcgacctcaattgatccaaggtggaagtggtttaaggtatgaattgaggatttaaaattatagttagtaattgttaactttaaataatttttaataagtataattaatttggtgtagaattgtctgggagcattagatggaacatatataagagtgcgtgtacctgaagctgacaaaccaaggtatagaacaagaaaaggagagattgcaactaacgttttaggagtttgttcacaagacatgcaatttatatatgttctaccaggctgggaaggttcagcacacgatgggcgtgtattaagagatgctttagctaggagaaatggtttgagagtccctaatggtaaagttaattataaaaaacttatcagtgtttgagattagactaccaatatatatagttttccattcaattataacatcatttatttattatgtttgataggttattattatttagttgatgctggatataccaatggtcaaggttttcttgc

SEQ ID NO: 332259 - DNA, 773 bp, Cannabis indica
ttatttttctaaaatgaaaaaggttaactaaatattaagctaaggaataacatgggcaactatcaagcaccaaaacagccacctatacccacattttaaaagggcaaaatactcttgatgcctaaacttaaactaatacaagcctaggggtaaaatagtcaaaaaccataaccccgctcaacctcggtattctacatattccaatattcatcccactaagaaaaaggttctagacttacccatgtgactcaaatggccatccatcacattttctgtcgtcgccgagcaaaaatcataaaaattgcatatttcatatataatacaatcaatacctatagagtttaataaaatctccagaattgagaaattataactctagtgccctcttttaataatgggacccacaatttaaataaatttatacataattctaaaaatattaataattaacgctaatttcctttactaactcatattctcaaaacatggtcattacaaacataaagttcctcttcttgatcttaagattcacttgattgtcttccaatgttcctttcctcaattaatctgatacctactcattactcccactcaacagtagttgtctgatctaatgcatactaaagcatatttgagacctctcagtgttgatcctaagaaattcctttctttggcctttatcttttttggaatagttgaaacttttccttagataaataaaatctatatctagaagtcaagaagcttctatagattgccattagaaaaatgct

SEQ ID NO: 332260 - DNA, 1893 bp, Cannabis indica
ttattgaggccgaaggccgatacccattgatagagaaactcacttactgctttattctagcaacaagaaagttaaggccctattttcaagcttattccgtttgggtgtaaactgaccaaccactacgccaaatattgcaaaagccagacgcctctggatggctactcaagtgggcggtggagttgggtcactacgaaattactttccaaccccgaacaggaatcaaaggccatgccttagcagacttcgtggtagaatgcacaagcaaagaagaaagcgtaccagaaagcaaccccgagccagtacaaacaactcagccaaataacagtgaagataagatgacttggaagctacacgtagacgagtaggctacaaatcaactatctggtgtaggaattgcccttgtcatgcctggggggcaacacctgcatgctgcaatcaagtttggattcaaagcatctaataacgaagccgagtatgaaaatctaatctgcagtgattcacagttggtggtaaatcacgtatccaaagaatacgaggctcggggagaaaagatgatagcatatctgagcaaaatacatgccctgctcgtacttcaaaagctatggtctcagacaaattccaagggaagaaaacacaactggagacgcgttagctcaattggaaagcagtaatgtaagtgataaggcgaactttattaccatacagtccctcgaagagcctagaatcactggtacggaagagatcgaaatgatcgatagttctcgaaactagatgacaccgatagctgcctacctcaacactggggaactcccagataatcggaacgaagctcgaaagatgagaaggaaggctgcacgatatatcatagtagagggaattatgtacagaagaggattctctatgtcgtagctcagacgtgttactcaagaagaagctgcacgaagcctatctgaggtgcacgacggatttcgtggaaatcatgcctatgttaagaaatgtgacaaatgccaaagattttcgaagataccttgagctccgcccaacgagttaactcagatgcaaagtccgtggccctttgccatatggggaattgacctgatcggacaattacccaaaggcaaaaggggagtgcagtatgcagtggtagaggttgactacttcactaagtggagggaagtcgaaccactcgacactattacatcaaagaaagttcaagaatttattgtgaacaacataatctaccggtttggattgccgtacaaaatagtttcggataatggcaagcagtttgacagataatccttcactgatatttgtgcgaaccatggtatcatcaaaagtttctccgcagtggcacatcctcaagcgaatggtgaagtcgaagcagtcaacaagaccttgaaggatacactaaaaaaaactcgaagatgccaaaggaaattggctggaagaacttcctgaagttctatggtcatatcaaacaactgagaaaatggcaaccagacagactccatttgccatggcatatggatataaagctatgctgcatgtagaactcaaaccaccatcccacaggagattggtgtacaaccaagatacgaatcacgtactcctggctgaatcacttgataaaattgaagagaagcaaaccacagcaaacttaaagttgatagcacatcaacaaaaagtagctcagtatttcaataaacaagtgaaggctcagaaattttttgtgggagatatggtcctaagaagggtatttctaaacacccaagacggtacgacaggtgtactcggacctaactgggaaggaccctatcaggtggtcaaagtcctcgaatctggagcatacaaattaggtaagtatgatgaaaaaatgcaacttgttct

SEQ ID NO: 332261 - DNA, 938 bp, Cannabis indica
taattgattttgtccagattcaatgaatataaaatattcatttatcagaaaattaattatttattttatttccttaaataaaaaattatttcctaaattaaaatatccttatattaagtgagctaaactttaactattttacatattatttatctcaatgattaatgcttagttattgtagagataactattaattgagctaaatatattttattattattttcttaattttttttatatatgtgttaatattatatgttttatttatataaaatgaataaaatacattaaaaatataatatttaaatgatataaagaaaacatagagaaatgatgtatggtgtaatgtaacttttagataaaatagattaaatggggtatttgtgatgtatgcaaaaatatgtccttttttcaaaagaaaagaaaattatgtaggaaaaatttagaaacaagttacaaaatatggaaaaataatgtaaggtaacaagataccttctcctaaaggctaactagttatcttatagtatataattgtgctacaaagtacaaacttgatagtgataatcacaacttctaattagaaacttgagcattttttttttttgtgaagagctctatcggacatgctcatcgatgattttcaccgatgcctccttcaatgatggatttgcaggcactcttgctgtaagttccaatcaagtacatggaaactcttaagagtgagaattctgctatatttttaggtgtcaacaggccggctttgaaatttagtgggccataaaaaagatatttttgagcttttatttaaaaaaatgttgtattttttaaaccagtaaaaaaaaaataggctaattaggatttttgcccccctgaactttgacatgtaccaaattatgccccttgaacttttaaggccattgaaaatgcccatgaactat

SEQ ID NO: 332262 - DNA, 573 bp, Cannabis indica
aagtcaacacagacgcctagggtttcacccagtgcccaagttgacaacccaactaaggtttcagtttctgcgactgtcttagtccagatgggtcaaactttgtattgggacatgaattagacatgtcacgaacatatttcaggcatcagaatcatattagagcactttcatatttgaccactcggagcactaggtgtcttaagcacctagtaccccaattaacattttgtaaacctaggacacatccaagcatcaaaaatgaggagacatgtacttttagagaagaaacagagcaattaagaggtcagaatgaggacccaacgcccaggttgacacttggtgctgagcctagcgcccaggttgacattttatcaacttgggccatttccaaagagttttgccaagaagtcttccaggcatattcttcgtttttgtcaaatattaagatacaagtgtttccaggaatcaacaagagtcttctggtggcctgaaactgaacccagcgcctaggttgacacctggtactaggcctagcacccagattgacacctagtgctgggcctagcgctcagg

SEQ ID NO: 332263 - DNA, 956 bp, Cannabis indica
tgaaagttggtaaatttatttttcctactgatttcttaattcttgacatggaggaagatgaaaacatttctatcattttgggaagaccattcttaaccatggggagagagttaatagatgtacaaaagggagaattaacattgcaagttcaagatgaagaaatgagtttcaatgtatttgttccaattgacattcctacctattgtaagattgaattagtgaaggcttgttaagaattaactgtcaagaagaagaaaggaaagtacaaagaacgattttgaactattcgatgtcgtatgaaaagattgatgtgtataagttgtgaaggtgaatcgagtcttgtggatagtttcaacattaatagcattggaggacagttttattcatttggtacgagggccttacaggatgcaataggtggacttgatccaagttgaagtttttcaaaggaaatcagtgtccggctaaatgacgttaacaaaatcgctcttaggaggcaccccaggtaagttctcttctctcatttcttttgtttcgcattgggaacaatgtgatatttaagtttggggggtgaactgaattttttcttttttagtttttttatctttagtagttttatgtcagtttttctagagtaataagtaagctttagtgaattgaaacaccatttattgtttcttatttgatttaacttgttagtattgtgtgctagatttgattatttttatgcttaactttgactctctgtaggaaaagttgaatataatttgtaaatgtgactagttggatttttttatacatgttagattggtcagaggattgataagttaaatttgatagaacttgtattaattggcctttgtggcgaaatctttgatgatgtatgctttaaaaaaatgatcactacaagaaaagggatcttttatcccacttttttagttaacaaaaataaaaaa

SEQ ID NO: 332264 - DNA, 1230 bp, Cannabis indica
aacctcgcccaagataaagtcagcgagatacagcgagtatgacccaagtctgatcgcataaccataactcgtattttgcggggtaggagaatggatctaacttgcatatatcaggatatgtgcgagtatcctctccatattcctgcgtaagcataaagatcgattctttacaatgcgagttggtcccgatgacccaacacccttgataagccaatatagactcgcatgtctaggttctgtcagctcgtcatgcgatgtccacaaaggcgacaacataagaacgcagacatcctaaacgcaattaagtgttaggcccgcgagcttaacattagaatatgaacagtcaactctcatgttaaaagggcgtatacgttgctaaatttagtaactgctattcatttattgatgtttacgttatttagtttagttattgtaattcagtgtgtaaacagattgacaatgaatgcaatctttgtataactaatttgacacatgctttgtatataaagggggatccaccgtgaaatgagacctacgaaaactcttgctacagtggactaagcagaccgcgatctgactgaaccactataatcctttgtcttattgttttttctaggttttgtttaagcatttcatatccatagttcgagtactcaccgttctaggttgaatactcgcaatttttcttcaagcaattttcttcttatcattgataatattacatacatttggtgttgcaaattttgctcgacaacagtaccttatcggtagaagtgaatagccttcaagaggaaaggtgagttctttggactgtcttccatcggctggaagaagagaagaagactaaggaggaggagcttacagctaaggtctagaagcataaatcggaggtggcgaggctggaagagaaagtacatgccttagagaccgtcgatctcgagattttttatgacttttggaaggctagccccgaggcaaatttcgattacctgggcgaggccaaagacatgtatctcgagtactgtgcgtctcaagtggcttatggtgaacctgaggtgactacttccacttttggccagaatgctgatgtaccttccactcagacaacagatcctccagctcctaccggcccagaagacccgaaccgagagcctggcactccagctgtttaaatacttctctttttatctttctttttttttttatatatcttattcggccataagacct

SEQ ID NO: 332265 - DNA, 786 bp, Cannabis indica
cgacaggaagttgagtttgatgtggtgattatgtcttcttgaaagttactcttatgcgtggtgtaacgagattttgagtgaagggtaagctagccccgaggtatattggaccttttgaggttatcgagaggattggggaggtcgcttatcgattaaacttaccaggacagttgggacatgttcataatatgttccatgtgtctatgttgaggaagtatactccagatccgtcacatgttattgagtatgaggctatccctcttcacgaagatgtgacttatgaagaataacctgtcaaaatcttggcgagagagctaaaagtgttaagaaatagagagattccagtagtcaaggtcttatggatgaaccacagagaagacaaggctacttgggagttagagtccgagatgtatataaggtatcctcacttgtttaatttccaacttgaggttgtactttgaaatttcgggacgaaatttcgttaaggaggggagaatgtgatacctcggtttgaccaagtcaaaaaggacatatatatatattatatatattaaaaaaaaaacaaaaaagcaaacagtcagactttccctccctcactcgtcccctctctacctctatttatctctccttttctctctcttcaaacacgaagcaagaaaactcataaaactccataaccaccaccctccggtgacccacctccagcgaccgccggacctcacgcgccggaccactcgaacctcctagtgccggcgacctcaccccccaagcggcgccgcttctctc

SEQ ID NO: 332266 - DNA, 588 bp, Cannabis indica
caaaaacctaaagaatcaacatgaaactacatgttgatagaagctgcactgaccagttgtccagtgcaagcattgccctcataacacctggagggcagcagttgcacgaagtaatcaaatttggcttcaaagcctttaacaatgaggctgaatatgaagccctgattgctggcctcgagttggcgcatgaagtacgggctgacacctggacatatacatcgaatctcaactagtcgtgaattaggtcctaggtgaatacacaactcgaggtaaaaagaatgatggcttacttgagcaagatccaagacatgctaggtcaactcaaaggctatacaacaatgcagatccccaaagagtagaatgacatagcagatgcacttacttatttggaaagtagcaccattgccgacaaggcaaacttggtgcgagtacaattcttgaaggaacgaagcattaccatccctgaagaagtcaacatgttggatgaaagtccaacatggatgacacctatcgtagcctacctccaaacgtgagccttacttgaaaacaagaatgatgcaaaaaagatgagaagaaaggctgctaggt

SEQ ID NO: 332267 - DNA, 584 bp, Cannabis indica
aatttttttttccctatagcccactttgtttcagggccggccctggttattattcgtaaggacattgttattattaagtattattggtgttcaatcgtgacgtcttacaattaattagcgatattttttaaaaaattattttcttaaattatataaaactcgatacataattatattaattatagtatgacatattcgtaaatatgctcatgagtaattgctttccagctgtcatatataataacaatacataaatctgcattcaatgctatattgttatatgcaactacattatttggtgagctatgctatctatctccatcatcattatgaggttgtacattctaaccagatggttatcaaggttgggtagggcgaccagggctattgaccaagtcccctcagcataaggtccttcaactagagatagtcctaggaaaatttacatagtatactaatttttactatatttttacaaaaatactgtcaggtggtattttttacattttcattgtgtttattttataagttccatactgcagtatactatgttaagttttcactgttgttctattggtgttttt

SEQ ID NO: 332268 - DNA, 1085 bp, Cannabis indica
accgatattgatcttggtaaatgttatcccaattttcacactctgacgtggcatcgcctggtggtgacacgtggaatcgactctaagtatatgctcgcagaatatagtccgaacaggatgcctcgtatgtatgctcaatgcattgcgatcagcgatccgtgtagagcgaccaacacttagcgaattcagctttcgcatcgtgagtcatcaaagaaatccctataacttggggatcagattgcagagatatggcaagctgtccaaaagtgtattctgtatttattatgcaatctttctgcttatatccattgtcacgagaagggaaatacttcctctccaagctcatagccctataaatagtgatgcatgtttattgggcaaagggtcgaaaacattctagttgagagatcttacttaaagagatattatctaagaattcatatccagagatattgttgtaagagctataagaaaaggaatctttctccttgttcttgagttaatacaaataacgaggattaggctattaccgaactcctcggggctgaacctctataaaattcctgtgtcttttatattactttatcatatattagtcgttataaactacttgtcgcttactaaatcagactaactgtcgttggctaaaaacgaggtcgacattttggtgctttcattgagagcggaatcaagaatcgctcttcactctaaatttaaccacaattatgatggtggtacaaactcgtaggggtatggttgatctgacaaatccacaggcggtggatcttgcattccagaacctaggaaacactagggttctgccagctgttaatcctgaacagctgtcgaacgcaggttacggtgtgatgactcctgtggataaaatcgcgcctggtgtgcaagagattgggaatactagttcagcacctagccagtgcattcataacacagtcgttctgcctgccaccaatgttcgaacgaccattggagatcgtacttagatccaaaacctctgtgctactcttggactcatgcaaggacacactccccagtgtcatctcgctgggtgaaacagacgaagatcc

SEQ ID NO: 332269 - DNA, 750 bp, Cannabis indica
tttatttttttttctttgcttgattttttgctgtaatttttttttttttttttttttttttaaactaaaaaggaatttagtactatattatacttatatatagcaagagaaagttattaaaaatgcatactaatataccttgtgagctaattcccccaccccaaacttacaacccaacattgtccccaatgtggctaaaagtataatcttgaattagctcgccacaaattacactcaccgcactcaccccaaacttaatgtgaaacttggctcttgacaagtgagcaattaagttaagatatatgtggaaatgcaagttagaatggatgtgatatggatgatcgggttgcacaacaagaataggctaaacggctcaaacttgggtgactagggaaaaatgcattttatagggaaggttagaaaagctcaaacgtccaaggatggcctaaatcatttctaagggacaagtcgaactaggatttcgcttcaaggagatgcactaaccaattctagatgctaacattacatgtgaaataatcgtatgagaaaggcaaagcatggtgaaatgatacaagtataaactagtgaggagagactaagggaaacatccataatatccaacaatgcaacatgataaggcaacaagtaaaattaggcagcaacaataatggaatgggcggaaagtatcatcatcgagcagagcactaggccactgaaaaactcataaatctctcaatgtcaaactaacaa

SEQ ID NO: 332270 - DNA, 1146 bp, Cannabis indica
cttcctccaatctttccgtttaatccaacttagtgcctccttaacacccaaagcttccatcatttcaggttgcaacacccctgaccgacagcaggtaaaggcttccaccaatgcgccagtttcatccctaatcacccctacaaagctataagttgcagttcctgagaaaatggcagcatctacattaatcttcaaggtgttttcagctggtttggtccaagtttcagcaccatcgacatcagtaaggaatgcagtcgtaggattaaatgttgaatcttgagcccgagtccaatctgcgagtaaagcttgagctaagtcagcaacactcgcaacagtaggggacttatcaaaccatactacttcatttcgatgtttccaaattgcccaacatgtcattgcgatcaacctccttttctccccattcgcctgctgtagaaccgcagcaaactagttggcaaaagaaccaactgtcgtcaaatgaacaccaacagccaactattcccaacacgctttggcaaaagagcaatccaccaagcaatggtagatggtttcatcagttactttgcacacagggcagatggtatcaataggcacatgtctagaacgaagtttggactttgtaggaggacagttagtagcagcacaccataacaagtctttcactttcggaggaacacttagcttctaaagagtattccaaaagatggaattatcatcctgtgcacccaactctttgctcaattgtaagaacttataaaccgattttactgagaaatggcccgagctctcccaactctaataccaaacatcacataaacgacttgaagacaaggaaatactaagaattaagttagcatccatttcattaaacatatcatgcaccaagtcaacatcccaagccaacgtatcagtttccataagtgctttatcattttgatcaataagagcaggattacgaagttactcttggattatcttcattcgacagccacggaaccaaaaacaatttaattcgagaaccatcaccaactctgcatctcgcctttttttcgaacaatctcttgagtttcataaatacttcgccacacgaaacttggattgctccctaactcaacatttagaaggtccaattcggtagtacctagc

SEQ ID NO: 332271 - DNA, 600 bp, Cannabis indica
ggagctggaggatctgttgtttgtacgggaggtacatcagcatcttgaccggaggtagaagcagccgcctcggttgcaccataagccacttgagaagcgcaaaactcgaggtacatgcccttagcatcacccaagtactcgaagtttgcctgaggattagccttccaaaagtcgtagaagagctctagaccggctgtctccagggcattgactttctctttcagcctcgccacctctaccgtaagctcctcctcgttggagttcttcttctcctccacccgacgaagaagcgctcgaagagaagtcctttcatcttgaagactgttcacttcagcaaataaggtctcgatggtctcttcaagacggtcagaagcctcaagatccttagctagctcaactatctttttctgggcggtaaaaagcttcttgttggcttcacccagctccatccaaacagctccaagttccaccctggcatcatcagcgtccttcatggccaagtccacctctgccctcatggtgttggatagagccatgttcctggaagtagtagacttagcctgggagtaggtgcaggccaacttcagaccggcctgcaca

SEQ ID NO: 332272 - DNA, 1038 bp, Cannabis indica
ccaccagtaaactccttctgtacaccagaagatccaactctatcaacattaaactttgagaatggaacatcatcaaagtcatcatctgactcttctcggccaataaactccattccagtaaggcaccaataaaccattccatttcattttcagtaggcacaatatgttttcctttcagctagcaaaacaagaaaaaataattagtttacaaaatataataaaaacaacaaataaacaatttacaaaatataaaaaataccttatttgaagatagaactttcttctcaacttcacttgaattaggatttccaatactcttccatctacaaaacctatatggtttaccagaatcataggaacaaaactttgccttcaagcacaaaggaatggtttcatacaaccaaaccaaaaatgcaaaaggtaaaccaggaagtttataagatcgaggacccttttccaaatgtttccctttaaccttagcaagaggcttagcaacaccttttcccttcataacacccctcagaccaatctttaaattgtgcaaagttaattcaaacactggtataccccatggaaaactaccatactcatcaaccccaattatgttcaaaatctcaacaggaactttttttgagtaaacgctactaatcaaacaattagtaacaaggtacaaaacagccatcttcacagcatactcatctgacttgaaatcactatacataaacctatgctcaacagcactaacagtcactgtctgatcacaaaaatatcgatcaacaaaagcattttctctgtgtgtatacttactcaaatcggcatcaccaacacacagtaaaccagaaacaacagcaaactcagctaaactgaatctgaaattctcatcaccaaacttaaaccacatttctttttcatttttctgatatacctccctatgtaaggcattatgaactaattgagactgaaaaccaacaggatggctatccaaaaaataaccaaaacaagtatcacgaaacaacttacgttgatctttagtcaact

SEQ ID NO: 332273 - DNA, 853 bp, Cannabis indica
gggcataaaacccaacatcaacaccaacgtccagcttccaaactttatgtaagtccctcgtatcttgtacactagactgtttgttcatatagcatgctttactgtttatttattttttctgggttggatgctgaatttctgggaatttttgtttgagtttctgcacaacgcggtagatccttcttcttttgcctttagaatacttctttttaccatattttggtcgaggacccaccttcgtcctacgtaatgacactttagggtttagagtagactttgtcttctcgattttaccctttatattttttttccttttctctttactttttgaaatgtcaccatctgtgggattcttgcacccgactcttgtcaaggaaaaccctttgaggctttcttttttggcaagtgtctggagggggcctctttccagcggttaggggaaccccattccctttttgaattagggtttggtttggggcctgactgctggattttttcaatctttttcagaaccaaaatgtctgcatccggttcaaagtcttcgaagaagggagagaagcatctggccaccctggaggaggtcatgaagggtcttgtggcccaagaagggcacaagtcccgtgccaacaggtgggaagcggcggagcttcgctccaccctgacctgccctcaccagttggaacagatcgtggtggtggcaggcatcaagcctataacctccgggacctaccaccggccgcctcgggacgaggagacgcccaaccataactacgggggcttcggaggctggagccaaacacacctgatggtcggggccatgttgttgggttttgtgccctaaataaaacccttt

SEQ ID NO: 332274 - DNA, 917 bp, Cannabis indica
tcgatctaattgattcaaataacaaaatcttttatttaggagtgatctagcattagcaaaggtgcaaaaatttgagtattgtcttgaatcctagttgaattgaaggctgcgattgtgtagtaattttgagatgatgtacgcgtgggactacctatgttagcaagaagtatcttgttttggtagctcccatggttgagagtccttaacttgtggtgatttcatttaggaaatttccccatgaagcgtgcgagtcggagcaaagcacgttggaaacacttggttggtccgtggagccagtcgtcagctcggaagcagctagagtgatgcactcgtgtataagagccatcattctgttggagtaagggcccaacagaggcttgaagtagggacgttaccggggataacgtataaaagaacatcaggaagagtagtggtatcactaaggtaaaaaagattatctaaattacttaaggtgatacggtaatgatggagagtactttaaaattgactggatagtcaatatggtataaaggagaccattgacattctgggaaaagatcactttattatgcaattatggaaaggcatactcacccagtatggggaaaaagcttatgaattgagatgcaatttaatagacatgtaattgagtgattggtggatgttgtatcacaaagtatgttgtttattaaacaaagagctatataattgagtgtaaaataagttttaaagtgattaacaaaggatgaagatagtgatgattacaaaggagcaatggtattttatgaactagggaggaaaaccttagtggtaatgacgggaaaagtatactagggtcttagatgtcgatgaattagcatcatcaacgggggactcactataggttggcatagtagttcatgccaagggattgtcaa

SEQ ID NO: 332275 - DNA, 1242 bp, Cannabis indica
catttcaaatttccttgcataaggtatattctagagagatcgtccaagaacttaatgataactcatatccactcctaaatgtacacccatatgctttaatacatataaacttacttccaagtggattttgtcatgttttctctttgcagagaatgatgttgtcaaaaccgttatgaacaagatacaaatgccatagatttaatattatgggtgtggtctttcgatcatccctaggtttagttacaactaagatttcatagaatagttaagtagattttggtcacaaaatacaaaactcataatctatacatttaacataaaattaggatcaattgaaagaaaatggatattaacaacttgtgaaatttatactgtagttttcaatgtattctagaaactgaaattcaatttctatttggaatctaaaaattgaagtcaaagacataaatttatatcaaatatttcttaagtaattattctaacttggacctccattaaaatactaattcaactctaaatttaagttgttttagtaagcatatgaagtaggagatttttctaagattaaggatttatatcattacgggatatgttgaccttgcttctagcgaacaacagtgagtcaaaaataaagcgattaaataagataagtaaaagaaagtaaaagtagtaaaataaagtgagcaccagattttaaagaggtccggccccataagtgtggtaatagcctactccccttgcatttttattgactgtagagaagaaacaaagtgttcttcctctagaaagctcttacaattgacctctgagtaagtttctctcttagatcactcttttctaccttaaatgtatttctaaagtaattttctcggtccgtttcatgaagaatgatttcccttttgcttataatgagtaaaataggaaactgtattaattctataattgaaatgcaagaaataggaaactaaaatgtgttgcctctattctctaactcaatcccgtaattataggaattatcttcgtgtgtggaaacaacaagattgatctctggaattgtatctttcatgcttcgctcggcataagcatgtctgcatcttggtcatacatcttctcaaccatcctgctcggatgtatgaatgttacagatgctgagtagtcatctatggactgctagggatactttcctctacccatgtatcaaaaatatgggacacgtgtcatccattttaatataatcagatt

SEQ ID NO: 332276 - DNA, 566 bp, Cannabis indica
cttcctctccactttcatccactattcaggtctatttctgcttagtttgaccttttgagtcgtattccttatatagggatcaaaggtgtgcctccaattgagtgaaaaataaaaattaggtcaaaaccacgatgtccgtacctagtcgcgactagcctataagctggtcacgactataggcaaaccttaaaaatcctaggttctgccaaaatctcgaagtcccgaccagagttgcgaccacaaaaaagggtcgtgacctggctcattggtggtcgcgactactgacgtctcttgagtagattttccaatttttcaccagtttgtcccgtcttttcaccaattaactgaatttgaactttgatacctcgggaacctgaaacaatgaaaatcaagcgtaaaaccgctccaaaagacaccaatagatgagaaaatgcttacttttcagtcccgaaacataggctaaatataacctaacagaattcccccaaactggtttcttactcgccctcgagtaagataaaaaaaactactacgctatcagataatcactacactgctgactcatg

SEQ ID NO: 332277 - DNA, 638 bp, Cannabis indica
tttccctctcccaaacccacgaaccctcacgaacccacacccacagacggacgcaggaagcgaagctccaccaaaacccacgaacccagaccacccttcgaacccacggccacccaaacgaacgccccaacgaatcaaacccacccacaaacccagacgatccgtcgaacccacgaccacccaaacgaaggtcaaagcactcgaacccagacgacccagacgaccagtcgaacccacggcgaccgaggagacccgcgagccccacgactgaaaaagttccacacctccatccaatacccaggtttgttctttttttttaactttaaattcacaatctgcgaaaaccctgaaatgtagttgtttggatttatgaattttagagtttggggaagaaactgagtttagggagatagattttgtgggttttttgattttgtgcgacattatgcgctgtatatgcgatttttatgcgattagtgatgcaatttaaggtatgtttcgttgtgggattgtgtgtgcgattaatgtgcgataatgtgcgagtttgtgcaatttatgtctattgtgtctgcaattgtttaatttgtgctattttggtcgatgtcttgtgcaattttgtgcgatttgtattcaaatat

SEQ ID NO: 332278 - DNA, 1109 bp, Cannabis indica
aagagtacattacgatgttactagcactagtacgagtaggtacatggtgtatgtggtacaacacttaacattactcggggtacggttcataccctaccttggtacaatggtacagaatcgtatcttagttaagaatattcttactcatttgttaagccttataaataggtatatgggcgcctagatacaagtcgatattatatgatttgttatatgcttttcttactgaatctgtcgactcacagttctattttcatgtgtaagtaaaggaaaggcaaaggctgaacaggagtgagcttgagctagggtgatgttgtacatgtcatggtgacgcgatctggagtgttcgatctcaggacatctggggttttcattttgtagtcgttctgcgacctaacttttgtattttggaatactttgtaaaatagtttaacaatgggatcccgacttttgtaaatatatatacaaagtttataaagtttcatagttaattataaagtcttaattcgacaagatttttaagaaaatttctttgattagcaaagatagcactgtaattaaaaaatcactgtaccgtgccttagtattagggcattacaattttggtatcagagctgccaggtttatctactgaagatcgccaagacatgtacaatcatcattagagaaaagctcggctcacggttcaataagcctttacttgtttagtattgtatgtaattggtaaagcatgttaggaagcatattagtttataattgtttattttgatgcgatgccttaaatccataagagcgggatttactttttttgatcgctgtctgacctgcctgacttatgggttcgcaagctaagtcttattaaatggacgcccaacaaaatacaaggagtcatggtaatagggttaagaccggaggcgattagggaaatcaaatttcccagaatccccgtgtcgcggtagaggccatgaaaggttccagggtggtcgatatgtgaacccacctcaagctcctctagattgggagcaaagattcacgaaaatgtaagatcgtatctgccagcaagatgaagaaattctgagattaaggtagcagggtcctcctgtagtgcc

SEQ ID NO: 332279 - DNA, 1314 bp, Cannabis indica
tatgcttaaagaaaagttgagttatctcttctgtcgaacactgcttcgacattggaatgaagattgcatactttgaaaatctatccacgatcaccaagatcgcattcaagtctccagtgtttggcaaacttgtaatgaaatcaagcgagacactcttccatggcttgcttgggaccaataaaggctctaacaaccttggcgtcttgtgcctctccactttgtcttattggcagatgagacagggtcttgtgtagtccaccacatcctttcgcatctatggccaatagtacccatgctttaaaagggcatgtgtcctatgccagccttgatgacccacccacaatgtgtcataacactcacttagtagcctcctcctcagatcgcctgccttcagaataaacaaatggccatatttggtccacaagaggtcatcatttacccaaatctgagttgtctttcctttccttgcaagagccatgatgttctttgcgactgggtccttctctaggttctccttgttgcgttccttgattggtatacccacttggctagctgacatacccgctaacacacctttagacccgccaactctactttacagctaagggcattagctgcctaattcagacgtcctaccttgtgctcgaattctaccaagaattcctgccatcgggcttgcttggtggttagtttcagctgcatgaggaaatgactgacaacagtattgtccgtcttcaccacaaactttgaccccaacaagtaatgcctccacgtccgcaaataatgaataactgctaggagctctttctcttgcgccgtataccacctttctgcatcagaaagcttgtggttctcaaatgccacggggtgaccctcttccatgagtacccctcccaaagcataatctgacgcatccgtctatacttcaaagggcttgcatatatttgacagggctaatacaggatcttcaatcatggcttctttcaaacttcaaaacacttcttcgcacttatcagaccacgcccatataacacccttctctaacaactttgtcaagggggtcgctcttctcgattagccctccaaaaatcatctataataattggctagaccgagaaaagagcattgttgtttcacattggctggggtcatccactcttggatcgcccacaccttctccaaatccatacagatctttctgtgttccaagacatgacccaggaacttgatactttcttgagcaaatgagcacttctcttgcttcacatacaactattctttcctcaactttcgaaacaccatagccaagtgttc

SEQ ID NO: 332280 - DNA, 1067 bp, Cannabis indica
aatggttccttttcttagagctcttacaatagtatctctgaatatgaattcttagacaaatgtttcgacgctttgcccagtgaatatgaatcactatttatagggctatttagatattgactatgggtcgggtacaagcctcgtgtcttgggtcctgggtcccgagtccaaatctagatcctggtctaggtccttagtctgggtcctggtttgggtctcaagtctaggtttgggtcttgggtcctgagtcatgggtcaaggtccccgattaaggtcagggtcctaggtcccagtcttggttatcatcctagtccgagtgcaggtcccagtccttgttcggtacttgtccttgtctcgggtcttggcgttgtctaggtctgggtcacaattctattctcaggtctcaggtccgagtattgggtctcgtatcccagtctcggtcctcggtcccagtcccagtcctagtcttagtctgggtcctagcccagtcaatgttcaggtctcggtcgttgtcctggtctggatcccagtcctgaactcagtactggtccaagtctcgcgttccagtccgagttcgtgtacgagtccgggtttgggtctgggtctgggtctgggtcccggtttcagttcgttttagggtctgggtcttggtctggatctgggtctgggtctgggttcttgtatgggtctgggttctggtcaaggtctaaggtcattggtcctggattctgggttcttggtcgcaagttctaacgcaagtatgggtccaactatcgatcccagttggggttcgggtctgtgttcgattctgcgtctagatctgtttttgggtcaacctctaattcctgttccaaggtcttcattccggttcttgttccaatttcgggttgcgagtccgagtctgggtttgggtcctagtctagaaattgctccaggtttgggtcttggtacgattccaagatctagacaccgactacgggtttggtccaagccccgatcgtgagtcatgtgttgggttttatgccgtaaataaaactctatttcaatgtaatccattttattcaaca

SEQ ID NO: 332281 - DNA, 1219 bp, Cannabis indica
gtcgggtactgctaatgtctactctccatcacccccgcgttttcgagaggaaattgctccagcagcagcaccgccacctactggtggtagttcggaagaggtaatcttaatgttagtttacgaattattcaaatgcaaaattataaatatggtcaacttacaaattgagttgttgcttgtttgttttggatttatagaccttaccatgttggatgcactgtctgttggagcctagtgggatggtactgaaggttgcttcaggccacattgtgaaggagaaatatttgaaagatggaaagttttccattaacatggaagaatacctacacaaagattatcgtcgggtatatatcgaagaagccaatatggagaatgcactgctcccgtgtcccttagtcgacgattcattgatgacagtaggtcaagctgtaaatggtcatgtggcatggccaaaagactatcttacacctgttgggaaatatttggtatgtttcaatttgtttacttaacttattgtgtttattagttaatggcattgctaacttattgttttttttcatatatatagacacaaccacccaccaagaaacttcagaagcaacccgtgaagaaaagctctgaagatttactcggtcctccaacacagcctctaaaacaccctgggaggccgagtaaggcaaaagttaatgcaaagtatgcccaaccacgccaaacttcttccattattgcattttggaacttcgtcaaaaggtggcccaagtcatccatgctccaattccaagtccagaatgagctatttggggtcgcagatgactctatttggcttgctaagagtgacattcaagaattgtgcaccatgcaatacttgggagcccaacaaataggagtttggtgcaagtatgatttataactcttaataataaactcgctaatgttcatttgacagcaacagttattaattatgacattttatcaggtaccttaaagaaagactgttggacatgggtgggttgaatcgagtctatgaatttttgaatccgggtgcgattgccaccgatgcaggggatgagagtaatcgttgccaagcactagtcgctcgaatgactaggatgactaattcagagaaatggcttattgccccatataataataggtatatgtagatgtaaactaaataatttcggtatttttaactcttcataaaatttattattatgta

SEQ ID NO: 332282 - DNA, 649 bp, Cannabis indica
gcccattttctgttttgactgagtatattctgttctgaagctgcctatctcaaatactagcaaggaaaaaagtttgtttttatctccttcttgaagccattttactttagatagttggaaaagaaaagacttgtataatctacttgctttagcatatattcccctagctactgcttctttctgaattccacattaagtaaatcctttttgagttcctccatacactcctttaattgttgcaaggcctttacacttttcgagtgcaattcattaaaacaagccatgttagttccttaaggacaagtttcaatctttttaattttgtaacaagatagtacataggagtcctgacactcattcttcccagctctttttaactaattcagtaaaatcaggcgcaccattcaacattttaaagtacctaagtggtttcctacccacctgaggcaatgagtggactgttaacaatgcggggtagttgtcaaataggcatgtcaaaaaatccatttagttggagcgggttggagcttcgatccgacgaatcaaatatgaactaaaatattcggatacttattggatcttggatcagattcgctctgccccgcctaatttttttctagatcggttctgatccgacccgatttcaatt

SEQ ID NO: 332283 - DNA, 747 bp, Cannabis indica
tttcttatagctcttacaacagtatctctgaatatataattcttagataatagtatagtcttagctcaactgcttttcgaccgatcccttgcccagtgaacatgcatcactatttatagggctaagaggcttgaggaggaagagtttcccctctcgttacaatgcgtataaatagaaagatcgtgggatcaatgctgaatgcaaggatcgtgggattgaggctgaatacactgatagtgggatcgtgtgtatgccatatccacgtaaattggtccctgagttatagggattgtgctgatgactcatgatgcgaaaactgaattcgctaagtgttggtcgctctgtgcggatcgctgaatatcttgctctgggcatgccagcaaggcatcctgctcggcctatcttcccgagcagatgttccaagtggactccacgtatcaccattcacatgattccacgttagagtgaaaaaattgggataacattggcccccaagtctgtacgggacttctgaagttgcgtgtagacttgatccgagctggttctgcctttggatggggacacgtgttgaacgcgaccgtctgagactcgatgtgaggctgactgggcgtcccttcggctaataaatgctctgacaattaatattttgaaatccaatttttgctctccacggctgacggctgcacttgattacttttgatttcccatattcgttttcaaggcaggaagctgaggcatctgaggttc

SEQ ID NO: 332284 - DNA, 824 bp, Cannabis indica
agtagagtatatatatatatatatatatatatagagagagagagagagagagtaggagtagaaaaaattcaattccttattttttttttctaactttgttatgcctttcctggtattcacttgcttgttccattatgatactatatatcctatatatgtgttaaatataaagccttttaatcctatatttaaaataaaagtaaatatctaatttgatttgaattagaatccaaattcaaatatatatataatatctaataattgaatatcaaatatcagttgatcttttattttaataattatcctttaattaaacaattatcatataattaatttaattaataattaaaaaaataattaacttaatttaattttaattattttaaattaataaaataattaaatgaaattaattatgggtctttatatgtcaccctacacgtgtatatttggcctgcacgtgcgagctatattttaaggtccaaaattaatttcttaattttctataaataatatttattatcattttatcgataaataataattgattaatttcattaatcttttatttcacgaggattaaaaataaatattattgtctctaaagtaatatagttctctctttcatattatttaagaataatattatatctaactaattaatatagttttatttaataaaaataaatatttaaatgctattaattgtacaatgcataattactataatttttcaaaataataattttacaaattactattttgcccataagaatttatttcccaaagaaattaattctcactcgaaattcattcatcaaata

SEQ ID NO: 332285 - DNA, 721 bp, Cannabis indica
atggaccaaagaatgcgaggagggattcaaaaaattaaaagaacacatggccaaacctccgatcttgtcaaagccagttcttagagaggactggttactatacttggccgtctccgagaatgcggtcagcgcagccttagtccgggaagaggaaaatacccaacaccccatgtactatgtcagcaagcatatgataggggcggagatacggtacccagtgatcgaaaaactagttttttcctcctgatggcttcaagcaagttaagaccctacttccaggctcaccctatcaaggtgttgacaaaccatccgctctggcaagtcctgcagaagtcagaggcgtccggaagactcctcaagttggttatcgagttaagccaattcgacatacactacataccacgcacatctataaaaggacaagcactagcggacttcataaccgagtgcaatgaagcagaagctagcgcaaacctaccaatgccacaaaccccagcatggaaagtattcgtggacggagcgtccaacgaaaacggatccggagctggggtagcaatgatatctccgaacggactccgactccaggcagccctacgcttcgaattcacggcttccaataatgagctgagtacaaagtcctaattgcaggactaagattagcaaaagtcgtgggggtcacaatagtagaagtcttcagtgattcgcagttggtggtaaacca

SEQ ID NO: 332286 - DNA, 503 bp, Cannabis indica
aaaggcaagtgctagcggacttgataaccaagtgcaatgaagttgaagctagcgcaaacgtccagtgccacaaaccccacatggaaagtattcgtggatggagcgtccaatgaaaacggatccagagctggggtagcaatgatatctccgaacggactccgactctaggcggtgctgcgcttcgaattcacggcttcaaataatgaggctgagtacgaagtcctgattgcaggactaagattagcaaaagtcgtgggggccacaatagtagaagtcttcagtgattcgcagttggtggtaaaccaagtgtcgggagaatatcaaatgcgtggagaaaaaatggtcgcgtatgtagcaattgtccgggagctactccatgagttcacagattgtaaagtggaaagcatcctcagagaaaagaatgcccacgcagactgtttggctaagttaccgccagacagcgagattgagaaattgagggtggtgcccgttgaacgcctcac

SEQ ID NO: 332287 - DNA, 642 bp, Cannabis indica
cccaaactcatctcgaaataatttttcgcaatagttataatgaatttgtactactaagaagtaaatatgaagattgatttcgcattaaattttgtgaaaacgaccccctaattcaaatattaaaaatatttttcttttcagggtaaatttcaacaagttttttccttattcttacactcgttagtgctctcttaaaatctcaccctactcatctcaaaaaatcgtgaaatttcacagattggaagccaatactgttatgcatcacttctctaccagtcatgtggagatgaaatgtaattttcacgcactaacaatcattttaatcgaaatagtgaaaatttcacatttctcatagtggtaccccattgtgaaatatggtccggacccatctttgaatatttttccgcattagacacaatgaatttgtactactaaggcatgaatatgaagattagtttcatgttaaatttggttaaaataaccactagttcaaatattgaaaatgttcttctttatagggtaaatttcaaatagtttttaccttactcttatactcgttagtggtctcttaaaatcttgctctacatatctcgaaaaattgtgaaatttcacagggaggaagtcaagaccattgtccattac

SEQ ID NO: 332288 - DNA, 820 bp, Cannabis indica
ttggacccttttctggaaatcttggagattggctgctccctcttgttgtagttcgttccagaaaggagtccctatgcgtatcccagcctggaggagggcaagctgttgtccgtcgtccaccttcttggtctttgaagcctcctctttgaatctttttataaagttctttagagttcccgaacgcaattgttttatattagtcagggcgctgacttcaaggttaatttttctcgccgcaacaaactatctccaaaagctgacttgtagcttatttcagcagtctactgatcctggttccaacttcttgaaccattcttcagcgaaaccactcaacgttagtggaaagcataaacactttgcgtaattactgcccctcatgacagtcatcactcggttgaactgggacaaatggtcactgggatccgagtcttcaatgtatgttgccatcttgggcatcttaaagttcttggggagctctgcatccagtatgtctcgggtgcatggttcccggtcctcacaatcggaattcgagtcatcccctttttgtatccgggagaccctagcaatgtctttgcgcagtattgctaactcagctaggattccttcattcaacgtgaccgcggaagccggcagcgcgtgtttcttcttgtcaaaatggtctcgtaagtcaccatgcttttcattgattttttgtcttaagttggctggagggtacctccggtttttcctccctctctcctcgagttcttggtgaacggatacgctctttcagtcctctcggtcctgagggccaagactcgctcgagggagcttgcccctc

SEQ ID NO: 332289 - DNA, 502 bp, Cannabis indica
ctctctctctctctccctccctattagtcccgatgatctcaaatccctttggcagccaccacatgccacctcgaaggttctccgaaaactcccagccacctcgacggttctctgacaacctccagccacttcgacggttctccgacaacccccagccacctcgacgatgcttctctctcccttgctgctctcgtaagtcctctcctctcctcatttctctttatcaaaattgttgttttatttttccagatctaggtgttttgtgatttggaaaaatacatattttggtttaagaaactatattttagtgttttgtaatttgcatttttttttctgttttaggtgagctttgattggttttatgtggtggtggtagttttggtgaggtgttggtggttttctggtggagagagagagagagttgactataaatgaaaaactgaaaagaaaaagaaacagacgaagaaagaaaaaaagaaaaagaaaaagaaaagaaataaaa

SEQ ID NO: 332290 - DNA, 1916 bp, Cannabis indica
ccttccttatagaaattttgtcctcaaaatttatttaaacagttcgagatattacccccgtatttatgattctaactctcaaattgttgtttctatctttctatgtatttttttatagcactttcttaactagtggatctgtctcattcatagtacctcctctttttagtccaaaacttggacaagatatttttcccataaaataaatttgtctgaagtttaacatcgtcacagatcagaatatgggtcgagttggatacatattttctcagcatggagacatgaaacatattatatactctgaacaacgtaggaattaaggctagataataggctacctagcctatttaatccagtgaacatgtatctaatatttctctcgtaccacagttattaaggtacctaaccagtggtacatttaattatcacttttaaataaacaactcataagggaagagattattctaagataatctacctttatcaaatatgctcacatcatgtttctaatattctattgatcttcttaggttacccacctttcaagaataaaacatcatacaattcttgctttaatctccatggttctcaatagtcttctttaattcttagcattatagccaacgatatcaaccttggaatttaacaagattagactattccttcgtatgaattccatatccttatttattgtataaattgtctatattgatagacaacatattaactcggtatgtccaatcgttactattcagccgaaatcataagatcccacaatacatagttcataattatgtgttttcattccttatatgggacctcctaagctgacctactgacttagcttaataataagttaagtattcatttttgatagatattcaattagagcatttcttatttccacctgtttgaatattagttgtaaggaaattagggtaacttgtattttagtagtttcctattttatgattagtagtttcccgtttagtctcctatctttgtatataaataggtactattctatggaatacatacacaattcgattcactactttctacatagtatcagagccattgtgatcgcaatttgggttcataaaaaaagattagggttcttttttgaaaatcttaattggagtgcgaattgattctcactgcccactcaagagtgttgcccagccgccaatctacaaaaccccaaagtccggtcgctaaattccacgcgcatggggctcacgcgtcgcttaaagtttctgttcattttcccacgcgtcggcgcgtgtgacggcatctttgacgacgttcttttgctggttctttgttctatttttctaagcctgcttgcatctgtttaaggttgtaattcaatatttttttttgccttcttcgtgtttgtgtgttcattctttggtattctttttgttccctttctctatcaattgtttttgcttttgagattatggcagagataaaatcaaattcaaaatcaatcattgtttctgatgtggttctcgtgatgtctaaaatcacggaccataagttaattggttcaaattatttggtatggagtaagacgattcaaggaaaatatggctccgtgaggatgctcgcttgttccttcaaattcaaaattctatcgataatgacgtaattagtttgattaatcattttgaattggttaaagaactaatggattacttcgagtttttgtattctggcaaagataacatatctcgcatatatgatgtttgcaaagccttttattgtgcggagaaacaagataagtctcttatgaattattttatagctttcaagaaaacgtatgaagaacttaatgtgatattaccctttagtcttgatgtaaaagttcaacagcgccaacgagagcagatggctattatgagttttcttgc

SEQ ID NO: 332291 - DNA, 755 bp, Cannabis indica
agattcatagggataatatcatgatatgtcaggacttggtgaggcactatcacaggaaagcaaacaagccaagctgtatgataaaacttgaccttcagaaagcatatgatacagttgagtgggagttcctagaggaggttctaactgggcttcacttcccaattaagttcatcaggaccataatgaactgtgtctctactcccaagttctctcttatgtttaatggaacattacatggtttctttgaatctaggagagggcttagacaaggagaccccatgtccccattgttatttgtgattggtatggaatatttctcgagactaatggggaagatagcagataaagaggacttccaatttcatgacagatgttcaagcctcaaattgaatcatcttgcttttgcagatgatgttcttctctttagctatggagacttcaagagtatagtttacatgttacaagctttgaagctcttctctttaacctctggcttacaccctaatgcatctaaaactgctatttactgtagtaacatgcaggaagaatgtgtaaacaagatcaggcaattatcaggcttcatgagacatgatctccctttcacttacctgggagttccaatttgtgctaaaaagatttccaagaaagaaagtgagaccttggttgataagatgacagcaagaattagaacctggagctcaaggaacctttcatttgcggggagaataacactaatcaactctgtattgattgct

SEQ ID NO: 332292 - DNA, 1228 bp, Cannabis indica
agatcctggtaaaataaattccaacattatggtcgtaccgcacaactgagaaaacagcaaccggacaaactccttttgccatgacatatggttatgaagttatgctgctcgtagaacttgaacctccatcccacagaagattgacatataaccaataaatgaataaagatgtttattttaattcaaattgagtcaagtttattaggaagttatacatttaccattatatgcgtacaaaaagtctgctcgtacccaaagacccgaacagacaaaaggcgtacttgtgaaaaataagtgaccaagagtcaaaagtctcctcggtcacttgaggggcacctatacctgtacaaggtatttttgtaataacaagcacacaaaaaacaaaacaaacacagttgcacaacgatcataaacaaggaacgaaattcattaaggataacaaagcataaacccaggattaaaagctgcccggtcagccagttgtttgaaaaatgaaaaatattccaagtttaaagaccgcttggccagtcacttagtttcaaaagaatgcctattggcagaacaaacatatacaaaaaaaaaggatggtagaaagaaggcatttcaacggtagaagtcccaggctcttggtaagaatcgactgggtctaggggcccgaggatcaccggtctgagcaaaaggagcctaaacattctgatcggtaggtgaagtggaagtggtcgcctcagggttctcattggccgcctgagccacgcagtagtcgagaaacatgtctttggaagcaccaaggtattcaaaatttgctttggcattggccttcctgaagtcataaaaaatctcgagtccaattgtctctaaggcatccactttcttcccaagctcctccacctcagatttttggctcttaacctcagtttcaagctcctcttccttggtcttcttgtctttgacctcatcctccaacctacgaagggttcgaaaattgaagagagaaagagagcgagaaggatttgaaaatgagagagatagaaggctcaaaatttgactgaaggctaatgtgacttaggttgtcaattttgagtctatcactatccatttataggaatccttctaggtttgcgtttaaattatttggcattaaaaaaattgataaataaatggtaaattcatgcttaagtggtcggccataggatgtgggcccaccacttgtaattttgccatttttcaa

SEQ ID NO: 332293 - DNA, 826 bp, Cannabis indica
ttaaacacatgaaaaacatgtcgccaaatttcgtaaagggaatcgcaacatattgcaaactaagtctccatttatcgatagtaatcgcaaaaaacatacacataatttgtagaaaacatcccctacgttgtcgcgaaatatcgacaatcaagttgtcacatctcgcgaactataacagccttaccaaacacacaacaaaaaatttaaccatatcttacgaaaatatttacaatgttagatgacatcaagactaaacatgtcgcagatcgacattgcaagatgtcgtgaaaaattgcaaaaaacaagcaactgctacattttgctgcatctggaaaagaaatcgataaacatcgcaaacatagttgctaaatgtcgataataggcaaaattgcagatcttgaatcgtaaacatgaaaactcaacccgaaacaaaaaatgaatctaattcctaacaatcaagcatttaagatccacaacccatttaaaatcaagtaaagtttagaaatatacccttttcttgtaattttgttgtgggtttctcgattttgttgggttttacgatttcgttgtgcgactgtctctggttttcgtggtttaggtttggtcgaaggtcatgggtctcgttggggtggataggtttcaagtggattttgtcaagtgagggtggtggagccggtggtggtggatattcttggtgagatttagagagagagagagagagagagagagagagagagagagagagagagagagagagagaggagagagagagagagagagagagagagagagagtagtagagtagagtagtagtagtagtagtagt

SEQ ID NO: 332294 - DNA, 1342 bp, Cannabis indica
agtcttatttagtaagcgacaagcagtctataacgattgatatatagcaaagcaatataaagacacaggaattttatagatgttcagcccgagcagttcgatagtagcctaatcctcattatttgtattaacttaagaacaaggagaaaggttccttttcttgtagctcttacaacagtatctctgaatatgaattattagataatatctcttaagtaaaatctctcgaccctttgcccagtgagcatgcattactatctatagggctatgagcttggagaagaagtatttcccttctcgttacaatggatataagcagaaagattgcataataaatacagaatacactgatcgtgggatttggacagcttgccatatctctgcaatctgatccccaagttatagggatttctttgatgactcgcgatgtgaaagttgaattcgctaagtgttggtcgcaggcaaaacgtctgtgttatgaatgctctggttgggtgctgaactgttagtcccagtctcttgcacactaggcacgatttcatctacaagagtcgtcacaccatgacctacgttcgccggctgttcaggattaacagctggcggaacccttgtgcttccagggttctacaatgcaagatccaccacctgtggattttctggatcaaccaggcccctacgagtttgtagcaccatcgcacttgtggttagatctggaataagagcaattcttgattttttctctcaatgaaagcaccaaatatgacctcgcttttagccaacgacagtgagtcttatttagtaagcgacaagtagtttataacgattgatatatagtaaagcaatataatgacacaggaattttatagaggtttagccctgagcagttcggtaatagcctaatcctcgttatttgtattaacttaagagcaaggagaaaggttccttttcttatagctcttacaacaatatctctgaatatgaattcttagataatatctcttaagtaaaatctctcgaccctttgcccagtgagcatgtatcactatttataggtctatgatcttggagaagaagtatttcccttctcgttacaatagatataagcagaaagattgtataataaatacagaatacactgatcgtgggatttggacagcttgccatatctctgcaatctgatccccaagttatagggatttctttgatgactcacgatgtgaaagctgaatttgctaagtgctggtcgctctacgccgattgttgatcgctttgtttcaggcatgcataagtggcatcctgttcggactgtattctccgagcagatactcgaagtcgattccac

SEQ ID NO: 332295 - DNA, 1122 bp, Cannabis indica
ccatgtaagcttcattataattctaagctacaaaaaacctcagcagtgcaaaattcaggctctacttaactaaatgagcattacaatcatgttaatcggttactcgcaaagccattatcttgagtttcttcatagcagagaattacttgaggagcgaaagcacagcaaaatcaagaggtttatctggtgcaatcctgtcatctacaatccaaggatggtttgaaagtaaaaaattcttactaatatactattatacctgaaattcggctagcatatagggtcagaatgggcctctaaggaactgctgcaaatagatcagaattcagtaaacaacattcaaaactacaagctgatacaggaaaattcacaaagaaaaggacttacgtatgattcagaaggcggaggtgtttattggagataaacccgtcatccagaagaagtcatctttgaaatctgtcttattgggtagaccatctatgagtctccggtcgttagtgtaagccccgagataatagaattcctcacagcatttttttctcgcagggacagctttgacagagtaaaagcaagcaatctccagggaagtaggacactcccagcctaagatgtggcacaagaccttgaggctcgcgaggatcctgtaagaagtaggattcagctggaagggggcaacctcgaggtagttgcagtagtccttaaagtaatacctcagggggagagtctccccagcattaatatgctcaaggctccaggctccaacacccgaggagttactggtgctgggaccatcacactcctcgcgtattatcctttctggaggataacagttgaatttcccaggtgccacaaacctgataacgtaccctttatgttgcctaatgtcacaagactgaaggatgccaccaacgtaggccccaatagacctaaccttagactcgataagttctgcctcaaattttacattggggtcttgaagggttttgattttcggagcgtagaagacatgatttcaaactcaaggtcacttgcttcaaaagcaatagttgttggaaattattttaccaggatcttagatctactcacaagtatgttgattaacatcgtaaatatgaacttctaaaa

SEQ ID NO: 332296 - DNA, 1013 bp, Cannabis indica
aggaggccgagcagcaagtaatgaaggagcaggctgcaaaggatgccgccatggcatcaaaccctcctgctggtggtaatgtcagtaaggggaccgacagtggcaaccctgagcacaaacggaaggctgaggcttccggagcttcagggggaaatagaaagtttcggggaaacagaggtggccgtcagggtcgcgggtcctcattccgatcatatccagaatgttctaaatgcaagaagcatcatcctggtgagtgccgagccaaggcatgtttccagtgtggcatggtgggccactttatcagagactgtccccaagccaagagagaagagcctaagaagaatgttgctcagaacccggggcgacttttcactataactcaggcagatgctgatgctagtccgtcagttgtgacaggtcagttatctattaatggttgtgcttatactgtgttatttgattcgggagctactcattcatatgtatcgagtagagtgatagaaagtttacataagccatgtgatatttatgcttcggggtttggaaccctgttaccctcgggagacctgatagtatccacaaggtggattcggtccttgtctttttggattgacggttgtgagttgaccgccaatctaattgagctgcaattatctgattttgacataatcctgggaatggattttctgtctaaatatggagcgatgattgactgcaaacggaagatggtggtgtttgagcccgacagtgctaacccagcggtgttcgtgggtaaagttcaaggggcacgcataccgagaatatcactgttgaaagctaaagacctgatgggtagaggttgtctagggttcatagttactgcagtggacactagccaacctgtgacatcagggcctgaggatataagattggtatgcgagttccttgatgtctttccagaagatttgccgagattgccacctgttcgggaaattgaatttgttattgaattggctccaggagtggatccagtg

SEQ ID NO: 332297 - DNA, 941 bp, Cannabis indica
tgagttgtttttatgttggtaaaccttggcttgatgtagttttttatcaacttcggtgtagcttgtcttttttctgcaaatctatgtttagatcacaacctttctgtcatattttcgaattatgaatgacttggttggtccgtttctagatgtcgttagtgcccacttgcattttggatccatgcaacaaatttgtatgttcttgcgcaagactttttcactttgaattggaagttggtttctaattgcatagaaatcaagcacactttgaagtgtttctttgtccttgtatatttgtgattttgaaattattattagtgtaagacaactattttgattctgttattgctaatgttaataatgtttccgaacattttggatactgatttttataacaaaaaataaaatgatctttatgaaatagaaaagaaacttacttctatttcctttcttatgttcaagtcttgtatttccaattctgaaccctgttttttttcaattttttattttttgtttttaatacatttatgaaactatggaaaaactgaaatgcaactattacgaaacgttttaaatttattaaacaaattaaccatttgtccaagtgttttctattttttctctgtcaaaataaattcctgcaatattgaataaaaccataatgaaatgatgatgcaactataaatcaacttgaaaaaacttggaacttaactccaattaacatggttgtagcttgattctattttgaaatcataaaaaaactactatgcaactgaatataccttatctgtattgtttatatttgattaggattgattgggagctccttatcttttcgttattttgattcagttgttgccaattgtgaaccctgtgcttttcatcagttctatttgaatcaaatcttctttgtaactattataaaactaatatgcaactat

SEQ ID NO: 332298 - DNA, 1664 bp, Cannabis indica
gtaaaaataatttccaacagtttatacagttgatcatgcaatgtgtgtctactccgaggttctcccttcttttcaatggctctcttcatggcttttttgaagccaagagggggctaaggaatggagaccccatgtcccctctcctatttgtacttggtatggagtacttgagcagaataatgggagtagtgggaaagaagaaggaatttggttatcacgaaagatgcagaaccatgaaactaacacatttaatttttgcatatgatgtattattattttgtaagggtgatttcagcagtattcatctcatgctacagggtttgaagttgttttctcagacatctggtttgcttcctaataatagcaaatcgataatctattgtagtggcatggaggagaatgagattcaaagaatagttaatgtctcgggattcactaaacaagaggtacctttcaagtatcttgacatccctatatgtgccaagaaaatttcagctacagagtgtaagattcttgttgaaaagatgactagaagaattaaaacatggagttctcgaaacttgtctttcacagggagaagtgtgttgattagctctattcttatgaccatacatacttactcatggagttaaattttgcttcttccatcaaaggttgttcatgaaatagagaatatatgtagaagttacttatggaaaggtacaagtcaaatggttgggtcaggaaacattgcttgggctaagatctgtaagccaaagtcagcagggggaattggtttcttgagtatagctaattggaacagagctactttaatcaagaacatctggtcaattgcaacaaaaaaagacaatctgtgggtcaaatgggtccatagtgtctacgtcaaaaataaagattggtggggatacaatgcccctctacaaagcagctggtattggaggaagttagttgagcttaagaatgagctcaaaaaccgaattgatcttgttacctttatcaataataaatatatgattgctgcaggttacaaaatgtacaatcaggctgaaaatcattaccattggagcaaacatgcttgaaatagactcaatattcctaagcattattttgtggtgtggattattttgctgaatagacttaaaacaaaggatagattgctcaaatatcatattgtatcagatgatagatgcttattctgtcatgggaattctgaaaactgttgaacacttgttctttgactattctttttcacaggaatgcatacatattttagagcagtggttcggttggaagatggccctcactctattacaggggctgcttcggaaattggacagagttaagggatataaatttcgaaagagagtgatcatgccaggtatagcagcattggtgtacaatatttggctgaccataaatgatatattgtggaatgaggcgactgctagtgtccaaaaaaaatttcagcaaacaaagtggcaagttaagaatagaatttcttttgttatgccaaataatgtaaagaaagaagaagttgaatggtttgagaagttgtaagtaatagtggaaaagtgtatagaatcatatgacatctcttgatagtcattaggtgtaaaaattgtttgtatggaatgaaactctgattcaataaaaaaaaaaaaaaa

SEQ ID NO: 332299 - DNA, 1041 bp, Cannabis indica
ggtcgagctggttatctgcgagaacaaaaaagagcgagttagcatgagatctcaaagtaattcagaaaatgcctaagttagaaaacacgcgacgtactaggtctgcgattaaaatcagttctaatcccagggactttgaagatgtagaaccattttgatttccagtcccccatattcgacaccattccttctactccattgatttcagaagtcgcccatttgctaaagcagtagaaaccgttatgaaggcctacgctttttatatcgtagaagtagctgaactcttctaccgagggagccctatgaacgtactccatatacatcgcgtaaaaggccagggcagtgcgataactatttggagttagttggaaaggtgatacatcgtaccgtttaaggatggctgcgatgaagggatggaaagggactgataccccacatcggagaatgggtattgagattaccacatcctctgtgggaataatcgcagggttggtaaaaggaaggtgcgccctctgggtcggtttaggtcgctgaaacgcaagtcgcagcaggtttaacctcgtaaaggtagtgaagtctgatttggtaaccctcgaaatcagatcctcgcacgcgaaaggctcgttcagctgggcgtcatcgaccgagtctgtcccactcccttccgcctcttcttcatcctcgcctgattcgcgagctggggccgtccagtcatcgtccatctcctcgacctcgacgtcaggagcatgcctcgaatgaataaggtagtcgcgagccgacaccgtagactcgctgtctcgaatatcgatggtcccaggttcggcgagttcctgcaccattctttcgatgtctgcagaagacatcgggcctagctctattggtgcgacctcctcttctgaaatcgaagctgggagaaaactgtcttcctcctggtcatcgtcgccatcgaatgcatggcctcccgagccgagcagttggctatccgacaggtcgctcatctgaaagatagaagatcttttcagcgtgatgaatgtgtgaaaa

SEQ ID NO: 332300 - DNA, 595 bp, Cannabis indica
cttcgacacaataaagctagggtaattattttttattttacttaacaatgatttttttaacacttgtgcctatatttaatcaccttccaatcttctaggggaacttattggcagagaggtgctctgcagtcatggccaagatgtctgaagagttacagactcttaggatggagtgagctacttctgactagaagaaggaagaggccttggctgcgttgatggaaacttaagcccaagctgacagcttagtggagtagcgagtcaagaaaaaggttgacaatacaattgtatcaaaaatacaatttcactctattaggatcatcaagctaaacaatttcaatttgataacactcaaattgcattaacaatcactattacaaaacacacttttggtgtcggttttaaactgatacttatacttttagtgtcggttcataaaaccgacatctagtctacagtgacaaaaagtcaatttttggtgtcggctctaaaacgacaccattgagtattggtctcgttttataactgacacttaaagtatacatttatgttttttcttttagtgccggttttaaaccgacaccattgagttttg

SEQ ID NO: 332301 - DNA, 772 bp, Cannabis indica
aataatatttactaattgaaattaaaatactactctaattaaatttatagttagttatatattatttatggaacgtgtctatatttatttaatatatgctaatttttcttcttgaaattgtaaaattgtacattttataaagagtttatgtaataaatgttagtacattttttaattaaaaaataatattttcttttattatatattaaactatttattacttaaaataggaattattacatagaaaatataaattgacattttatttacaaaaatacctccataaggtaaagacaatatttatacctttgatgtgattttaattactaaaataccacttacactatcatcacttacacaatcagatgatggttgcagggtggttgctgcgtggttgcacggtggttgcctcagacgaatcagacgatggttgcagggtggttgctaggtggttggctgaaggttgcatcagacgaaggtttcaatcatacgaaagtttctgggtggttgttgggtggttggctgaaggttgcattagacgaaggtttcaatcagacgaaataaatgttagcaaaatatttaggcaactgtaatgcaactataatgcaactgttctgaaacattaaaaatcaaaacagtgtttccacctacgtaactctatctacatgtctcttaatgatttaatatgaataaattcaccattagaaatttggaaaacaacaaaaatacaccaagataaacattttactataatattgatgtaatttttttt

SEQ ID NO: 332302 - DNA, 795 bp, Cannabis indica
aatattttatataaaaaaattaaatttaaaatattataaatatttttaaccatattttttactttattattattttttgtaaagtttgaaaataaaaaaatattatatcaaatttacaaatttagcctatatagacactcaaatttactaatgtgaatttttgttaagaatatagtaaattacattataagatacattacctactaaaaaataattaaaatctcaaaccttatttcaaaaattaaaaattaattgaacctagtggattgcaatgaacatcaacctagtatacatacattttgctcaattttattctcttgtatttcccttagggaaatttgattttatatacttaaaaaacaaaaaaaattattcttaaaccaaaaccttttaaactaaaaaactatgacttttttttcaaaaccccaaaaataccccctcataattcaaaccttttctctctccttccttcaaactctctctgcatcatctctctctctctctctatctcgcatcccacaaccgcccaccctcaccaccacctccgaccctcaccaccacctccgaccacccgcaccaacaccctcgacccagcccccctctctcggaccacccaaacgtcgcaccccctcaaccccactctctcttcctctcttcgaaaatcgaaaaaaaaaaatccacagagtccgatggtcggaccatggggtccgaccaatccgacccatcggtgttaggttttatgccctaaataaaactccatttcaatgtaatctattttattcaacatcaataaag

SEQ ID NO: 332303 - DNA, 875 bp, Cannabis indica
gataatcagcgatgaagtatacttacacttggagtaagtgttatgtcctttccaggacatttcaatagtatactagtctcgaatgtatggagtatacattggactggactgatgttgagcttagttaagatattataatacttaccgttatatctttccaagtcaatatcactagttgatcttagatcaaaagatcttaatcctgatatgcttgggttcaatctcagggcaatatgtacatattaggaacatgatagtatgattgagttggagcgctaaacataaatatggaatctatagcttctacaggtatttagaagtaaagtaatgatttccttggagcttagctaaatagatgtaaatggaagagctcttatttctatgattatgttttagttcacttaaagatcatttacaggtagctaagtgttttaaggatcaaaatacattgaggagtgaaacggtaaattagttcctactcggtgtaaatcatctatatagaggatctttgattatttagattataacgatggttaaatgtgatagcgtatctatatggtggaacatatagagcgttctatatgactgagagtgcaattctaagttccaagagttgatgcaacaaggaatgaataagctagtgaatttacttggtaaattcctgatcagcttattggaagctaagaaatataggcccattgtccccattctagttgagaccatactgcttgtaagactcagttaattgatttgtgattaatcaattataattcaaaaattagactatgtctagtttgtgaattttcactaagcaagggcaaaaatgtaaagaaaagagattctacgtttctttattaattaagagactctatatg

SEQ ID NO: 332304 - DNA, 1126 bp, Cannabis indica
ccaatgcactaggacaacctgagcactgggcttagatttttgaccttcgagattcttattttcttcctgagtttgcttgtatcttcgttaattttgatgaaggaaaaaaattctcgaaacacttttttcaaaaatatgattagaaacagcccatgttgacaaaatattaacctaggtgctaggtccaggtttaggccactagatggttctatttgattctcgaaaatacttgttaatctttgacaaaaatgaagaatatgcctgaaagacttcttgaaaaaactccttggaaatggcacaggatgacaaaacgtcaacctgggcgctgggcccccttttttggcctccagtgggtctgtttcttccccaaaaacacttgttacctcatttttgatgaagataaagagaatgctcaggatagttcttcgttttgattcttggaagtgctctaggttgacagaatgccaacctggatgctaggtgtttggggtacctagtgctccggatgctgaaaaatgaaagtgttctgaattttattctgatgcctcaaatatgttcatgacatgtataattcatgtcccagtataaagtttgactcatttgcactaagacggtcccaaaaactgaaaccttagttgaaatgtcaaccttggcactgggtgaaaccctaggtgcccgggttgacttccaaggtgttatttcgtgtattttcaactttcgtgcctcagacttggattcttcttgacttagttactcaggatattaaaggatggtgacttggaaacaacttggcgggatccaaatacccattccagagcctcaaagttaacatgggcgtagggctaaggaccctttcccatgttgactgctatgactcgagtttcttcactcctagaatattttctttctttccacgtgtcaaacattgatgttcacatcgtcaaagctagttttggtgtaagaattttcccccaagtcaactttacacttgtatgaggttgaatgaatgacgtgaactaagcccatttctctcgaaactaccaggtgggcatcaattttggaaatcttaggcaattgaattttgattgtcttaagtgatttcatttgaattgggagacttctaaaa

SEQ ID NO: 332305 - DNA, 815 bp, Cannabis indica
aaaaaaaaaaaacacaaaaaaaatactcataaatataaacaaaacaacacacaatgcacaacaataatctaaaataaaatataagtgtgaaaatagtttcaaacctagaaacaaaataataaaaagaaacttaaaataaaaaatatacaataatatcataaaatagagcaacctcattacaaaacccttaaaacctgtaaaaccagtttcgaacttatgaaccctgtgaaaccatattcgacactatgaaaaattataaaaaaataaaaatgctaatcaataaagctaactgaaacaagtcatcggaattggcatagtcgccggagttgctgccagcactgggaaaatcaccagagttgctgccggcgccaaaaaaattattagaatcagcattatcgccttctgaagattgagagcaaggaggtatacaagtagcaacaacaatggactggcaaggcctaacgacctgaccaagggtacgctgcaccactctcctacaacctgtagttggggaccaggaaccacctaacacgagataagggtaccaggtgtcagactacccccagcacctgcagcatgcagcaggaaagtgacattttatccccacgggatcactttgtacatcaggccattagagcctataaataccccccatctcatatgtgaaggggattggaaaatcatttggtgtaactcagatcttgaattcaatagagagagcaatatctagagatttgttcaccttcatctttgtctttatctttatcacattttttaattagcttttgcatttttccgaccactaacttagttga

SEQ ID NO: 332306 - DNA, 929 bp, Cannabis indica
tttagcatctccactggaaccaactttagttcatccaaatcattctgcgaggccagttttgctaaggcatcaacgttagagttttgttctcttgggatttgctcgattttaaaataattgaatctttccaagttcttccaaaccttctctagatacttggccattcttaggcccttagcttggtattccccgagtacctgatttacaatcagttgcgaatcactatgacatatgagattcttgaccttcaacgcttctgctatcctcaaaccatcgatgaaggcttcatactcagtctcgctgtttgattcgtcaaattgatatctcaaagcataatgaaacttaaatccatctggcaaaattaatatcacccctacacccgagccctgctcgttggatttcccagtgtccgcatcttgctgaacaagcaaaattttcttttggagttattccttttattaagaaatctaccaaagcttggcccttgatggatgttcgagggtgataagttatgtcaaactgccccagttcaattgactattttatcaatcttccagaaacgtttggttttgataaaacttgtctcaagggttgatcagttaacacgggtgtgcctataagtagggccataatttgcgagatgcgtggattaggcataaggcaagtttttcaagagggggatacctcaattctgcccccagtaaccttttattgacataataaacaggttgttggtgctttccctcttctcgcactattgctgcactaatcgcgtcttttgagacagctaaacagaggagtaacgtttctccagttactggttttgccaaaactgaaggtgacgctaaattccttttaatgctttgaaaggcctcctcacattcctctgtccattaaaatttcttattgccttgtaatacattgaaaaa

SEQ ID NO: 332307 - DNA, 883 bp, Cannabis indica
acggagtctgtactgacaaaacttaagaagaattatagttttacaaacattgggtacttatgccgctaaaaataaacattgggtttatgccgcttacaatttatcctaccttttataattgatcaaattgatgattaaaattaggggtgtttattggatcacatccaatatttttaggtctatttagatcagatccaattatatattagatgatagattttactatttgatcgatccaattaatttctgtcatccaatggatgttggattggatcgattttatccattagatatacgtcatgtatatctattagcttaatttgggtttatctaatattttagacctagtatttattggatcagatcagatccatttaatattttaaatccagtatctattggattgaatgtatccaataaaaaaaaattaatgttaattttatatatatacatatttttacatataacaacataaaatctaattactcattaaaacgaaatgaaaataataattagttcgattggatgttccaaaatccgatccaatctgattagatattcaaaaataacatctaattcgattcgatcgcaattgaatatctaatgtttggcagccggttataattgaatcggtcggttgttattgaattagatcgattatgcacactcctaactaaaatgttattttatttttatatttcttgtaaagaaaatcatgattattatttatatatatatatggaatatttctcaaagagtattactcgttaattgttactaaaacactttaactataaatattaattttagaaatattaaaccattagatttttgttcaaaaaaactgttagattttgatccaataacaaataataaaagaaaa

SEQ ID NO: 332308 - DNA, 1311 bp, Cannabis indica
atctagatcctggtccagttctatctcatgtcttttgtcctggttcgggtcttaggtcaaagtcatgggtcttggtccccgattcaagtcaaagtggatattcccggtcttggttagggtctcagtccgcgtgtaggtcccggtttgtgttcagtaatggtccttgtctcagatcgtggcctggtctgggtctaggtcacggttgggttctcaggtccctggtctgagtatcgggtcctaggtcccagtcccagtcccagtttgagttctagtcttagtccaggtttaggtctcggtcctagtccgggtttgggtcccagttgtgatctcagtccgggtcccagtcctgggttcaagtacgagttctagtactagtcaggtttgggtccgggtctaggtttgggtttgggtctgagtccaggtttcaatctatgtcttggtccgggtcttggtctaggtttgggtctgggtctgagttcttgtacgggtctaggttctggtccaggtctcgagtcacgggtcctaagtcacaattcttggcgtaagtctgggtcggggtttgggcctgggtcttggtatcgatccctgtctgggtctgggtctgtgttcggttctgcgtctagatccagttttgggtctaggtccaattcctattccaaggtcctgattctggttctcgttccgatttcgggtttgggcccgagtcagggtttaggtcctggtctggaaatggttacaagttcgggtcttggtatgattccaagatccagacaccgactacgggtgggttccgagccccgggtcgttggtcaagattcagatcccaatcatgggtcccagtctcatttcaattcggatcttaggtcccggtctttgtccgtgtctgggtccgggtctgggatcgagaccggggttaggtcttgggtccaagtcccagtcctgggtcttaattattgttctaattttgagttttggtccccaatctaggtctgggtctaggtttgagtctccaatcccgctctgggtcaaggtccaagtctgtgtctccgttcacgttggtgtcccgagtcctgatccgagttttgatttcagtctgcgtcccgatccgagtttgggtttgggttttgggttgtagtcagattccagttctcaaactcaaaaccatgactctgactcggacccaagtttggggtacgggtctgggtctgggtatgagtctgggtttgggtttgagttcgggtatgggtcctagatccaaaaactaactacgggttaggtccaagccccgagtgtagatgtggatcacggtct

SEQ ID NO: 332309 - DNA, 798 bp, Cannabis indica
aggggtggacttcaaataaaaaactatctgactttgtgaggagaaggcataccccatttctgggaggtgtaaaggacgaagaggggagacagatatttaatgcccttaggagtgaactgggccgggcaaaggccgaagaagtccgccacattcttaaaatattgatgcaaaggcatcaatgccccttgctgggcatgggcacccgaccaagcacacatcccccttttagtgttcgtggcacgattgttgtgggcaggaatgtagcaatccaattcgcccaagtatctgccctggtcgagattccgaagacgcgcctcagtaacctgagacggagggcttacccacctaggccccaaggctccttgccttctatgaggaactgcagcagtaagctcctcactgacgtagtccacgccctcaaccaagacatctccgtcagcatcgactggcttcccagcctcattgtactccccgtagtttgggcgctcaaccttcgcctcttcctttgccttggaggaactactaggacatacatcgtcctgctcctcaatctgctagacctcagcatccccttcatgatcctcctccacctggacagctggatcctgttcggtgctgggcaaagtggcgtgccgagccacttgaggatcagatgcgtcagccagacgtgttattttcctgtacgagccatcattcgatggctgggtataaggtttggagaatgtccttcactagaggaaggtgggctagaacaaagatgaggatgatcctcgtgcaaaagttgaagcaggtcctggt

SEQ ID NO: 332310 - DNA, 900 bp, Cannabis indica
aaagagttttatttagggcataaaacccaacattatgttctttctggaatttctaataagcttaacgatgcggaatgtttatgcttggaagctccattcacgtctaatgaggaccagcaagcagtcttccaacttgcaggcgataaatccctcagaccagatggcttcaatggaacgttcttccaaaaaatctgtcatttgcttgggactgatgtcgttcaagcatctctaagcttcttgaacaacaatgaaaatttatcgctgatcaataataccatcatcgtccttatttccaaaaagagtcaccctcactcctattggaaatattttaccaggatctagatttaccaacaagtatgtttcattaacatcctaatatgaattctaaaacaatgaaataaacacatataaagtttaggaaaccttactgtaacgccctcaccaattgggacaccacgtgtgtgcaatttaataaaattcttatatagatactatataattataccaaaagtgtggctaattaaattttgataatgaaaaatttaacacatagactatatgataaaagttaaaaaaaaagtgaacaaacaataactgaaaaatgattatcaatttaatctcatgtcatcatgtttacacattacataatatcataaagtacccctttacacattacacgttacacattacacaatcttagtactttataaagtacccctttaccacgagctgtatatgtcactatcgttgcccgatgaagcaaacgataagtaagaaacctaaccgcgatttcaagagtaattactcgtaacggtattaaccgtttccaaccctaggtcataacctaggctcaacaaatatttaatcaaagtcttgataataatcaaggccataaccttt

SEQ ID NO: 332311 - DNA, 792 bp, Cannabis indica
ttgtacagacctgatatagcttttctctgtcaattttgttagcaagattttagttcagctcccaaacatatagacatttggaaaagggatttaagcacatacttcgctatcttcaggatggtattgataaaagattgttcaattctaattaataattgcgggtcacaacttatgggctacgcagatgaaggatatatatctgatccacataaagctagatctcaaactggctatttgttcacttgcggtgacactgctatatatatatcctggcggtcaacgaagcaaactctagtggctacttcctcaaatcatgctgagatacttgcaattcacgaggcaagtcgagaatgcgtttggttaagatcattgacacaacatattcgaggaacatgtggattaacatctaataaagaagtaccaacaattctctatgaagataatgctgcttgcatcgctcaacttaaaagagggtacattaaaggagattgaactaaacatatttcaccaaaattcttctttacacacaatcttcaagaaaatggtaatatcgatgttcaacaaattcgatcaagtgataatcttgcagacttattcacaaagtcattaccaacatcaacttttgagaagatggttcacaagattggaatgcgtcgattaaaggatctccgtgaatgccgaaatgagggggagtaatttcatgccgcacttttttctccttggccgagttttgtcccactgggttttctcagcgaggtttttaatgaggcagttattatggacatccaaggg

SEQ ID NO: 332312 - DNA, 784 bp, Cannabis indica
tataaaaagaggtatgtttcaaataaataaaaaattagaggtaaatttgattaattgattaataaaagtggtatttttcaacttaccacttttatgtaggcataattagtattggacttattcaatgaataacaattatttaaataatagttaaatttctctcctttcggtcttgtgtgagagttatggagccattagtagtgggtacgacatactggacctatccctccctcacatgaacaactccaattgtgaagacccatttgccttattaaataattgtattaggctaattatactagtttaacctaatttaaatttgaagtagcaacataattaattttttattggattatttttaaattaatttagaaaaatacacttagtttaacgaagagattctagatagtgatttgtagtaactaatttatattttctaatatttaattaagtagaaaaatatatttaagttgaaaattaatttttttaattaattttagaccaacttaaattaaaatatttttcttagaacttaaaatagaattgataattaagttgattttaatcaaggtacttaattatttatttctatttcaagaaatttgattggttagaaaatatattaagttaaaaattaatctgtttaattaatttaacgcgaacttaaaattagaatattttctaggatattaaattagaatttataattaaggttgattatattcaaggtacttaattatttgtttttattttaataaatttaattaaaaagaaaattatattt

SEQ ID NO: 332313 - DNA, 420 bp, Cannabis indica
aaatatctcgagttataaccctggcgcccatacacccgatcataaccctaatcctcgtgtaccacacggtactgagtctagaacgttcatacgacaatactattgaccataatgttagcataaacttaatatactagtcatactctaaccatattgacgtgacaacatcgatcagtattatagccaacatacatttatcagtaatcagtacaactctatgtatactattactgctatcaatgtaatctaacaggcataaactgttgggtttatgccctaaataaaactccatttcaatgtaatccattttattcaatatcaataaataaacagaagtatttttcattcatttttatgttttggttcatcttatcaactgtttgtctatttgatttataaattcattcaaacccatttcac

SEQ ID NO: 332314 - DNA, 987 bp, Cannabis indica
gttagttatttcgttacgaaactggtaactttgatacacttcacctaacttgatgacatatattaagacccctaaacatctacagtgatagtttcactactgcaagtgtacatcgacactactaagtagaaccctacttttataccagttagtgatttcgttacgaaactagtgattctgataccctacacataacttaattacatactttgtgtcacgacacccataaacatatatagtgacactgtcactactgcgagtgtacatcggcaccaataagtggaaccatactttggtatcggttagtgatttcattacgaaactagtgactccgatactctacacgtattttcattatatagtacgtgtcacgtgaccactaaacatctacagtgatagtgtcgctcgtgcgagtgtaaatggacaccactaagtagaaccccatttcgatatcgctaagtgatctcgtttcaaaactgaagactctgatacactacaactaacttgattacatactttgtgtcacgggaccactaaaaatctacagtgatagtgtcactcctgcgattgtacatcggctccactaagtagaactctatttagatatcggttagtgatttcgttacgaaattggtgactccaataccctatacctaacttgattgcataatttgtgtcacgggacgcctaaacatcaacagtgatagtgtcactactgcgagtgtacatcaacaccactaagtagaaccctatttcgatatcggttagttatttcgttacgaaactagtgactctgatacagtacacctaactttattacagacttatcacctaacgagtgtacatcgttaccactaagtagaaccctagttcggtatcggttagtgggtgactctgatacactacacctaacttgatttacagacttttgtttcacggggaccccataaacaccctttagtgatagtgtcaatactgcgagtgtac

SEQ ID NO: 332315 - DNA, 597 bp, Cannabis indica
tcttctttatctctttctttctcaagcacttaagcaaccaactagggttggaagattttcaactagattctgaatattttagcaggattagagagtttccaactcaaggggcctgtaaattgtcaagcagtagttccattcaagttggctagcacacctgaattcagaagtgaggtaaaattagtataatgatatgcatatgtgtttacatgtttagcgtacatatttattaagcctgctagattacatcaatatcagtatcagtatatgtagagttatattgggtaccaatagatatatgtttggctcagatactgatcgatgctatcaaatcagtactgctagagtatgattagcgttctgagtataggctgatattaatggtcgatagttgatgcgtgtcgtaagccacaacaaatttactacatttttatttgcaatacttccaattatttgagtataatcgtaagtaagggtcgatcacacgaggactatatttatttaattatttacaaatcagtaacaagaattaggaaaagtggagttttgatgatcagaatagtaatgataaaaattaaaaagaaaacaagtttaaat

SEQ ID NO: 332316 - DNA, 1227 bp, Cannabis indica
ttgtactcgccagacttgtatgcgcctttattgttatattgtaacatggtgcagaccttctcagtttggtccgaacatgcttgttgtaggatctttgctgtcaaggaatatactttagggagtaattctttggcaaagttttttctttcctcgatctgtttgttgacgagcctagtaactctttataggcagcatgcttcttcgagttggcttggtctcttcttctttcccttttgtcaagggatcttgctagcaagatgttgtgtacctcttggtcactgtagactagaagtatgagagtagactgctggtggatcagacaagccagggaaaaactaggtggccagccacattgaaagagcattgcctaggcggttggataaggccatcaccggccagcatgtggaggtaatggctgggtagattatggattctatggtcggctaacttgttgaggacatggttggccagccttctaaaggcccagtcgatgttgtagtttgatcccatatgcattcgattggctttgcccccgacataattgtcgtagagcctttatgcacttctgttaatagctatacaacttctttcttagaaatgctccttggtggtgttaagataccacttctgtgtgttatgctatgtagaattggacaccttgcagctgtccccctagtccctgctctctagcaagctctttgtttggaggcatgttgtaaagaccgcttagtttaatttggaaattagcagttaattatgtttaattatgaaattatttatagatatttaaataattattagtgctgttatttttgaattctgaatgcatttttatgtcatatagtgaggtttcatatttttgcatttccggtccccggtaacatggaactcggtgtttggctcagtagaatcacaacttagcatgttagtattgtgggacagttatttagacattgggaatgtcgggattggtcgggaatttagaatttcccaaaataccccctttagtaccccttttatgttattttagtgaggaggggcaaaatggtcattttgctccaatgatattttgtcctttagtggactaagtgtattatgaatatgttatttttattgtggtatgttggctgagataagtagggaagttatcatttattgttcattttattcaaaattagaaattagaagaaaaatcaagaaaaaacaaaaattgtattttcctctcaa

SEQ ID NO: 332317 - DNA, 722 bp, Cannabis indica
aaaatagtggcatacgtatcgttctagaaactatacattttgcaagtgcaaaagatggaaaccatgtttaaggtactatgacgtattatggggttattgaagaaatatgggagctcaattatttgcgtttcgaattctactttttaaatgttcttgggttgacaataatgttggagtgaaaattgatgagcatggttttactttggttgatttaagtaagagaggaagcaagaatgatccattcatcatggctagccaagcagttcaagttttttacatttttgatccggctaatgataaatggtttgttgttttatcgacactagagaggaggttcttagagaatgaagaggatgaggagaatgctgatttatgttatgatggcttcattattggacaatcaattcatgaacaagttaaaggaattgatcgtaaccttgaggaagacgatattgaatacattagaaacgatatcaatgagggaatatgggttaattatgattcaagcaaatataaataaaaaaatagaaaagaaaacgtatctaattggtaacttgatatgtagcttacttaatattttatttgtttatgttgaatacataatgtttgtttatgctgaatagataatgtttgtttatgtatttaatattttgtatagattacttgttatatagctaactttaaatttttttgttaatggtgtagatatggctaactcaggt

SEQ ID NO: 332318 - DNA, 532 bp, Cannabis indica
agctccataatatttgaacttaacccatcttttttacttttaaaatctgatttttattttcggattaatgtgttgttaatagatattatgagattaaatgttatagaatgggtttatcttgttctttgaatgattattgtatggtttcattgtgagattgaaaattttggttagagtttaacaatggaggatacccatttcggatttaccatttttttggtatattattttgtgtttttgaattaaatgggtattgggagtgatagagtgttgaaaatggaacaaaacccctcaaatggcgtcggatttggtggccggagatgatacatccgatcgggtcacgaagcgggtcgcgccgatccgaatagcagacccgcggacccgcgagctgggttttttgggtgacagggacgagaaaaacgacatgtcgtttgcctctgtcaggcaaaaacgacatgtcgtacgcgcatgtagttcagtccccaccgagaaaaacgacgggtcgttttgctgaccctttgggatgtcgttc

SEQ ID NO: 332319 - DNA, 614 bp, Cannabis indica
tatttgttaaacgatcagcaaatatggtagctcataactgtactcgagcttttatattttttcctggttgtactttcgatatggaatttgttccattcgatttgctaccgtctttggtagcggactttgatggttaatagagatgcattttccattcaaaaaaaaaataaaatttgttaattctctcaataattgtgtaagttagattgtaaccaaaacaaaaactgtttggtagtcttgatttggttatacattttcttattaagtgatgtcattaactaatttcaaatcttttcaacttttcatctaatttttttattcttcaatgagataaattatctttaatgatctagaatctttattacatgcatatcaggtaccattttgtagttttatctacagtgcacgatatacggcatcctttttttattaattgtttttataatttaattaatatttatattattgtatttgtaaaattaagaattattttttgagaaattttaccatgcacatttttaaaagtgatgtacaaatctactcctatttatttcggcacctgacaaacttttttagtctattttttttatatagtagtgtatattataattatt

SEQ ID NO: 332320 - DNA, 1980 bp, Cannabis indica
tcgtacagaagttgaagcaggtcctggtctattcggtgtttgcttccacaaaactcacaagggttcatctacaaaagacaacacacgagatgagtgtttggtcaggatatcaaacaataaacaggcaaatatgccgaccaggagtactcaacagattaaagaatggaaatattcaacaataagtcaaaacccaaaattttgaaagttttgggtttagggtaaaatttcacgaagctttgaataagcaaggtgaaagacagacagtgtgtgatcaaaaggctaacctcataaaacgcgaagtattacagattataacacagaaaatcgcagagttttaaacctagattttctacctctcttctacaggaaggtcaagagcgcatatttgaaacccagaaattaaacatgcaaagtaaaagagaaggaattgaaaacttactcactattcgacatcttagttcagtccaaacgatgctgctcggatgcttttggtagaaatctcacaacagacttgaagcgaaaaacctcttttttgctctgagtttgcttactggagaaattggtaaaagtgaatttgtgaaggatgcacagccctatttataggtagaaaaatgaaaaaagggtaatcatttcaaatgccttagacgcatcggttcccacccccaaacgcaaatattgggaatcaaatataatcaagtgtaaccgtcaaacgtggtgagagaaagttgggtttcgaggcattaattgcgtcagagcattaattagtcgaaaactgaagagacggctggtcagcctcacatcgaatcgcgaacagacgcgcctaacatgtgtcacccattcaaatgaaagggcggctcggatgaagtctacacgcaacttcagaagtctcgtacagacttggggggcaaatgttattccaatttttacactctgatgtggcatcacacgatggtgacacatggactcaactttgtgtatctgctcgcaagagatatgccaaacagggcaccacatatactcgctcggacaaagtgttcttaaccgggcagtgagcagtccgaacagcacgccaacacttagcaatttcagtcttcgcatcgtgagtcaccaaacaaatccttatgattttgcgattggatcacagaaatatggcaggctgtctgaatcccttgattagtgtattctgtatttaatatgcaatctttccacttatatcaattgcaaacagaagggaaattcttccctcccaagcttatagccctataaatagtgattcctactcactaggcaaaaggccgaaaaacttatctaagaattcatattcagagatactattgtaagagctctaagaaaggggactattttccttattcttaagtaatacaaaccaagaggattaggttatttttgaactgctcggggctgaacctttacaaaattcttgtggctttatttgatttattatattacatacaccttatactacttgttgcttataatttagactcactgtcgttggccaaaagtgaggtcaataattaaatagattaaatttgcctttatagagttagaattaaaatatggcatttgagaaaagaaaaataagttttaataaagtggcaaaattgaaaaccaataggcccactaaggatttcggccatagggttttaaataaagccatcttttattccatatttaaattctatcctaaccctaatagctataatataaaatagaacattatagctcttattttcctaaactaagttaaccctaagtgacactttattagacaaattagaaaaataaagagaactcttataattttttaattgctaacattcttcttctcataatttcgtgccctagagtgaatgagtatttacccacataattcaagtcattaataaagatagtgttgaagattgtgtagtgttcttatcacctgaaggagaaactaggttcagatcttgatcatac

SEQ ID NO: 332321 - DNA, 594 bp, Cannabis indica
gcttttggttctcagacctaagaaaattcctctaaaaggaaggaagacaagcagaacggttggagaagacgtccctcaagctaatggccaacctccacaagttgaattccctatgaacacccttctcaaagccttaagagcagttctcactcaacagatggatcctaccactcgacagagtcatcattttcagatctttcatcggatccaagtgcttgagtttgagggtggacaagatcacaaggtagctgaaaggtggttgaggaagataaagaaaaatttcaaaataataggagcacctgaggaataccaagttactttgctatgtccaagttagagggtggtgaagcagattggtgggagactttgtccagcacaatggaaactgatgggatgacttggggagattttgaggaagttttcagggaataatattttagtccatctcacatgagggctcttattggagtatttgatggtttaagacaaggggatatgactgtgaatgagttttacatgaagtttgtagagctatcctcttatgcatatcctggtgttgttgaccaacccttggtgattgaacatttcatgcgt

SEQ ID NO: 332322 - DNA, 471 bp, Cannabis indica
aacccagactaagacccaaacccgaacccagacctagacccaggacccgaaacttgcacctaaacaagaactgccggaccaggaccgtgtaacaagattaggaccctgaccaggacccagacccacacctagaaccgaactcagaccaagcctaagacccaaaccaagatggaaactcaggcttagacatggtcgtgtacccagatcgcaaccgagaatcggattagacctaaatctgggacccaatcccaaacacagactcggacctagatagggatcaaggtacgaacctggactcagactcagacccagaccaagatcgaaacctaggaactagatcaggacctagatccagaccccaacccaaacgtggacccgcaccaaggacctgaactcagacctggaccgaacccagactgatctcgacccagaccgatatcggaacctgaatctagactcggaccaagactt

SEQ ID NO: 332323 - DNA, 650 bp, Cannabis indica
ataggcattgtattagttcccctatttgtcctaggtgttctctctgttttgagtcagtgcagcatgctttgttcgagtgtcaggaaatgaaaaaggcttggtcaggtacaattttcatctctatcattaaaacaaccaaacacatgaacattttcgacattcttttattaatgcagtttaatttttccaaagatgagtttaacctatttctttgtatgctttggaagtgttggaatgcaagaaatgcatctgttttcaggaaccaagtttcaagaccggagaccattgaacaagaagctcaggagtatttggcattttatcaagcagctcaggacaagcgggggaaccactcccagtctacctcaaacagagatcttctggtttgggaacctccgccagtgggatttctcaagctcaatacggatgctgccatctcctctcatcagaatagaacaggagggggagcattagttcgtgatcacacagggaagattatcgcagcaacagcgtttaaccgaattggacaattgcatccacaagcagcggaaggatgggccttgctggaagcccttaaatggtgtcaagataaaggaatcaatatcaaccacgtagaagtggactgcaaaaaccttctcacggaattgcaaaca

SEQ ID NO: 332324 - DNA, 1041 bp, Cannabis indica
tgattcaaaggcaaagcaaaaggaaagtgcttctattgcaacgaaagggccactggaaaccccagtgtcctatgttttcggcagagaaacaaggtatttctatctttgctataaactcatgtgttttagagaattattattatcctctttggttattaattatggatctactaaccatatttattttcttcttatttcaactccagctgcttaatctttgattggtatcctagcgagttgagtcggatggttggacagaagggtggagattgtccaagttgaagatgaaactcgttatcttctttaatttttgagttgattgtttagtttgtgaaaaatttagtttcaattgtttgtttgggattttattccctattttatatttttacagacaattcattatgatatttttgagaatgttaataaaattttctctttaagaggttttcattatgaattgcttttatgaaatttagcttcatatttactttaacttgtatgccaatacacattatatttatatgtttatcatgtttaatgtgttttgtgttttattatgatacaaaatctatggtatgttaatatctgcaaacaaataataccacataacacttagaatttaaattcaaggtttatgaataattgttaattcttaagcaattattaaaattttgtttaataaaaagatcttttgatctgatgggggtggaagaagttaagaagtaatatatcaagttcaatgatcttttatatctattgaactctagattatattcataacaccacagtatctctataacaattaggggtggaaaagttattgatatatgtagttcaaacactttaactttgaactctagactatactcaatacaccacggaatctctatagcacacatattttgattagacatggatacaatataataaacaaactagcaaattattagaactcattcttgttcctataattgttctgattcacatcttactgtagtaatagaaattaataccaatgaagttattggacatagtatcaca

SEQ ID NO: 332325 - DNA, 749 bp, Cannabis indica
caagaaatgtaagttttttaattaactttatttgttcatgtttatttatttatttcattttaatccaagtataataatcattttgttcttatttgcagttgacagtgtactccgttttatgtccgcaagctcatgaggccaagtttttgagcaacgtcactagaggtgaggcgcctctatttgtagatatggaggaattggttattagcagtgatggagagcctactcaagatagtttgcgcagccaggcttcgaagcttgcacagacgctaggacaacgagcggaggaagatggaatcttcagagctgatacaccaccacactctccacaatcaggggcccgttctgttccaccgcctgcatcaatgccccattctacatctatgcctgagtcagcatctattcccagtacttcacagcctcaggaaccaatatcttctggcatattggcaagattagagcgtgttaagaaagaacagcttgctttgaagcaatggcaaactgatattctgaaagggcagataaagataatgagttacttgaagaccctattggcactcatgggagatccgagaaggcccaatgtagaggcagagccacagccagaccctgtctctccaggagatgagttcattcttcccaatgactacaaacctgatgatgtggaagatgtactccatacacctgaaaacatgtcgatcacgtccattggagatacgcaagatgcatgaggacaaggaaacttcatg

SEQ ID NO: 332326 - DNA, 584 bp, Cannabis indica
ttaatattgtaactcaaagcacctttaaggaggtcaacaaaaataattgtcatattggtcttatttaattgtataagccaattataatttttcatttatctattttaattaaaaatataaaggacacctatgcctaatttaaaatattttcactacttctctcttgctacataatacaatgtggtacaccatttttttgattaatcatgtaaaccatcccattggagttagcctcatagtttgattaaacatgttcttgggatactcattgagttatgttagtttaaaaatgttatgacttttgtcttaatatgattctcatcattttgtcaaaagaaaaaaaataacaagtgagcattgtcattgaaaaaagatcaagggttaaagtatagactaataaaaacataaggagatttaccagtcaatcactcaaaaattatgagaattcaaaagtgtagttaggatctctctattatttcaaattatatatttacttaggtgccgtttggtaacacttttgttttctaattttttaatcacaaaataaaagtaaaatttttgtttttgaaaaataaaaatgagtt

SEQ ID NO: 332327 - DNA, 735 bp, Cannabis indica
cggtcccctttgatttgtaattagtaataaaaaaacaaagaaaaagttgtgtatattgaggttgttgtgggtcttttggccataaagattgtaattttggttgtaacttctattttagaaagcaaacttctttgtgagatggggctcttctcttctaatctcaaatgacacattatttaataaaatattataatatttctgtctttatgttatttgtttttagttttccataaagaataaatagttatttttgcctctgaactatgattgattacaatcgtagttttctgaatgattctcgatagttaaagtttcctaaaatatgcacgttattaactttggggacttctattagatttcaagtatttgaatgatgagatgtgacattgacacattgttattatatgagtgaaatacaaatagaaagagatataatgctaatccacataaccacttgagggtgcttgtgtgttggaagtcctggtttgagtcccgggttatgcatgattgtaatatataaacgcttaaatcaaaaaaaaaaaaaaaaacaatccatatagtcagtctcaaactacaggcttttccttaacgttggcttttcctcttagtctttgttaggttgtgtattttagtattgacacttattatataaattttagtcttttattatatcttctgggtggtaatctttgtaactaatgataatattcttatgatctatcctagtagagaaat

SEQ ID NO: 332328 - DNA, 769 bp, Cannabis indica
tgttattatatgagtgaaatacacacattatatgagtaaaatacagatagaaagagatattaaactcaagctttttttttgttttcctcttagtttttgtaggttgtgcatttgagattgacacttgctatataaattttgcttttatatatcttttgggtggtaatctttgagctaatgagaagagatttcgaaagacatatttggaaagatagattagatttttattatttcaaaacttgatacccttaatagaaatgagaggctatatatataggccttcaacaaacataaaacattacaaactttaattattatagacagaatacgttaaagacttaaattacatcttttcctagatagggaatctctgacataccaaactttttttttataactacaaacagacaaaaatttcagatgattagaggaatctctgttgtctgaatgcttccttgtcgttagttgtcattttcttacgagagagaatctctattgatcttgtgagtagtcactggtcaaggcacacgaaacaatggactgacttttttagaagtcacatgtccacttcattattgacataggacaaacacgtcataaacatagatgtgtatttttgcagtggttcaggagttttactaatttttgttaatgggctcatgtgagggtctgagattcatgtactcatctgtgtcactatcgtcttcttgccacgctgatgaaggacttaatgatgcaataggtttgttgttgacaggtggagaaatag

SEQ ID NO: 332329 - DNA, 806 bp, Cannabis indica
tgaaaatgctcgagcagcagagaaagcccatatacaagctgcatgggacctctcctttcactacggaagtgcgacaagctcaacttcccaagggatttcgattattcgaatccctaaaatataaaggtacctctaatcctatagattatcttgaaaaatttaatactataatggaagtggatcaggtaccacagcttgcaaaatgccgcattctcgcggcaacgctcgaggaaaacacccacgattggtttacccaattgcctgaggcttcgatatcgacatgggagatatttgtcgatttatttctcacgcactttcaggccacgatgacctataggcccccttatacaactctggccaacatcaaacaagaacctagtgagtctttacaggattattttaaacggtttaacgcggaagtaacaaaattcgagaagactccctagtcttcgcttgtttgcatgctaattacaagtattttgccgagaactgatttctggaaagagttgcaagctcgaaggccagaaacgctagtggagttcttcgctatccgaaccccataagagaattgtgaattctctggcagagttggaaaagggtaaggataagcgtaaatcaccagtaccacgatcacgatctcgcagtccctgagggaagaattctagaggctgaagcccgagaagacgcagcccacggagacagcggagtccaaagctggccaaatctcctcccaagaaggagtcctcaccgaagaggaagggtggaccgcgttttgttaactataccgaactcgcggtgccccgaga

SEQ ID NO: 332330 - DNA, 1021 bp, Cannabis indica
tgtgaaattagggatatgatttcaattactttgattatctaattgttaacactaattaaccattcttcttcctcctatgtgatgacaaaatcatgcttaacacacaactcttcaagctctaagacttgagctttaaatccttcaacctcataatttttccagcagcataacactacttaaaacatcatttccaacctagaaaatactcaaaacatctcatccaaacccaacaatctaacccacaacaataactatcaatttcacacctaaattcatcaaaacaacaccaattcattgaacatgcaaactcaagaacaataaaaccaaaaacatgcttttaccacaattaaaattcaacaagaacttcaatcaaactcagtaaaggaaactacctcaattccaatcaaagcaaagctcaaaaatcttcaaatatcaagctccaaatcaagcaacttccaccaaatcaaaaaattgaatatcaaagagggtgagagagagagagggttcaagttgaaggggaacacaccaaaaataattttctttcctcaaaaattccttcttttatctaatataaatcaataggtcaaaagaccattttgcccctaaggctaaaaatcaagctcacatatgcacaagggcaatttagtcaatctcatcacaaatattctcaaattaatttcagattaatcacatataaataaaatgccaataaatcatcccaaaattgtattttggccccgaacccggttcggcccgaaatacccggttatgactataccgcgccaacttgtcagaacacacctgaaaaagacagcacaggcacactatataataatatagtcccataagcacgtaaatatattaatatcaacattttacccttctcgggtcataattactaaaatgcccctggctcaccaacggggtctgaccatgttataaatcatattaattcacatatactgaattatataataatataattcctgaattattcataattatctaattagggttttgc

SEQ ID NO: 332331 - DNA, 1205 bp, Cannabis indica
acaccgttactaccggccacttccgttattaactcataaatatagacacgtagagggcccaaatgcattacatttttttattttattttaaaatttaatatttttaatatcaaaaactaaatactacttgtttttttaaaaaataaaagagatgcaatactaaattaccatagctgagtgaaccagtgtagtatatggaacatgattatcgaattgaagtgttaatatcatgtaaaaattattatgcgaacagttttttttttttaaaacaagtagcatttagtttctgatattaagaatattaagttttaaaataaaataaaaataaatgtaatgcatttgaaccctccatgagttcatatttatgagttaatgaaagtggtagtaacggtgtaagagaattgtaacgttaggtatttttgcctcaaaaaataaacaataagtatttaagtgtataaaatctaaaacattaagtatttatgccgcaatttacgatatagagagctaacacttattacacatatggaatatgtgtgtgcaatttagagaagaggagtggctcatgttaattttttattacaatctgttaattaatttttgtattcgaaaacacatgttaaaatatttttttttcaaaggtattcgttatgtttacaatatcaatcctgtaaatttttaaaaaatttcgaatagtttatagtgtcaaaaatatgtttgaaattttttgaacgtaatattaggaattctgttttagtattgtaaactattcgaaattttttaaaaatttacaggagtgatattgtaactataacgaatactgctatgaaaaaaattaaaaaaaattattctaacatgtgattttgaatgtagatgttaattaagagattataattagcgctagaatgacttgacaaacagtttatatagggaaatttgaaattccatgctttaaataccctataatttttcccctaaatgtataatcattaaaattggtaatatatgaccactttaatgattttcctaaactacccctcacatttcaaaccatctctctctcttcctctctctcagcccccttctctcttcatctctttctaaccgaaaaaaaaaaaaaaaaaaaaaaaaaaaaccaccatccctcacccgtcggacacactcaccaccgcccttctccggctgctccagtagtccgaaaccaccat

SEQ ID NO: 332332 - DNA, 641 bp, Cannabis indica
aagtgggtgttaaggataggtttcttccattagctagtaggaccagcgaattctaagagaaccttccatgtctattcggacagtgaaagcccctacagtgcatacttttgcgtattctgatcaatcctccatacttccgtgtccattccattgttccatataaccaagttgttgcatcaatggttatggtgaatcgttccatcttccttaaaagatttgaagacatccatcaaatcctctttaataacttcccagctggcttgaaagactgcaatactagaaccatcaggacctagagccttactaccttcacatcttgagatcttacttttaacttcatcttcttctaaaggcctttctagttgtcccgccaagaattccaaaattttttaccactcaattccttcaatacttttcccacttgtcttctcaaaagtgtataatctcttaaaaagatctcttcaaccacatcttcttcttcatcgataaacaatccatcctccctttcaatttatgaaattgtgtttcttgcttttctcgcattcaacatgtcatgaaaaaatctcgagttagcatcaccctctttggtccacttgcatttagctttcaaccatgcatttctttcttcaacaaaagctaaa

SEQ ID NO: 332333 - DNA, 746 bp, Cannabis indica
cttgatgaatcttttgctcttgatatcttgttgaatccatttagtgttgctttcaaaagtttggtaaaaataccaaaatatttattttctcttttaaatttgctacaaaatcaatgaatcattagtaacaaataataatcaaatatttgttaatcatcaaaacaaggagatctaaaagtttgagttaacaacagggagatttcggatcacagtatcatctccaatggttgttcgagcattggtagcaggcggaacgactgtgttatgaattccctggctgggtgctgaacttgtattccctgtctcttgcacaccaggcgcaatttcatccacaggagtcgtcacaccatggcctgcgtttgacggttgctcgggattaacagctggcggaacccttgtgcatcctgggttctacaatgtaggatccaccgcctgtggatttgccgcatcaaccattcccctacgagtctgtaccaccatcgtacttgtgattaaatttagacttaagagcgattcttgattctgctctcaatgaaagcaccaaaatgttgaccttgcttttagccaacgacagtgagtctaatttagtaagcgacaagtagtttataacgattgaaatataataaagcaatataaagacacagaaattttatagaggttcaaccccaagcagttcggtgatagcctaatccttgttatttgtattaactcaagaacaaggaaaaaggttcattttcttatagctc

SEQ ID NO: 332334 - DNA, 758 bp, Cannabis indica
ctggtcgaagaagcaatccatctaaaattgtgcctttgagataccttaaaagacgcttgcaagcctcccaatgaacaacagtcggagcatgtataaactgactgagtttgtttatgatgtatgcaacatcgggacgagtaagagtcagatattgtagaacaccaagtctactacggtacaaagttacaacgggaaatggttcaccagcagttagagacaattaggaggtggaacttgcttgattgggacaacttttagcaccatcaagttgtaactttactaagagttcaactatatacttactctaagacaagtgcattcgagcttcatttccgtagatctcaataccaagaaagaaatgaaccggccccagatctttcaaagagaagcatgtgttgagatccatgataagcttggtgatgagttgattatttagtccagtaataagtatatcatcaacatatactaaaagaataaccaacatgtctcttgaaccataggtaaagagggaagtgtctgactgagaggctttgaatccccattgtagcagtgtgtgtttcaacttttcattccatgcccttggagcctgttttaacctatgcaacactttatgaagatggcaaacatgagttggtttagagggatcttcaaatcctctaggttatttcatgaagacagtctcatgtaagtctccctttaagaaggcattgttgggttttatgccctaaataaaactctttacaatctgattagttatc

SEQ ID NO: 332335 - DNA, 658 bp, Cannabis indica
cagtgtcagacagtgggatgctatgttcaagaccagggtttgtgttccaagtagtacgggacttagaaatgaaattctcgaagaggctcataccactccatattccctacatctcggcaccaccaagatgtatcaagatcttaaaccttacttctagtggagcggaatgaggaagaatgtggtagaattcgtatcgagatgcctaacctgtcagcagatcaaggctgaacatcacagactggcagggttgttacaacctttaaccttacctgagtggaagtgggaagacatcataatggactttctggttgaattacctagaaccataggtttgtttgattctatttgggttgtggtagactgattcacgaaatctgcacattttttaccagttaaaacaacattttcagtggatcagtacgcggatttgtacgtcaaagaaatagtaagattgcatgggggtagcaaagtccatagtttcggatagagatctgaagtttacctctaaattatggcagagtttgcaacgggctatgggtacctaactgaaattcagtacaactttccatcctcagactgatggacagtctgaaaggacaattcagatattggaagatatgttgcgagccggtttatggatttcgagggctcctggaat

SEQ ID NO: 332336 - DNA, 770 bp, Cannabis indica
atggggatgacacatgtgtctgtgcatgagaatggtgtgtaagtggtattattgtaataaaataaagatggtaagtaaaaatgttgatgtaggcgtgtaggagtaaaacagtaataaaatgtgcaaaacagatttttggtgtaaaaatttctaaaaaatataaatggcaattttatttgataattaagtataattattaaataaatagttttagtatttatatgattaaaattgaaaaagtggtattattgaaagaagtataagtagttgaaataaagtggcaaaattgtaactagagagttttccactaagtggtcgaccttagtgtgtaattttgcccaatattttattcttttttaatccatataattgaaacctaagccttagttgaaacactataaaaagaacatgatgctctcatctcatataactattcacttcaaccaaatcaaacctagttttcattctctgacaacttgtagatgggagacacctttatagaatttcgaaccctcctttactgttcttctcctattcagcctatagtgatagagtgccatgcccatacatagcaagttaagtactcaatcatagtgcggaagacggtgataaccaacccaaggagagaaagagattcagggtcagatcttgataatactctgcaacgaaaggaacaagggttagagatctaagcggaaagagtcgtattatattttatttcaaccacttatttttctttcaataataccatattttccaattcaatccta

SEQ ID NO: 332337 - DNA, 658 bp, Cannabis indica
ataaggtaaaaagggtaagttttcttactcagttcttttctacctaaccagttgtgatattcttatcttgtgagagtttcccattttgtttgatcagattacttgaggagaaaatcggagctaaacttttcttttctataaaagaagagttgtacttgctgcctacgattttgtaggtacagaaatgaaaatttctaggctgattgaagatttattttagtgaattttctggtgggctggggtcttgttcagactgtgtataagctgtcaataaggtgtatattgattataaatacaccttatagcagctaggtttagtatctctttcgtacactttgatttgtattcatatcttaaggaaagagtgtctttgttttgtagagaagagcttgttcgactcttactctctttatttgtattttgtattgtcttgagtctatattcaaacctacaaagaaaaagaacaacagtgctacattcgggagaaagttttacaaagttttcgggagattatttttcatgtcttgcatcgggaggaagcaaacactcttcaaggagatcgaaggaagttcgagcacttgaagtttcatcaagattcgcttagaagatagaatacatcaagcttgtgatatctaataagagggagtctatttatgca

SEQ ID NO: 332338 - DNA, 1012 bp, Cannabis indica
attgttggctcgcattatagtatggcaattattgaggtgagcgattgggtctgaagtcccatcgtacggtgagacgtgagggtttttgaatccttggggaaattcaaagttcataatgtctggatggaaaggctcgagttcttcatccgagtcataacaaggcagtttcccatattccccatcttggtatctcttgaatttatttttcaactcactgatttgcaattggatcggatcttcttgcttttcattagcattgagttgttggcgtaaattaggtgcattctgatttaagcgctcacataaatcgggttgttttcaatttaaacgttaacgagatctggctgtcttcgttcatggttgctcatagacctcgtatttgagtaactctcagattggcagctcctcgtattactcatactttctcgatcatcactacgtcgaggtctttcccctcttcgcgtatgtcttttcgatcgactgtgatctcaggatctcgaacgtcccaagctagaacttgcctcgtcctgcagattccttctccttcgagaaaggttagatacacgccccccgttgaggtacgtgtatgcctcctccctatcagtgcaagaaggacgttggggatgcctcggtggtaacccactttccctaggttgtgtcctaggatttctcttattattacgagggatctctgttccctagttttgggctgccttatgttcgcgttcctacgagatgattctggaatttttttattttcattcccttgatttgtgaatccctggggtctctgaggtacctctcgacgaggtgcctgattgttcggttgttcgccttttggaacatccccaatttccccaggttgctcctcctgggtattctagggattttttgagttgtctcctacctcctagttctcaaaccctgaggtctacctcgtggcctcctcactccaggatcaagttggttttgtgtagcgtttccttgagtcgccctggctgcggttgcctct

SEQ ID NO: 332339 - DNA, 556 bp, Cannabis indica
tgtttaaacaacatacttgtgagtagatctaagatcctggtaaaataaatattccaacatcgacaacatatcgacaacctgtcgacatgctctggacaaattcaatcagataacaatttcacaacatgtcgacaacatatcgacatactgtcgatattcagtcgacaatacaacttaacaatcaacaagttaatttaatcgacaaagtatcgacatacggtcgacaagtcgtcgacaatatagggcagaaaatacgctaaaaccaccaattgacatcctatcgacatacaaacgatatcctatcgacatataaataacaacaaaattcaaacagacacccaatctatcgacatcctatcgatatcctatcgatatgtcatcgacaaccttgtaataaacacagataccattgaaacactaacatctacaacctaaagatcacaaaagctacaaaaaatccactaatctcaacaacatgcaataattggcatccaaatctatgaaaaatatatttttttctcaaaaaaaaacattaccttttaatgaatttggtggt

SEQ ID NO: 332340 - DNA, 873 bp, Cannabis indica
aaactgcatcatagggcattggcctctatactaaccgcggaggtatagagggaggcactcgcacatgttctgacatatgcgagttgggtctaccctgtatgatgaggattacggttatgcggtgtgaattaagtcgcatccgcgatacctcgctggttttatcctgggcgaggtctaaacttcgagaagcctctcctggacatttcagccttcactggaagtctggatacacgtgtccttcaaggaggggtctggtctcgagtttctaggtgagagaaatctcactataacaatctactcttttccctttgaaatttttgaagatatataggattttggtgagattttggtttgtaattgttctgtataaatgaattagtgttagaatatttttaccaagcttaattgttagatattgtgtggttctaatgcttgtttagttgttattggttggaaactctcaagtttgagttcatggaactcaagcttgagcatctatggtgattttgcaattctgaggtaattaagtgatttgactgtttagatttattgtatacttgttatcagggtcgaccctagactaacgcaggctaggcccgtgccgagggcccctcattttaaggggccaaataaaaaaatgccttttaaaaaatatacatattttttttaataatttttaaaaataccatttatctttgggttatttgcggcaaaaccccctaaagtaggaaggtttttgcaactaacccccaattctaaaatttttgcggtaaaactacctaagctcaagttctgttagcagttagccatttccgtccatttttggctgttaactgccatggtggaatgtccacgtgtacacagtgtacacgt

SEQ ID NO: 332341 - DNA, 966 bp, Cannabis indica
gatgtgttattgtttttcattttcagtttttttatttgattcagtttttattttttaattatttttttatagttttaacaccttgctatatgtgtttgtatcgaatttgttgttatctagttgttttctgtccatgtatgtatcatcaatgcgtaaaaattagaattatcatggatattgatgttgaaggagcttttcatgtttgtttgtttgtttgtttatagttgttttgtagttgtattatagttttgcaacttgcatatgctaatcattatatttactttctttgtaaaatgcaagattgagttagcaaatttagtcccaatgatttttacagagtgaagtgtgtatgtacgagcaatttctctgttattgctaacattaagaatactttatctatgaatttgttaacaatgttctgagacacccagtttgggcattttttttgatatccctaactttgtttttcaccccaagtagttcacagccttcttttgagggaggtttaccagcccaatcccaaagaattttgggctaaggttgctggccgttgtatacggttcagcaacgaggaattttacttgatcactagttttgattgttttagggattacaataaactgttgttttctcgggaatcaaaccagttaattgaagtttgtttccctggcataaaagtgattgatcataaggctataaaggatgctttcttgggcagtaggtggggacaggatgaatccctaagtttgaaacactctgtgttgtatttcatccaatgtttccttcttagcaatactctggataaggaagtttctaggtttgatttagatgtcatttacagcggccgataggatgagtattgttggggtagggagtcatttgagttgactattgattcttttaaaggcaaaatagagcatggtattgaaatgaaaaataaaaaagaggagaagggaggtcagtcct

SEQ ID NO: 332342 - DNA, 1075 bp, Cannabis indica
aatttttgcactctgacgtgacatcacatgaatggtgacacgtggaatccacttggaacatttgctcgggaagcatagtccgagcaggatgcctcgctggcatgcccagagcaaagtattcagcaatccgcgcagagcaaccaacacttagcgaattcagctttcgcatcgtgagtcatcagcacaatccctataactcagggatcaatttacgtggatatggcatacacacgatcccactatcagtgtattcagcctcaatcccacgatccttgcattcagcattgatcccacgatctttctgtttatacgcattgtaacgagaggggaaactcttcctccccaagcttactagccctataaatagtgatgcatattcactgggcaagagatcggtcgaaaagcagttgagctaagactataccctaaatatattatctaagaattatatattcagagatactgttgtaagagctataagaaaaggaatctttctccttgatcttaagtcaatacaagtaacgaggattaggctattaccgaactgctcggggctgaacctctataaaattcttgtgtctttatattgctttatcatatatttgttattataaatcacttatcgcttataaaatagactctttgtcgttggctaaaagtgaggtcaacaatgccggtgggcttgaatggaaaactacgcaccgaacggaggccctatgtcacaataacgtaaaacgagtaagcaattttctaaaaactttttggagatctaaactcgaaactaaaagtttccctatcggtaaatagcatggcaacatcctaaatatccaggagacatgagaaaaattactaaatggggaaactacctaaaaacgacaggttgtttctgttgaaatttattttactaggatcttagatctactcacaagtatgttgtttcacaccctaaatatgaacttttttttgtgtgatccttcacatgtgtgtgggcactactctgtcacagagggtcaaaattatgaagaagaaaagagagagggatagggtcggctatagagagagaagtggaagactc

SEQ ID NO: 332343 - DNA, 961 bp, Cannabis indica
tcaaagtttgaggggcatgatttggtagatatcaaagtctggggagcatagtttagcacataaacaatcactaaaacagtaaaattgaatgaaattagacaaaagtccttcaatctaacaatctcaatagttcaaggagaattttaacggctaaaaaagttcagaatgcattatttagtacatgtcaaagtttgggggaaaaatcctaattagccaaattttatgctactattatttgtctgtgtctatttatattttatttgattaagaataggtcaataatttattttaaaaaaaaaaggtacaatagaaactgattttaaataagcttttctgaaatgcttattcatcatttggtactagtgtcatatatatatatatgggataattatataaagcactatttttcgtaaaatttttacatttttacgtttaattttttttttatatatatatttttacggttttctatagaaacaacacgaaaataacaagaaaactatataaaagtaacagaaaaataatatcaaatcagtaacaaaaaataacatatagataataaaaaaattaacaataaattaacaagagtacaacataaaaagaccatattttctgtaaataaaatcataaaaatcgtaaaaatgtttaaaattccgtacgatcgtatttttgtaattttttttttgttgtttttgtgtatttgtgaaataatccctatatatatttaaattatttagtcttaatgataggtcccattttaaaactaaaatttcatttttcacttaaagtttcttgaaagtgttacattaattattcaagctaaaataaacttacttaattttttttttttgtctataaattacattttaaattatacattttgaataaatatttaaaaataagatatagtttaaatataaaaaaaataattatataaaaattttactagaacaaagataaa

SEQ ID NO: 332344 - DNA, 981 bp, Cannabis indica
agctctttacgagaagaccaggatggaggaagaagatggtgaggtcgaggaagaagaagaagaagatttgtccaagtctcccagcatgtagacttggtttatctctatctctctttttcttttagaaaatggccctttagccaaaacaatggtttgcccctggtggcactctctcgtttttttttttttgtaaagacagatttgcaaggttggacgacaaactttgctttataatgcctcgtactttaatatgcagatgtttgcttgcgttttattcacactataaacaatcacatgcataaaatttattaggggtttccatcgcctgcattttcctctgacgttaagtagttaatttcctgctttacgcgcgagcaacttatctgcccatccctcaatctgcgagccatcattgattccacctcgcgatcatcagaaatgatcttattataagcaacttgaaatatattttcaatgaacttgtcattttgtacatattttcattgcttacatgagtagttaaattttctacccacgtgttttgatttaagtattttttcaagaaactttgatgtctcgtttaatactttcccttaacgtgagtcattagtattcagctttatgcgctagtcataaccttgtactttcctttctcgtcagataggttataaataaaaaaattacagttgtttgatccctttctcgtcagaaaggtttgatcaaggcgttataacgattcaaccccttttccgtcaaaaggtttagtcagggagttataacagttcgaccccttttttgtcaaaaaggtttggtcgaaaccttaaaatgttttcaaaaaaaaattattttttgaaacgatgggtttgcatttgtattaatgtattttcagattaattccggttaatcatacatatatgccccgcaagtaatttcaaagggtttatgctttataattacttgtttgaaaaaaatgattatttt

SEQ ID NO: 332345 - DNA, 450 bp, Cannabis indica
aatgaaagcaacatggttaaggaaaagcttgagaaatatgaaagcataataatcaagaaagttaaaggcaagatgaagtatctttcacattggcaagaagcatccgtccgagcaagacctgatggatcatcatcatctgacgagtctccttggtcctctaggacggctttcccctttcctactacaggagtggatggccgagtaggtagactgggctccctgatctgaatcgtatgttcgataggcctgtgctcggccgaaagtttcttcttccttttgagcggagtcttctgctcctcctcaacctcatcttcctcctcagcatgctcctgagcatactgcttggctcccgcacctcccttcaacttagcttcacgcttgagttgaatgtgtttattctcctgatgagctccctcagcccagccaacactggatttcctcttcttctcc

SEQ ID NO: 332346 - DNA, 627 bp, Cannabis indica
gattgtaaatttgatataaaaattttttattcccaaattttatgaaaaatatggtgtgtgaatcggtttaccacaactaaaatgaaaatcaatattttaaatatttatcccaaaaagccaaaattaaatgtcaaaaatataataaaaaaacccaaaaaaattatattagttccataaaattaaataagaaattgatatacataatcgatatacactcaaaacaaaaattcatttacagattaattaaaaaaaaatacaaaatattttgaactgaactattcccattaatcaataaaattcaatagctcgaatataggtgtggagctcaataaaaacctagaaaattttcataatagttaaaaaataaatataaacaaaataaacgcaaaactatcaacaccacaccgaagtttgttgttcaatgccgtccgactgcacgaaaaaaaagagcaagtgagccacatagaaacagggaagtaaaaatgtaacaccctatcaagcataggcgtgttaacgtgattttaaacttactgtacagctcgttgctaatcaacgaggttattggaaaacgtgattaattaaaattttgcttcttaattaaaatataacatattacattaataaaat

SEQ ID NO: 332347 - DNA, 812 bp, Cannabis indica
ttattttacgtgatatgtaatcaaaccttacaattttagaggataattgttgtaaattgtaaagatatcagtcaactctgaaattaaatgcctacctatgtaattataaatagaggcaagttagactgaaaaagggacgaaaaaatcataagagaaaaaagccctagaacggtatcagaaatctaataagattgactcgtggactatgcagaattttaactgtaaaaccatgtaaaaaaacctttgtgttcataatttttttttcaccatttttatttttctgtgcaaacttatcatcgttaaggctcatatctggttaacgaaaatctgcgttaacagaataaatttccttcttttttcatttgaatcaccttagttggcatatcatatatgtttggaaattttttattaatatacttaatacacataatgttatcccattttttgcagtatgatgtggcagaatacacaagtgacacatgtcctacattcttcgcatctggacggagatggatgtcccaaacagcctttatcctatacatctgcttgtatacctctaattacccgagcagagtggaaggtagattatctgagcaagagcaagtttagcttttcgaactacttatcaggacttagctactttagaatgatctcgtgaagtccaagcacgaagacaatccttagaatcgtgggattacgtcagaggaatatgacaacctgttcaaatttcctattttgtgtatcataattatgtaatgaatattatttcctattttatacattgtaagcaaaagagaaaccttccctcatgc

SEQ ID NO: 332348 - DNA, 645 bp, Cannabis indica
cagacgaagaaccaaacctgaatacagagctacacgtcggacccaaaattacaacctaaacaagaattgccgaaccagggccctagaacaagacaaggaccgcgaccaggacccggacccagacctagaacggagcagagacctagccgcagacccaacctgagacttgaactcgtgcccagacacggtcatgtacccaggccagaactgagacgcggacctggacctaagtctgggaccccatcccaaacacaaacttggacctagaaagggattcggataggaacctggactcgaaccaagacccagactgggatcgaatgctggacctagatctggaccgagatcctgaccaaaatcagacccaaagctagtccaagacccgaacccacagtcgaacccaaaccaggattagaaccaaggacttagacccataactgaatccagactcagatcaggattggaacttgggactcagacccaacctagaccaagatcgaggccgcaaacccacacagggagcatgatttgaacctagactaaaatccatatccaaaccgaaactcagacaaggacttgaactacaacccgaactgaaacccaaactcgaataagaatcggaaatggaactagaaccgaactagg

SEQ ID NO: 332349 - DNA, 856 bp, Cannabis indica
caaaattagactcactgtcgttggctaaaagcgaggtccacctgtgggcaaaacggtaggcgggcagaccttgtctagtaattcatcgggagaagtcatacccaccaattccaaccaagttaatggtgtcggtcagctaattggccaaaccaaccagtcactaagacagccaggcgtttccgtatttgataggttggggatgactcatgatctcaaaaatgatttgaataggaggagaggggtggatgatcagcttgacatgccgatcgtgcagcccggaacctgcgctcaaattcttgctcaaaaagatgctaatgtgactcagatcggccaagaggccaaacaggttagtccagccgtgcaggcacagttggatgaactaaaaagtatgttccgaggcatggccggtcagaggaacaacaatctcgagttggaccgagcacgtggaacccctttctcctctgagataaatatcctggagttgccccacaagtttaaaatgccaacgtggaagatgtatactggaaaggaagatcctttatcccacctcaattatttcgagatgcaaatggatctgcaaggagtatgaggagatgtatgttgcagaatttttcatgccagcctctcggaagccgcccagcaacggtatttcaagttggcacccggaaagttcaactcatggaaagctttctccttggagttccatgcacaattttccttctctcgccaacttccgttgcacctaggagatctggttgaagtaaagcaaagaccaggagagcctctccgagcctacatcagtagattcatgatggaggcgactaaggtttcacgggtaaccaaagacggaaagtta

SEQ ID NO: 332350 - DNA, 559 bp, Cannabis indica
atcctaacccttttaaggattggtggaaaaccctctggactttgaaccttcctcctaaaatcaagcatttcacctggaaggcttttaaccatcttcttccttgtgctctcaacctcttccacaagcatgctattccaagctcttgctgctcatattgtgggggaagttcagagtcggtctctcatgctcttctttactgtaccagagtaaaaaccatttgccatcactccaagttcaagcagttttttgttgattatcgtaggctagatatcagggatttttatcttcatagccttactttacttcccagagatgaccttcccctgttttttggtttaatttggcaaatatggaatataaggaatgcccatctctttcacaaacgcagtgtaattgataatgttcaggattttgtttcaagctttctgcaggattaccaggatgctcaaattcactcctctgcttccaacatgggtcataaccattcctcagctgacttggatcaacttctgcttccatcgactcctgctctttttgttgatgctgccctgagtactga

SEQ ID NO: 332351 - DNA, 954 bp, Cannabis indica
ttatatgaaataaaaaatgataaaaatattagcaaaaatagacttaagtggctggccatatagatgggccccactagttataattttgccatttttcaactattaatcttttatttcacaaatgccatattttcgagttttaatcctatatatgccaaaaatatttatttaataattataattaattatcaaataaatttgtgatttatattatttattaattagactccacaaagtctcttaattaacaaatagaccctagaacctcttttcttcacaattcagtcattgcttagtgaaaatttataaataagacagtctaattttagaattataattgattaattaaaatcaatttactgagtcttacaagcagtattgtctcaactagtgtggggaccatgtgcctatataatcaagcttccaataagtagctctagaatttatcaagtaaattctctaacttattaattcctccttgcaccactatagatttggaattgcactctcaattatatagagcgctctatatgttcaacgatatagattcaccatgtattatctattgttacaatcctcataattaatgatcctctatagaggatctacattgattagggataaatttaccgttacacccttcaatgtattttatccttaaaatacttagctacctataaattatatttcagtaaactaatgtaattactgaaatgagtactcaaccattgttgacctcggttctagctaatgacattgagtcaaataataaagcgattaagtaatataattaaaagaaagcaaaagcactaaagtaaagtgaacactaagtttcaaagaggttcagtgtgacagtcagtagtcccgtgatccgtaaggggaaataccgggtaagctgtgcaatcccacaccgcctggggaaggtcaagtgggatgattctgagactgtgtagg

SEQ ID NO: 332352 - DNA, 805 bp, Cannabis indica
caaaattaagtgtgagatgcaaggtgataaaagaatattccaaaggtgctatgtctgtctaaatgcttgcaaggaagggtttaaaaatgcttgtaggccattcataggactcgatgggtgctttttgaaggggttttgtaaaggaatactgctggctgctgttggaattgatgcagcaaattctatatttccaatagcctatgcagtcactgagaaagagacaaccagcagctggacatggtttttagaattgttaagagatgacttgagtcccattgagccaaactcattcacttttatgagtgacagacagaaggggcttcaaaatgcagttctaaacattttcaacagcccagatagcaggttctgtgtcagacatatgcatgggaatttcaagaatgagttccctggactactgctgaagcaactgctgtggaatgcagcaagatccaccattgaagcagattttgataggagaatggaagagattaagaaggtgaatgtgaatgcatacaactggctggcagcaaagcaaccatcagaatggaccaaatcacatttcaaagagggggtgaaatgtgatatgctgctaaacaatatctgtgaaagcttcaacaatgcaattcttgatgcaagggacaaaccaattatttctctattggagtccattaggtaatttcttattttaatcctaattaaatttggcttggatatgtctgctaggaagtttacatgagtttcactgtatttgtttcaattctggtgttattaatatgagtttcactgtatttgttggctgatttaa

SEQ ID NO: 332353 - DNA, 594 bp, Cannabis indica
tttagtgtttaaggggcaaaatgatcaatttgctacgttgtatttttcttttgtgggatgtattaaatcatgttttagttgatattaagctaaattagtttgttaatcaataatatctcattatttggcaaataatagaaaattgccaaaaatctcattttctctctctcaaactcaactctctccttctctctctcgacatccctagaactagctagggtttgggattatttcttcagcaactcatgtttttccagtaagtcttaggtgatccaagccaaggtaaagtctttagcaaccttctttttgatttcttgggtgttaagttttggtattatgcatgttttgggattttttgttgctgtagttgctgcttgtgtttgttgttgttttcagtagatgaattatgcttagatatgttgtttaaagcttgttgtgttggctggtttgttgtttgagcaagctttgagttttttgaactcaagcttggctcattaatggtggattttggttctgagcgtggatggttgttttgttgctttagatatgttgtgtatgatctaaatagccagtctggaaggtttctttaagttt

SEQ ID NO: 332354 - DNA, 550 bp, Cannabis indica
gaccattgacaatttctaaacaaaaactaccaatattcaaagcaatccaagatttttgttcaaacatcaaacaccatatcatacttagaaactgggatctcaaacaccatgtcagtaaacaatgcattactgtccatcttggggccaattttcgatcttggggccaagagtatatgtaacattaggttgatctcagagtcggcaagctcattccggtcattaggatcaccgtcggatcggatctcggcgaggatccggttcgtctcttcgatgatgttctggttgacggcgttggcatcggagccgccaaggtttccacgaggtaagctcccaaatccacgacttctacaattcacagctgagccattattaaaagagaaaatgtagggggggttttgtcaataggaagaagaagaagaatggcagaagaggcagaagaagaagaaagagaaagaaaaaaaaagaaaaaaaaaacagaacaaaaaacagaacaaaaaggaaaaaaaagtaaaaaaaaaataaattttttaatactgatttttaatttttt

SEQ ID NO: 332355 - DNA, 1390 bp, Cannabis indica
gattccaaggctgtttcagtcttttcaaaactgatttttttgctataaaaaccctattaacgacttcctcaccccccattcagataccttaaccctaaatagagcctcaaaccctttttctctcaaattctcactctctaaacctaatctccttattctcttcaacctcctaccaccatggcctcttcttcaagaccaaagaggcaaaaagtgtcaatgcaacaaaaggagcaaaggactaaggcaaagcatgatctcttctcacatggaaaaattgcaaggaagttcaaggaagattactctcaaagggatgtcatcaatggtaagcaatgtgatctccaagcccttgagtatgtcaactttaattttcttattgagcgtatgggatgggaaaaattgttagaaattcaaacaaatatatatcctaggttagttagagccttctatgcttgcattgagtttcaatgtgatccatatagagttaggggagatctcaaaggagtacattttgagttaactattgactcgcttaatgattttcttaatgcacctaaagatggcctcttgcttgaccatagacctcgccttaaaaataatgcctttttcaattttaacctctttaataatcatgtgtgtgtaggtaactcctttaggttaaaacaaaaaagaacctacctcacccttcaagggaaaatagttcatgcctttatatgctctaatcttattcctaggaaaggccatcaagatgaggtaagtgccattgatcaagttctcctatacaatcttataatgggcgaaaaccaaattaacctaggctatctcatccttaaaaccatgcatgaagtgtttaaaccttccctaaaaagggcattaccctatggttatctccttagctatttattcccacttctaggaatcccaatagaagatgaaattgatgtttatgaacccaaggattccgacactcttggtgagatcacattcaaattcatgcgctacaaattcgatgaagaggaaaagaagtggattcccaccacttcaatgtcccatgtccatgaggatgaacacttggtcccaagtgaagatgaaggggaagagcaagatgtccaagctcaaaatgaagaggaaggcgaagaggaagtgcctccaataccccaagctcctcactttaaccttgaagaagcttttgccaaccttaccacttccatgacttccaatttcaccaccttgagaggtgaaatgaacaaccaattttcaactcttcaacatgagatgacaaccatacggagtgatattaccacattgagagtagacatggagcaagggtttgacaacatgcaagaggaaatgacacaatggagggcatacatggatcgctttggccccccac

SEQ ID NO: 332356 - DNA, 1807 bp, Cannabis indica
tgatcagtggttgagccactacctcccctgctaaagcctgatgcaggaggggtaggagtcctgccaacaaccggagtcctatgagactctactatgcatcccactacgccctcagctcgtagtgccttatccaccatttcagcataggtggcactgtcgtcagtagtgatcatcaaatcatgtctgatcttcgcatttaacccatccaggcatttctctaacttacagaagtcggttggcacaattctcgaggccaacctcgccaaacggtcaaattgcgttgtgtactcagtaacactcatgttttctttctgagttaattgggtgaactcttttcttttggcacttttgactgcctcgttataatacttggcatgaaacatctcctagatttctcccaggtcattgtgctaacgtcatgaatcatggacaccatttcccaccaaaccagagcatcttcttgaaattgaaaagtagcacagaccagtctattattgccagtgacgcccataaagttcaagatcctcgtgatcacagttagccacctctcgactttcataccatcgggacctccaaagaaaactggaggttcctgcttacggaacctttcatacaggggttccatccggttcattgcaacaaccgattcggcctgcacagcaggggcaggagctactggtaattctagagcagggactgcaagagcaccctgctgtcttaaccgccgaatcacttcatcttgttcattaattctagctttaatttctgcaaacctgttttcccagttttgggcatcctgagtagcttgggcagcttgggcaacctgtggtgggttaacatcaccccgaccacgtgccatgcccctgggacctctacctcggccacgaacatttaggggaatctaagctccctgaccatcattggatccaaccaaattgccctggctcctggtgtttcgcttggcgtccatactaattagaacagcttgcgtaaccaatagctagtctggtcagatcgtgatcaaagaaaaacttaataatgtcgcttatttagaaattaaaaacatatgcctattctactttcaggctactaactttcttcctaataggcttttcttaaatcatactattaaataaactactacgcaataaaagcttactgaaccgtggagcaagcagactgttgatgatgattgtacatgtcgtgacaatcttcggaaaacaacctggcggctctgataacaaattgtaacactctaactattataggcgtgttagcgtaatttttaacgtactgtgcagctcgttgctaatcaacgaggttgttggaaatcatgaataattaaaattttgcttatttaaataaaatcataacataatacatttataaaatcccgggatcccgtttacaaaatacatttacaaagtttactattcatatacaaaagatttttcgcctagcgactaaacagtaaaagcctgatgttccgaggattgtacgctccaggcctaaccaccctgacatgtacaatcttcccctgctcgctctcacggctcccaaactttagctttgcccttacctacacatagaaattgcactatgagtcaacaaactcagtaagaaaaacataacatataacatacaaataacctgcgttataacctggcgcccatacacccgatcataaccctaatcctcgtgtcccacacggtatcgagtctaggacgtccatatgacaatactatcgtgttggaaattattttaccaggatctatttactatcatgtatgttggattaacaacctaa

SEQ ID NO: 332357 - DNA, 871 bp, Cannabis indica
acaagggttagagatctgagaaaaaggagtcatgtaattccgctacaaccaatgtaaggtttctcatactttataagtgtttaattttcatcgttttagaagttcatatttaggatgttaaaaacatacttgttagtaaatctaggtcctggtaaaatatattccaacaacactattgcatccactagttgatctatgtgcggtagcagaaagctatcttttgggcaagccttattaaaatgagtgaagtcaatgcagactttccacttcccattgggcttggaaaccaacacagtttttgacacccatacccgagtaaaatgcttatcggatgaaattgatcatgtcaagtcggtccacttctcctttcaaggccgcatacttctcagaatttagagcccgctacttttgccttactagccttgcatttgggtctatattgagatggtggcacattaaggtcgggtctactccttccatgtcctcatggctccaagtgagcacgtctacattattttccaaattttgtctcaactccctcttaagagcttcgaggagtccttttccaatcttaaggatcttgaacgggttctccaaaattactatttcttccaattcttccattgactccactagaacttcctcacaaacttgggggtctagttttgatgaagtttccccgacttggttgagtcccccatggaccgtcattctcattggttctcgaggtttagtggcgatcttgagtgacatgttgtagcattctatagcttccttctgttctcccttcaaggtcgcaattccttcggattgggaatttctgttgggttttatgccctaaataaaactctttacaatctgattagttatc

SEQ ID NO: 332358 - DNA, 979 bp, Cannabis indica
ttttaaatattttttttcaaatgagaattttttttattattttaatatttatatttgttatacctatttttggactatttaatgaaaaagtcaaattgaatgccacgtggcataaataataaattctcacaataaatacattatgggacaggtcgaaaaaaactcaggactcaacctgtgaggtgatctcatctaaataaagatcacaaggttcataaagtgaggtatttcaagattgtcgaaatgttatgttgataaacattcaacatctagcaataaagatcttgtagctgctcgtaatacatagccagtgatgaatcacctcataatacacagtcagtgatgaatcatcttgtaatacacaacagtgatgaatcacctcgtaatacacagtcagtgatgaatcacctcataatacacaatcaattatgaatcatctcgtaatacacagtagtgatgaatcacctcgtaatacacaattagtgatgaatcacctcgcaatacacagtcagtaatgaatcacctcgtaatacaaaatagtgttgaatcatctcataatacacatgcagcaatgtattacatcctattacacagcagcagtgcacctgctctcaaataacatgatttgacaaagtcaaataccacttcaaagaccacttttttatattttatatatgaagaagttatttatacttatccaaatattcagttatatatgaaacgtgggcaataaccacccatcaattgtaactttttactaagataagattgagtaaccaccatcttattcctatgaataagggttcactcaaaggaaaaagggagaggcaattatgatgtacagaaactttaccaaattgtaaacatatccaaaattcagaaataatatagactcgtggagtatataaattttaactacaaaaccacataaaaatatctagtattcatttattatttttgtttcttcttttcttgaatt

SEQ ID NO: 332359 - DNA, 765 bp, Cannabis indica
tatgatctaatgttatgacaaaactggttatatttttatgtatttgttcgtgttaggaaatatctttaagtttgttatattaaaaaaaatgtcaaaaattgaacacagggtcctattttttactattttagaaaacacatggttcattttatcatttaacaaaacataaaatacatggttcaaaatgttatttaaccttattattaatattaattattcatctttagtttatttttagaaaatcacctcatatacgattttttaacttttttaaaattatttttacggtttaggttgctccaatagttactatttgggttgctatgtgaatttggattgaagaaaaaaaaactataaaatatttcaaataaatacaacgtatatgattattaaaaaaattgaatgaaagaaatctctcaaatactgaaataaataaaagtgtatcaatatatattatttttttaaggaaatgtattgtataattttccaacagttataatagctttaaaaaaaaattataaaatgttaattgaagaaagaaaaaaaaagaacaaaaaaattatatatatcttagaatgtgaaaaaaaaaaaacgaaaaagaaaaaaaagtaacaattaaaaaaaaaagctaaaatgttgatttcttcaacaatataaatttaaaaataaattaaaagaaaaagaaattagataaaaggtggaatggatgaaatgagatagtcaagaaaaagtttagacagtatcttttttattatttaaattttt

SEQ ID NO: 332360 - DNA, 477 bp, Cannabis indica
tcgggaatttctagatgtttttcccgaagaacttccgagtttaccacctcaccgggaaattgactttgtgatagatttagcacccggagtggaaccggtttccaaggctccttataggatggctctagctgagcttaaagaattgaagattcagcttcaagggttacttgacatagggtttattcggcctagtgtgtcaccctggggagctccggtattattcgtcaagatgatgaatgggtctatgagaatgtgcatcgactatcgggagttaaacaagctaaaactgaaaaataaatatccactacgtaggatcgatgatcttttcgatcaactttaggggaagatggtcttctccaagattgactttcgatcgggttatcgttagttgaaaatccgagaggaggacattccgaagacagctgttcgtactaggtatggacattgcgaattcttggttatgtcgtttggactaac

SEQ ID NO: 332361 - DNA, 702 bp, Cannabis indica
tcggtggtgggattaacccctccaaaaacgatgaagatgttggggtcgatccttggtcaagacgtggtggtgttagttgatagcggggcaacccacaattttgttacggtggacttggctactaaattggagctgcccattacaagaacagaggcttatggggttcagttgggtagtggacaagcgatcaaaggcgctggggtttgccggggagttccgttgactttgcaaagcattaacattgtggatgacttccttccacttcccttgggtaatacggatgtgattttgggagttcagtggttgaatacgctgcagaaaacaacacaccattggcaagagcacactatggaatttaatctcggtaacaaacgggtggtgttacaaggggatcccaccttacataaaacaccagtttctctgaagtcattaatggctaccttgcaaaccgagaagattggtgtttgggtggaattgggccattcgtcagttatggcagcagaggaagaaccatcggaagccatcgccgccttgctacagcgctataatgccgtgtttgaggagccacggtatctaccaccacctcgacaacatgaccatgccatcaccttacaaccggacgcaacaccagttagtgttcggccgtatcgatacccccagatcacaaaggatgagattgagcggttgattgaccaaatgaaa

SEQ ID NO: 332362 - DNA, 858 bp, Cannabis indica
agagatatcataaaacatttcataaggaacaggaattgtgcttgagtcattcgaataaacattggaaaaattttctatcttatcctcataatacaaataagttattactatctatatgaatggttagagtaacttttcttagttttattttaaagttcatttcttgaacatatcgtagtaaattaatcactagtgtcaaccaaataataatgggctcgaattttaaaatcctcccactaagataagatactgtgattttatgtccaaggacttttactagtatcaagttactattatgatagtaacatatttatttgaacacttacaggatcaagaataagttctattaatttacttgttagtttattattatatatccatgtctaatcaaaatatatgtgtcatagagattctatggtgtattgagtatagtctagagttcaaagagtttgaactgcatatatcaataacttcttccacccgtaagtgttatagagattctgtggagtttcgaatgtaatctagagttcaatatatataaagatctttgaacttcatatatcacttcttaacttcttccgcccctatcagatcaaaagaattttttattaaacaaatcttaataatttcttaagaaataaaaattattcatacacattgaagttaaattttaagtgtttatgtggtattatctctttgcggagattattataccatagattttgtatcattaatatatacaaaacacataaaacatgataaacatataaatataataccatattggcatacaagttaaaaaaatatgaaactcaattttataaaagcaattcataatgaaaacctcttaaagagaaa

SEQ ID NO: 332363 - DNA, 482 bp, Cannabis indica
cttatttggtttcatagagtttgacattcgtagctaacttttttctctctcataaattatgatgtttgctgactcaagttttagccaacaacgaagtcacaaatacaatcactacaacaaagatcatctttagtgacaactttttagacacaataaaaaaaatttgtgactaaatgtgacttttagtcgcaacaaaatttacttctgactaaacatagtatgtagttataagttgtcactaatttagttttagtcacaacaagtattgtgactaaaaatacatttagtcacaacaaattgtgatttttgtgactaatacttttagctacgaattttttagtcacaacgtagaaatgacaatttataattagtcacaacttttttacttttagtcacaagttttcttgtaactaaaagtatgattttttgttgtaataataattttataattaattaaatagcaaataataaaatataataat

SEQ ID NO: 332364 - DNA, 1824 bp, Cannabis indica
tgttcttgggaatcaactcattcttttcattcttgattacggtcattccccctttctttggaactacttgcaccggactaacccatttactatctgagatgggataggccactccagcatccaaccacttgaccacttcctttctgacaacttccttcataggtggattgagtctacgttgtgcatcaattgttggcttagcattttcttccatcaaaattcggtgcatcacagttgagggactgattcccttgacatcacccagtgtccaagcaatggccttgttgtgcgcccgaagtactctcagcaatctatcagtttccacatcagaaagagaagctgacacaataactggcagctttttatcttctcccaagaactcataccgcaagtgactagggagcaccttcaactcaagctcttgaggtttctcagtagatggcataagctcttttggcactactcccagctcctcataataccttatgttcaatggcccataggaatcaagccatttcacataacccattacatcttgtccctcttgctccgtcaaatcatcttcaattagactcagttcgagaggatcatctatcagctttttctcactcacaattgtatcaatcaaatcaacgaagagacagttatcacttgcctttgggtatgtcattgcctttaacacattaaagaccacttcttctccttggactctcagctttaattcacccttctgaacatcgatcaaagcttggccagttgccaagaatggtctcccaagaatgattgggacattgctatcttcttccatatccagaacaataaagtcagctggaaagatgaacttgtcaactttgactaacacatcctcaatgactcctctaggatgagctagtgatcgatccgccaattgtagagttaccgtggttggctttgcttctcccaactgcaatcttttaaaaacagacagaggcatcaagttaatgctggctcccaagtcacaaagcgcatttattccttcaattctcccaatggtacaaggaatagtgaaactccctggatctctgagtttgggagggagtttcttttgcagaatggcgctacactcttcagttagagccactgtttcatagtcctccatttttctcttcttagacagaatctccttcatgaacttcacataactcggcatctgttctaaagcttcagcaaaaggaatgttaatgtgtagtcttttaaagacctctagaaattttgtgaactgcttgtctagattggtctttcggagtctctgaggataaggtatcttcacatgatgatcaatactgattggtggagactgttgtggtggtgcagggctatcagtagccttcttttctgttgatgttgggattggcactggttgatctttaatctcttcatccactggttgtatcatttcaggcccatcatatttcttaccgctcctcagggtaattgccttgcagttttccttaggattaacttcagttgtactaggcaaatttccttgaggacgggttgctacctgagttgctagttgccccatttgagtctgcaaatctttaatggaagatctagtttcagtcataaattgtaacaataaatctgtctgcaaaccagaatttccactagagctttgttgctgagtatactgttggttctgtgtctggttctgatttctctgctgatagaacccactgttccttcggttacctccttgattgaacccatagttgttgttgttctgagaataatttccaatggcttttgcttcatccattggcaaatcatccacatctgcctgac

SEQ ID NO: 332365 - DNA, 510 bp, Cannabis indica
aaaaagcaatttcaagccgcaagggatcgatgacctgaggcatcgtccttaaccaatataaaacaacaaccaggggagtcacttaagatatatttaagtcgctttagcacagctgcagcaaagttcaggaacctaaatgacaatatacaactcacgacacttcacacaggcataacaactgacttatccacagctggaggcgaattatgggatgatctcaagggtcgccctgtgagaaacattaatgagtttaatgaaagagcacaagtatttatgcaaaaagtggaagcaagaaacgagatgaagctgttgaaaactggctcgggaagtaaacccagcacgagtacggcaacaacgagcatggtctcgactaaagtagacaatcctagccggttaaaaaacaaaagaaaggttgattcaaaagaatcatctaagaataaaaaaaaaaaaagcacgacaagtatgtttcgatttattcaatatacaccgagttgaatgaaactcgtgaga

SEQ ID NO: 332366 - DNA, 841 bp, Cannabis indica
tttaacgaccaaaagagttcagggagtatgtggaagaggtgaatcatccttctccataggggtaccagagtgatccgacacacgagatccagtatcttcaatcaaagccaaaccaacgtcattattggtgacagagtggccacccgaaggcaacccaagatccatacagatatcattagtcgcattggttggctggctagccacctcttccacttggtttggcccaacattatgttagggtttatgctctaaaaagcctgtaaaaatatttataattattaaataaagagttaaacatttgatatatgtgtgaatgttaaattgttaatatttattattggataatttatattaaatatcgaaaaaaatctttattcatatatgaggttgtggcttctagctgcacagtgaactaaaatcacttagttatgatatgaataacagtcaataacatattaaagttatggaatctttaatcaatggttgctattacggttcactgatgcccgttcttcgttgcaagtaatcgcagtttggattacggatgtagtcagacatcgaagtgaaggtgttgtatataatagagattatatatgacaaagactgatatgaataaagctatctttatgcatgatacatgtcgtttactataaagacctaattcatatcaaaacgatgatcaatagtagatcggcctaaattttgagttaccatgaattactgttcatgttattagtttctttgattcacttgttaaaatttctcaaagaagatgattcttacaacttctgttttgggaatctaataatatggatggatgagaactgttgggttttatgcc

SEQ ID NO: 332367 - DNA, 1021 bp, Cannabis indica
ggttctagacttacccatgttattacaatagagatccattgcattttctgttgccgccgagtaaaaattataaaaattgcataattcaaatataatacaaataataatcctagagtttaataaaatctctaaaattgagaaattataactctaatgcccacttttaataatgggacccacaattaaataaagtcacaaaaaattataaaaatatcaataattagtgctcattgcctttactaaccattttatgaaatacagtcattacattttatttggattaattttatcactccactttgcctatatatctggtgttggaagactatttttcatacatctcttcattccacaactctctacttttcaccatttcactcacatttctaccattttcattctgccatatttttatattttgtcaagtatatttatcctttgtaatttttatttcaatctagttatgagcttctaatctttattcaagataattaagatgatgatgaagcaaaatgtaactagatagtgtttatttttgtatgttgatttcccatttgtgctataaagttcatggatttttctatcaaaaatatgtctttttcatcttcaatatcatgtatttttgattgttaaagcatatttctacttagttcttcattatgcaaaaatataatactctttgattaaatgtctttcattaaattgtttacatctaattcttagaatataagtgttatattttgcctaaacatagtttctttgattttgtgtagtttcattaaattgtaacacatttaatgcttagaaattatacattttataagtgaagaaaaatcctacctttttgaaaataacttgtacttaaatgaaaaatatattttggaaaatatggtgagatttatttcaactatatctaaaacttgggaatcaatatacttataaatattattgaacttgcattttgtggattctaatatcttaataatcttattttacacatcttatttgaaaatcattttca

SEQ ID NO: 332368 - DNA, 711 bp, Cannabis indica
gttccatttccccaggctttgagacctgctgggaaaaatcttgaaaatcgaggagaaatccttgagcacttgacacaagtgaagattaatcttcctttgcttcacgtcatcaaacaagtgccaacctatgctaaaatcatcaaggatctttgcactgtaaaaaggaagcatcatgtcaaaaagactgctttcttgactgagcaagttagtgcggtaattgaacaaaagacaccgctgaaatacaaagatcctggctgtcccaccatttcttgtcaaatcgggactcatgaatttagtcaagctttgctagacttaggagcgagtgttaatctcatgccttattctgtctactcgcaacttggtcttggtgaaatcaagcctacttctgttgtcttacagttggctgatcgttctatcaagaagcctcggggaattgttgaggatgttcttgttcaagttgacaaattctattaccccgtggactttcttatcctggatactcaatctgtggttaacatggaatccaaaatccctatcatacttggaagacctttcctcgctacagctaatgcccttattaactgtaggaatggtctaatgaaaatatcttttgggaatatgactcttgaggtcaatatttttcatgttgcaaagcaaccacatgacgatgatgagtgttatcagacatttttgattgacacgctcatttct

SEQ ID NO: 332369 - DNA, 1292 bp, Cannabis indica
atttaagtaactattatttaattaataaaaattctaaattttaaaaacttatgtataataaattcaaaattatacattttcactaattttaatgaataagtttttggtaaaaaaaaatgtataaataaatgtgcgataattatttccttaaattcttattaaatttaaaatatattaataaaatttaaattaaaaaaacgaaaaaaaaaaatctcacctgcatgggattatttatcccaccctgctggatgggataaataatcccagacagatgaggttaactggattagttattcagacttctaatatgcccaaacactggattagacaaattagcctgtgtaattcaatccagttctgcgtactaaacgggcccaagattaagagggacatgggcattacctacccaatttctaacctagtaaagaaaaatccaataaaaataaactagtttatcggattgtgcacctatctttcttagtcaaatacatactgagtggcgtttgttttaagtggatcaaaattaatttcaaagatacaacgtcattcaacgcagaaaattaattctaattttgtattccttaggagaacgggtagctggattctttgacttatgagtaaactatattcagatttgagatcattgacctcaaagagagagtgggtggggtagtttgctaccacatattgggtaacgtgctcctttgaattgataagtctatcccatatatatatatcccatatatgtgtatctattaatatatcttctaactattataaaaatgacataatcgtgtcatactttttaagacaattttactcttatattaaattaaattatacccttattaataaatcaatttatatagtaatttctttttattatgattattaaaccccacaattactaatttagtttttgtctatattataattattttatttctttttattttttattttactattatttaaacaaatgtgactaatgatatataaacaatattttgtgtcttcatatttataatatcatttgccatatactattttacctatatatcatatagctaatggggaaaatatctccattcttaatgatccctggcttccacatgactcaaacaactatgttgtctcacggcaccctgctcttgtgaataagtcggtcatctgcctctttcaagtcggtactcgcatgtgggatgaggatgttgtgagggatctgtttgttccccgtgatcaggaccttattttgtccattcagcttagtgattcggccgctaatgatggtt

SEQ ID NO: 332370 - DNA, 647 bp, Cannabis indica
ccggttaaccattctttgataggttgcaccagcgtttttcaatccgaaaggcatgactaggtagcagtatacccctttatcggtcctgaagctagtgcactcttgatctgctgtgtgcatctttatttggttataaccggcgtacgcgtccatgaaggacagtagcttgaatccggaggtggcgtctaccatctggtcgatcctgggcagagggaaacagtcttttgggcaagctatgtttagatcagtgaagtctatacaaactcgccaggtcccgttaggcttcggcaccaggaccggattggctaaccattctgggtagtaaacatcgcggatcatgccacttgttaatagcttgcccacctctttctctaaggcttcggccttcactgagtcgagggggcgtcgtttttgctagactggcggcatgtccgggttgacattgaggacattggtgatgacgtggggacttatgccagtcatgtcttcttggcaccatgcgaaaatgtcaatggcacccttcagtgtgtttattatctttactttttcctccgggtctaggctctttcctagctggagtactttggtggggtcgaggtcgcacactgatatctcctcgacgtcctccattggttctacgatttttt

SEQ ID NO: 332371 - DNA, 798 bp, Cannabis indica
tatttcaagttggctcctggaaagtttagttcatggataaccctctcttcggaattccatgcacaattctcgtcctcacgtcaaatcccattgcatctgggagatttggtcgaagtaaaacatcgacaaggcgatccactccgggcatacatccgttgattcatgacgaaagagaccaaggttcacgggtaaccgaggatggaaagttatccgcgatactggggggcattgaagtccttggcgaactatggaaggataaaaggaaaaatggaccggtcgactcaatgagtgatttccttgaccgagccgaaggcttcatcaagctcgaagaagccattcaacgagaagaaggtgagcaaaatccaggcaaaacgaaggctccttccactggtacatccacccaacttccccaatattttagcaattcaagtggcaagcgttcaggcaacaaccacaagaaaggaaacgggaagaaaggaaagttcaccgaaaagtccgaacagactccccatgatcacgccaaacacactgcattcactatcctaactgaagatatagagagtgtgtatatggcaactcagtcgttaattccgtagaggaagcccgggcccatgaagaaagataccagcaaaagggacataataaaattttgtcggttccacggagactacggccacgacaccaataaatgctacaacttgaagcgggaaatagaacatcggatcaagaaaacaacccgcactatgaagtatgtcaaggccaaccaacggtgagaaaaactagggtctgttgcctcca

SEQ ID NO: 332372 - DNA, 643 bp, Cannabis indica
ggttctctggaaagtttccctcccaaggttttcattttgcttggaaagctatttcgaggtgtctcccaactcgtacccaattgcgtacaaaacatgttcctgttgatcctcgctgtgtgttttgtaattctgatgaagaaaccatcattcatgttttggttggctgtcattttgcgcaatcatgttggcataggtcaggtgtgggattgcatttttttgcagaagctacctttgccgattagtttaaggcatttctcacagggggtagagtggctttggtggatgagctcttgatggtagcatggcgtatttggaaagctcgaaatgagcttctttggcagggtcgttcttctcaggctgcggatatggttcgagtggcaaggtcatgtcattctagttggctgttggctcaagagaacaggtttgaacagttgttgtttgatgctactgttgttggtagcagtgcttgttgggtgaagccgcctgctgggaagctgaagatcaacactgatggggcgatttttgaagcaacaactcaatatgatacgggcatggtcattagagattgtcatgggaagttaatcaaagctagttcttctttgcattctggggtttgtcagccggctgtggctgaagtattgag

SEQ ID NO: 332373 - DNA, 658 bp, Cannabis indica
ttgactttcttctttgatgttgtaatggatacttaggcatttccttgcaatgaggagtctatgttgcattttctgtcgccattcagggaaagctctttgataaacttttcattttcttagggagagcatttgttttaggaccgtattatttttgacatggattatgctcaatgaagggggagaaatacttatcctttgtgtaaagtggtgtgtttgttgtttggttgcttaaagtgtttgtttttcctgtttgtttactctgttatattttgatggttgctctgtttttctttaatattgttgtcattgaccataatttttcaagggagagatggaagaacccgtatattctttagtgacaattcatgtccagttgcgtctgagattcgtagtgttttgtctggagttccactgttagtgttagtccacgtcgacaaagatatttgggttttaattgttcagatggtaacaactgtctatttcgggtttcttggtttagatgggtataaatacaacttctgggtattatgttaaaagaccttttgatcggagatttgggattacatttctttcttcttgtttcttctttatgttccatggcaagtgatctttgagcttggaggtattaatccaaagttgtagatcaaagcttgaagat

SEQ ID NO: 332374 - DNA, 834 bp, Cannabis indica
ttgatgagtcaaagaaagaaaacgaaaggccattagtaagtttctctcttgtttcactaaaccttctacttcaactgaccgtgtaaggaatgaagacatggaacagattcttaagaggttggagtacttatccaaccaaattggaaacttgaaatttgagaagaatgttgttgaggtgcaactatcaggaagttcacgtgcgaagacttctctgccagatgaacctgaaatttatggtagagacactgacaatgatgtcttaatgaagttattgttgtcggatgaagatagcagtggtgagaagatatgtgtcattcccatagtgggcatgggtgggattgggaaaactacgcttgctcaaacacttttcaatgatgaacgagtgaagaagaagtttgaatctagagcctgggtatatgtttcagataaatttgattccacggctgtgacaaaaaatctccttcaagaattagcaccgagtgatgctggtaatgacatgactttgaatttacttcaagttaatttgtcaaataagttaatggaaaagaagtttttgattgtcttagacgatgtttgggaagatgattatgctcagtggacagaagtgatgaagcctttcaatggtggggcaaaaggcagcaaaataatagtaacaacaagaaatgaaaaagttgcagatatcattcgaactcgaactattcacacacaccatcttagtgaattatcagaagatgagtgttggaaactattttcaaagcatgcatcttgtggaaatcctgaattagaacgtatcggcagagaaatcgctagaaaatgtaatggtttgcctttagc

SEQ ID NO: 332375 - DNA, 760 bp, Cannabis indica
gccaccacctttccttcatttcggttacttcccatttcttgccaactttgctcgagtttcccagagagaaaaaatcctcagaccaagagaacaccttcgaacactttacaaatttccctgttaaccttcattcaccactgtcaatctacctttcctttgtttgatcgacaacagaacccccagtttcaacacttcactgtaagtttctcgcatcccttgctttactgtttgtgtacatggcatgctttacttatctgtttgttttttctgggtttggtatttgaagtttctgggaatgtattcttttgagtttttcacgtaacaagtctagattcaccttctctggtgttagggttactcttgtcacgtacttgttgttattttttgcaaaggaccatacgctctttgtgtactggtcttctagggcatagagaagactttgtttttctcgattttctgccctttctttttcttttacgcgcaatgttgccttctgtgagttctttgcacccgacttttgtccaggaaatccttctagggttttctggttgacagatgtccggagggggcctctttccagcggttaggggacccccattccctttttttgatttagggtttggtatggggcctaactgctggaatcttaactcttttttcagaatcaaaacatgtctgcgtccggttcaaagtcgtccaagaagagcggtaagcgtctggctaccctcgaagacgtctcactgggtcccgttgcccagga

SEQ ID NO: 332376 - DNA, 1041 bp, Cannabis indica
attttagtaattttaagtgtttaaatttttggttcagttttttttttgaagataatcgtttatgtttagaggggttttgcatgcaatcatcacgatttgatggttgcttccccattttaacttactttttcagttttcaattcatccctataaacactaaaccgcctatactatatggcatataagggagtagtttattgaaagaaaaataggaggattaagatagaaattaagagattcgttggaaaattatctatacccagtttatgtttttaacattattagtgtgttgttcttcttcttttttaaaaatttttaatccgaagttatttttgtatttgttttatttattcatgttggattagttgagtattttttgttttgggttttgtttcatggtttacaatgttgttgtttagtttttttttttttttaaatttttgttgatatttcgtgttgttgttgtgttttgttttagaatttgtttggtttttgggtattttttgttgttggttttagtgttaagttttttttttcatttttagaaactggtttttggtgtaaacttttgagcggttaattggcactccagctatacccacctgcccaattaattataaattatatatatatataagtcttccttaaacaaataatggaaaacagagagagagaaggccatatcatatgtatatacccttgcaaataagttaggtgttattttgaaaatgggtttctgtgtttctgtgcttagtatgggttaaatttcttctaataatggtctccactgaaaaatatggctttgatatgttttttcaaaatcttatataactattgaattcgtttaagaaaagccatagtcataaggaagcaatgaggtcaacagagagagttgttgtgtgtgtgtgtcctgatgttagtgcactgtatattgttggtccacttttttagtgaaatcattgcaactacggcttctttctattattacttctacatgtcaaaaacccatttctagagattgatttgtgttatttgtgcgtt

SEQ ID NO: 332377 - DNA, 1194 bp, Cannabis indica
tatcttattcattgtaatttgtccttgatattgaaggattttcttaaattttctatttttggaaagtatcttggtcattctagtttccttctatttttttaaaaaatattttttgaaaaagagtggggcggttattgcttgttcgtgggctggtggtttttcaaatttgaaattggtttccttatatgctccactctaccatgtttatttaaactaattttctttgtcatttattctcattacctacccgatccatcttctttgtgttcttgttctttgtttgtcattcttctttcaaaaattcatggctaagactaagaacctagggcatccaagcaagatggtggaatccgaacaaggccccctcgaatgctcctcttgctgctccaatcttgctgcctgctgctgcaactgcatcaaacccaggagattcatcgcttcctcagcgtgaatctcagcctgtgaagcccaagccaaaacgaattcccaagcaagttgctaggaaatctgtgcgtccccacaaatttttcacaccatcgtcttcttcgttgaaggggtgtccaccttgtcctagtgcatctcctcctgctgcatcaagtaagggcgttgctgcctcaactcgaataggcccttccactcgcactcgtgcccagtaggcgtctctcgacaaggaactttgctctaaacgaagccatgatagacccattcatcttgccaagaagctgaaatttcggctacttcaagttctgaagaaaaagaaccaatggaggtcccctctgatgattctaagaccaaatcagagtctatccattctgaaaaagagcttccaaaagatcactttggagtctcctctaacagtgaagaaactgaactcgaacccgagccacctttgaccaaatctgctccagtaccttctcgtgcatcttcaacagccaaagcttctactggtgccaaaggcaagcaacctatgtagagttcatctcctagtaatatctctccatctcaagctatcaattctagatttattaccgtgataattatcagcgtgattggaatctttatgctaccctttgaaagtgagaggaattatgattcgcatgctcatagggtgtgtggtattgttaagtttgttcaataccatcattgggaaaatactcttacttgttttgagggatatattgatggaattgtcaa

SEQ ID NO: 332378 - DNA, 817 bp, Cannabis indica
ttttttgcatcataggatgcacattaatttttcctaatgccaccaaccatccgaagactttaactttagaagggcacctgcttttccataagattttcgtccaaaataactcgccaacattatgatctgaagtaaaccatttgaatgctaacttacaagagaaaattccaccaggatctggtttccatactctgatatccactgagatattaagcagtctaatatgttccagtagttgcagtaaatccataagaataggcatttccctctccatcaagttccttctaaactgaaaattccagcttgcaacgcaatttcctacctctctttcaatggcaacaagatcttttatactcgtatttttcacctttgaaaccactgccaggtccggaaagcatgttgtttctccaatccagatatcttcccaaaaccgaatggttgcaccattgcccactttaaattttaccagctccaaaaatttaccatagagatatgatatatccttccaaggacctcttggagatagcctatgaccatatttagtatcccaacaattttttgctctcccataacgatttttgatcactttatgccaaagtgagtttgattctaatgggtatcgccaaagccatttcataagcaaccctttatttctcatatctagcctgccaatagcgaggcctccctcatgtttaggtctacacacctcctcccaggccaccaaatgatccccacccattgaatcacctccttcccaaagaaaatctctcatcatcttttctaacgagagtaaaaccgcttttggagctttaaaaag

SEQ ID NO: 332379 - DNA, 638 bp, Cannabis indica
ttatgttagaggtatctcgtggttttgacaaatcagatataatgctaacatttttaccaatatatagaaactttaactttctaaggataattttatttgaggaggttttatattatatatgttttctaccaaatttattgttaaaatgtgggataatacatttcatcaagattataagtttactttattaaaataattttagttatttcatttatatttccataagaaattattttgagtatatatatatatatggtgatttatcattcaagtttatttcggtctaagaaaaactgtataatattagactaatatagttatgcagatatgttataattaatataattttcatattttgtagatctgttggtgggacataaatacttctaagggatttctttttgggagtactgacatcagtggcaacattaatgttgcagtgtataaattaattttgcatgattttagaataagatagaataaatctctttatttttaccttttaatattttttctatgacttaaaaatgctacccttaaaaaaaagctacacgttaattaattgggtgcacaaagttgcgatcgagtccctcaatatttacaagtagttaattttttttagggatttttttattttt

SEQ ID NO: 332380 - DNA, 631 bp, Cannabis indica
gagccaagcccagcaagacagtaaaagatattaataatcacgaataacacatcacatatataataatgccatttcacattcgtctatttaatatagacctgcgtgttaagctcacatgcccatttatgtctatgtggcatagactcacgtgttacactcacacatttatttatgtctatatagcatagactcatgttttacgctcacacgtctatttacaataaggccttagaagggtttatctgggttatagttaccgagtctaacctgattatgccttgcccacataaccctatttgtatatacataattcatacatctttcagtggtttatcctgatgatgtatatcaggtctaacctagttatgcctcatacacataactcgtgacatatatgcgtacattcaatatatactataatatataaaatcttagagtaataaccctaactcgcataccaaataattactcaaataacatattatagcatgcttaaaataacacctatagagggtaataaccttaattcatgctttcactttattagcaatattattgtacatcattgctctcttaccttcatataaattctagggtaatatccctaaaccgcattattatcaaactcaag

SEQ ID NO: 332381 - DNA, 1093 bp, Cannabis indica
attattttcttaccaaaaaaatatatttatataattaattagaaaaatatataatatttcataaacaataaaatgtattataaaattaaaagtattacattatttaaactaacattataattaacaacaaattttgaattgtatgatgttttgtttttataaataacactaaatatttttaataaaaaataattttatttattaaaaaaataataaaaaaatctaattatacatctaaaaatatacataattaaaataaaaaacaaagaatataattaagtatacatacattgcacgtaatattaacctaatcttacattaaatgtgcatatttaacagaatttgttggtttaacaatttttcttttatttttcctataaaattaacggttaaaagttaaactaacactattaaatcaataaattaatatttttttttttttaaaaaaaactagttataaatatttaattttaatttaaaaattaacaaaattagataatttttatataaaaatcttaatttaaaggttaattaggatttttttaccccttaaacttttatgcctgttaaaaatccctaaactattaattaaaattgttagatttaaggacttttgtccaagttcattcaattttactaattcagtgattgtttatgtacaaactcatgctcccaaggtattgatatttacgaaatcatgtctctcaaactttgacatgtactaaattatgttccctcatcttccattcatgttaggcatttcttactaaaattgaataaaaattcttaaaataattcagggaaaatttttaacaaccttaaaagttcaaggcgcgtgatttaatacatgtcaaatcgggggacaaaaattctaattagcttaatttaaatttaaatttaaattagacgttaattaaattaattaatatcatattttataacaaatttataagttatattatttaaaatatctaaacttatttacttattttattatttaataaaattagttagatatatttttttataaataaatataaaattagataaattttacatatttttaaaaaatataattaaattgtattagatt

SEQ ID NO: 332382 - DNA, 351 bp, Cannabis indica
ggtacattatctcatttaatattagcagaacatgtacagcctaggttctgaggttaatttattcttccatacacatactaaaccaagatattaattacatatatgataatcctctctaaaaaaaaattacacatgggcataaatattcaaaattttaaatttataactagtataaattcaataatttacttttagcaacatgcatacttaatattaataaaattgtaattttcattagtttcgttaatatcttaagtattacatatataagatttaggtactaaatcattgagtttggataaaaacatgtagtatcagttactttcaaattattttaataaattcaaaaca

SEQ ID NO: 332383 - DNA, 763 bp, Cannabis indica
gtaatgggttttatttagggcacaaaaacccaacaatgtttccctatcgataaaaagcatggcaataccctaaacaacataaaaacgggaaaaactagggttcctaaaaatcccccaaccggcagaccggttttgcaaccggaattccggttcagggaatcctagaacaccatccggaattctggttgcacaaccggaattttggttctgagcaggaaatgaataaaaattcataactcactcaaaacgatcccaaaccatacaaaactctccaaacctgttctaaataccctattaaacaattccaaagcatcaaaaccgagcttcatacaaaaatacacaattcaccattaaagctccaagctttgagttcaaaactcaagcttggttaaacaccactaacatgcatccaaacctgaattaaactactcaaataagcatatattaacagcagaaaacaatactaaacaaatcccacaagtacagcaagctaattgaacaatccaccattaaaatcaagatttagctcaaaacttcatacttgtttgaaatcaactaaataccaacaaaaacttgcttgaatccacatattgaaacttaattaaactacagaaaataaaattaaaacctagcaacaactacagccacaaattctcaagcatgcaaaactcaacatttcttaaaaaccaagaaaaccaaaataaagctacaaggatcataccaagcacttgagaacacaaaaatcttgttaaaatcagcttga

SEQ ID NO: 332384 - DNA, 844 bp, Cannabis indica
ggtgagagtaatctttatcctcctttgatttatgtgattcttcataatggagccatcactagaccaattgattatcgtgtaatcgctgtaaatgaggcttacgccatctgtcatgtccttttatgggcgttccaagacgtttccctcatgccgcattaaatgcgaagcgattgttcgaacaggttctccttagcccggagatgctttagtgtatttctagctcccggagaggagagacacgctttatgtgcccctccgggggctcacttcctcgtctatatatgacttagctaatttcgtgggtgaggtgtccttgagatccacgtgtcactcgcagccgcggccacgtattttgagaaaaattcaaggcaacagttaccactgtcttactcactatgattgactacttgacttgctatgtgtgggcataacactctatcaatcaaggtttcaaatatggtgaagaacaatgaaagagattgaaatcactattctctcatctaggttgaaggcaatagtcaaattgtcaaaagttgacaagaggataaaatgagagcaaccttttatagtgtttcaactaggacttagggatgaattatatggattaaaaaagaataaaatattaggcaaaattcatttctaaggccggccaaacaaagaatcaatctctagttacaattttaccacctttttcaacaacttatttttctttcaataatactatattttttaattaaattctataaatgtcaaaactatttatttaataattataactaattatcaaataaattatcatttataaaatttattaattaaataaaataaacaaataaaaataaaa

SEQ ID NO: 332385 - DNA, 670 bp, Cannabis indica
ggcaaggctaaggttgagcagtcgtgaaagcgagcagatgaagattgtgcatgtcgaggcagttagacttggagcgtacgatctttgggacaactagacatattttgtatagtcgttatgtggcaacttttgtattaaataccagaaacggttgtaaatattttatactcgggatcttggttatatatatgttatttattttggtatttataagtatttaaataaggttttaaatattcacaattttcaataattttaaatattcacaattttcaataaactcgttgattagcaacgagctgcagaattatgttaaaatcacgatagcacgcctaaactagtagggtgttacaaatattgatttggaaaagatatgaagctaagtttatgatattttttctactttcaatatcggttcagtccaatgtaaatcttatatatctgatccaagtttagtttgttaatgccttgaaaataacattccacttagccaagtgtaagtgaaccacattgctaattatcacgtcagtgtaagtataactgaatataattttttagaaaataataaaaaaagcaagtatactttttcttttaaactaaaaatatatacatattatgttaaaaaaaaacaaaattgggatgcttcaataaaattttggaatattaatat

SEQ ID NO: 332386 - DNA, 678 bp, Cannabis indica
actggggtgtagttctaggtcccaaccctgattttgtgtccctaatctggttccatgtttgggtctgagttcaggttcaacttcgggtccagagtctaggtttgggttggtatctgggtccgattcccaattcaggtctaggtctgattttgagtccgggtcctggtccggttacggttctggatctaaatccaatttcagttatgattcaaagtccaagtcctagttccagtcccgaccaacttccagtttttgttccaagtttgggtcacagggtacggattcaggtccagttttgggtttgggattgggttctggtcctgttgcgggtttgggtcctgggctaggtccaaaatccagacaccgactacaggttttgtccaagccctaggtccagattcggatcccaatatcgggtcctaatcttcttccatttcaggtgtcgtgtcacgagctgggtcctaggttcaagttcgagtctgggtcggctactagctcccggtcctagttctgtttcctaggtccttatcctaaacctgggtcgaggtcccaattattctgtgggtttgggtcccggtcctggtcctagtcctagtaatagttcggttcaggttttggtttagttcctggtcctggtcctagtcatagttcggttctagttccatttgcgattctgag

SEQ ID NO: 332387 - DNA, 1795 bp, Cannabis indica
aactaagcggtctttacaactagaccaaacacctgctgtttagtgggagttatgagtaggtataagtttaatctaagaaagaaacattgaaagataatcaagtaaaatttaagatcaaaagatgaactatatgttagtcgataagggttgtattttaatactcttagactacacaaaatcaagtttctagacttgcggtaatgctagaaagtctactaatgagatggtgattactttaggggtggagtagtgatttttagagaagtgtaaaaactaatttgaagtctctaactccacaagtgagattgaatgttaaagtggccaagaaggctatttattcagcctatagaaagttttatatagtttttggcattattccagtaacgaattaactactagtgttacttcatgactaacacatatatagttgctgaatagtaaagaattccacaatatcaaggattttgtgactaaagggatgtaatggtggggaaagtttgcattgaatacaacccatcaaatcccatcacagagataatactacgtactacacttgatctgaatatcaaggtgttgagattaattgaaatgcacttttagttttatattagtgcaaatgggagtttgttgggttttgtgccctaaataaaacccatttcaatataatcaaatctactaataaataaaagatcagaattcattttatgatgcatggttcacatgatttatttcacaattatacgtttaatatataaattctattaaatccagaacatagagttattcattattatagtgttgtcaacatagtggaatttaatcatgattatatgtttcaaagtttaagtcccatggtttgtcagtacactggatttagactggcatgataattagcgatagagcttacttacaccttggataagtgttatgtcatttccagggtattagcaaagtatgctagaatcggatgtatggagtatacaccgaattgggtcgatattaagtttggataagatatcataaacttaccattatatctatctaagtcaatattagttagttgatattaggtcaatagatcttaatcctgatatggttagattcgttctcaactgtgttgtttatgttcttagagttgttcgttaaagatgaccaatggatcggtcaaatacttacatcttggaaacatagtagtataattgagtgggagcgctaataatagatatggaatctatagctttttagtatttagaagtgaaataatgatttccttcaagcttggcttaatggagataaatgattcacgcctcattatagtaattatattagtttactaaaatatcatttataagtagcaaagtgttttaaacataaaatataatgaagggtcgaacggtaaatttgtccctattcgatgtagatcatctatagaggatctttaactatttggattgaaataatgggtaatcaaatcacatttatttttggtaatagtgcattttatgtaattaagagttcaattccaaatctatagtggagttaggaggaattaatgagttacgaaatttacttggtaaatttcagatctacttattgttagcctgatgacatagggccatggtccctacactcgttgagataatactgcttatagacttagttaattagttttaattaatcaaatataattctaaaattagactttgtcttatacataattttcactaagcaacggcataattatgaagaaaagaggttttggggtttatttattaattgagagactttgtaaggt

SEQ ID NO: 332388 - DNA, 112 bp, Cannabis indica
ctgttcttccattccgggaaagagggttgaggtcataccatacctctagtgatctttctttcacaaaaaaaatagtgcatgagagagtcacgttaaatttttatgaggcaag

SEQ ID NO: 332389 - DNA, 700 bp, Cannabis indica
ttaataattttcgcaacatgtcccaataactccaaccaagttaattgtgtcggtcagcaaattggccaaaccaaccagtcattgagacagccaaccatttctgtatttgataggttggggacgagtgatgatctcaaaaacgatctgaacaggagtagaggagcggacgatcagtttgacacgccaattgtgcaacccggaacccgcactcaaaatctcgctaagaaagatgttgttgtgactcaaatcagcacagctggacgaactaaaaaatatgttccaaggcctggccggtcaaaggaaaaacgatctcgagttggattgagcacgtggaaccctttctcccccgggatcaatatcctagagttgccccacaagtttaaaatgccagcctagaagatgtatattggaaaggaagatcctttgtcccacctcaagtatttcgagatgcaaatggatctgcaaggagtacgaggagatgtatgttgcagggtttttcctgccaccctctcagaagccgcccaacaatggtatttcaagttggcgccctgaaagatcaactcatggaaggatttctcctcggaattccatgcacaattttcctcttcttgccaactttcgttgcacctaagagatctggtcgaagtaaagcaaagactaggagagcctctccgagcctcagcagattcatgacggaggc

SEQ ID NO: 332390 - DNA, 626 bp, Cannabis indica
ttaggatgttaatgaaacatagatggtagtaaatctagatcctggtaaaatatttccaacatgaactgggtcagacagaggcggaagaagtctgccaaattcttaaagtacgagtgcaaaggaaacaacgtcccttgctgggcatgagcacccgaccaggcgcacattcccttttcagggtttgtggcccgattattgtgagcggcaatgtaacagtccaattcgcccaggtagccatcctggtcgagaacccgcaggcgcacctcagtaaccttgaacggagagctcacccacctggcacccaaggtaccttgccttctatgaggaactgcggttgtaagttcctcactgacgtagtccacgccctcaaccaggacgtcgccattagcatcgactagctccccagcctcattgtatcccccatagtttgggggtgcaacctcttcctcttcctccacctcggagggactgctaggatggatatcgtcctgctctttaatctcctggacctcagcgtccccttcgtgatcctgttcggtgttgggaaaagtggcgtgccgagccacttaagggtcagatgcgtcaaccgtacgcattgtctttttggtacgagccatcattctatg

SEQ ID NO: 332391 - DNA, 552 bp, Cannabis indica
gatattgtgaaattcctctctatatgtctactcctctaaggatagtggattctttactttttgacaactacttctgtgttagttaggaagtaacactagtagttaataaattgttgttacaatgcaaaaaactgtatagaactttccataggctgaataagtatctttcctgcaattttagcattcagtctcactggtagagttagagattccggatcattttttacacttctccaaaatcactgctccacccctagagtaatcaccatctcatcaatagactttctagcactaaggtaagcctagaaaacttatttggtgtagtctaagagtattaaaacaccacccttatcgactaacatatagttcctcttttatgatcttaagattcacttgattttcttccaatgtacatttcctggattaatctcatacatactcattactcccaatcaacagatggtgtctggtctaatgcacaacaatgcatatctaagacctctcacaattgatcctaaggaattattttcttggcttttatcttttttggaa

SEQ ID NO: 332392 - DNA, 575 bp, Cannabis indica
gaggcgactaaggtttcacgagtaattgaggacagaaagttgttcgcgatactgggggcattgaagtccttggtgagctttagaaggacataaggaagaacagaccagtcgactcgatgagtgattttcttgaccgtgcagaaggttttatcaaacttggaaaggctattaagtgagcacaaggtgaaaaaaaaactgccaagtcaaaggctccttctactgggaaatccatccagccccctcattacctaagcaattcaagttcaaatggtaaacggtctagcaacattaatcaacaaggtaatgggaaaaagaaaaagttcactggcaagaccgaacaagctccccgggagaatcctgccagcatttaccatcctgacagaggacatagaaagtgtttacatggccactcactcactagccccgtacaagaagcctgtacccatgaaaaaagatgtcagcaagagagacatgagaaagttctgtcagtttcatggagactacgactacgacaacaattaatgcaacaatctaaagcgggaaatcgaattcttgataaggaaaaataacccaca

SEQ ID NO: 332393 - DNA, 644 bp, Cannabis indica
aatgggatttgaagaagaaaaatggtgtaggagaggggtattcggcgtggaggttagggttgagaatgaggaaatttgattttagaaattatggaagttggctttttattaccgtgtcagaccaccttgccgcggtcaaacaggcccaaaaatttggccattctgcccagaccttttggccgcggccatatatgccctcgccgcggccagataacaatgaaaaataggcctcctgtaaggaccttttacccgcggcgacactacatctggccgcggccactgcttcgtcccacttttttttttttctaacaacagtacaaaaataataagaaaacccaaaacttgttttaccagttttctaaacaggactagaaagaacgactaaaatgtaacacaattcaactaaaacataaagaaaacttgggttgcctcccaattagcgctgtttttatcgtcgcacagctagacgttgatcgagttcttcatagtggcgccagaatcatggcggacttggtttgatcaatttgacctcccaagtagagctttaaccgctgcccgttaaccttgaaagtattagggccttcacctttcaattccaccgcaccataaggaaacactttaaccactgtaaatggccctgacca

SEQ ID NO: 332394 - DNA, 551 bp, Cannabis indica
ctggaagctacatgtggatgggtcggcaacagatcaactatccggcgcaggaatcgcccttgccacacctggggaactgcctcagcaagctcctcactgatgtagtctacgccctcaaccaggacgtctccgtcagcatcgactggctgcccagcctcattatactccccgaagtcagggggtccaacctcttcctttccctccgcagtgggaggactgcccggacgcacctcgtccagctcctcaacctcctagacctcagcgtccccctcacggtcctcctccattgggacggccgaatcttgttcggagtcgggcagaatggcgagccgagccacttgaggatcagaagcatcggccagacgcgtggttttcttcgtacgggccatcatcctatggctgagtacgaggttaaaagaatttacttcgctagaaggaagactagcacaaagacgaggatgaacttcgtgcaggagtcaaagcgaatcctggtcaatctgatgtccgagttcccaagactcacctgggttcatctgttggaatttatttta

SEQ ID NO: 332395 - DNA, 691 bp, Cannabis indica
tattttctaggatattacaactatccccgttataggaatttcgttctcaaaatttacctgaaaagcttgggatacagctcccgcatctacgactctaattcctaagtcgcttcttcaaccttgctgttccgccatagcactttaactagcagaatagtcttgtttcgcagtaccttttctttcctgtctaaaatctttactcgttgttcttcatatgacaggtcagtctgaagctcaatgtcttcataacttaagacatgagttgtatctgatacatacttccgaagcatcgagacatggaacacgttatgaaccccagataaagcaggaggtagagccaaccgataagctacctgatctactatctcaagaatctcgaactgaccaataaacctgggactcaactttcccttcttcccgaaccttcgaattcctttcattggggatacccgaagtaaaacaatatccctaatctggaattcgacatccctacgctttggatctgcgtagcttttctgtctactttatgaagcaagcatacgagctcgaatcttttcaatagcctcactcgttctttggacagcttcaggtccaagatacctgcgttcaccagcttcatcccaatgaatgagtgaacggcatttccttccataaagcatctcataaggagccatgccaatggtactctgat

SEQ ID NO: 332396 - DNA, 589 bp, Cannabis indica
cccttaatacaataaccgagatccaagaccccaggactgatccatcctaaacaaatggatcttcaccttcggctgaaaagtcaccattttctgcttacaatctatactggccgaacacttaaacagaaaatccattcccagtataatgtcaaactcaataaattccaattttataaggtcagcgctcaacttcctatcttcgatcctaaccagcatagacttaaagcgcctattagagataaccaacgccccactaggcattagggttccaaaccctatttctaaaatatcacaaggccttacccaaaaatattaattattcacataactatgtatgaacgtatagctcccgaatcaaacaacacaaaataaaagaagtcatttacagggagctgacctgccaccacagaagagctcgctgcgtcatcagcttgaacattagcatacactggagtaggaacaaatatcgcttcttactcttgctctactttctccacatgtgagaaatttctcttaaaatgcccaaccataccacattgaaaacatacttttcggttacattctccgggatggtgtttcatgcaacgtg

SEQ ID NO: 332397 - DNA, 2365 bp, Cannabis indica
attaatcacgatttccataaacctcgttgattagcaatgagctgcacaatatgtttaaaattcacgtaatacgcctatgcgagttagggtgttacatgtttgctgcaatggtaaagatttttagcctgattgtacattttgtaatttgcaggaatcatatatttattattgataaagatagcgggatcaattcggtttttgagctcattcttgagttcaactaacttcctccaataccagtgctttagagaagggctttgtatccccaccagtcttcatttttgatgtagacattatggacccatttaacccacaggttgtcttttttcgttgcaattgaccagatgctcttgattaaagcagctttgttccaatcagctatactcaagaaactgatccctcctgctgactttggcttacagatcttagcccaagcaatgtttcctggcccaaccatttgacttccacctttccataagtaacttctacatgtaccctctatttgatgaactacctatgttggaagaagcaatatttggctccagtatgtatgtatggtcataagaacagaactaatcaacacacttctccctgcgaaggacaaattccaagaactccatgttttaattttccagtcatcttttgaacaagtatcttgcactctactgctggaattttcttggcacatataggaattcaaagattcttcaaaggtacctcttgcttagtgaaccccgagacattaactactctttgaatctctttctcctccatgccactacaatagattaccgatttgctattattaggaagcaaaccagaagtctgagaaaacaacttcaaactctgtagcatgagatgaatactgctaaagtgacccttacaaaataataacacgtcatctgcaaaaattaaatgtgttagcttcatggatctgcatctttcatgattgccaaattccttcttctttcccactactcccattattctgctcaaatactccattccaagtacaaataggagcggggacatgggatctcccttccttagccccctcttggcttcgaaaattccatgaagagagccactgaaaagaagggagaacctcagggtagacacactttgcatgataaactgtataaacttcttaggaaactgtatagcacttagcatctcctctaggaaaccccacttaagagtatcatatgctttctgaaggtctaatttaatcatacaattggccttgaatgtttccttccataatgccttagcaaatcttggcatatcattatattatgggcaatatatctaccttgaacaaaacctcctttgttctgagcaaccaaatctggaaatatatgcttgagtctgctacaaattaacttggtaataattttatacaaaacattacaacaagctatgggtcgaaattcactcactttgtttgggcatttgatcttcggtatgagagtgagcactgttgagttcacttctttcaatatctgccctgattgtaaggctgataggattgcttcagatacatcatggcagacaaaatcccaattatcttgaaaaaaggagttgttaaatccatccggacccgggtctttaatccctgggatactaagaactgcttgcttaatgtcctcttttgaataatttccttcaagataagtggcctgttgactagtaacaagcggtcccatctccaccaacttctttttgatctccttcctatcttgcattcgggttcccaagagattcttataaaattcagtaaaggcttcagtaatctcagcaagttcttcaactctttctcctctcatgttttgaatcgagaggatattatttctggtccttctttctctgatgtatgcatgaaacattgcagaattattgtctccatcttttaaccatgacagtttagccttttcttgcaagaaagagcagtaattgctatatatttcagcatattgagttctcgccattgcttcatgtcgctgtagctcatcattgaggggattattgtgcagcaacaattgacactcagccagtcttgcagaagcttggatatcagcttgttgtaaatcaaaaaaaccacctttgttcagctctctaaacactagtttcaatgccttgagcttcgacacaacttgcaacattgaagtcccaacaatcttttccttccatttgttttctagcagagccttgtattgtggatgagtactccacatcttgaagtacttgaagggttttcgggcacttggtctctcaggatgaatttttgaggagtgcaggggtgtgatcaaacaacccttcattcgcaaaaaacacttcagccatttcgaaaatctatctatccatt

SEQ ID NO: 332398 - DNA, 1422 bp, Cannabis indica
tatttgattaataaaaattattggagaaaagttaaataaagcaagactatgattaaaatttcaaaaaatatcaataataaagatcatgattattatgatccccaagtatcttttatattactttctaatgcaattacataatttttcttcttcttattcaattcacaagttaaattaagtatattataatctggttaagacttataaacctaatctatgtgaaaacttcttatattcctatagtaaagtttaatcacaaaaaaaacattaagcaaaacaacttataaaattcaaatctcaccttctaaaattttgattcaaattcatagataacaattatagtgtccaataaataattataaaattaaaacagattgtatggaattaaattcaaaaaagaagaagaaattgaacaatcacattaatccacaaaatatgttaattttatttttggcatctttaatgtgataaaaatattttattatttattgtttaaattcggttggagtaattacattggtttctatattttgcatttgacttttatattaatctatttatttttggaaggaaagttgtttagtttttctatttatagaagataaggtaaaaatgttaagtttggttactcaattcttttccatatatccagctgtgatattctaatcttgtgtgagtttcctattttgtttgatcagatttcttgaggagaaaactagagcaaaactttcattttttatgaaaagaaagttgcacttactgctcacgattctgtaggtacagaaatggaaattcctaagttgattgaaaatctattttaaggatttttctagtggactgtggtcttgttcaaaccgtgtgtgagctgtcaataagttgtatattgattataaataccccttatagcagctaggtcatgtacctcttttgtatctttgtatttcactcatatctttagaaaagagagtctttattttatagagaaaagtgtgtttgactcttctctgtttatttgtattttggtattgtcttgaatctgtattcaagcctacaaagaagaagaacaccattgctaccttcgggagaaggttttactaagatttcgagagattgcttttcaagtcttgcctcagcaggaagcaagcactctttaaggagatcaaagggagtttgagcacttgaagtttcaacaagattcgattagaagatagaatacatcaagcttgcagcatacaataagagggagtctatttatgaataattcaattactttgtattttttagatctatctaatgaatcttatctctgggcttgatccatggactagtaacaatctgaaaagattgttgaaaccacgtacaaaaaccttgtgcgtttttacttttctgcactgtttgtttttctggtttattctaaagtta

SEQ ID NO: 332399 - DNA, 948 bp, Cannabis indica
cacacatagagtatagatctcattaagagtttctattaactcatcctcttatcgcttcaggacttcatgcttctcgtataactatagcatgatcaacacatatcaactcataatttgttattacccgttgaacctaattcttgggatctccagtcattaggttgggttaccattatgagtgactcatttttctaagggcaatagtcccattcctttcgaagttttatagactttctctctagctagtcctttcgtcaaaggatctgctaaattgtcatcagtgcgtacatgatccactctaacagctcctgttgagaggaactctctaacagtgctgtgcttacgacggatttgtcgtttcttaccgttataataacggttctggacttttgcaatagccgcggtactatcgcaatggatcaacacagctggtatcggtttttcccataaagggatctcagctagcaggcttctaagccaacctgcttcttcactagcagaggctagtgctatcatttcagactccatggtggactgtgctaaaatagtctgtttctttgacttccaagaaacagcgccaccagctatgctaaaaatatagccacttgtagctttggagtcatctgacaaagtgttccagtctgcatcactgtatccttcaaggacagctggaaacctttgatagtgtaatccaaggttcatggttctcttaaggtatctcattaccctctcaatagcatgccaatgctctatactaggcctactggtaaacctgcataataatcccacgacataggcaatgtcgggtctcgtacaatcagtggcatatcgaagactgccaatgatgctcgcataatcagattgtctcacaccgtcaccagtgttattgaatagctttacacttggatcatatggtgtgcaagcaggtttacagtcaaagtaattata

SEQ ID NO: 332400 - DNA, 634 bp, Cannabis indica
aattgattaggatttaaatgttttttgtaatggagattagaatttatatgttaaaattaccgttctttatgtatagcaatatacatgtttaataatttttttaaggaattatgacatttttttaaacaggaattatgacatttaatatatatatatatactagatgaaagttacgtggcgagccacgtaaatattagttttatttaagttctagtggtttttatttaagaattcgataattaattgtaaattattttgttaaacgatttgttttgtaaaggtaaatttgttaagaatgccataattttgtatataaatctatgattgaaattggtctcgtgttctacgattaggatgttacgattgagcatttaatttttgaatcaaaattgtttgggtggctagttaagaaacctataagtacaaaagtgccagaacagtttcagacataataggaaattcatatttgcaggtctatgattcatatagttttccaggtcaactttacaagggataataatttaatttaattatattaatatcttgattcacatctgttacatggacaatgtttgtttatttatattgtttattcaaaactttttaacaaacctattatttatctgatctaaat

SEQ ID NO: 332401 - DNA, 1377 bp, Cannabis indica
tgggtcctcaagaaggacctcttcaacaaggctcacactctcaatgtaatgtttcagtctctggccattgactcgaaaaattctcccatcggttgggtccttgacttcaacagaaccgttggggaatacttgtttcaccacatatggaccagtccacctcgatctcaacttaccggggtggagatgcaaacgagaatcgtacaaatgtactttttgattcggctcaaaatgttttcttaggatctgtttatcgtgagcaactttcagctttgctttgtagatcctagaattatcgtaagcatcatttctcaactcctcaatttcagacaattgaagttttcggttcatacctgccgcacgtagatcgaagttcagggccttaatagcccaataagctttgtgctcaagttcgacaggtaaatgacatgctttcccatagacaagccgataaggagacatcccaagaggggacttgtaagcagtgcgatatgcccaaagtgcatcttgaagacgtgttgaccaatctttgcggtcgggatttaccgtcttttcaagaatgtttttgatctccctattagctagctcagcttgaccattggtttgtggatgataggcatttgcaactttgtgaagtacaccgtactttcgcataagagcctcaaaagatcggttgcaaaaatgagtgccttgatcactaatgatagcgcgaggggtaccaaacctcgataacacattttcttttaagaatttcacaacagtcgcgttatcattatttcgacaaggtactgcctcgacccattttgaaacataatccacagcaagaaggatgtaaaggtaaccaaaagaaggtggaaatggtcccataaagtctatcccccaacaatcaaatacttcaatgacaagaattgggttcaagggcatcatgtgccgacgggacaaggagcctaacttttggcaccttacacaagagcgacaaaaatcattggtgtctttgaacaaagtgggccagtaaagaccgcattgtaagatttttgcagcggttttcttcacagaaaagtgaccaccacaagcatcattgtggcaaaaatttagcacactagacacctcatcatcgggaatgcattttcgcataatctggtcgggacaatacttgaataagtatggatcatcccaaaagaaatttcgcacctcgaccaagaatttgcgtttgtcttgtgaactccactcagaagggagctcaccagttactaagtagttaacaatgtgcgcataccacggtaacttagtaacaacgaataattgttcatcggggaaatcatcatgaataggtgggccatcagcgggatcactaaattcaagtcgggacaagtgatccgc

SEQ ID NO: 332402 - DNA, 556 bp, Cannabis indica
taatctagataaagaaataggtggtttgagagatgagactgttcaaattgagaaagagattaacagagttggagattccatgtctagcaagatgaacattcttcaaaacaaggctgatgatattggaaatgtagcagggctttcattggaaaaacaaaaggaagttcttaaagggcaatctgaagctcttaatgggcttcagtcgctcactcaatttcagtctaaagctctagaagagagcaggtatagcattatcactattcatttcatcaaatattgtttcttttactcttaaaatacataattgtttcatactgtaatctaaattgcagggcagttttgcagcagttggctaatttcggtcatgaacaacaggaagagcttcttcagcgacaggaaaagcttcaacaagcacatgatcatctggtcgagaattccaagtccatgttggctgctcaggtaaatattaaagaaaacaaagtaaagagatttaaaattaacaatactcaaaagagagtatgtttggaccatgtaaacaattctcttcctcaggttc

SEQ ID NO: 332403 - DNA, 1061 bp, Cannabis indica
taatttgatactaatttttttgggtgttctgttttgttgtgattcttgttggtttgtgttagcgcataaaaatgttgttatacaaaatgatattatgttatgtaaacatttgttgacaacagccgcatggaatactgttatataaaattattatgtatttaatttattttttattatatatttattgttatataaaattattttaaaatttaaaaatgcaggtaggaaaaattgtatggaaatctgtaattttctttaccttatattcatacttcattttataaccgacgcaataggtaaaaaaagatatttgagcaacttatacgtcatttaaaaactgaaggtataaggttttagtgacggtttttaaatggcacaaatgattttgcgtcatttctaaactgacgcagaatattaaaaagaacattgtatattttgtgtcggtttcaatatgaagagaattgttatttgcgtcacttaagaaacgacgcaaataaaatctatttacgactacggcatatacgtcggttttatagaccgacgcaaaaactatatatgtcacttagaaaccgacaaaaatacctctttttgtagtagtgtgtgatcactagaacaaagcttttttcgagacatccctggatagaacgattaaagacgtgtttaaatacacaatcattttgacccggtaaaagtgggaaactcacagctatatgattttcaaatcataaacgcatttacactacgtgctgtaacgccctaatctatagggatgccacttgtgtgattttataaactagtttaatactaatagattaattagttattaaaaaccgtggtaatattaaaaatttgactgaaataaaacactaaaaatagacattataatggcataagaagtgtgttccgggaatccctgttgtaaagcccgcttagttaatttggaaattatcagttggttatgattaattaagaaattatttatagctatttaaataatttattactgttatttatgaaattcagtagttgcatattttgcattttccggtgcccggtatttt

SEQ ID NO: 332404 - DNA, 856 bp, Cannabis indica
tttttagttattatgccaaacatcactaattttcttttctcctctaggtatttcgaaaaaaaactattgaaaatttttcatttaatttttcaaatcacacttctatttataattgttaaaactccattaattaaatcatatttaattatttaaataaatatctataactgtctattatgacacggatagtgtcttttgtcctgacaacttttgtctcaacaaattttgtcttaacaacttttgtcttttcactatttaattaatttgaaaaattatttatttattacaaaaataaataattactattttacatttcaaaatagattttttctgaacaacattatacaactctttatcccttcccttgacagtatttcaaggtggcaattcaaagaccatagacctataattctaagctctaataaattagattatttattgagtctcatcaaccaaatattattttttattaatttcatgattactccactataaatatagaattgaactcttaataattatagaattatatttattgaattttactgcagtgtctattgatataatcaatttcagtaattagccctccacgtgttggttcataattagttttagtcaaattatcgttttacctttctaattacttctttatactttagtaccattaattcactagtagaagtataatttagatcctatctaaatttgtgcacaattttccagttctagaatttacacttaaagggaaccaacattcaattcgttataaaagtcacgatttcataattgtagatcatgttcttagccatccacattattagattcccaaaacaaaatttgtaagaattatcttctc

SEQ ID NO: 332405 - DNA, 681 bp, Cannabis indica
ggttatgtcagctggctaatgtgagaataggagaccaaggctagtgagccaagaaaagaaggaaatgaacttctatttttagggtattagattgtacctcaatgatctaacaactaaaaaggaagtacaaccaccattaatgaactcagctgccattttgagagaaagaaataattgcagaaagaaaatcactgaaaatcaaatatctaaaagaggaagtcaaccaagcaaagaaggaggaggacacaagcttcattagtttgaatttctattcttcttcttctattttcttcctttctttatatacttggagttgttaattttgtaaagactaagtagcagccatggatgaataaattttattttgaattgtaattactggtttgaacatgagctaagcttcttgagacttggatagctatgaacccctatgatttgaactaagtaatttgaatgcatgatcttagcaatttttcctttgttcattcaagtaagcttactgtttattaattgttatgacttggccatgagtaataatttactaagctagatctgaatctgaaaaagctagatctagtagttacaacttggatgatgcaagtgaattcttaagtttaggtttttcttagtaaatagaatatggatatttcattaccttgcataacttgagaattgatgttt

SEQ ID NO: 332406 - DNA, 1053 bp, Cannabis indica
gaacaatagtattaaaataaaagtggaagctttttagagaacgtacaaagtgagcggggtcgcttttgagttcggaaatgaataagaagtcaggcgagcacaaacgaactagggctttaacttctagaactgtagaggtctgccccaaccctctacagttccaagcaacgcctctcatggcgcctatggaggagggttgtccatctcctccacaggggtaataatgttgataggagaacccaccaccgagcccacatcttcaataatgacatgatccttcctaggaatagcaatatccatcatcctgacccttgccttccaagcagtgagtctcgaggattgaccggcagagattggtctgtccacgtgataggagtaaccagcagagacgaccgctagagagctcccatcacccaaagatggctcctcaaaattaccaaagccaggcaattcacaagacacatccggctcactgcccctggggccaacaccacgaggaaaatccctaaccacacattttactattttcatattccatttaggcacgatctttaatgagtaagtctcaacattaagtctccgcttcttcaccgatgtggttctctcattagtttcagaagtcggttgaacaccaatgtcacatagacccgcttttcttttaattgggccgtgagaggtgaactcagccagttcttgaagatatccttcttgagcttggaaaaatatggaaagagacctcctttcatcaagatgctcagaataatcctgtcccaaaacagagagctttgaatcgttatcaccaccactttcgtttccaagaattaccacgggcagtttttgcttctcacaactgagtatcggcccaacaccaataggcccatgcccaaccatgttcatttctttggtatttggcccactcccgtgttgggattttatgccctaaataaaacctatttcaacctaatgtgatttgttatcaataaaagattagaagtcatgtatgtttacatgtagttttcatgtttatggtttaatgtgtacaaaatatgttaa

SEQ ID NO: 332407 - DNA, 1054 bp, Cannabis indica
gttacttttagtattaattttagctagattgagtttagtatatttttaattgagttttaattgtgtttggagcatttttatgcttgttatcttttatatttgcagatttaaaataaaagaagattagaaaaatatcagaagaaaaatatggaaaaaaagataaaaatatctcacaaaaagatgatatttaaaatagagaaaattacgcaaaagaataaagctaaaacttcaagcctgaattcgactatcttctggttatattttggaaaaagtcaaaacataaaatttctagatctctcttttatttttccggaacatcttgaatcgtccgattccaagaaatatcgagagagttatggcaaaattactatcagtcaacgcagcagaaaaatcaccgtcaaaatgtgaaattccaacacgggccgcggcatgataagctgggtcgcggcccgccccccttaacaacacaaaaatcatatttatttgtttgacgtgggttttggtggttttctaattcggaataggcatttaacatgtgcgtttttctatcgttttagtccctaaaagcatatataaagggtgaactggagttgatttcagtcaagcaatttttgagggaaaaagtagtacgaatttcaaagacagaagtcaatactggaggcattttgcaaaggttttcaacattattttattctctatcttcttctctttcttaaagttaatatgtgtgattttgcttccatgaacatgtgtagctaaacacttaattagggttagatagatgttgtttgacattgctttatggttttaatatgttttatttttcccctaatttctatgtattctatttcattcttggttaattacttttaattgcttggccatcaattaacagttttatgatttcgatgcgagatttaagaagtgagtgtcgattatgctatagtgaaatagaattgaatttcgatataggacgagagtacctatatgttttagatagcttataggatttctatgtttaatgcatgttgcatgttaaatttatcacgagagt

SEQ ID NO: 332408 - DNA, 734 bp, Cannabis indica
cttctcattttccgagcttcattacggttatgtgggagtttcccaaactcgaggtaagtcgctattggtgtcgtccagtttggggatgtatcaatcattttgatttcttctgtgtcagtgatgctaggctcttcgaggaactggataggaactaggtttaccttgtcacttacattgttgcttgccaatcgagataacacgtctacaattgtattttcttctcttggaatttgtctgagaccgtagcttttgaattgtgcaagcagatcaattattttgctcagatatgctatcatcttttctccccgagcttcatattctccagatacatgatttaccaccagttgtgaatcactacagatttcgatgtgttcggccttcatctcctgggctagtgttatcccagtgattagagcttcgtacttggcttcgttgatagatgctttgaatccgaacttgactgcagcgtgcaggtgttgcccccaggcatgacaagggcaattcctgcaccagatagttgatctgtagccgacccatccacatgtagtttccaggtctatttgtcctcattgtgacttcgttgcggtatttgtaccggctcggggttgctttcttgtatgctttctttttcgcatgtgcattctaccacaaagtctgccaaggcttggcctttgattgttgttcggggttggaaagtgatttcgtactagcccaactctaccgcccacttgagt

SEQ ID NO: 332409 - DNA, 920 bp, Cannabis indica
aaaaccaattattattttctaataaaaaatagattttccttcgctttaaaattataacttctaagcattaaatgtgaaacaatttaatgtaaatacaaaaaatcaaagaatattatttttaataaaatgtagaaccaagcattaataatttctaactatcaaaaatacgtgatattaaagatgaaagaaaattattttaagaagcgaaaatcataagcatatattgtactgagaatcaaaataaaaataaatacttaattaaatacactaggtttcatcgtccaccttaataataagggaacttagaaacccataagaaaattaactaagaaaagcggtaaactaactgagcgttttctctggatttttctgtctgaaactctgaaactgtaactgaattctaaaaacctaagcttctatttatagaagggtaaaaggactaatgcgcaattaaacttattacaaattgcatgtgggtaaaaatgtaaatacaaaaaattataatcggagtgccacgtgtcaagctcggattggtggctttggtgtgcaacttgacacgtggcgagaggagagaaagccacgtggaaagtggcttttggctgatggggctcggaccaaacgaaggccagccgcgtggctggcgagtggacgaaacgcatggcccataggggccggtgcatgccacgcgcgcgtggaggaggcagaggagacaaggcacctgttggtgctgtccgtgtggggcccaggcgcagatggcctctgcgcgtgacacgtggcagcggagagaggaagaggaggcttgggccaaatgggctctccttcttgggctttgttttttatcttcaaaaatgctatttttcatagttttgggcctcatttttatcactttttatttcttttccactctttcacaaatgcta

SEQ ID NO: 332410 - DNA, 825 bp, Cannabis indica
cttcatattggttaacccttcaatagcttggccatcaaagaagtaaactactttgagataatgaagcttcatggccaagtccagcccacttacattatgggcctcgttggacccaattgcatagctcggcccaactgaggaaagcttgtggttatagaccaagcttgattcttcttcactagacaaaaccatagtgtttttcttttttggggtgagaaaaaaaatatgagataaagtatattgggttttctttttgtgtgatacaatgttgatcaaaatgttgtgtatatatatagatgaagatgttgttttaatgagggggtagttaggagatataaatatggattgtgtacgtgtcactttgttattggttgataaacatagttagttagacacttcaatttaaagtttcatctgccccaaataagcatactattgaattgataagtccatttttcataaaggataagtgaaagaaatatcatttgattgtatagtatttatttattgtaggactattgctattagagcagtgaaggagaattgttaaaagatactattagtgtcggatctcatataatttaagaaataatattgttgttgagtattagtggtacctaacatttctaaaaatgccatcttatgattagttaacgatacttcaaaaaaattattatattaaactggactcaatacttagttagaccaataacaatattaatacatatgagggtaccaagtatcactggtgtaacgtccccgcttcaagcctccattgggtccttacacccacggaataaatggctcttatacacgagtacgtca

SEQ ID NO: 332411 - DNA, 929 bp, Cannabis indica
cccgagtgccctagctgcaaaaggcaccatcggggtgagtgcaagggtcagggctttgaatgagggcccggtcccttttaattattaaaatcatgtgaaggaatactgtcaccacttcttcttctcctctgggttccaggctgtggagcatccagagcttctcacggagtggactagaatcccttcttatgcgcgaactgaacctactcaacttttcctccaacgggccaagaccttcgccacatatgacaagaaggcccttgacgtcggggagttggtcacgacagagcactatcggaaggccaagctgatcttggggcatcagtcggtggacgactccaacctttctaaagtcgtctgtcctaatgtgagggctccggccgcagagaaggtattccgggatgacatcatcgccacggcagaggataagtaccagaagtacctcttcaagagggaacaagagcgggcttataataaggcccaactgaccgccggaagggcccttcgcattagggctccggtggagcagaggacccccagaccaaagcccgttgtcccggtaccgaatacaggggctcctgatgccagcacttcgggttctggtaagtgtcctttaatgatacattatgtcccttccgtccgcgaatatgttagccttaggcctatagggttcgatgaacgtctccaggatgccctccactcggtgggggaatcatgccaatgagtattatttctcccacttaggcgattatttaggtcggtcccggatgggttttggacctccagtgcccgttcccttggactcttcagcctatctatcttctagctggttccgtccctcagacagctatctcggggatgatgcagccagtgttaagattcgggactttgctagggctgaattagggagtcagggtaggactagcttg

SEQ ID NO: 332412 - DNA, 513 bp, Cannabis indica
tttgaacttgccaatttatattgtttgcccataatccccaccatgccaccaacaaatctacttttgtaaagagagtgagtttatatatgcttaaaacccctctctaattttataagggttaaaacaagagtttataaaggagagttctattattccatatcattggatcttcaacaataataggtattataaaacttaaaacacatactactgcaaccagttgaattggatagttggatgtaggatttatttaattttaaattaattaattaaaaaaaattcgaaaaaataattaaataataaaatatattttcggatttttaaataaatttaaataaaataaattaatatttagaattaaacgtacaattttgaaaaattagatttcaactaacctaaatatcatttcaaaaaaatttgctaactatcttttaaatttaatgttattttataaattaaatattcaataaaataaaataataattaaataatcttttctgattttataattta

SEQ ID NO: 332413 - DNA, 577 bp, Cannabis indica
atacaataatagaaaagaggcacgaaagtgcacaacaagactaacaacatcatcagaaaaaaatgatagggaactatgtaaacttattgcgattaacagtaagttgagattataggtcgatgcatactctaaactgtaaaatttatttttatagaattttttagttgtattaaagttgctcgaaaaacatgcaggtcaaaccaacaaataaaaacatatttgaggtgatagatgaagacagaacaagaatagtaaacttgaaggacaaaacatgtacatgcaatagatttcaaaaagatgaaatgccatgtaaccatacagttgtcgtcatgaagggcttgaacatagacacatataactattgtgcacactactacacatcaaaagcatggatgcaaacatatgaagaaacaatatacctagttggaaatcttagagaatgggatctgctagaatttattgaacacatcatagtattgcctcccaaagaaagaatcaaatctggaaggccaaggaaaagaggagtgacgaaatcttgggaaacaaaaaaatagaacaagtgtggcaagtgtggaca

SEQ ID NO: 332414 - DNA, 857 bp, Cannabis indica
ggacaaaagggacataacaaaaaaacgtgtagaagaattacatcatagaagtaaaatcaacaattcaacaactagaaaagaactataccaaaacatttagataaacatacatatttttttcattagtttttttgttatttttaagtggaactttttatttggtaaaagattttcaaacatattgttgagagaaaataggtatgaatatgatcattaaaatagaaatgacataaatataacagttaagtgataaactatttgcttgattcattaaaagcaggttgtaattatgttgttgttgagatgtttttaacccaaaaaatggatatcaacatcattaatatagaaatgacataaatattacagtaaagtgataaactgtttgcttgattcattaaaagtaggttgtaattaggttgttattgagatgtttttctaggttaaaaggaatatatcgactaaaaaacaaaatgtaaatataaattaaatgcaataaccacataaaatcacttgctagaaacaaaaatttgtctatgattgtcaacataatttgattataaaaataacaacaaataaaaaattcatcctttagctaaaaacaacaagacataactaaatcaaattcttctttggaccctttgaaggagcctcatcagcactatcaacaaaatccatttctttcatgcgagcatacttgccttaattaggcgcaaggttagggtcccctcccaaatcgactgctatgactcgggtctactcaactccgtgatatcatccttcatgccacgtgtcaaatattgatgtccacgtcaccgaaaaaatttccaggttaacactttccaaataataataataat

SEQ ID NO: 332415 - DNA, 531 bp, Cannabis indica
acacaaacaaatgtgtggactcccaaatttatttttggtttacttttgccggcgcagatttgcgccggcaaaacatatctataccggcgatgtcaagttaaatgcgccggtaaaacgtaaaccattaggcgcgagaattttccgccttcgatttcatttttggggcgcatttatacttttaccggcgcatacgtgcgccggcaaaagtcaccaaaaatattggagggaaaattcccgcgtgggttttatgtggtaggtggggccacttttgccggcgcaattatgcgccggcaaaagtgttaagtaaaacactcgttttgggtttaggtttacatttttttaatacttttaagccggtaaaagtattaatatgtatcaggggctacgaagccccccctttcttccccccacttcattttctggaaaaacagccgccccctctcttctctctggttttctctcagccgccccctctcttctctcttgttttctgtcagccgccccctctatctctctcaatctctctaaatt

SEQ ID NO: 332416 - DNA, 528 bp, Cannabis indica
tcagtctccattttgcttgagctaagatttcacaattcaatcatctttatttttcaacttttaaaacgtttcataatagttgcattttagttttttcatagtttcataacagtattcaaacaaaaaaatgaaaaatatagggttcagaattggaaatacaagacttgaacaggagaaaagcaatagaagtaagtttcttttctattttataaagattatttaaattttgttttaaaaattagtattaaaaatgttcggaaacattactaacattagcaataacagattcaaaacagtttcaaaatatttgtcttatacaataataatttcatattcacaagaaaaagaagacattccattcctagtcttttgcaatggacaatttgatgatcgaatgaattatgaaaattatgaagctagtggacaatacatctcaatcgattgtaaatatgatgaactaatacaaaagctgatattaacccaagatatgtttccaagaggggggtgaattggaaatttaaactaatt

SEQ ID NO: 332417 - DNA, 564 bp, Cannabis indica
gcttagaattttaaaattctcccactcaaataaggtactgtgatgctatgaccaagaactttattggtatcaattactattatagcagaaaaatattaattggaacaaaaaattaggatcaagaataagttctaataattttttaatttgttcattatattatatgcatgtttattcaaaatatgtgtgccatagatattctgttgtgtattgagtatagtctagagttcaaaatgaactacatatgtcaatagcttcatccacccctaagtgttatagagatcatgtggagttatgaatataatctagagttcaatagatttaaaagatcgttgaactacattcttaacttcttccacccctatctgatcaaaagatcttttattgaaaaaaatcttaatatgtaaagaccgcttagtttaatttggaaattagcagttaattatgtttaattatggaaaattatttatagatatttaaataattatttatactgttgttattgaattctgaaatacattttatgtcatttagtgatttccacaattttgcattttcggtgcc

SEQ ID NO: 332418 - DNA, 918 bp, Cannabis indica
aaaaaacatatgagtgatgtggggagctcctcgagcaacttgacagcctttaatccaccctttagtttcataatttcgaatgagagaagaaagaccctcagcacaaataatgaaaagataaggggataaagggtcaccctgacgaattccccgagatggagtaataggacccaaatgttgcccacccgagatgatccagtatcgaacagaaacaaccaaagccataatcaactgcacacatctaggatgaaaccccagcttcaagagaaacaattccaggaaagaccattcaactcgatcataggcctcactcatgtctaacttcaaagccatttgtcccaccttgcccttgctctttcttttaagataatgcatgatctcaaaagacaccaaaatgttatcagtaataagcctaccagggacaaaagcactctggttctcagagacaatatcattcaaaaatagcttgagtctattagccattaccttagagatgaccttatagaccacgttacagagtgcaattgggcgaagatcacccatcctttcaggattcttcttcttaggaatgagcaccagattagtattgttcaaagcttcaggaatagaggcggaatcaaaaaaatctcgtacaagttgaaccacatccgaacccactatgtcccaacacttctggaaaaaacccggagtcataccatcaggaccaggagatttgtcaggatgcatctggaaaagagcctttctcacttcttcagtagtaaccggagccaacaaatcagtattcatttctgaagtaatagcaggagcaataccatcaagaatatcagtatgaagactacccgaagtggaaaataactcagagtagaaactaaccatatgatcacccaaacccgactcccaatcaagccagctcccatt

SEQ ID NO: 332419 - DNA, 521 bp, Cannabis indica
gtgtagaaactgaccatatgatcgcaacccgactcccaatcaagccaactcccattgtaatcttgaagcttatgaatcgtattttggcgtttacgagcactcgcaaaaacatggaaatacttactattactatctccttctttgagccaaagttgcttggagcgttgtttccaaaacacttcccttttagtaagcacttcaaaaagatctttttccgctttgagatgggcctcgacagacacttcatcattcttccctttaagtcttcgaatcaagctcttacattcagagatttgttgacgaaaattcccagttatctcttttccccaagaagccagaacctcgccacacttagaaatttttgaactgagaggaaaagtatcatactgacgccaacaatcactaacaacttgcagacaataaggttctctcaaccaagcattatcaaaccgaaaatgtttcaccccattaaatatgtttcaaataataggatccaaaaaaattggacaatggtctgacga

SEQ ID NO: 332420 - DNA, 1516 bp, Cannabis indica
aacatcaagaattagagaacaaaaaaagagcataacataaacttgaaacttatgagtggacacaaaattaaattaaatctaaatacatatatgtgtattatgatgatatttttagtgaaaatctttcaaagcaaatgaaacattacccaatagttttgttgcaaaatattttcattggagaagaacttatcaattgccattgtgatctgtaaatttaatatcaagaattagaagaaatataataaaatcttaaaaataaataattattgccaaataatatgaacaaagaacatcaagaattagagaacaaaagaaaagagtataacataaacttgaaacttatgtgaaaatatacaaaaaacttcatgtgtgatgccacctcaacctccttaaaaccttcctttatatatatatatatattgatgattgataattgaaagtattagaataaaatcaattaataaatttgttgcggtaaacgacacgtaccaaagaaccaaaatattgataggactgtggtactaagtacgcaagtagagccaaaatattgttttttttttgaaattgattattctttttaaattgtgatctcaattaaaaacttaaaaagtgaaaatattttttagaacatatttttaattttttttgttacttttttaattaaaaagtaaaaaaattaattaaaaagtgttaccaaaagtagtcttaatttttcttttgtgccaagtaggggtattcgtcaatgggatcctctgtctccttatctttttctcatttgtgccgaggggttcacttctctcattaagcagtttgaagttgagggtcttttgaagggttgtaaggttgcaaatggggcaccgttaatttcacatatgctatttgctgatgatagctatgtttattgtcgtgccaatgaaagggaagcttctaatgttctgcgccttcttcatttgtttgaagctgctactggtcagcaggtgaatgttgccaagtcttcaatatttttcagctctaacactcctcttgctattcgggatagaatgtgtgctatgctgaggatgcccatggcagatgcgcaaagtacttacttgggtctcccttgtactatggggaggaataaggatgcaatcttgggttttctcaaagataagatgctcaagcgaatacaaagttgggagggtcggttgttatcaaaagctggccgtgaggttttgctcaaaacggttgctcaagctttgccaacctatgctatgactgtgtttcttcttccgctcaagatttgttcacaccttgagagcttaatgtcaaagtattggtgggggtcctctactaacagaacaaaaggtgtaagctggtttagttggcgacgtctttgcagaagcaagaattcaggtgggcttggctttcgtaatttgcgtgattataatctttccttgttaggaaagcaggggtggcgtcttcttttgtatgaagactctctcgtgggacgcatttacaaggcccgttactacccaaa

SEQ ID NO: 332421 - DNA, 1202 bp, Cannabis indica
agagtgagggtaattcaaatgtgaagccaaacatagcaaatcatccacctttggctttacatttaagttgcaaacaccctattgaaaagagccgttctggacttgaaaaacttagtagtcaagtatgtttagcaagttcagacaaagtctaaacttttctaagggaacatacttggttagcatttagttttaatcttcttcacttggacttctccttttgcaatcacatctttgatcaagtgtagctttaatgtctatgtgttttagatctttcatgaaacatagaattcttcattaaatataatacactttggttgtcacaatatactataatgtattctgcaagcctaattttgatgtgaaacctcttagccaaattacctctttgattgcttctgtggcagccatatactcagcttcttctgaggatagtgctaccgccttttgaagattggatttccaactctcacttccacctaagactgtgaatgtataccctattatagaccttctagtaccaatgcttccagcataatcaaagtctacaaatccttcaacttcagtagttcttttgttgttaatactgtaaacaagtcccaaattcattgtaccctttagataccttagaatccacttgacagtagaccaatgttcatttccaagatctgaaatgaacctactcaccatgcttagactgtaggcaatatctagtcttgtacactccatgcaatacatcaaacttcccacagaagaggcatatggaactgtgtccatttgagacttatcttcttctatctttggggcctgggactgagaaagtttaaaatgaggtgctaaagttatggtgactggttttaattcacttatacagaacttgtctaataccttttgaatataatctctttgagatatgtatattcttgtaggtctttctcttttgatatcaatacataggattcttttggcctcccccatgtctttcatttcaaaatctgcactaagttgatgtttaaggttgtgatctcttgtctttccttaccaatgatgagaatatcatcaacatacagtagttgtaatacccggaactaagaaattgattagcaaaaccctaactagataattatttataattgaggaaattttattattatatagtttaatatatgtgattttatatgaattttaatatattaaagaccccg

SEQ ID NO: 332422 - DNA, 823 bp, Cannabis indica
ttatatattaaaaaaaaaagttgtcaaaaattaagctcatggtcctattttaccattttagaaaatatatggtctattttgtcatttaacaaaacagagggtccaattggtaacttttgcaaaacagagaatccaaaatggtatttacccttttaatatttttgttgcaactgagttgttgtacaattgccctttagttttattgacgctcagagaattgatgcatcaatacttatacattgattaggctacactatttttagtgttatttgaaagtatttcataagaaaatctgacacagagacctcataaaaataattctaatatggttagtttgtttatattttaacattgtactactacaaaaagaaaaattcgcaacaatcccaaaaatattattttggggggaccgtagttaaaaaaattaagtaattgtttaaaaccgtcaggaaaaattagtattcccgacggtttataacagtgcctaaaacgttaggcgacgtttttcattaaaaacgcaaaaaaaaaaattacgggattatacctgacagttttaaatcgtcgggtatactctatttaatttatatatatactacaaaaaggagaatagtcgacggttctaaaccgtcgggtataaactttcacctacttctcgccacatttccacgtacccacctaatttttttatatttcccacatgctcacctatttcttctcacctattttttctctattttccacaccctaaaacgaaaatcttaactctccaaaatctcacccacccctctgcactatcgccctcctctctcgccatcttccttcc

SEQ ID NO: 332423 - DNA, 620 bp, Cannabis indica
tatgttgatgaactactttcctttgtattttatagtcaaacatttctatctctacaacttgagaccttctatttaaatgtatatatatgacattactacttttttcttatataatattaggttctttaactttactcggtatatactggtatattattaatcctctgcatagtactagtgtgtagtgtgtgtacacatgtcatatatcattcatatatatatatatatatatatatataacttacatctgcttgtggaaagaaatacacacatggattcctgcgattctttcagatgaaatcatgattagtttatagacgaagtatttaaaaattctattagtcatggtcaatgttgatcaagaaaagttttgccatgctcatgggcaaactcattataagtaagcatagtgattatagaatagaacctctaaacaagaatatacttgggataaaaaaaataatattctaattgagaggttataactaaatagagttacacttaaaaagaaaaatcaaaatatcaaaatatcaaaatatatcaatgtaataaaattaccagtaaacaattcttaatactatattatattagaattattttcgagtacatataatatttat

SEQ ID NO: 332424 - DNA, 1130 bp, Cannabis indica
atatggttaggttcaacttagttgtattatttatgttcttcaagtttttcgtggatgcttaccaatggtttggcagatatttacatcttacgtaacatggtagttcaattaagtgtgagcgctgatcatagatatggaatatatagcttctataggtatttagaagtgaaacgataatttccttcgagcttggctagaataaaaataaatgattgaggtctcatttcagtataaaatacattaaaaggtagaacagtaaatttgtccctattcagtgtagatcatctatagaggatctttgactattaggattgtaacaatgaataatcataacgtatctataccgtggtatatatagagtgttttatataattgagagtgctattcaattccaaatctatagtggcgcaaggcagaattaataagttagagaatttacttggtaaattttagatctacttattgaaagttcgaatatataggcccacggtcctcactagttgagataatactacttgcagatttagttaattgattttaattaatcaattattattctaaaattagaatatgtctcatttatgaattttcactaagcaaggacttaattgtgaagaaaagaggttttgggtcaatttattaattaagagacattgcatggtctaattaataaatattataaatgataatttcatttgataattaattataattattaaataaatagttttggaattaataggattgaattagaaaatatggtattattgaaagaagaataagtggttgaagaaaaaagtggcaaaattctaactagaaagcggtcctttaagtggacggcactaaagtgattttttgcccaatattttattctcttttaatccatataattcagccttaagccctagctgaaacactataaaaggaacatgatgctctcactcatccacttgatgtcttcaaccaaatcaaacatagttttcattctctgacaactagtaaatgagagagttccttccatagtgattttagcctcattcattgttctttaccattcaaacccttgagtgatagagtgtcatccccacacatagcaagtcaagtactcaatcatagtgagtaagacggtg

SEQ ID NO: 332425 - DNA, 1228 bp, Cannabis indica
gaaatctggcaaatggatgtcaagacagctttccttaacaacattcttgaagagaccatctatatggagtaactagaaggttataagcttccaagacaataagagaaagtttgtaagctcgataggtccatttatggacttaagctagcttctcgctcttggaacaaatggtttgatgaaataatcaaaacctacaactttcactgaaatgaagatgaaccttgtgtttaccaactaaaggataatcaagtggtagtattcctagtcctttatgttgatgacattttgattattggtaaaaatatcaagaaaatgactaacattaaggaatggcttaacacttaattcaaaatgaaagatttggatgaagcaggttatgttcttggtattcaaatcattagaaactagaaaaacatatcacttgctctctcgtaaggagcttacattcataaggtgctagagcaattcttcatgagtgacaccagaggggcagttatgccttctagacctgggatccgtctatctaaggaacagtgtcccactgatccccaagagatagaagacatgaaaaaggtttctcatgcttcagcagttggaagtctaatgtatgctatattatgcactagatcagacattttctatgcagtaggaattttgaaggtatcagaaaaacctgggagaggaacattggactgcagttaagcatattctgaaatatttgaaaagtacaaggcattatgtgttatctacaagggtggtactttaaatctcgtaggccatagtgactcagattctaggcttgtcttaatgaccagaagtctacatctgggatggtatttactcttgggggtagagtagttgtctggaaaagtgctaagcaaaccgcaacatcagactctaccatggaggtcgaatacatagttgctgctgagcctgttaaggaactggtctggttaagaaagttcttcacagaatttggtgttgttcctggaatagaaaaaccacttgttttactttgtgacaacactggtgttataaccaacagtaaagagccttgatgccacaagagaagcaaatacattgagaggaaataccacatcatcagggaatatgtggcaagaggggacgtactggtggagaaagttgatcaacttagctgatccattcactaaaattttgactttaactacatttgaaaagcacatactgaatctaggattaattgaaa

SEQ ID NO: 332426 - DNA, 634 bp, Cannabis indica
aatcatagcgtagtagctggttaatacttatggcagttccaatacatcttctcccatgcggcattaaatccgaggtgactgtacagataggatttgatacctccctgaggtgctttgcaatagctttgctctccggggaatatgtgaatctctcataccttctcagggaggcatgctccttgctgatccttttgattaagaagacttagttgaattatctcaaagccttactccttcaatccacgtgtcgcagccgtgttggtccacgtattttggacaaaattaatcgcaacaagaaatttaatcaatttaaaatttgaataaacttgaaatttgaaaattggttagatatttgaatttaagttagaatttaggatatttaggagatttgttagttttttgaatttttttaaatattctcttacaacctaaattttaaattcgacttaagatatattttaaattttaaaatagagatatcttagcattctttccagattatctattactggtttggtttgtaatgttttgattattgaattatttgtttattcaatttttttgaacaaacctattagttatttgatctaaattgctatgattagttatttaatcatagtccaattgtcaatag

SEQ ID NO: 332427 - DNA, 426 bp, Cannabis indica
gtttttttgttgttattttgatattacttttatgttgttttcttgttgattttatgttattttcgtgttattttttggaaaaccgtaaaaatataaaaaaatatattctttgaacgtaaaaatgtaaatattttatattattccttaaaaaaattacataaggtacttaaaatcaaacttttctttttataatttttacaaattttttctttcaaaaaaacgttgttttccgtacaagtaatgtgaggacaacggaaaaataaactctgtatttttttttttaaagaaaaattaaaatccataaaaatgtaaaatatagataaactttttattattttcgagtatttataaaataatctctaatccctataaaatataaaattatgtgtttgtaaaagttacagattggatcctctattttgttaa

SEQ ID NO: 332428 - DNA, 614 bp, Cannabis indica
catcggagcaatcgccgccgccgtaactgagcaatttctattagcagcagtcgtattaatcgcagccatagaaagcaccaaacacaaacgaaaacaattagggttagggaattaaaaaatgatcaaatatactaattaacagtgttaaatttaaaaatgtattttggttcttctccgttaaagttaacagaatattcttttatttttaaagtatattctgttaaacaaagaatcgccgttagataggcacttttaatatataaagatatatacacatatatacttttacatacaattacatatacaagtatatacttttacatctatatacatatacacacatatttatacatatacacatatatgtatatacatttacatatatatacaaatacacatatataaactattatgcacatttatatacacatacacacaaatttataaaaatacacataaaactatataaaattacacacatctataaactaaaaaaactaaacacaattttatactcaaattaactaaaattattatatatacacaaataaaaacataaattaaataaaaataaaatagaaaaaatataggttaccggagcggaggtgcggcgg

SEQ ID NO: 332429 - DNA, 969 bp, Cannabis indica
cgagctagagcatggctcaatacccttccccccgattcgatgacaaattggaatgacctggttgaaaaatacttgagaaagtattttcctccaacaagaaatgcaaagttttgaagtgaaatcatttcttttcagcaattggaagatgagaccactagtgaagcatgggaaagattcaaggagttgttgaggaagttcccacaccatggtattcgtcattgtaccaaacttgagacattttacaatggtctcaatgtagcctctcggatggtgttggacgcttcaactaattctttccaagtcttacaatgaagactttgagatcttggaaaggatagctagcaacaactatcaatggtcaactaatagagctcttacaagccaaaaaatagcgggtgttcttgaagtagatgctttgaccgctttaaccactcaaatggcctcaatgaccagcattttgaagaacatgaatatgggaggaagtgtaccaccagccgttgccattcaaagggcagaaatttcttgtgtgtattgtggtgatgggcatacgtttgaaaattgtccttcaaatctagcttcagtttgcaatgtgggtaaccaaaatttcaactgcaataacaatccatactcaaactcctacaatccaacatagaagcatcatccgaatttttcatggggaggtcaaggagcaagttcaagtggagcacaagcacaaggaaaacaaccatttctactgggattttctcaacaaccaagacctcaacaaccacaccaacctcaaagctctcaaacaagttcattcgagtgtttaatgagagactatatggccaagaatgacgctataattcaaagtcgaacagccttttttcagaatcttgaaattcaattggggcaattggctaatgatttgaagaatagacaacaaggcacttttcctagtgacaccaaaaacccaagaagagatggcaa

SEQ ID NO: 332430 - DNA, 925 bp, Cannabis indica
accaagaaagttgatgacggacaacaacttgcccttctccaggcaggcatccgcacagggactcccttctggcacgaactacaacaagagggggctgctagccttcaggacttccagaagagagtccaaaaatatatcaaccttgaagaggcccaaatagtggcctatggaggatactaacccaccaggatacagggtacatgcccggagcaccgcccttgggtactgtcccgaccgctgctccaccaataagcggcatacagttctctgctactcccagatacagtcagggccaggccttggcacccgcatcatcccattttggaactccctcagggataaatggacaagctccctcacactccgctccaaccgctagcctggcgggcccttcccagggctcgaggagtaaacgatcctccaaaggcagcaaccggacagaggagaaacgccaaaagagggggtacactccacaatacacccactacacggagctgacggactcccaggagcgtgtatactttgctactaggtaaaatacgcactaccagaggccgcctcccaaaagatgcaagtaccacaacgacattgggcatagcaccaatgaatgcaagaatatcaaggacgagattgaaaacctgatccaattgggccacctctatgagtggaacaagaatcggctgcctcacctcaatccgggccaagcgacagggattgtgccacagggaacaccagggggtgcagtaggagtattggctccagttgctcccgcaggcgatgtccagcacgtcctcggtctgccgcacagacccaacgggagagtagtcatgatctccggaggaccccatattggaggatccacccgcagagaactaaagcggtacgtgttgggttttatgccctaaataaaactcatttcaatata

SEQ ID NO: 332431 - DNA, 884 bp, Cannabis indica
cacgtatattgggcgattttaggagcaacaagggctattttgcatctcaacccttgttttagaccatgacctgcttgtttggtttgaggtaatgaaatagagtgaaatagaaagtaaacaacttttattctatttttcgaaaaataaaatttaataataatccgaattaaaggtattatgacaaaactgtttatattttttgtatctgttcgtgttaggaattatcttcaagttggttatattaaaaagaaaagttgtcaaaaattaagctcatggtcctatttttaccattttggaaaatacatggtccattttgtcatttaataaaacagaaggtccaatcgataacttttgcaaaatacatggtctaaaatggtatttactctagattttttctaaaccttattattattattattattattattattattattattattattatttattatttattattatttagtaggtaagtactattttgaattatatgttctacaaaagttatcggttagatttcatgttttgttaaatgacgtattagaccatgtatttatcaaaatggtacaaattagtactctgagctcatttttcgtcaaaataaaacttaataataatattatttagaagtattaatactgattacattttctgcatctattcatgctaaaaattattttcaaatttattatattaaaaaacaaactgtaaaaaattgagctcaagtactattttgtagggctatacaaaaaaaaaaattgtaaaccgtccaaaccgaaccgaaaaaatcgataaaaattacaaaccgaaataacccgaaaaaattacaacccgcccaatctgttaattgggcgggttaaaaataggtccaacccgcccaa

SEQ ID NO: 332432 - DNA, 681 bp, Cannabis indica
aatatcctaatggtaaccacgatgttttgcatacataaactttctgtccgtggtttcataagaaggtatgatgacaatattttaaattttaattcaacaatctatattcctctcatattaatacattttatgtatttagatatatgagttacacaagcttggatgtttacaaaatgctgatgagttactcgctctagcttctggctctgattacatagcaacctttcacaaaggttgtgtagtgaatggtgttcggtttattgcgactgaaagagacaaaaagacacaaaatagtggtgttactattgctggacctgaagggtttaattactacgacacacttgaagatgtaatcactatatcttatactggtgcatatacagtgacactgtttgaatgtaaatggtataacactaatcctataagaaagaagataatcactgaaaataacataaccagtataaatatacgaggattttagtatcaagatgagtcgtacatccttgctaaccaaaccaagcaagttttctatcttgaagatccactcagaggtcgcgattggaatgttgttgaagatgttagccatcgacaaatttaggacattaatgacaatgaagatgagacagatgttgatgttgtaaatgattctaactcttcaaattttgtgttgacggttgatct

SEQ ID NO: 332433 - DNA, 566 bp, Cannabis indica
agaaactcgagaccagactcctcatgtaagaatgacatgtggactcacatcccttgaagatttgagctgtcaagaaaggacctctagagaataaacctcgcctaaactaaactcagcgagatgatgtgaccttgacagattctagtcacattattacacctcgcataacgtaggaccaagaaggaaatgttcaagtctcgcatataccaagatatatgcgaagtctatgaagacttatcctgcgacttagtaaagactatatctttacatagcgagttagtccaaaagacttaatatgctcgatgacccgataaggactcccacgtcctagatcatcgacattgacatggtatccacatatgcgactcgattagggcgcatatacctaagtacgagactcgttagtctcattttaacaaaaatgcagcctaagcctgcgagcttgtgtgagtagatgaacagacaacttgcactataaaagtcacatagttgttgtatttagtaaaacggatgtaaactgtacttcatttattccatttacgtttttcttaatttaatgctaatat

SEQ ID NO: 332434 - DNA, 985 bp, Cannabis indica
tttttatttatatatacatgtacttgtcaataaactagcatcaatttgataggttgctaattattctaattcatattagttcttcctttaatttattgaaaaatatatgtagcattagtgagacatgatctaagaagcagacctcaatttaactatagtttatgcatatgtttgacatgataataatccactactatgttccattacttaaatcataattctttttgtggatctcactggatatataaatttagactcagattatgatgaagaaaggaagaaagaggtagcggtagagatgcttagaaagtgctctggtctgccattagccatcattgtgcttgctgggcttctatctaattcgctgcattgggagcaactgaaagcaaatgtaattcactgcattggtcaaggtgatcaaaaacatgatgacgactcaaaatacagtagtgttcggggggtgttaggtttaagttacagcgagttaccatctcatttgaagccttgttttctgtacttggctcgttatgctgaagatgtcccaataagagtaaaagagttatgtcgtatacttatagcagaaggtttaatatcgcgaagaataggttctgtgggaacttgggaggatgtggcatatgattggttgtgtgagttggtggagaggagtatgattcaggtcaaagaaatgagttcaacaggaagaaggataaaatcactttgcattcatgatctcatgcgagatgtgtgcctgtctaaagctcaagaagaaaacttcctacattttatagattggcgaaatagaaggggagagccaatagaaacaaaggtacgaagagtttccatctatggtagtgaaagtaataattgtagtgattttattcatatggttggaaatatagatggctctctcaggtgccttgccgtagatggtggaggaattcagtataattataaaagagtattgagacatgtatgcaatcacttt

SEQ ID NO: 332435 - DNA, 609 bp, Cannabis indica
gtaaaataattccaacaccttcctgctcaagggcatcatccactacgttggtcttccccggatggtaaaggatttcacaatcgtaattcttaaccaactctaaccaacgcctctgccttatattcaaatctttctgggtaaagaaatatttgaggcttttgtggtcattgtaaatctcacacttctctccgtagaggtaatgccaccaaatttttaaagcaaacactatcgcggcaagttctaaatcatgagttgggtatcacaattcatattcctttagctgacgcaaggcataaatgacgacgcgattggcctgtatcagtacacaccccagaccctgtctggatgcatcgcagtaaactacgaacttttccttgtcagaaggtagggctaatactggatctgtaatcaatctttatttcagctcctgaaagcttgtttcacccttgtctctcaacacaaatcgctaattctttttggtgattttagttgagggtgttgagatcttagaaaatccttcaatgaactgacggttataaccagctagaccatgaaacatctaacttctgtaactgtcatcggtctcggccaatccctgacggattcaat

SEQ ID NO: 332436 - DNA, 900 bp, Cannabis indica
gagcttgagggtagagattgagtttacaactgagttgaaaatttaacattcgagattgctacgaatgtaagctactcacatttggttgatcttttgtgcgaagaacttgatgttgacaaagtccattatgacttgaaattggaagtaaattacaagtacatgaaaagtttaatgtattgacctgaagttattggaaatgataagcgtgtaaggtcatttttgcctatgcttgtgaaaagctagattaatttactcccttatttctgactttggcgaagaagaatttctgtaacaatcctagtaccacattaagtactattaaggatactcatagcgaggttgggagtttcgttccaaaaataaatccagaggtgttggcagccgatgtgttacctgaactaaatcatatgatgccgacaaatgacattttagcgaaatgccctttattgatggttttagtgatggtccgaccttaaatggtatgttgagggcaatgatgatgtaagagaggaccaagatacagaggcctttgctgctatagctttgaacttgactccactatcgtaccatataccacccaagcaaccgacacagtaaagaataccccgtagagaaaatcgccaaacacccggtactagtagtagtcgtccagacagaacgagtaatgctagaggtcctagtgatgctagaagaactagtgatgatagagggaccaatgatgctagtggtcctagtgatgttagagggaccaatgatactggatttggcgatccattttctttttcgacaagttacagtaaaatcaatgagaaaatgtttacaagagaagacatcgaggatcacagtcattatatatctatgggtggcacaccagtcaaggagttacatctaggaaatttt

SEQ ID NO: 332437 - DNA, 914 bp, Cannabis indica
tgtctatctataatagctccattattctcagcctttgggaagtaactagtcatctggagttggtgatgatgcattgtctgatgaggtttcatccgtccatggataaaattcttggtcgcctcaaaatgatcttaatctgacgccatcccaaacagttcagtcaactggttcatgatatctgtagccgtgagagtattggcaaaccttattttccaggtgtcgaccatgctagacaccataaagtatcgagctttgtttttagcattctaccaacgctcgaacttttctttgactgcctttgttgcattctcacctggccgctcaggagcctcttcagtcaacacaaacagggcattttcaccaatgagagcaatattaatgttctcttttcatttgacaaagttagctcgagagagcttgttgtcagtcaatagtgacaccatggggttgttcatagtcatattgggtactacaaatatcaataaatagaaatcaaataaggtttaattccatatcaaacacaatcagaaattattagcacttagcaaataggaatgacaagtgaaaatacaaaaacatataatcctaaataatttccaagatttccaacaaactgataccagtgtcccgtttaggtaagagtcaaagatataattcattgaaaagagtaggcagctcatcgaaaatgacaaacattctagcaaccttttattcgatcaagatgagatccagcgttgtcctgtttagacgagagtcaaggccattctatcttatgagcttccaccattgtttcatacttttgtaagtcttactcttagtagccaccattagggtggacgttaataagaataaaacacttacaaataatacctatctgtcgagattttatggcgttaaattgctaatgagcgttc

SEQ ID NO: 332438 - DNA, 710 bp, Cannabis indica
atttaagtgctcatttatcgttattaaaaaaaaaaaaaaactcctagttgaagtattttcttaattggtttcatttaaggacgacatgaattaaattttccatgaatgtgaaaattcactaatattaaccacgataacaattaatatatatgagttactaagaaataaaagtgttgaaaaaatgccactacaatcactaactgaaacttcaatagtattgaaaagacttgcttttgttcattgagaagatctctcgtgtatttcaaaaatgtataaggcaaccactataaaaaattttatttttagtcacaaatgtcgtgactaaaaggtccgtgactaaaagtattagtcacaaaaattacaatttattgtgactaattaaatgtatttttagtcacaatacttgtggtgactaaaactaaattagtgataacttgtatctaaatactatgttttagtcacaagtaaattttgttgtgactacaagttacatttaatcacaaaaaaattatgttgtaactaaaaagttataactaaaagtagctatttttgtagtgcacatccaaaatatcaacatgcaaaacaactctgacaaaatatatatatttacatttgaatttgggcaaaacaattgctttaaattacttttttttttttttgaaagagaacctcagttcattatgattaaaacaaagtaggattgacagggg

SEQ ID NO: 332439 - DNA, 1044 bp, Cannabis indica
atcatgtataatatggatggtatttcgccatacgattcttgtgggcagcgtctagcatccaccatagctttttctcttgctctccatgctttttggtaggatattgagacactatagtcatctgcaatgtcgtctacaatttcatttggagtgtagtttctttttgggttgacaaatttgttttttatcacatgcccaactaggttgcttgtggcttgaggatggtttccggaggtgatatctaacgaacatgtatggtcatattttatcttcctaactttgaacatttctgtttttccatgttttgaagctaggaaactccacttgcaattttcatcaacacaaacgattttatagtcaagagttgatgatctcttcaccttgaatggctggttttgtctaattgagtataggctgattgcattcttcagtgtttgcttgtttgaaaagacttggccaacatgtattctgtcaatttgaggatttgtaattacttggtttatctctgaacttgtttgcagtgcttgttgtgcatgatcataagcataatctgctaccaattgtgcatattctgttcttgttggtaactgttcagtacactgcatacttgtttctccaatttctaaataattgttgctggcaagacattcaggtgatgctgatgattcaaatgtgtttaccatcaaagggtatcttgtttcatcatcatttttcttccttatttgatggtagaacttgcagccattgtcatctttgatggttataggtggtatcccttctttaatttgaaatttcactgtaattccatacttgtttctgtctattgataaggtttcatagatctcctgtgcaagaacattataggaacattttattgggattagtatacctgccacttcataatcattgtatgttgttttgtctacccatgttccattgtagaaaaggatgattgtcatggggtccattggttcctgtgtgttatcatatacatattagtttatttattatttttttttaatgaaattttaagtatttgtgaaa

SEQ ID NO: 332440 - DNA, 1260 bp, Cannabis indica
aaaaaaagaaaaaaaatacagatttttctgccattttcccctattttttttcctgcattagttcaataatattgcctaaattaaaataaaataactaattaattttattacgataacaactaactttaaaacacattaaatttatacaataataaaataaatatctgtaataaataaaaagtatataaataaataaatgtatgtatgccgagctcggagagagaggaagatggacgggaggtggtgatggtcagacgtatgagacagagatgagagggacaccgacgggaggtggtggtggtctaacatatgcaacggagaggagaaggagactgacgggaggaggggtcggtggagatcgatgggcgagagagacgagaagaaatggagatcgagagagggaagaagctagtcggcaagagaggagggcgatggtgcagatgcgtgggtgggattttggagagttaagatttttgttttagggtgtaggaaatggagaagaaataggtgagaaaaaataggtgggcatgtgggaaatagaaaagaagtaggtgggcacgtgagaaatgtggcaagaagtaggtaacaattttttattggactcttatacccgacggtttaaaaccgtcatttaaaatcgtcgcctagtaggcgacggttctaaaccgtcgtctataagggcccaataaattttataaattccaattaaaaatgtcgcctattcctgtaattattgttgtaaaccgtcaggaatactaattttttccgacagttttatacagttacttaattcttttagcgacgaccccctaaaaaaactatttttaggaccgtcgcaaattctgaattttatagtagtggtaccatccccaccatattatatcctctaggagctacgatgtaacaccctaactaacataggcgtattacgtgatttttaaacatactgtgcagctcgttcctaatcaacgaggtttatggaaaaacgtgattaattaaaattttgctttttgattaaacttgtaaaataatattacaaaagactcgggatcccaattataaaatcatttacaaaagattttaactgattaactgatacataaaataaaagtcgtctaacgaccaattacaaaatcagcctcgctgtcccgaggatcgtacgctccaggcctaaccgccccgacatgtacaatctcacaagctcgctcacggcccatcagctttagccttgcctttacctacacataaacgtaaactgtg

SEQ ID NO: 332441 - DNA, 472 bp, Cannabis indica
aagtaataattttttatttttttaattaagtagttaaattaagtaaagaaattaaaatttctcgtttattattttgtcatttgataaaaatataatagtttatatttttaaaattaacatttatagttaaattgtttagtaaccatcaatgggtaatactcattgagaagaatgttttccaaggatttggaccaattacttgggatcatgtctgccaaccaaaagctgtagggggaaatggtttgaaaagaattgcagaatggaacattgcagcgatgacggaatatgtgtgtgcagttatgaataaggaagacaaactgtggattgttggaatatattttaccaggatctagatttactaccatgtatgttgttttataacatcctaaatatgaatttctaaaacaatgtaaataaacacatataaagtttaggaaaccttatattgggtgcagcggaatattaatggctt

SEQ ID NO: 332442 - DNA, 446 bp, Cannabis indica
cttttggttaaacaaggatattcttttcattttgaaaataataatgttgacattatgcttgactcccgaattattggaaatcgcttttattctgatggtctttacaagttgtcattggctcttttagattcctcttttaatgttgtgaatactgtgggtaaaagacctcacattaaggaaacatccttattgttatggcacaaaagattgggtcatatttctaaagaaatggttgatcatttaatgaaatctgaaattcttcctcctcttgatgcttctggttgggatacttgtgttgattgtacttgtggaaaaatgactaaaacaagaaagaagactagaaactgcagtcaatttttattagaaattatccataatgacaccagtggaccttattccaccacgttgtgcagaaacaagtattttatctgtaaagaccgcttagt

SEQ ID NO: 332443 - DNA, 519 bp, Cannabis indica
cacgcggatcgtcgaattggcggctcttcaaatttttgatttggggtctgagaaaaggaaaaggagggagggagccacatctctcaatggacaatgatgtcatgtcaaaatgtaaatctattttaataatttttattttatataaaatttatatttttaattttattaaggtgacgtttggtaatacttttttaatcagttttctatttttaaaattaaaaaagtgaaaacattttttaaaaacatgttctataaaactgtttttaccttttatttttgaattaaaaatcaaaattttaaaaacaaaaaaaaaaatcactttcaatatttttttaaacagttttttttttcttaatcaatattttgaacttcgatcagacccggacccaaatccccccacggccctggcgctgaacccggcctctgacctgaacccgattccgaccccgaacctagacctgacgtaaataaaatacaaaaaatgaaagtaaaaatgagttttacagaacacacttttat

SEQ ID NO: 332444 - DNA, 819 bp, Cannabis indica
gtctcgagctagattgagtcgatatacctaacaacctttcctgagttagtcatcgtaaccacatcaggccttagcttctttgccaggcccaaacacctcttgcatctcgtcatgtctgtgtagttatgtccagtggacggcgaggagcacgatcttaaggataccaatggccggtcatcttgccaaggagttggctagctagatttgggttttaggggcgagcataaatatggtgagcgtttctaggctacgtacgttcatcttttgcactttctttgagcgcctaaggatgtagacccttgatctgaacaatatctcaggccaagaacctcttgacttttggccagaccctatcaagcagtcaggtggccttccttcttctttcttcacatggactcttccttttatagggttgcgccggcagtcagcatgcatgttttttttcctcagctctcaatgaaagtaccaaaatgtttatcgagtttttcggtaaccaaataattttagagcttaagaaagtagttatagagtaaataacaaaataacaaataagagatttttacgtgattcatgcgttaattatccttagtccatgagtccattttattaggctcatcggccggtaactgtttatacaaatagagatacaatggactagaacccctttccactgtgttcctcttgaagaagaggaagcttagtagatatattttggagttgattgtagggttacaaaatgcgtttgcttttgatcatgaagaatcggtcttctctccccaaagaaggtcctcctctcttgtgctttgtttggggtattta

SEQ ID NO: 332445 - DNA, 689 bp, Cannabis indica
aattaaaccaaaaaaaattaaacattaactcattcatcaaatataacattttgactgaacactattgggtttctttactatgataatacgaaaaaagagaaaaagaagaattgggaaagatgtctctaagagtatgtctttattttaaagcatatgaatttctggtctttgataaagatgggcaccattagctgtcttaattctctttggggtcaaaaagatcgtttcgaaaaagctttgtatgctgtcatttttggtatttgaacatcatgaatggtagttgtaaagattggtttttggtactctgaagatttaattctctttttcggttttgaaagtcctaattactaccagttcatattgatgattcttagcagattaattctatgttatgaattagaaattaaaaacaatgaacacagaatttacaagcttcctctgcattggaaacgcattccaaccgagtagtgcttgggttcccttgaaccgggtacagtaactttcactaaacaatcaattcaattacaaaaaccagttctgattcttcaaatcaaacaatgtaatctaaattgacttttatacaaagttacctaatgcttgaacaacctcaagctttgagatctaaacacatttagatctcaaacacaagaaacacacagctgaactaccttcagcaaagaatctgaact

SEQ ID NO: 332446 - DNA, 1279 bp, Cannabis indica
aaaggattgttgaaaccacgtacaaaaaccttgtgtgtttttccttttctgcactgtttgttaatctggtttcttctggagttacagagtcgctttctgtagctacaaaaaaactatttcagtaccagtttcattattccgcatttaattaaataataaaactgagaatattaaaatgaaaaatttcaaacttcaacttcaatatccaaatacaataaaaattattaactataaagtctaatttttaagtaaaacactacaatgtccaaacatcaaatacaaaagtttaactaataaacgtaacttatgtaatatattatatacacttttattgaaaacatatataaatccgtttaattcgatttattcaggttaattgggcggtttagaataaattataaaccacccaatgtattcattgggcggtttgaattttcattgtcttatttcaggttgtatttttttgtcagtttattcagttttgtttggacagtttataagggttgggcagtttgtaaattttgttgaacacccctaattcttacccttattagctgtgttaatagctttaagaggcttcttgctattcttccatttcttcttctttgtgggtttcaaagtagaggcaatgtttgtctcaggttttatcataccagccgtagcattactagaacttggagctttatttcctcctttctacggtcctccaatcaaattttcaaatgtctgaaggttgttaatcaactcgtgaaagtcaaaaagtcaacttgttcatgacgtaatgtgatgtaaagggtagaaaagctggagttaaactattcaggatcaaactcacttaagtttcttgatcaatgatagctccatgattctcaacttcctggaaataactagccatcaagagtaggtgatcatgcacgttctgatgaggtttcatccatgcatttatgaagttcttggtcgcctcaaaatgagcttgatccaaagccatcccaatcagtgtagttaaccggttcatgatttctgcatccgtaagagtgttggcaaacattgtcttcaaggtatcaactatgctagacaacataatgtaacaagcttcattgttagcattctgtcaatgctcaaacttttcctttactgccttggttgcattctcacctggttgctcaagggcttcttcaattaacataaataatgagttttcacctatgagagcaatattaattttctctatctatttaagcagagttagctacgagagagcttgttgttagtcaacagt

SEQ ID NO: 332447 - DNA, 914 bp, Cannabis indica
agcaatcttccttcccaaccttgaatcattttccgcatttaatccttcaagaacccaagtaaggctgttttattatgtcccacaatatttggtaaacccaaatatgtgctatcatcacctgcctcattaaaacccaacgtagaacaaactttttgcctcaccccattgacagtgttagcattgaaaaagatagaggacttctgcaaattgacttgttgtcctgaagccttttgaaaaatatgtaacatttctatcatattgatagcactatcctcgaaggctttacaaaacacataacaatcatcagcaaagaacatgtgtgataacacagaagcccctctagcaactttgcaaccccaaatctttcccaaccgttcatagtctcttattaaagctgaaattccttctgcacaaagaagaaaaggatagggtgaaaggagatcaccttgtcttaaacctcttataggaattataggcccaatttcatgaccgccagatgtgattgtgtaggagacagaactaacacaccgcatcatcaatttgaccacatgctcatcaaatcccaatctcctcaacatagcctgtagaaaggcccactcaacccagtcataagctttgctcatgtccaacttaagtgccataaactcctccttccccacttgcttccttttaaagtaatgcataaccttaaaagagattaagatcttgtcagttatcggtcttcaaggtaaaaaggcgctttgtgtttcaaaaataatacttgggagaataacttttaaacgattggccaacactttagatacaattttatagaccacattacacaaagcaattggtctagatcactcatgctttcgggtttagacttcttcgggataagcacaatagtcgtttcttggaaattattttaccag

SEQ ID NO: 332448 - DNA, 866 bp, Cannabis indica
tagaaagataagagagagtggtgatcgtgggtgaatgggtagttgagaatatatacagatgattttactaaccaaatcaagaaaaaaaaaaatgaaaaggaagtaacttccttaccttggaaacaacgccggaaaagaaaaaaggataccaaaaaaagattttttaaaaaaaatggtcaatgtttccttaaaatggaaaaaggaaaccaaatatccccacaaaatctaattattaaatatcccaaccaatctgaaatttccaccaaaaaggaaacgaaaaataattaattatttaaggacaagttttctaaaaacaccaaaataagaccaaatctccaaaaataaaggaaacacaatatagagaatacaattaaaacatgtttccacaaatgaaaaaataaaagaaaatattaacaaataatcaaaaaaatcgaaaaaatatgcccccctttttctttaattttttcaaaaaataccacccaaaaagaattttttttgtaaataatgaacaagagaacacaaagagacacataaatcactaatcaccacttaagagcaaaaaaaagtgtctaagaatataatgaaacataacaagataaataataagaaatttttaagaaagctcaattgacaaactcggtcacaaattttttgttttttatttattttttatttatttatttaaaagatagaaaataaataactttgatatttttgtaactaaaattcacaatgtctgcttgtctttgtccctgataaaaaaacaaactcataagaatagtcagaaattatttatcaagctaatgaagtagtagaataaggtcataccggttacacaggaaaaattgactcagtcaccaagaata

SEQ ID NO: 332449 - DNA, 503 bp, Cannabis indica
ttggcccattcactaacttgtgcaacgagttttctcacacgatggttgaattttttttttttgattgaagttataaatcacattttatttaactaagagaacaacaatgaaatttttgaaattggataatcgagtaaagagttatgcgcgttttagtgccaaaaaatacaagttttgaacctgcctgatttttggcctacctattgaaaataagtagtccattttttgtagataggaagtctgtttttccaaaaatttgttttgaaatgcgtgcttatgactataaacgactaattttcacccaacactataaaaaattgatttttactcaaaaatattagttggctaagcatctatgtctaatacctaacctatctaagtgagattaatgagcttccaagtttgaaatccaataaacacttttcacacacactttgagccaaaatttgtttctattcatcttaagtgtgcttccttttcactctaggtttccattgtatcat

SEQ ID NO: 332450 - DNA, 815 bp, Cannabis indica
gagctcctattattattagaatacaacactactaatttattgtcacaaaatatcttgtgtggtctttctacattctccaaaatacgcaacctagtgacaaagtttctcagccatattccctgatttgatgtctcataacatgctacgaattctcctaccatagtggaagaagctataagtgtctgtttgacacttttccaagatatagctcctctagctaacagaataatgtagcctggtgtagactttctgctatcttagcatccagcaaaatcaaaatcagaataccctacgacctctaaatgatttgactttctgtatgtgagcatgcaatcttttgttctctgaagatacctcataaccctcttggctgctatccaatggtccatatcagggttgcttaaatattttccttaaaccccaacaatgtgcggaatatctggacgagtacatatctaaaaatacattagactcccaacagctgatgcatagggaatccttttcatttcctgaatttcaaggctgcttttagggctgaatttgtctcctttagcatcaagggtatcacttggtctacaatcttgcatgccaaaccttttgagtgctttatcgatatagctcttttgtgataatccaagaatacctcaagaacaacctcgatgtatttgaattcctaaaacaaaagaggcgtcaccaaaatctttcatctcaaattgcttagatggaaaaatctcaatttcgtgcaataagtctatatcattagtggcaagcaatatatcatcgacatatagaaccaaaaatatgtaatttactcc

SEQ ID NO: 332451 - DNA, 785 bp, Cannabis indica
ctgaagagacaggggttggctggccataccctaggagagtgtatggtgaagatcagccatgccctgcagaccctggttcccatatacgggagctggcttagttcgcctaggcttgtgcctagttgctgtgcttggctggccagacctttattgggcagggtctggccacccagtactcctccttggctgggcagacttgcaaagggcagggtctggccacccttgaagcctccatggccggccagacctacattggcagggtctggctgcttgtgactccttggtcgaatggtgtcggttgtgtgttgattgggggtaaatcacactagttgttggagtttggtggatcttgatgcccgaagtgattggtttcatttcttgaatcgccattttgggtgtttccacccactctaggtcctcgtcgattgaagatcgatctctgtgcacctcgctgccctaggggacgaagtgatgtaccctggccggccatgggtactcctactaatggctggccggctagtggttgtacagtggggctcgctattgagccagggatccctggccgacccctaagccgctagttgtcgggatcttgctgttcttgctgtttgacctttaagtaaaggtatgtccttcctctgacaggggaagatccgtcctagttcctaaggaacttggcagcgatctattttctcagagagacgaagttgctttattcttccttctttgtatttctaaatatattgcatgtgtatcaattgctcggagtaaaatcataaaaaaaa

SEQ ID NO: 332452 - DNA, 784 bp, Cannabis indica
tgctaagaaggaaacattggatgaaatacaacacagtgagtttcaatcctagggattcatcctgtccccacctactgcccaagaaagcgtcctctatagacttatgatcaatcgtttttatgccagggaaacatacctcaattaaatggtttgattcccgagaaaataacagtttattgcaatccccaaaacaatcaagaccaatgatcaagtaaaaattcttcggcgctgaaccgtatacaatgaccagcaatcttagcccaaaattctttgggattgggctggtaaaactccctcaaaagaaggctgtgaactacttggggtgaaaaacaaaatcaaggatatctaaaaaaatgtccaaactgtgtgtctcagaacatttttaaacaaatttacagataaagtattcttaatgttaataataacagagaaattgctagtacatacgcacttggatctataaaaatcactgatactgaatttgttaacccaatcctgcattttacaaaaaaagtaaatgtaatgaatgggcatatgcaagttgcaaaactataatacaacaacaaaacaactacaaacaaactaacaaacaggaaaaactccttcaatatcaatatccatgatagttctaatttttacccattgatgatatataaatggacaacaaataactagataacaacaatttcaatgcaaacacacatagcaaggtgttaaaactataaaaaaactatgaaaaaataataaataaaatgaaaactgatcaaataaagaaactgaaatg

SEQ ID NO: 332453 - DNA, 659 bp, Cannabis indica
aacccaaaaactcatccccttaattcaaaacaaacccaaatcctttcaaaacttccagaatacctgcatacaatattttaaactaatcccaagcagcaaaacaccacaattcacacaatttctcaaatcaccattagagctccaacttgagctctttaactaacttttcatcccaacttcaaaataactaactaactcagccctaaacactcaaagcaatcaatacctaactccagaaaagagaacaaactaagagcacactcacagcccccttaaatcccaagactaccaaccaaaacttaaaataaaatcaaagaatatcaaaggaagcaagcaagaagagtttaccttgaattagagcttcaattacaacaacaactaggtgaattgaacaagaaaatcccagcttagtgctggttcctaccaaatcgagagaaagagggaaagagagaagtgatttttctaggtttttctttttacttcttcacacaagaaataattgacttttctttcttctttttttttttaaaagaaatgcttaaattcagattttaaataaaatcaaataagacaaaatcttcctttggcaatttactaaattgcccttaactaaaatccttatattaaccaactaaaaagggtaagttggtaattaaaac

SEQ ID NO: 332454 - DNA, 804 bp, Cannabis indica
ttagattttgtgaagaagaaatcaaccttatttatattttttatatcttaaaaaataaagaaaatatttagaaattcaataaaaatataaaattatttttttaaaaaagttagaacttaaactaaaaaaaaatgtatgtttatttaagtaaatttagacttttagagatagaaatagacttaaccgtgtttttgtaaaatttaaatttttacgaaaaattgaatttttattatacttttttttattaaaataaattttttaataaaaaataattaactagaataatcacttacttttttaagatctaaattaatttctgaagattcactacaaaaaatattcaatctttttttttttttgagagaggtacaatttgataattgttaaagtttagggggcaaaattgttaatttataaagacacatcaacatttaaaatgaataatggaataaaacctaacataatgattaattttttgtaaatttaaaaattcaagaaaatttttaataaactatatattttaggggcagaaacagatagtatcgaaagttcagtaaagaaaagttactaattattttataatttatcaaagatttgatgcaatttttccaatctcacaatacaattgcctttttttttttcatggcaaacctgtaccaaactaaccattatattgttatggctaattagtaatttccccccccgaactttgacatgtactaaatcatgtctcctgaactttttttgtccttaaaaattctccctgaactattaagattgttaaatttaaggacttttgtctaa

SEQ ID NO: 332455 - DNA, 588 bp, Cannabis indica
tttatgggtgtcatcggcaacgagaaagtggcttgtgccacattccgattccaggaagataccctagtttggtgggacatggtggccctgaaagaacaacttatccggatttcatgattcaagttaccgagttgttcaagattagattgattaattttaacttaaacattcaagaatcagattgaagagtaagctgtaaagaacacgatgacttacaagcttcgtctgcactgagaataaatctcagtcgactagtgcttgggtttcccgaaccaaggtaataatgtccactaaatccaaaagattcttattacaatcttcagttcacaattaggaatttaatacaatctttacaataattagtaatgtattaccaacaacaaccaagattcttggttgtacgcacaagattccctgtgcaggagcttattgggttttatgccctaaataaaactctatttcaatgtaatccagattattcaatatcaataaagtaacaaaagtatttttcattcatttgtgtctgttttggtttacttaatcaattgtttgtctatttgatttataaattcatccaaacccctttca

SEQ ID NO: 332456 - DNA, 667 bp, Cannabis indica
tataggcgactgttttaaaccgtcgcatatagtattaggcacggttttgaatcatcgcctattaccttttataggcgacgatttaaaaccgtcacctatagtataataacctatttttttattattattttaaaattttgataattttaaatttttattatatattcatttatatcataatcataatcatcaaccgaatttagtataaataaaaatttattaataaaataactataattataaatgaataaataaaaatttataatatataatgtatttatacatagtttataattttaaaaacataacaacaaataatgtaaacaatttttttttattatatacaacaaataatttaagaatctctttaatagctatacaccaaaacactaagaaaatagcaaaactaaaagtaatgagtataaaatggcatctcgacacattcttgcttcgataataagttctttggaataacttatttcttcaaacttattgatttttcctacaaaaaaaaattaaacccaaactatcaacaataagacatacctatataattatagaagataaaatttgagccaattataaacaatataatatgttgtgccactatcattcaaattccaataacaaaaaagagaatcattcactacaatttgatctatacata

SEQ ID NO: 332457 - DNA, 1068 bp, Cannabis indica
attacattatcaaaggtttccagatgtcgttgaaggatatagtgatgcagactggaacactttgtctgatgactccaaagtaacaagtggctatacttttagcatagatggtggccctgtttcttggaagtcaaagaaacagactattttagcacaatccaccatggattctgaaatgatagcactagcctctgttagtgaagaagcaggttggctaagaagtctgctagctgagatccctttatgggaaaaaccgataccagttgtgttgatccactgcgatagtatcgcgattatttcaaaagtccagaaccgttattacaacaataagaaatgacaaatctgtagtaagcacaacactgttagagagttcctcttaacagaaattgttagagtggatcatgtacgcactgatgacaatttagcagatcctttgacgaaaggactggctagagagaaagtccataaaacttcaaaaaaaatgggactattgcctttagaaagatgagtcactcataatggtaacccaacctaatgactggaaatcccaagaattaggttcaaaaggtaataaaaggttatgaggtgatatgtgttgatcacgctattgttatatgagaagtatgaagtcttgaagcgataagaggatgagttagtagaaactcttaatgagatctatactctagctaggtggagtggagtattgagctgcaggagtactcttgataaactcacctatgtgaatgtgggagtggggccgcttcctatagaatttggggcaaaatttctagagcgttcactatactgggataaacatgcatggccattaacgcacatgcttgtttgaatacacccttgaaagattggtgtgtggtatgatattagagatagatttcaagacttcgagtcactatagtaaaatctaaatcgtattcactacgcaagattcaaatcgaaagatatctttgttgaagcattgtcttatagttgtctgataatgctcaagaaaatatttttaaaaaatttcaagtgggggattgttggaacctttgtgaaatcatataaaaa

SEQ ID NO: 332458 - DNA, 519 bp, Cannabis indica
ttttttttaagaattaaaatttttaaattaatttcatatatttatcattaaattttttgtagtatcacaataagcctaatggtaagtaataaagatttataattatattatgggctaagcaggtaataagtgagattatgatcctactaatttagttcaatataaattctaaattcactataagtgagtaaataagcataatttataaattatggagatttatatagcatgtgtgaatgtaatatgagctacatgtggaataaaaatatttttcaggtttcgcaaagactcgatcgggggtcagaaatgttataacggctttaattgatagaattgatgagaatattgtaataaattaataatataagtattgaggtagttaggagtatgtggtatttgacttagcgtcctgaaagtataaattttttagtggctaaaaaataataagataattatgaataataaagtttttattaatattatatctattaatattattattatattattttttatata

SEQ ID NO: 332459 - DNA, 917 bp, Cannabis indica
aaaacctcctcaattcaatagggtcttgtctatgcttcattgccttgtgtaattcacaaatgaggtcaaatgaccgttggaaggatctattccttttgttgagttacaattagaatgcaccttcgtagaaagagagccagcaatctacctaagtcaccttcgtagttaagctttgcaaagttaagtccattcattttcaaaggcatatagttaagatatctcctaatcttcattctgattatccttacagaagatataaacagcaatctaccaagtcaacaaaccacgtacataccatcttatgctatatttacatgtagctacaaacagcttagtcacaaagataaacacatagctaaaagcctcaaattaagtttcaacaagaaaaaaagcaacaactagatgtagaacaacaaaaataccaatccaccaaaatcctagttatatctatattaagatacataggcctatacgtatcaagtaaattcattttgatagaacaatgaggtattaaacaatcaccaagaacaatacagcaagtaattacattatagctagtaatgtttcaataagaagaaagagtatcattcgtcttaagcttccttactttaaatattgaatgtaaggagataattatattataaattaatcatactcttttataacgcaaagcaggtatagattgagatcctccatggctcaactcctttaattttttcctatttgatgcattgatctccgaacgtttcaatcaaaaataaatatggagatattaatatgtgaaattaaaatagtttagtaaaaattcaattagggttgaataaaaataaaacaccttcacttcaggtagttcaaaaaatgcaatggcctttttccattggtctatagtgcattcagcatatggagttgtaggacca

SEQ ID NO: 332460 - DNA, 1621 bp, Cannabis indica
gagagagagagacagagagagagacagacagatatttatgtattgtatactttgttctaaaaaaacatatctatgttgacaatgtaaatgtaaatgcctccaacaattagtaacctcaaatcttattagtcaatataaaaaacatgtcccgttgtgctattatatgcatgctgcctgaaaaaacaaaaaaaataatgtattaattaagaaataaatataatggttgtgctcatgtgtgcatatatatatatatataataggatacctttagttaataatctggaaaggccaattccttaagtgttgtgttccaaatattctgaatgcgtgtcagcatctgtgcctgtattgctgtgtaaaactccttctgatcccttttaacaaatgcttcaacatctgtaatgctctgctgcagatctttaaccaagctacctaaaccctgtaataggtcgcttatcatgtcctgtgggtcattagggaaacttggaaatcttggcatatggagtgtattctccataacagcaaaagtaaagtaaagtcgatcttccattgttattgtcctgctgttagtgaccatattattcatcagtacccttttacggcctgcaatatcatcggtcactatagcaagcacctctttggtgttcctaacgaagaaagatgatggttctatatccttaaaatccaaattatctctcattctcctcctataggattttcccaataaggctatctttacgatgctcattgaaaagtcagtacacagagttgtgatttgcttcacctctttgactttgaggtctggcatcgaagcaattatggatttgagtccacaccttttgaagaaaaacccattttgctttgctttaagcataaagcttcggaacttgtcttgataatcgttggttcttacatcaaatcttggcataggaggtgtagtttggaacattaaacatagaatactaaacttgtctttcacgtcattatgccctctatcaaggtattggagcctcaccttagtaatcaaatgtgtattccttggcgtggaacacttattgatgatatgacacagttttttgttgcaccctttaaacgcttcctttaaacaatgcaaaaacggtggaggtgaatctttagtctcacccatccttattagatttgatgttttttcttcctcaagaattacacgttgttgtagttcacatagattagagtatatctcttttaattttctcctgttaaaagttcatttttatataataaatcttgaattagttttttttttcacaatcaaaaacaaaagaagacaaatagaaatttatatatccaaatagttcatatgatacacagaatgaatcttttcatatctgctttctttctttcttgatcaaagtttaaataaaaaaagagccaaaaataaatttatatatccaaatttctaaaacttacccgtgattacaggtttcctcttcatttttccaccttcgagttgatctcttatgtgcaccaccacctgccattcttgaagaccttcctctagttcttcttggagctctatccatatttctttttgaacagtgtttttacacagatttgtaatatatactgtatatatatatat

SEQ ID NO: 332461 - DNA, 948 bp, Cannabis indica
aaatttctataaggaaggggtaaagtaagatatgaacacaaaggtttttacgtggttttgtagttaaaattctgcatagcccacgagtgaatcttattagatttttgatacagctatcaagcctttttttatgatttttttgtcccttttctattgtaacttgtctctatttataattacatagtaaggcagttaattacatagttgattgatatcttacaacaattattccctgaaatcatggggtttgattacatatcacgtaaaataaatgtggttaatatttgaaaatcacacagctgtgataggtccgcttttaccgggtcaaggtaaacgtgtattaaatatgttgtaaaccataacgttttgggatatctcgctgggaacacggtaacaataaccttggtagcgagctggaacttttcccatgtctttctggggttaatgatgtaagtctcgtcattcctgcgcttgaagacataatgctctatctaaaaatcgcagttcttggtgacaaggtagactttagcagttaacatcatttgtatgtcagcttctatgtgagagagctgactcgacggagctgtgatccccattaaaaggtgtctggagctgattaatgaaggtaccatgagtgtgccttcctataacgagatgggtgcctcgctattagttgtttgcatttaaaaggtgtattatacactaagtgtattatacactaagtgtcttaccagtcaccatgcctcgtctcctaatgcgtagcgaggtttatgcctcaccttgtaaatctgaatttgtatggtttctcgttaatgtacgaatcgacagttggcatatctttatcttgcataaaaccttccagtcagcaagttgtaaatatactctgtcaattttacattaatgagttattccattttcaaatataattaccgttacattcatagattc

SEQ ID NO: 332462 - DNA, 811 bp, Cannabis indica
gactttgaagcatttgtccagatcatctatagtccccccaaccttcctagatttgacgagcatgtcatccacgtacacttcaatgtttcgtctgatctagtctttaaacatcttgtttgccaatctttggtatgtagctccagtgtttttgagaccaaatgggatgacttatagcaatacaaacccatatctgtctgaaaacttgtatgttcttggtctggtggatgcattttgatttgattgtaccctgaataggcgaccatgaagcttaatatttcatgccctacagttgcgtccacaagctgatttattcttggaagtggaaaataatcgttagggcacgccttgttgaggtcggtgaaattaacacaaactcaccatttcttattcggcttgggtaccagtccgggattagcaacccaagccgagtagaaagcttcgattatgaaattgttgttacgtagcttttctacctattcttttagagctaaggctcgctccttgtcgaacagtcttcatttttgttgaataggccagaaatttggattaatatttaggacatgtgaaattatagcaggatcaattccgaccatatcctcatgcgaccaggcaaaaatgtttaggtttgctctcagaaattttatcaatgctaatttacttcgagcaacaaaccttttccaatcttaagctttgtggttggaatatttgggtcgatttcaatctcttctagttctttcactagtccaacattattgtttggatccccaagtcaaggatccacatcttcatccccgccttgggtggttcccta

SEQ ID NO: 332463 - DNA, 519 bp, Cannabis indica
tcgatgccccctagtatcgcggagaactttccatcctcagttacccgtgaaactttggtcgcctccgtcatgaatctactgatgtatgcccggagaggctcgcctggtcgttgcttaacttcgaccaagtctcccaaatgcaatgggagttggcgtgaggaggagaattgtgcatggaattccgaagagaaggttttccatgaactaaactttcaaagagccaacttgaaataccactgcggagcgacttccgacagagtgggaaggaagattctgcagcatacatctcctcataccccttgcaaatccatttgcatttcgaagtacttgagatgggaaagggatcttctctcctggtgtacatcttctacgtcggcattttgaatttgtggggcagtgagaggacattgatctcaggtgagaaaggagttttgcgtgctcggtccagctcaagatcattgtttcttgtccagccatgccgtgaaacatatttttcagttcgtctagctgagcctgtac

SEQ ID NO: 332464 - DNA, 435 bp, Cannabis indica
aattgaaaaattaaaaagtaaaaacagttttaaagaacatgattttgaaaaatatttttatttttctaattttaaaaacaaaaaactgattaatttaacggactaaaaataaggttcaagcggtctgttacagtgtctcatattttatatgtgtgaaataaaatgtttgaacactattttctatattataaattatttctttaaaaactttacatgttgtcttaaaaaaatataacatacatactatcatctatcatctattatatatataaagggatattggcgctaaaccatctaaattttaaaattgttgacacttaactacaaaaattgaaatttcgacagcaaaacctactgaacccccattccattttgctctttccacttctgtcaaaaaatcttagttaagtgttacgtggacgagcccacgtgtac

SEQ ID NO: 332465 - DNA, 1247 bp, Cannabis indica
gcgtcgttatatgaaaaataactggcaattttttcttgatgaataaaatgggcaaacatgccttattacatcaaaagtgggcaactcgtacctttacattatcaaactttatttgtaggtatgacgaccaactatgaaaatacactttgtgggtacaccaacaagcctaagtcattactgaaaagcaacttacattggtagtacttttgtaggtgctttccgtttcaatggacattctatagtactaactttgtgttggtaccgtaacgtgctaacttgtatattccatatggaatgaccttaactactccgtactcaatggtaagtcatcttttggtgggatgataggttatcatacccataggcaaggacaaggggaatgttatacgtggctgaagattgtatcaattaggaggacacagtcattaacgatgatgatttatttggctttttgttgttaataaagatgtttctaccattatcgttgttggtcctctttccattgttaaagccatttttattgttgctcccctgaccctgggagccttggccagtagtgtttgctccattcttgtttcccttagcttggttaaggcctttggcatttcgctcagcctcttccaatttaataaattcatctgctctatcaaggaagtctttcatagaatgagttcacttcctccttctatctttccatagctgacctcccaccgtgatgccccccattatggcagctcacttactgtcgtcacttaggttctttaccttggtggcttcatgcatgaagcgttggatatagtcttttagcagctcattgggcttctgcttgatggcgaccaagtcactcaactctagtggtatctgtcgagctgaaaagaattgggtatagaataacccttcaaactcatcccaagaagtgattttccctgggggtagcttagtaaatcattgttgtgccgtgtccgtgagggttgcatgaaagattcgacacctgaggtcatccttgatcccttgaaggtccatttggattttgaagttctcaacatgagttaaaggatcttcactacccgtgtacttgcaagtgggcattttgaattttgctagaatggggagatcattgatcggttgggagaaggtagatcctctcctcctttccagctccaagtcaatgagttttggtgcagtaaggtccttgaccaatcgggttaactcgtccaaccgagcctggatcaccggatctgtggctg

SEQ ID NO: 332466 - DNA, 844 bp, Cannabis indica
gtttatttatgttttctgaagttaaaatatgtcaagttatgttgatttgagcatgttttggtaggtagtttgttgtttgagcaagctttgactttaaaactcaagcttggctctttaatggtgaaattcgattctaagtatgggtagttgttttatcacttggaaaatgtttattggggtgtattatgcaggtctggaaggtttgaattggtttggaatcgttttgattaggggttgaagctttttgagttttctggttttacaacgcttgtaaaaccggttacccggattttgtagcagggaaacccgaaaattcagcttgtcgtttctcgtctattttaggtttctagttggttgattccctgctagtttagggtattgccatattaagttgtagtagataagtgtttggtttaaaacctaagtcccggttgtgatttagcgagtcacttatgcgtgttgttatcgatgtgatttaggagcctataatttgtcgagcagttgttactcaggttgaccggcacacctgaattcgaaattgaggtaagattagtataatatcatgcatatgttattacatgtttagtgtacatgttgttattacctgttagattacattgatagcagtaatagtatacatagagttgtgttgattactgataaatgtatgttggctaaaatattgatcgatgttgtcacatcaatatggctagagtacgactagcatattgagtataggctggcataatggtcgatagtattgtcttacgaacgttctagactcagtaccgcgtgggacacggggattagggttatgatcgggtgtatgggcgccaggttataa

SEQ ID NO: 332467 - DNA, 581 bp, Cannabis indica
actcatggatgcttgcgagcatgactcgacggagttgtcgagagacgaaagtgtgcacgaggcacgcagtcgtgcgaaaaatgagcccattgttactcggatggtcggaaggcttaaaaggtgagcccgtgacagttggtattagagccaagttcatctcagtgggaggtgaacctggttggcctatcctagagaggatgtaggcatgttcagagatgctagaaagaccactaccacgtgcaattgtagaaaggtgcaacagaatgttttaaactcgttggcataggacaagtttaattggatagtccgtactgtatgcttggtacactaggccaagtttgcctgagtgacatcgtaagccgcaggaggcgcttttgttgaaaaggaagattgttggcatgggtgtgaaagtagtgcaaagaccgtcagattcttgtttgtcacgacagaggttcagagttgataactgagatggttaagattgggatagacatggaatgcttcagttgctacatggtgtgtcaagagggatgcacatggagaccaaggggcagatgtcgcaatcatcagaggatggttgt

SEQ ID NO: 332468 - DNA, 496 bp, Cannabis indica
atatttatatatatttcttctacttttttatatataatatatatagtgtatatatattgtatattatatttatttaatctctttgtttatttttgtattatattgtaatataattgtatataatattttaattttattctattgtaataatatctcagacatgcatgtgagtggagagttgcatattattgacttagttatcatgtgaaaattgtaacccctttctttttaggagaaattaatgaagatatatattattagaagaaattttttaaaagaaaggaaagtcttgggtcttcttttttcttggattgttttgtaaggatcgatcctcttttttctaatagcaatgcttttttctaaccatatcctcagctagctgaggtgagatctgaaccatgctagctacctgcccgggacccttcctgctcagggcgatcggccactacgtttggccgtttcccacgggtggatagagaatctcacagtcgtaatc

SEQ ID NO: 332469 - DNA, 533 bp, Cannabis indica
aaaagataaaaagttttgcactaaaaaaaatctaaatgatctcgattaccgctgatcgcattcaaattagatagtatgtgataactttgaataactatgagatttttcagatgtacagaatgatcgaattgctacccttatattttaagatcaacaattgcacaatataattgttatcccaaattttggattgtatgacacatgcaatcaaaattgtaacatgtagcaagacaggttatcataaaattataccttgtcgatacattaagattgtacagagaagtatttcccttaagggcaagttttcgtctggtcggtaaggagacaacaacttggtaaagaagcttgttgggtgcttatattgaagagtcgatatatgcttgatcaatatgtatgtatatatattgacaaagtaaactattttaaatttttatgatagtttattaattaaacttattattatgggaaactcttatacacctttgtttttttttttttaaattttattaatttttgtatacaataaaatataa

SEQ ID NO: 332470 - DNA, 700 bp, Cannabis indica
gaatttatacattaaatataatcatgaaataaatcatgtgtaccatgcaacataaaatgcaatttttgatctttatgaatttgtaaatatgattatattgaaatgggttttatttagggcacaaaacccaacaccttttaccacaccaatgcttccattgtcgcatgggaacttcatgcacaagtgtcaaatggtagtcactgcttcgaagttgactagggcgcaacgtcctagaacaacattgtaggcgatggggcagtccaccactatgtatgtgtaatatttgaatgcataggttgtgttgcttctagctacacccccattgaacgtagctgtgctgaatcttccccataggtgataaggaatctctattaaagccctgaagctggatgggcatggcaacaaattagcttcaactagttgaattgcctggaaggtagctgtaacgccctaacaattaggcacgctacccaaaaaatacttatgaaaccttaatcccctagacgagattactaatcaaaatagcgcagaatttaaacttttataataaacggaatgaaaataaaacttgtaataatttaaacttttaaacagttgggatcccaaaaatatttacaactttattacaagtctttgtctttcagccggcctaagcggcaaaatgaagtttcaaaatacatcactggtagacccttaaccc

SEQ ID NO: 332471 - DNA, 1208 bp, Cannabis indica
gcggtaatcaagcgttgctttaactttagaaaacttttctcacaccgatcaatctaaacaaacttcaagttctttcgggtcaactccgttaagggtacaacaatctttgagaaaccctcaacaaatcgacgataatacctagctaagcccaaaaagcttctgacttcagtagccgattttggtgttggccaatctcgaacagcttcaatcttggccggatccaccattatcccatctttatctactatgtgccccaagaaagagacacgagataaccagaattcacactttttgaatttagcatacagcttgtggtctcgtaatcgttgcaatacagatctaagatgcaactcatgttcctcttccgattcagaataaaccaagatgtcatcaataaacacgatcacacatctatccaggtaatccttgaatacccgattcataagatccatgaatgccgccggggcattggtgagtccaaaagacatcactagaaattcataatgtccataccgagtacggaaagcagttttcgggacatcttcctctcgaattctcagctgatgatagcctgagcgaagatcgatcttggagaagaccatcttccctttcagttgatcaaaaagatcatcaattcgaggtaaaggatatttgttcttgatggtaagcttattcaactctcggtaatcaatacacattcgcagagacccgtctttcttcttcacaaataataccggagcaccccaaggagagtaactcggcctaatgaatcccagattcagtaattcttgtagttgtatcttcaattcttttaattctgctggagccattcgatacggtgcctttgatactggttccgctcccggaaccaactcaattacaaattcaatctcccaggtagctggcgatcccggtaaatcttctgaaaagacatcaaggaactcgcacaccaatcttgtattctcaggtccagatgtcccaggttggctggtatccactgcagtgactatgaatcccagacaacctctgttcatcagatccttatctttcaaaagtgttattcttggtatacgtgtcccctgaactttacccacatacactgctgggttagcactatcgggctcaaacaccaccatcttccatttccagtcgatcgttgccccatacttggacagaaaatccattcccaggattatatcaaaatcaga

SEQ ID NO: 332472 - DNA, 681 bp, Cannabis indica
ggagtactttctttatttgattttatatgttgtgatcgtatttatgtgttagaactaattaagtttttcattagccttgtcttttgacatggttctttagtctttccgtttttctggttcgattcttattagttcttgttagtttttttgtttatgtggggcgctttggcatgagttgtgtagctcgaaatcatcatggtgctatggtagaaacattcaagaagggaaagattggttgtgttcaacccgaaattgcttggataataggcattaaagaagttttgagttggattgcaactcatttgtggaatagagttctgttagaaacagatagcttggtgtgtgtccaagcgattcagaacggtatttttatgccttcacaatttggtcttattgttcaatattggtatttttatgcctccacaatttagttttattgttcaagatgttcgaaatttgcttttggctttaacttttggtgatttgagttttgtaaaacgatctgcaaataagttggctcattacttggcaagagactcttatttctctacaggtcgtgtacttcagtaggaggactatttctctgaagtgtattctattgttttcaacaaatttattaataataaatcttatgatttttattcaaaaaaaatatttgtgaaaaggctaattaggattttt

SEQ ID NO: 332473 - DNA, 1027 bp, Cannabis indica
tggattgttttccttattaggaattcgatttctcgcttcaagttgtaacattcattagtgtcgtggtcgtagtctccgtggaaccgacaaaactttgtcatgtcccttttgttggcatctttcttcatgggcccgagctttttatacggggccagcgactgagttgcaatgtacacactttctatatctccagtcagaatagtaagggcagtgtatttgtcatggttctcccgtggagcttgttcggatttgccagtgaactttcctttcttcccattcccttgcttgtggttgttgctggaacgcttaccacttgagctcgaattacttggatggtggggaagttaggcagatgttccaataggaggagccttcgacttgccaggcttttgctcaccttccgctcgttgaatggcttctttgagcttgatgaagcctttggcacggtcaagaaaatcactaattcaatctaccggcctcgaggactttgatgccctccagtatcgcggataagtttccatccttagttaaccgtgaaactttggtcgcttctgtcatgaatctactgatgtatgcctggaggggagaattgtgcatggaattctgaaaagaaggttttccatgaactaaactttccaggagcaaactttccgacagagtggtggggaagattctgcagcatacatctccttgtacccctttcaaatccattttcatttcgatgcacttgagatgagaaaggggattgtaaagaccgcttagtttaatttggaaattagcagttaatcatgtttaattatggaaaattatttacagctatttaaataattattatgctgttattatttaattctgaaatgcattatatgtcatttagttattttcataattttgcatttccgatgcccggtaacatggaactcggggttggcccaagaaaaatcacaacttagtatgttagtattgttggacggtttattagatattgggaatttcgggattgcccgggaatttagaatttcccaaa

SEQ ID NO: 332474 - DNA, 562 bp, Cannabis indica
tttttttttatgaatcagtagtattttcattacaccaataaactaatttacaacctaagagcatcccaaacaagggacctcaaatattcgtatgtaatacacaatttgagtataactctacaaacttacaaggatctaaaccattccaaatcttgttgcccaactttcttacgcaaaatacaacatattctttgtttaccatttctttaactgtacagacaactctatctacattacctacttttgagttccatatttgatcattcctagtcttccaaacatggtagactaagcttgacaatgcagccgagagcacttgcttgctgaatttgttgctttcgcttctttcaatccatcagttgagtcttgtgatatccaaagtggatgcattccaccctaaccaatctttaattctttgaagaccctgccttgaaaacgagcaagagaaagaagagatgctcacaagtttcagcttgagtgttgcaaagcacaccattggctcatcaataattctgaacctgtgaaatctctcttttgtcctcaatcttccttgaattgcaat

SEQ ID NO: 332475 - DNA, 2370 bp, Cannabis indica
tcgattaggattctagccacaatattattggcaataggagtctccatgaccagggggtcatgatgaggaaaactcaatgtcttaatgtcctcttctgtgaatgtaataggctgatccatcatccggggcctttgagctgggagttgagtaacctctcaaagctcactgtgctttacgacccctgcgtaacgtttcagctccttccgggtagttcctctgatgtgaggtcctcctgagatcatggctactcttccgttgggtcttggtggcaggccaggaatttgttgggcatctccggggggagcaaccgaggccaatgttccgactacactccctggtgccccttgaggcaaagtttctgctgcctgaaccggatagaggtgaggcaaccggttcttgatccattcgtaaaggtgtcccaatcaaatcaagcttttgatctcgtccttgaggtttttgcattcattggtgctatgcccaatgtcattgtgatactcgcatcttttattgggatccctcctggagctttccctgtacagaggaggcggcctccggtagtgcgtatttttcctggtagcgaaatacacatgctcttgggagttcgttaactccgtgtactgggtatactggggagtgtaccccctaatctgccgcttattctccgtccggttgctgccttttgaggacctcttgctccaagagccctgagaaggacctgctaagcttgcaaccggagccgagtgcgacggggcttgtccactcatccctgggggatttccaaagtgagaagatgcaggggccaaggcctggccttgactatatccgggagtagcagaaaattgtatgccactcatcggtggagcggctgttggcaaggttcctgggagctgagctccgggtacatatcccgctatcctggtaggatagtatcccccataggccactatttgggcctcttctaggttgatgtatttttggaccctcttctggaagtcttgaaggttggaggctccttcttgttgtaactcgttccagaatggagtccctgtacggatgcctgcttgaagaagagcaagttgttgtccgtcatcgactttcttggtttttgaggcttcttccttgaacctctttatgaaattcttcaatgtctctgtaggcagctacttgatgttagtcaaggcgctgacctccagattaactttcctcgcggcgacaaactgtctccggaagctggtttgcagcttattccagcaatccacggatcctggctccagtttcttgaaccattcttccacggacccgcttaaagtaaccgggaagcacaaacacttggcgtcattgctgactctcatgactgtcatgactcggttgaaccgtgacaggtgatcgctagggtccgagttcccggtataagctgccatttcgggcatcttaaaatttttggggagctccgcttccaagatgtgcctggcacaaggctcccggtcttcacagtcagagttagagtcatcacctctttttctccgggagactcgggcaatgtcctttcagagtatggcaagttcagccatgattccttcgtttaacgttcccatagagactgcgggcacgtgtttcttttggtctagatgatttcggagatcaccgtgtttcccgttaatctgatgtctcagatcgatgggaggacatttatggccccttcttcctctccctttgggttcttggtgcacaaaaatgctctttcggtcctctcgatcttgagggccaagactccctttttggagtttgcccctctacggacctttccctttcgggaaatctgagcggacctttcgcggatcctacacccttttctttttcctaggagtggaagtagggtttttctactggttcccttcagagggataccttatagggctaggtcccctagacttttgcttttgggtacttggcgaggattctcctggtgtctctccaagtccaacagggatggctttatgatgcacgtggattcttgctgcctccatggctttttgcatggccagcatcaactcttgcatcttttggttttgttctttttgggatgcgattttagcttcatgatcagcagccttctgtgtcaagagtaccagctctgtgtagctgccttcgttgtaggcatcgtactcatcgaagtttccttcgtattcgtcatcgtagattccttctcccttctcagagcccacatttgctcttgaggccacatcctcattgtctaggttttgagcgtcttgaggaggacgaggttgacgtgtgttttgcgtctccactattgttgttttgtaatgttactgtgtaacaccctaactagcataggcgtattacgtgatt

SEQ ID NO: 332476 - DNA, 825 bp, Cannabis indica
atttgataattaattttaattagtaaataaatagtttttgcatttataagatagaaattgcaaaaagtggtatttgtgaaaaatagataaatgattgagaaaatggcaaaaatctagctagtgatgggcccacataagggtcggccattaggttctaattttgctattattttatcattttttattccaaataattcaatcctaaccctaagtgaattagtgtacaaagaaaaaaatggtctcataattcaactaatgactcttgacctagttttcatcttgtcagacaactcgagagtttgagacttcttcttcttcttcttttctcttctaattcgaaattcaatagtgttcttcaccattaaaattcagcctttagttattgagtgcatgcccacccatagcaacctcaatcatagtgtgtaagactatgaagaatccaaacaactgaaggagtttcgagctcagatcttaattatactctgcgatagaaaggatacaagggttatagatctgagcggaaggattcatttaatttcgctgcaaccaatgtaaggtttctcatactttatatgtgtttaattttcatcgttttagaagttcatatttaagatgttaaaaacatacttgttagtaaatttaggtcatcataaaatatattccaataactagcctcagagccaggttttcaagaaatatggattgaaaatgatttatgtgtgacttggatgtgattcatgttgatctatgtgtctattgatgattgtttgatgtttgcaattttttttacgtaaaataattagaagttcattctggaattatttt

SEQ ID NO: 332477 - DNA, 571 bp, Cannabis indica
attaagaaaatttataagaacagctgaaaaatattttatattaaaacaaaattttaattacacgttcagtaccaaaacgattttcttctatcttggttatctatatcagcatcttggttgtctagatcaccaactgggaataaaaattccttaggagtaaatttaaaattatgataatcattttcttcatatattgctacatcataaataggatcatcagaaaaatgatttgagtgataactgtcactcgtggacttatccaccgtctctggatttggaccaggcttcttagaatgctgtttcctcttacttttttttacccttaaagagactttgtagcattttattcactgctctccttagttcttttagtgttccttttttcttttcttctgttagtttttgtacatcgttaaaattaaattgagaatcatgtggtgatgaaaacctcatactttgcgttatacgtacatgatcaaataaataagttttttccatatctacttgatatatataaggccggtccggcataggtgggctaggcccgtgcctagggcccacactttttggg

SEQ ID NO: 332478 - DNA, 600 bp, Cannabis indica
ttggttgtattaaaaaaaaagttgtctaaaattaagctcagggtcctatttttactattttagaaaatatagggtccattttgtcatttaacaaaacacatggtccaatctgtaacttttgcaaaacacaggatccaaaatggtatttaccctttattttattatggaaaatcagtcttctttttttttttcttttcttttccaaaaggtaggtaggttataataggcacatgttgaaagttgaaaccaacgtgttatgtttgggtaaaagagaagtgttaccgtcaattctttatcacaactttttagtgaatctccatacccgataacacatattaaagtatttttttaattttcttttttatgaaagtgtatgaagaattctgtaatcaatcactgaggggttgattggtttgtgattcaaaaattgtattttttaaaaatgtgttttggaaacaaaaatttaaattttgtaagtgaaaagttgtttttaaaaatgtgattgattgtagtgtgatttagagcatgtttggtattgttttttgttttttgtttttaaaaattattttagaaatgagaacaaaaaatagtttttgaagt

SEQ ID NO: 332479 - DNA, 2056 bp, Cannabis indica
tcatgatcagatcaggaagaactccgcgctgcggtaaatctcacgttcgaggaacaaagatgcatgtttgccgagtggagagacaaaaagatataagccttaagggcttatcacatagattttgaaaattgtagtgggcaagctactgtgctgatacgaaaagcctaccaaacagtcggacagcaacccacaagtttcatccccttgggtgagacggacaaagatccaacgatgaatacttcccacactataaatggtcagccgccaaatccctagtcacaagttctgcttgtgggcctagcgataggcgggcagaccttgtctagtaattcatcaggagaagtcatacctgatagttctaaccaggctaacggtgacattccacctgtcaaccaagcaaatcaatcactgagatagccaggtgcttctgtgtttgataagttggggacgactcatgacctaaggagcgatctgaacagaaggagaggagtagacgatcaaattgtcacagcgatcagacagcccagagtccgtgctcaaattccctctcagaaagatactgatgtgattcaaatcgactagaatgccgagcaggttagtccagctgtgtaggcacagctagacaaactaaaaaatatgttccaaggcatggacggacagagaaacaatgatctcaagctggactgagcacgtggaactcccttctctcccgagatcaatatcttggcattgccccacaagtttaaaatgccaacatggaaaatgtacaccggaagagaagatcctctttcccacctgaagtattttgagaggcaaatggatttgcaggggatacgaggggatatgtgttgcaaaatctttcctgctaccctttcggaagccacccaggaatggtattttaagttggcccctggaaagttcaactcattgaaagccttctcttccaaattccatgcacaattctcctcctctcgccaactttcgttgcatctacgagacctggtcgaagtcaagcaaagaccaggtgagcctctccgagcatacatcagcatattcatgacggaggcgacataaggaagaacggcctggtagactgaagatggaaagttgtcagcaatactggggggcattgaagtcctcggtaaactttggaaggacataaggaagaacggctcggtagactcaatgagtgatttttttgaccgtgcttaaggcttcatagagcttgaagaagctactcaacgagcggaaggtgagcaaaagcctggcatgacaaaagctccttccactgaatgtccatccaactcccccattactgaaataattcaagctcaaatggtacacgttccaccaacaacaacaggtaagggaatgggaagaagggaaagttcaccaacaaaaccaagcaagctccccgagagaattaagcaaagtacactacatttaccatcttgactaaagacatagaaaatatttacatggccactcactcgctagccccgtgtaagaagcccgcgcccatgaagaaagatgttaccaagagagacatgacaaagttttgtcgattccacagaaactacggccacgacactaacgaatgcaacaattcgaagcgggaaattgaattcctgataaggaaaaaaaatccacacttacagaagtatgtcaagaccgattagagtcagaggaatgacaataactaagacttgctacctccataggtagacgcacatctacaagtcattgttggaggcccacacatagctggagattcaggcaaagctcgagagttgtatgcccaaacggcgtagcacgagcaagaggaagttatcatggccgtagaagaaaggaagcccaaaattccacgagcaggagggcctaccataaccttcaatgacaaagatgctttcaaaatcagatttccacacaacgactcgttggtcgtagaggtccagatagctaataagatggtggccagaaccatgattgataacgaagcctcttccaatatcttgttcaaaactgcttatgaaaagatgggactctagctcaagga

SEQ ID NO: 332480 - DNA, 563 bp, Cannabis indica
tcatggtgcagtaagtattgagagtaaatacttgactgtatgtgtgatcatctggttactgctttccattttaggcagtatgcaagcatctagagtatgtatgtgttatgtgatgccatgctataaatgctaattgtttatgtaaataatatgaggtaaatagatgagttagggtttaaggcattaagtgcttaagtgtggtattggtgcttaattcgctggggttgttgattacacgggtactagtagtggaccttctttaatcatctagaccacagggcgagttagtagagcttggtgtagaccaaaccaattcaccgcactgcccccacctccgcggaatccggggaattaatgcggaggttggcaatgctaatcctcctgctgaatggcagcagatgtttcaagaaatgcgaagtgtcatacttcgtcaagaagaagagttgcgacgattaaggtaaccggctgcccctgttgatcaagtattaccaccagcacctgtgccagtggtgggtaaccaggggtttgttatgccgcattgagactcgatgtttgagcggttc

SEQ ID NO: 332481 - DNA, 1152 bp, Cannabis indica
tccccttatagatcatgggactagtgactgtcacaagggataatgactgtaatcatgttttggtcaactttgtaattatctgccactatgcaattataaatagtggccaacaatctcaaaaaaaggaagaaaaaactcttacgcaagaggccctgaaaaaatactcaaaaattttaataagattgacttgtggactatgcagaatttaaactgcaaaaccacgtaaaaaccccggtgttcatattttatttttatatagcttttatattttctgtgttaaatcataatcaagtggctcaaatttagttaacgaaaatatgcgttaacatatatcatagtagattgcatatgaaatttaataataatcatcaatattcaatatatctatctatatatataaaggagaaatataaggcggtgacgtggcggtctaaaaaatactttaaagtcatttttttctctccttaattctctctcttttttaatttttaattctcttctcttttaattttttttatttatttttaattctatttacaaacatttaaatatattgagttgaatattcaatcttagttcgatattttatttcttctttacaaatgttaaaaaatatggcataacaattagctaatgattttcataattcaagataactaacgagaaaactactaattattaatactaagttgccatgatcattcaatatggaggtggtcactcgggttgtacttcataatttttcatggtgtaaattttgttaaagcctttttgtgccaacctctctaataagcctaaagactgatgaaactgagtttggtgtggttgatgactctccaacaaaggtataaaagaactttaattttattttattttttataataaaaaattcttataatttaaagttttaaaaacagaattttagtaaatttgaaatatatattacgtcatatatttattagactcttcactatttatatgagggaaatttcattatttagctctaataaaacacatatcaaattttataccccttatcaatttgtacaaaacaattctacttttttcaaattctacccaaaataccccttacatttaattttcctgctctctctttccctctccctctctctgtctttccatttctctctc

SEQ ID NO: 332482 - DNA, 635 bp, Cannabis indica
ttttgggaatagaattacgcttgctttctttggtttcaggtttgacacttagaatatatcagctgatcaaatttcggaaaacaacaatctatagaatagagaaaattttgcaagaaaataaagctgaaacttaaggccttaatttgactatgttctgatcatattttggaaaaagtcaaaacatagaagttttagatttcttttcttctttccaacgcatcttgaatcaactcatttagagtttgtatgtcaaagttatgcatattttactgaaagatgtggaagctgtcaatttgctttagtagtcgccaccaccattttccatggtcgcgaccctttttcatggtcgcgactatggagtaggcaaagagcttgatttttgtgttttgcttatggtcgcgactaagctttatgtagtcccgactatgggcaaaacacgggaattttgggcaatttttgactttcaccattctgatgtagcaaccctaatttctatttaaggggctcatgttttagaacgaaaggaggcagaaatttgaccaaaacataaaagaaggaggtagagaaagcaattgtggcgatctggagcacaatcaccaactagttctttcttaaactcttgatttctatgttaa

SEQ ID NO: 332483 - DNA, 651 bp, Cannabis indica
tttaaaatagatttggttagataattattattttaggaataaaataataaataaataataattaccataattatatgtcaaaatatctaaaattaagcaatattttaaatcctaccataattggaaatatttcaaaaaagggaaatatttaaaattggaaatatttcaaattggaaaaatttaaatttggaaaatataaaattggaaatatctaattttgggaaacaatcccataaaaaattggatttttggggaaaaacccacaaaaatcggcttgggaggctggctgccaggaggctgcacgtccagcccaggaaggctgcacgcagcctcgggcgcgcgcggacgaggagctttgcagggtcaggcgccgagttttctcggctggtgcaacatccgtgtgcggcattcttcagcgtcatgcaggatcgtctgggcggatggcagggtgcgtgaccaagcctcacgcgcgcggatgggcttccagtctgagtgcctggtgctcacgagcacccactcgacaacctgaatcctgattttccaaaatttataactttttcaatttttatcgaaatcgagttctgtaacaaaattgcttaattttcacaaggaatccaaataaatattttcaaaaattgaaaaaatattttt

SEQ ID NO: 332484 - DNA, 1776 bp, Cannabis indica
acaagatggtaattacagaaaaacgctaagtttttaggaaaaataattcaaaatatatgtaataaaaaaaatttaaatcggctaatttttaccatagataatgatctaatagtcaaaattaacttctgagattgatagtcaattttttgagcccgggacacagcgttgggacccgctctgggtaagccaatgcttattttcataactcctttaaggataaaatgtgaggtcgataactttataattgcgattgaagtgttagacatgaattgatagagcattgaaatagcttcaaaatggaatttgaatcacgttaatcgaatcaatattgagtgagttatggctgtgtttactgaaggatgttctaggcgcaacacccaggttgacatcctagcacccaggttgacatccagtgcctaggttgacatatgacgtcaacctggatgctgggtgagtgtgagaacatcttggagatgtattttttgatgcctaagtgatattttgacatcacttagtccatttctgtgttctggcaaagttggtcactagttttcggagatgttgctgttctgtagaaatgaaagactcaaaactctttattttcgagtggtcatcccatgttggaattgagaaatgcaaagttataaatttgacttttttgacttcatgaccctaatttattgcgaaaaactagatggatgatcgagacggaatcataatcggataagcagaacccaacgcactaggtcgtttgtcaacttgggcgttgggtacttattttggagcttctaagatgttgttttgaaacttccaaggttctagaacttgacgatgaggttaattaccccatttttaccattttggagagaataatcggatcaaatttggcatttgaatgatcaaaactagagcaccaagttgattgtcaacctgagcattgggctcagctttgaggccttcaagtttgtggttttctccctgagtttccttgaatcttcattatttctaatgacggaaaaaaatttatgaaacactttttcgagaaactgattggaactagcccaagttgacatcaacttgggcgttgggcccagtgccaggtgtcaacctgggcactgggtcctagttttgtcctcctaaaagttccgtttggtctaaagtaatcttaatctttgttgaaaaagaagaatatgcctggaagagttctcagaaaacttcctcaaaattggactaggtggacaaaatataccctcggcactaggccagccccaggtgtcaacctgggcgctgggccttccttttagcacccaagaagtgctgtttcttccttgaaaatacctatttccctatttttgatgaatacaaagaagatgcaaaagtcagattgccgatttgatactgagaattcacctcgacctgggcagtagatgctcaaaaatgaactttcttcgaatataattttgatgcctcaaatatgtcagtagtatgtctagttcatgtcccaatgtagatgcagatggtgcctttatttcctagtcaatggtcgagtcactaccacccctaccataaccagaggtacgaggagtaggggctccaccaacaacctgagtctctcgggactcctggctgcactcaactgcgcccttagcttgcagtgcctttctcaccatatcagcatgtatggtgctatcactagtggtaatcatcaggtcatgtttaagtaggctcaatccatctaggtacttttctttcttgctaaagtcggttggcacaatt

SEQ ID NO: 332485 - DNA, 876 bp, Cannabis indica
tgtaatattattacttttttttgttaaaactgaaaaaatcccaaaaaaaatacacccatatatgtatgtatatatacataaaaattccatatatatatcgtaattttactacataggatccttagtttgtatctcatggtataaggtaattttcttaaccaataaaattaaagtcaaataaaaattacatggtaatggtatgctagtatgtatatatacaagtaattttttttattaaaaagcggtgcctttgttaaaaaaaaaaagctagaaaaggattattttatatatggcgtgtatatatatttattctatataaagtgtgcctatataactaaattcttgatttatgagaaattcatgggtgaatttttatttatattaaaaataaaatgatttattattaaaaataaaatagtttatgagaaattcatggtcacttcttatttatatatataataaaataaatctcgttaaatctaaaaaaatacaattgggtttttcctattgtacatctacgatttttctcttcttcttctcttcttctcttttagaattactatcttcctataaacatactcattaaaagaaaaagttatattttagtatatacagtataattaagaagccataaaatttataatttcgtcttctgttaaataaaaataaaagcaacttaaagcattattataattatgctgctttgtacatgctccgacaaaaaggaataccaatcttattaatttctccacgttctatctattaatgcaaactagaaaaagaaaaatatttactaaaacctaccaaaacttagcataattaaacttgaggtattagatgcaaaaataaataaatcagagagtacattacaacatt

SEQ ID NO: 332486 - DNA, 637 bp, Cannabis indica
tttaattgtgaagtgaacaaggcttgcttaggtgcccccggctggctcctcggtttcctggcacgtgctttgggcgcgtgatggcgcatttaatgatcaccattactgcagcgattcactttttgcaggcgtcgattcgtttcttgtccattaattgatacgacgcattaatgggtgtcagacggacactcaagcgtttccaccgtctcaatgatgatccaatccaactgttggatcttgggaattcgaatcgtgtgcctccccaaccgtttgattggtagctgatcacagctgtttcacatgtgtttggcctataaaagccacccttctcacttcatttggttactttcagaatttcaccaaattttcttaagttttcaagagagaaaaagaaaccctcgaacagaaaccctcatacaccatagatttttcacttcttttccttcgtcgctgccaatcaactttttaccgtcgatcaacaccaacgcccagttctcaagcttcatgtaagttcttcgcattttgtactttagtttattgtttgtgtacatcgcatgctttactattcatctgctttttctgggtttgatgtttgagttttctgggaatttctgtttcgagtttctgtgtaacacgt

SEQ ID NO: 332487 - DNA, 871 bp, Cannabis indica
ttgtagctctgcccctttttgacgactttctgatggtatcgtgtactattttgacaaacggttgtcatggtgtgatctactcgacaaggtggtcattttgatacatgctacacctatttttcgcgacgattccagtacatcgattttttccgccaccgatagttaatttgcaccgcttaggtgaagtttcagaactccaaactttaaatatagttatattatatgttgttggactcgttttgaatgtagaatgcaatgatgataattatttagccatttgatggtatatgtgagagtaatatctaagattggaataaacaattggagctcgagacttgagagcttaagatcgtcttttggacaaagtttaacgacttgggagtggcagggacttaacttgatttttatatgggttgaataacattagacatattcgaatttttatgatttgcaaattgtttgaaaagttgaaaacttaatttggatatttttctagactgttctagggcacagagtgccaaatatatttttgtacaaacatttatgcaggttatgatttttgagtttattcaaaatacagccgttgtgctgtcgaattttctagaaaataaaaaggaatatgttcttttgttattcttattatttgcctgctttggttatactgatgagagccatgttgatcatgttcggtgcatattaattgttttttcacgacctagtctttgtgtcatcataggtagattgggtgtgtactcatctgtaagacctaaaatctttacaaggagtgaattgaatctgagcctcggtattaaggtggttatcaggtgcgactacccgattttggatgacgttttctatgattggtattgag

SEQ ID NO: 332488 - DNA, 787 bp, Cannabis indica
agttcaaagatcattaagttgattttttgaattgtatccaaacttacttccccaaaaattttatttgcatattgatgatagtataaggtctatgattagttactaacagttgcctaagtccttctagggaaataccctagtgataagaaaatttcagaatgataaaatggttgtgtacttagtgtaaactgttactagattcatggatgacctaatcgtgatcttaagaaaagctaaaactattaagcaaggtttgcatgtttgatagctattataagtgattagaggtggaccaccaaaagtcattaaaataagaaagtgttcgtttcaacaaataccacttttctaagaaaatgactaagtctgaaaacaaagtagtaaagtaaaggagatatttttttcttgattccaaaagtgttctatcatcttattcgatataagatggtcccactgcctctattgtctagacacaaacgaagaggataataccacttatgttcttagacaaaagtcacggtaccttatcgtagtaatgaattgttatgacttggaagacacttgtgaggaaatccattgttagtttaaacaagtaatgaattgttagaataagaaattgtgtagcaaagtgaagagaactatggttaaatccattcatatggaacaaccaaaacttttctattacaaggacaagaaaggaaatttcgttagtaagtctattcaatggacttaacaaaacttctggttcctagtattaaaggtttgagtttatctaaacctatggcttgtg

SEQ ID NO: 332489 - DNA, 720 bp, Cannabis indica
aaaatatttagcctttaaaagcttagcaagaagtgaattaggcagtgtgaaaaccctccaagcttgttttgcaagtaaggcctgattatgacacacaaaagacctaaaacccattccccccgaaaatttggattgacagagtttatcccaagacttccaatgaactttcccttgattcccgaaagaaccccaccaaaattgggccataagtcgttcaattttttttacaaaccgtaacagggatcctgaaacaagacattgcatatgagggaatagcttggataactcctttaagaagaacttccttaccagctcttgaaaatagtttattagtccaagtactcaatttagaactggctttttgcaaaaagaaattgaaatgttcttttttagaccgaccaaaacactgaggaatgcctaagtatttactaatgaaaggcttattttcaagacctaaagtatgacggaaaaactcagcctccaaagcactaggggaaaaaagaacagaggacttagtaaaattaacaagctgacccgtagcttggtggtacaaatcaagagcagccttaatagcaagacaagatcgagcagtggtagtagaaaatagaaggctatcgtcagcaaaaagaggatgagatataggaggagcagaacaacaaattgaaattccctggaaagaattatcatgctcctgcagtctaatagcagcagataaagctt

SEQ ID NO: 332490 - DNA, 764 bp, Cannabis indica
aattctgggtccgccactgctcttgatggagtgttcaagcatagtgctccctagctttgatagtctcgcctacaatgtggggtccatcaataatggcccctagatgtcctgcaactggtggtggcattgaatctccaacttgggcaccttatgcttgagtttggtggttctacacataacgatgcaggtggggattattacgccttatgaggaattcaatctccctcttcaaattttgacactcattggtgttatgtctgaagtcattgtggtaccggaaaaactttgacatgtccctcttactaatctcccttttaataggaaagggctttcggtaggggactgttccctaagtggccataaagatggcctcaaggttctccgtcagaagggtgaagtaggtatacttttccaccttgttcttttgtgtcatgggggaagtgttaaactccacttttttgccactgttcctcctagagatgttggcgttgtgcttatatctagtgttcttgccattggaggtctgggcagagttggttgtgtctacctgggcatctagtaggtcatcagactgtacgatgtctcatgatggcatgttgttgacgtgccctgcctgggtctgtcgtatggcttctttgagtttgataaagccatcatctctattaaggaacttcttcgtgttgttggttgagattcatcagatgtctttctagaagtcactcaatggaagtatgccccccggtatggccgtatatcgaccttct

SEQ ID NO: 332491 - DNA, 1562 bp, Cannabis indica
tattccgaccaaacactcatcttgtgtgttgtcttttgtagatgaactcaggtgagttttggtagaacggacatcgggttgaccaggacctacttcaacttttgcacgaagatcatcctcatcttcgttgtagcccactttcctctagtgaaggacattctccaaaccttgtatccagccatagaatgatggctcgtacaaagaaaacaacgcgtctggctgacgcacctgatcctcgagtggctcggcacgccactttgcccagcgccgaacaagagccagccgtccagatggagggggatcatgaaggggacgctgaggtccagcagatggaggagcaggacgatgtacgtcctggaagttcctccgaggcagaggaagaggcaaaggttgaacccccaaatttcggggagtacaacgaggctggggagccagtcgatgctgacaaagacgtcctggttgagggcgtggattacgtcagtgaggaatttgctgctgcagttcctcatagaaggcaaggtgcattgggcgccaggttggtaagccctccgtccaaggttacttaggtgcgccttcaaagtctcgaccagggccaactggattgctacattcccgcccacaacaatcgtgccataaaccctgaaagggggatgtgcacctggtccggtgcccatggttagcaaggggcattgatgcctttgcatcaatacttcaagaatgtggcgaacttcttcggcctctgcccggcccagttcactcctaagggcattaaatatctgtctgccctcttcagcctctacgcttcccaggagtagggtacaccttctcctcacaaagttacctggtttttcgatttaaagtccacccctaagaaaggcacgtcggggtacttctatttctctcaaccaggcttcaagtggttgacgagcacggacgactcgaccatcagcaagattgggcattttactgatgagtacgtcatggtggatggcacgggcatgactcgcactcggttccagcagattctgacacatcaacgccctcccctcactcttgctcttagggataaagcttaaaagcttgctcgactgccgggggaagactggaatactatccagttaacctccgaggataactttgtgaagtacgggttctatcccaaggacttcgttcctaagtccgtgacggggaagaagaggaaatctggtgttggacggaccgaacgagctcattcggagaaagaaatcattaaacttaagcacaaagctaagttgaagggaggtgcaagggccaagcagtatgctcagtaacctttgaatcttgaagatgaggctggggaagagcaggtgactccacccaagaagaagaagaaactttcggccccgcccaggcctgttgaacatgccattcgtattagggagcccatttcacctgcttggccatctcctcccatgttcggtaaagggaaagctgttatgtctgaagtgagagcaatgtctggtgatgatggactttcgagtcttgtttgggaagtcaccttgcatactactttgtcttgtttt

SEQ ID NO: 332492 - DNA, 1030 bp, Cannabis indica
tgcgccaattgttgcctttatggtgaaacttttgaaaagtttccactgtagttggtagttttcctgtgtcggggttagcctatttttaagagaaaatatattactattgttattttactagaaaaaattaaatcaatgataatgaaatgtataaacttaccccctcgacaacatgtgaaacaataggcttcgagctccagcctccttgaagtttcatcttacctagactttctttattttttgctgctctcgcctaaaattaataatttttctaacaattaattatttattattgactatataaattaaacattactaaattagaaattttcaaaaatgtaccttttgtttgtctgtgctccgataagcgatgcagtcactcctcacctcttgagttactccgtcaagaggtaacatgttggccctctcctgtccaagctcctgaatgttttgtatccactttttcttacagtctgccctccagtcacgtaaaccctttgacatcacgtactcaccgtagtctatgaatgtagggttatctcgtgggaggacaaacttggtctgcaaaaagttacacattaatacattaattacaatttaataagaatatagtaatttaaaaattaaaaaaattattacaacatacctcaagtctatcccagagtgcattgatgtcagctctactgacatcttcccatttgaatttattgatggggatagacatccgagtcatccatttagccatgttgttgaatttttttccgtttttgccgacgggggtgccagtctctgcatgcaactcaatctgtaacttggcagattgtgttttggagagctcctcttcaacattcttgcctttgtatttacctctgacccctttctttttcgaactgctgccacctggtgtagacatactacatatacaacacatattttttatttaaaataaacaaacatattcaaaacatattaaagaagaagggttgtaatttttattttatttaaaacactatttcaattacaattcatc

SEQ ID NO: 332493 - DNA, 311 bp, Cannabis indica
gtgggttaggatccctccttatgcgcggagtgaacctactcagctcttccttcaacgggccaagaccttcgccacatatgacaagaaggcccttgacgtcggggggttggtcacgacggagaactgccggaaggccaagctaatcctggggcaccagtcggtggatgactccaacctttccaaggtcatctgcccgaacgtaagagttccggccgcggagaaggtactccgggaggacatcatcgccacggcggaagataagtaccagacgtacctcttccaaaaggcccaggagcaggcttacactaagg

SEQ ID NO: 332494 - DNA, 648 bp, Cannabis indica
tagcaatttctgttgtgccaaaaatgatcagatttttctcctccatatcctgtaatcaccagaaccatcgaatctgtcaatatctaatttgatattactcattttaatgaaatctaaattaacaaagtgttgagttagagagttttcaattggatcattcaaaggaatatccacaaaatcctgaagtgcataatcttcttgctgtggatcaagttcttccagctttgaacagctttcttgatcttcttatgttgactttctttagcaataaaccttgctctgataccactgttgggaattgacagtcttatccctacacaaagtcaactcacacacacaaaacacaaggtcaatcttgaccttttacacctcagcaagtggacacaaaatgtccacgtatcacatgcaaatttgacacattacatttgcttaaaacattcaactttaccaaaacagtaggcagagaaaattgttcaggttttcttagcttagtttctagggttagtttcaaagatgagcatgcaatgttcaattgatttagtactgattatgaagaaaagaaaataaagaagaagagaagcaaacacaaagaatttatagaggttcccttgagttgatggggtactcctcttgagctcgcctcagaaa

SEQ ID NO: 332495 - DNA, 628 bp, Cannabis indica
aagcttggtggtgacacttttgtttggccatttggggtgctagaaaggagttggtttggcaacaaaaattggtgcaagcttcaactataattgcttctgcgaaaggttatcttgatcaatgttggaatgctcaaaactctcaaattgagacatcatggtatggtattcaaatgaatgatggggcgaagcattggataaggccacaaacaaatagtatgaagatcgcaacgcttttttaagatcaaaactattttcatgtggtaacggttttaaatcatcgggtataagggcccaataaaaaaattattacctacttctcaccacatttctcacgtgcccacctacttattttctattttgcacatgtccacctatttcttctcatccatttcttttcctttttccacaccttaaaacaaaaatcttaactctctgaaacctcacccatgcctctgcaccatcgccctcctctctcgccgtcttcctccgtctctcgatctccctttcttctcatctctctggtccatcgtgttgggctttgtgccctaaataaaactctatttcaatgtaatcttttttattcaattatcaataaagaaacaaatttaatttcattacttgtttaatg

SEQ ID NO: 332496 - DNA, 522 bp, Cannabis indica
tttttctgattttatttacagaaaatacaatctttttatgttgtactcttgttaatttgttgttgattttttgttatccgtatgttattttttgttattattttgatgttatttaaatattattttcatattacttttatgtagcttttttgttgtttttatggaaaactgtaaaaatgtaaaaaaattctttaaatgtaaaaatgtaatttttttacaaaaaatagtagcttatgtaattatcactttattaaaacttaagttaattagataatttttttattgagttagtctatagcagaattatgaaaacaattccaatccaactaacattaattatgtaactaaggatctaaggagaaagacgataatattacaattaaagcaatcgttatacataaaagtatgtaatacactactacaaaaataatatttggcaacacgcatatagtaacacttcataaaaaaatgctattattttatataaatttttaataagaaacacttgagaaagaagtgttg

SEQ ID NO: 332497 - DNA, 586 bp, Cannabis indica
cgagctcaaagagagagaaagagagagagggagacggacgggaggtagtggtagtctgacgtatgaaacagagatgagagggacaccgacgagaagtggtggtggtccgacgtatgcgacggagagtagagggagatcgatgggaggaggggtgggtggagatcgatgaacgagagagacaagaagaaagagaaatcaagagagagggaggaagacgtcgagagaggagggcaatggtgtggaggcatgggtggggttttggagagttaagatttttgttttagggtgtgaaatggagaagaaataagtggacatgtgagaaatagaataaagtaggtgggcacgagggaaatgtaacgagaagtaggtgacgattttttaatggacccttataggcgaaaaccgtcgcctatactatacctgatggttttaaaccgtcgggtataaacgtccattaaaaaatcgcattttattaaaaaacgttgtctattttgtttactacgattttaaaccgtcgggaatactaaatttttcccgacagttttaaatagttacttaatttttttagcgacgatcccctaaaaaa

SEQ ID NO: 332498 - DNA, 713 bp, Cannabis indica
ggaggcaaaaaggggacaacttggattccgattgcgaggaccaagagctgtgtgcccggcacatattggaagcagagctccccaaaaactttaagatgcccaaaatggcagcatataccggagactcggaccccagcgattatttatctcgcttcaaccgggtaatgatggttatgagggttagcaatgatgccaaatgcatatgcttcccactaacattaagcggctccgcagaggaatggttcaaaaagttggagccatgatccgtggactgctggaacgagttgcaagtcagtttcaggagacaatttgtcgtggcgagaaagattaatctcaaagtcagtgccctgactaacataaagcaactacccacaaaaaccttgaagaactttataaggaggttcaaagaggaggcctccaagaccaagaaagtagacgacggtcaacagcttgcacttcttcaagctgggatccgtacgggaatcccattctggaatgaactacaataggaaggagcagctaatctccaagatttctagaagagcgtccaaaaatacatcaacttggaagaggcccacatagtggcctatggaggatactatccaaccggagtgtcaggatacgtacccgaaaatcatgcgcgcgcggaaatcatgctgatttcccaaaccgccgagaattctcgcccatgctccccacctgcgcgcgcggac

SEQ ID NO: 332499 - DNA, 1337 bp, Cannabis indica
atgctatgtctgttttcttgctaccggtggaaacttgtaataagttagagggtatgatgagtaaatattggtggagttcgggatctaatcaaaaccgtggggtaagttgggtgagttggaggaagttatgccgccataagcatcatggggggctcggcttccgagatctaagggatttcaacttagccatgttgggaaaacaagcttggaggttaattacaaatgagctttctcttgttagtcgggtttataaggccagatattatcctcagggttcttttctgagtgcttctcttggaccgaatcctagcttcatatggaagagtatttttgaaacgcaagctttgattaaagagggagcccgtcgggtggttggtccaggtacgcacattagtgttcaatttgatccgtggctcgctgatgactcgcaaccgtggattacttcttttgctaatggtatggagacatggacggttaataatctcatggtggtaggagaacgggcttgggatctagaggttgtctcggatattttcaatgatcgcgataaggagattatacttagaaccaacattgatcaggagactcccatagacacttggtattggcataaggatcttcatggattctatactgtgagggaggcatatcggctgttgcaccattcggagatcactaatactagtgattttgagattaagatatggaagattgcatggaagcttcatgtcccccccaaagtgcaccaactcatgtggcgtgctttatctggctgtttggctactaaggttcaacttactaccaaacatattcctctacaccaaatctgtcctatgtgtaaccaggcgcctgagactattttccatttgttggtgcaatgctcttttgcaaggtcttgttggcatctttcggttataaattggagtcacacgcctatggagtctttttgggattggtttagccacattctgttacatcactcaaccacggcccaggaagaattgctcatggttctttgggccatttggtttgcccgaaatgaggtggtttggcgggacaaatcaatgtcagcagcggaggttattctattggcaagagtagtccttaatcaatggagaagtgctcaacaaaggagaatggatcattacttgttcctacgggttcaagaatggacttagagcattgggtaaaaccggttatgggaaagattaaggttaatgtcgatggggcaatctttgcaagtgatagtcgatttggagcggcaggggtggcccgggatcatcagggtcgattccttgaaggctttacggttttgcgagaggggtgtgtggattcgg

SEQ ID NO: 332500 - DNA, 607 bp, Cannabis indica
tggatgatgataggtggttgaattagggcttcaaggacagaggagggagtgagagaagagaagaaatgcaaacagagagaggtagaagagagaggggcggctgagagagttagacaaattgttagggtttcgtttattaaatgatttttattgtttgagcttttaaaaaatatatattttatttgttgaaaattttctcaaaagtctgatacaaattttttaattaaaataaaatggtatggtgacacgctatgcgtgttagcaaacgtgtttaccaacgcgtttgtcgcgtcactaaagccacgtctttagtgacgcgcaaaacgcgttggtaaacatgtttgctcacacgcgtggcacgtctctataggccatagtttttttatttttataaaattataaattttgagttttagtatttagtgacactccatatttttagtgactcacagttcgcgtaataaacactgaacatttagagtctaatgttgtgtgtcactaaaaactacttttaattttttagtgacacacacttttatgcgtgtcactgtatagtgtcactaaaagtctagtttgtagtagtggtaaatcgtgatctctttacatc

SEQ ID NO: 332501 - DNA, 796 bp, Cannabis indica
atgtaaggcacaaaacccaacatactcccactcccactaatataaaataaaaagtgcatttcaaataatctcaacaacttgatatccagatcaagtttagtatgtagtattctcttcgtaataggatctgacaagttgtattcaatacaaactttcctccactattacatatccttaatcaaaaaatccttaaaattgtgaaattcctctctatatgtctactcctctagggatactagattctttactttttagaaactacttttgtgtttgtcaggaagtaatactagtagttaataaattgttagtacgatgccaaaaactgtatagaacttttcacaggctgaataagtatcttttcgacaactttaacattcagtctcactggtagagttagagactcagataagtttttacacttctccaaaattactactccaccccaagagtaatcaccatctcatcagtagactttctagcacaaacgcaagtctagaaatatgatttggtgaagtctaagagtgttaaataccacccttatcaactaacatatagttcctattcttgatcttatgactcatttgattgtcttccaatgttcctttcctaaattaatctaatacctactaattactcccactcaacagcaggtgtctggtctaatgcataacaaagcatatttgagacctctcactgttgatcctaagaaattcttttccttggcctttatcttttctcgaatagatgacattttttcttagataaattaaatctatgtctagaagtcgagaagctt

SEQ ID NO: 332502 - DNA, 589 bp, Cannabis indica
tcccataattgagagagataactttaaaaagtgaaggactagtctagtagttatgatgatgattaagtaattttgaatggagtgagaaccattaaatggttttattttttgtgtggtgtgtagcctctggtgggaagatatggccaaattaaggctcaaccaaaagggtcttaattagtatggtctttgtccctattagcagcaaaaagaaaatgttgtaataattgtctaatgttatcttcataatgcagcctggagtagggccctaatcaaataattgctgaaagtagtcatgatttgattttctatgaccattaataatagttcattgctgcagtccttttcatatttagtataccctttcttatgttttacctaccatcccactcttggaaaaattacaagttcgggaaaataattttgaaaatttctgtagtaatggttgaccctctatttattttggcatataaaaaaaattagtctaacttttttatttatgattgcttacttgtaaattttttgaaaatacggaatactactttacagtgctgaaaataaagtttaaacagttgtcagttgcgcctacaac

SEQ ID NO: 332503 - DNA, 435 bp, Cannabis indica
aagtttccctatcgatgaataacatggcaataccctaaataacacaaaaataggaaaaactagggttcccaaaattgccccaaccggtgaccggttcccttaccgaaattccggttctgggaaaaattcttggaggccaaccagaattctggttcctacaggcctctctcaacttgaattctggttcagtgcaggaatgactaaaaaaaatcacaactcatgcaaatcaaccccaatttaatccaaactccgggtaaccagttttagggattccctgctacaaatctgggtaaccggtttacccagaaaacccaaaaccaacaaagcctaaccaaatcgtttccaaactgaaccgaactttccagcctagatatatccccaataaccatttccatgcaataaacaacaatcaaagctcagaatcaaatttcacca

SEQ ID NO: 332504 - DNA, 538 bp, Cannabis indica
ttccaatcccgatctgagtctggattcagttctaggtctaagtccttggttctgatcctggtctgggttcaagttggggccgggtccgtgtccgggtctagcttttggtatgattctaggtgtgggtatttgagtttgggtcgagtctgtgtccaggtttctctccaggtctggacccgtttctgggtctacatttgggtccaggtccaagttctggtcccgagtgcgggtccaactttgggtctgggtcgggttctcggtccagatctttttgcagcatttcgatcccagtttggttcttggtttgagtctagttttgtattcggatccctatttaggtccaaatctttgtttgggatcgggtcgcagatttaggtccaagtcagggtgtgagttccggtgtggctacacgactgtgtccgggcccgagttcgagtctcagtttgggactgaggctaggtctgtgttgtgttctaggtcttgttccgggtcctggtcacggtcctagtcttgttctagggtcctggttcggcgattc

SEQ ID NO: 332505 - DNA, 1780 bp, Cannabis indica
aaaggtcctgtaaacctagggcataattttcctcttttcctgaaacgtttgatccccttcatcggagacacccgtaggaacacatgatctcctacctgaaactctacatttttgtgtttcgaatctgcataactcttttgtctactctgagaggcaagaattatggccttaatcttttctatggcttcattagtctgttgcactgattccggacctaagtatttcttctctcctgtttcatcccagtgaatgggagatctacacttcctgtcatataacaattcatagggagccatttctattgtactctaatagctgttattatacgaaaactctatcagtggtagatatttactccaggagccctcgaaatccattacacgggctcataacatatcttctaatatctgaattgtcctttcggactgtccatcagtctgaggatggaaagctgtactgaaattcagtttggtacccatagcccgttgaagactttgccagaacttggaagtaaacttcggatctctatccgagactatagactttggaacaccatgcaatctcactatctctttgacgtataattctacacattgatccactgtaaaggttgttttttaccggtagaaaatgtgcaaactttgtgaatcgatctaccacaaccgaaattgaatcgtaccaacctgtggttctaggtaatccaaccacaaagtccatggtgatatcctaccacttccactaaggaagtgtcaaaggttgcaataaacttgctggtctctggtgttcagtcttgatctgttgacaagttaggcactggtaaacaaattctaccacatttttcttcattttgctccaccagaagtagggtttaagatcttggtgcatcttgatagtgccgggatgcagtgaatatggagtggtatgagcttcttcgaggatttcgtttctaagttccacactacttggaacacaaaccatggtcttaaacaacaacatcccactatctgacactgtaaaatctttgacttgaccagccaaaacctcttctctgatcttcactaattctggatcaattaactgagcagctttaattcattctaacagatcagattgtagcatcaagttatgaagtttgcctacaacaaactcgatgcttgatctgaccatgtctttagctaattaaggtgaaatcttaatcatacttgttacctgcccgggacccttccttcccagggcattagccactacattagctttcccaggatggtaaaggatttcacagtcataatccttaaccaactctaaccaacacctctgtctcatatacaaatttttctgagtaaagaaatatttgaggctcttatggtcagtatatatttcacatttctctccgtagagataatgctgccatatattcaaggcaacaccactgcggaaagttctaaatcatgagtcagatatcgcttttcatattctttcaactgacgagaggcataggcgatgactcgatcggcctgcatcagtatacaacccagaccctgtctggatgcatcacaataaactatgaaattttccttatcagaaggtaaagctaacactagagttgtgattaatctttgtttcagctcttgaaagcttgcttcacacttgttcgtccacacaaactgctgattctttttggtaagctcagttaagggtaataaccagccagacccaagaaacttctaacctatgtaactgttttcggtctctgccaatccctgacggattcaatcttccc

SEQ ID NO: 332506 - DNA, 560 bp, Cannabis indica
caattaaaagtaattaagcacaaatgaaatagaatacatagaaattaaggggaaaataaatcatattaaaatcataaagcaatgtcaaacaacatccatctagaccctaagcaagtgtttagctacacatgttcatggaagcaaaatcacacatattaacattaagaaagagaaaaagatagagaatatattgaggttatttgagatgttataagttgttcttgttgattgttgtggtgattgagcaaggtttcagtttatgaactcaagctttgttctctaatggtggatttagtttctagttgttatggttggttttattgcatgatttctctttgtcataatgtaattaggtattctggaagttattgtaaggtttgggtttgaattgaggtgtgtagaaggatttgtgtgtttcttgcactgaaccggaattccagttcagggggacctgtgttggaaattattttaccaggatctatttactatccatgtatgttagattaacaacctaatatgaattataaaacagtgaaaataaacacatataaagttagaaa

SEQ ID NO: 332507 - DNA, 553 bp, Cannabis indica
actgaatacacgactcagtttgatcacttggcaaggttggactcaagactcgtgccaatcgatttcagtaagaaatagaagtacctggatgggttgaatgcaaagatcagacatgacctaatgatcactactaacgacagcaccacctatgctgatatggtggataaggcactacaagctgagggcgcactagagtgcaccttagagtctcgagggactctagttgttggctgggctcctactcctcctacattaggctttagtaggggaggtactggctcgaccactgatcaaaaaataaaagcacctgccggatccagcggctcaggtcaaaataagaggctttaagggaaccaaggtcaaggcaatcgtcagggtagctctgaaacccgatacacttacccagagtgccccagttgtaaaaagcaccagagtgtaaaggggggtgctttcagtatggtatgcaagggcattacaaaataggttgtccccaactcaagactgaagcaccgaagactgcagcgaaacccactccagcaagggtgttcgcaat

SEQ ID NO: 332508 - DNA, 948 bp, Cannabis indica
aaaattaatttctcaattttgccaaaaataagatttattatttattctgccaataaataataattaattaattctcattaatctcttatttcacaaggattaaaataaatattatttttttctaaaataatctatttctatcttcaatattattaaataataatattatatttaactaattaatatagttttataatataaaactaaatagttaaatactattaattatacaatttataattgtcataattaatcaaaacaataattttttaaattactattttgcccttaagaatttatttccacttgaaatccattcgtcaaataaaatcttcccatatatagtattgtatagaagtaactcgaagaccatggatctatatttcaaagctccaataaacccaagattaccatcaatctcatcgacaaattaatatagtttattaagtccattaatactccaatataaatatagaattacactcttgacaatatagaatcatattttacagaattcttacttgtagtccattgatataatcaatttaagtagcccgccctccaattattagttcataattagagttggtaaaaatactattttactcttctaataatctcttgatttcttatgtaccattaattcaatgtaaacagttaatctataacttattatagatttagattcaactgttagcacttgctgaattgacactacaagggaactcatattcgatttgttaggaaagtttagatttcactattgtataacatatttccagccactcatgttattaagttcccaaaatagaaattgtaagaatcatattctctgagaaattttaacgagtgaatcaaataacataatgaacacaaacaagagctcatatatactcaggattcatgctgatctattaatgatcatcattgtgatatgataaactcttt

SEQ ID NO: 332509 - DNA, 594 bp, Cannabis indica
atccttggcaaagggtacttattcttcactgtcaacttgtttaactcccggtaatcaatgcacattcgtaaagttccatccttctttttcacgaacaaaactggtgcaccccaaggtgaagtactaggtcttgtaaattttaaatccatcatccctgtaattgcacttttaattctttcagctctgcaggcgccatcctgtagggagctcttgatacaggctctgctcctggtattagatcaatctcaaaatcaatttcacgttttggcggtaaccccggtaactcttctggaaaaacatccagaaattctcgaaccactgggacatgctccggccccgcttgtggttccctggtagcatccactacatttgctaagaaaccaatgcacccctcacacaacaaatctcttgccttaagcgctgaaattaagggaattcgggatccctgcatcttccccacaaatacaaaggggtcctcgccctcaggctgaaaagttaccatttttctcttgcaatcaatagtggcattgtatttagcaagccaatccattcccaaaataacatcaaaatcctccagattcaattctatcagat

SEQ ID NO: 332510 - DNA, 532 bp, Cannabis indica
cccgcttcaacatgtgacaatacgaagggagcaatgcaaaattttctttagctgttcctctaatcaaattttgagcccattgttttcctttccatgctttccaataactgacttgaactttcatttcctcacgcatgaatcctgcaaggcttcttgggttaagtgggtccttactattcttaaagtgtccctgtacacgagaaccaataacgcgactggatgcttgtctatgattggcatttcggttcattaatgagcaactatgaagactatggtattgtcgaatgacaaagaaatgtgaatctttcatcttcgtagcacgcactctccataagcaattttcactgacacaacgaacctcctttatagacttgtttgatttggttgttcgcatttcaaatctcccattaatggcaatgatgctaagataataactcaattcatccttactcacaaagtgttgacccactttcaaattcgatccatcatgtctgccactatcctgacttgcttctctattacattgtgcaac

SEQ ID NO: 332511 - DNA, 556 bp, Cannabis indica
agcctaaccggaaaggttgcggccctgaggcgttttatctcccggtccacagacaagtgcattcccttcttcaacatcttgaagaagtgtcagaaatttgaatggtccgacgagtgcgaggaggcattcaaaaagctaaaagagcacatggccaagcctccaatcctgtcaaagcccgctctcggagaagacttgttcctgtacttggccgtctccaaaaacgcagtcagcgcagccttagtccgggaagaggaaaaaactcaacatcccgtgtactatgtcagcaagcgcatgataggggcggagacgcgatacctagtcatcaaaaactagttttttgcctcctaatggcctcgagaaagttgagaccctattccaagctcacccaataaaggtattgaccaaccacccactccggaaagtcctacaaaagccagaggcgtccggaaggcttctcaaatgggcaatggagttaagcatatttggcctgcactacattccccgcatttccatgaagggacaggcgttagcagacttcatcacagagtgcaatgaa

SEQ ID NO: 332512 - DNA, 940 bp, Cannabis indica
tcaaactattgtcaacttgactattcaaccaaacttgatgagagagtcccttccttagtgttttctcacctccttcattgttcttcacttattcgaaccttgagtgatgagtaacgtgcgtgaaggagagaaagagatcaaggttcagatctttataatgctctgctacagaaaggaatcaagggctagagatcttgaacggaaggagtcattatattccgctgcaaccaatgtaaggttttcttaaactcttatgtatttaatttcattgttttagagaattcatacttaggatgttaatcaacatactctaagtaaatctaaatcctggtaaaatattcccaacaaatagtctcagagccatagtaatgatttactttcatgaaatatggatttaaaacgatgaatattgtttgtgtgttgattaggatgtgttcatgtttgtttatgtgttaattgatgaatgtatgtgttttacgaattttttccatgaaaataatttttatttttgatctgaaaatattttatttggattccttgtgaaaaattaagcaattttattttttatggaactcgattctgataaaaattgaggaagttatgaattttggaagttttggatgccatggctgtcgagtgggtgcatcgagtgcaccagacactcggacaagacaggcacacgtgcgcagattgctggggacaaaatccgtgtcttcagacacagtatgggcattcagacacgatggaggttgcacccgctcgtgccacaccctgcatctgcccccacgtttctcggcgcctcaccccgctgcatctcacttccgcgcgcgtgtgcgcaacaggtgcatcatacaccaaattttttatttttgtgggagtttttcccaaatttcgaatttttgtaattttcaaacctcaatttcaaagtaaaatattattt

SEQ ID NO: 332513 - DNA, 1510 bp, Cannabis indica
aagattatgaataaattcatgaattaatattatgcataaaattaagatgtggaaatgatagaatgctaaaaatagattaaattggtgaaaaatggcccaaaatttgaccttgcacgggcccccacgcgctcattttctttccctccttttttttaactgtcatacgacatgtcgttttggaaaaacaacatgtcgtttggtgaaaacgacatgcagcaggggtcatgaaatgactcgtcgttttgtgctgctaaagggggttgcatctattatcgtacgacatgtcgtttttgggaaatgacatgtcgttttttggaaacgacatgttgtttttgggaaacgacatgtcgtttgccccgaatgacatccaaagggtcaggaaaaatgacccgtcattttttctcggtgagggctgaaccaaagggcgtacgacatgtcgttttctgtcgttcttgtcacccgaaaaacccacacatgggtccgcgggtctgcaacccggattggcgcgacccggttcgtgacccggtcatatagaccatctctggccaccaaaaccgacgccgcttgagggattttgttccattttcaatactctatcaatttcaaccatccatttcatacatttttacaaaataaacattacccatataacatatatccaaaaataggtttcacctccacaacaatggaaaatagacaaaatatccatccaaagcatatataaacccatttaaaatagtaaatctcatatttgcacaattttaaacacattaattcgaaaaataaaataatataataatttttcagatttgaaaaataaaatgggttagttcaaaaaaaatattatggagctctcaaatcaaatatactagctcttaataccaattgttaaacattcacatagattatgagctatccaaacaaactttaaacattattactcataatcattaaatccaagattaatactttatttagagcatcaaatatgaaatacacatacctcccatatttgcattttccattattgctatgacaccaaaatccttcaatgtatccccaagatggtagaagatgaacttatgatagaaaaccctattccttatcaccacacacacacactcaccttatactaacacatattagcccattttatatccaacacctaaccctaaggggttttattgggtttattaggctaatatgtacaattagtggtggactataatttaatgggtcaattatagttttagggtgctctcatgtgcctcttatacattaattaattattaaccatctcattatggttgttgatgattattgggcacatagttaatgattgtgtttatggtatttgttgtcctcaaaagtgagtgttttaatatttatactcgcaagtgcacgaatcgtttcagaatataatgttcatgtaagggcaaggtcgaacccatgggagttgactaacatcaaaagaaactatttcaaacaaaataagaatattctaacctag

SEQ ID NO: 332514 - DNA, 1309 bp, Cannabis indica
gcattttatgtcatttagtgattttcataatcttgcatttccggtgcccggtaacatggaactcggtgtttggctcagtaaaatcacaacttagtaagttagtattgggacggtttattaaacattgggaatgtcgggattggccgggaatttagaaattcccaaaatacccctttagtgctctttatgtcattttagtgtgaagggacaaaattgtcatttttccccatttatgttttgtcctttagtggacttagtaagtgaaaaataaatgttaattgatgttatgttggctgaatatatgtgttttatgcccattttcttttatttcaaaagttagaaaatatttggaaaagaaaaataaaacctctctttctctctctttcggttttgagtagctgggtttggggggaattctttgtgtgtttcaagctaaattcttcaaaattgttgtgatctctaagttttggtaaggttcctttatctttccctcttgaatttgttgaaaattatgaaaagatgagtattgcatgtatggtttttgatgttgttactgctgttagttgttgttgttatttctatgattaaaatgcttgaattgaatggattagataggttgaaatgcatattttttgctttgattcaagcttggtagtttttagctcaaaactatggtttttcaaagtgaaaaggtgaaaataactgctgtaaagtttgattgtgtttgagttcagtttctgcagttttaatatgcatgaatatgtaattttaatcaaggtttggtgcatgttagtgttgtttaatcaagtttgagtttggaactcaaagcttgatgctttaatggtgatttttgtttatttgcatgaagctcggtttttatgctttagaaatgttccttaaggtctatatagcaggtctagatggttttgtttgaattggtttggatttgagcatgttatgaattttttattgaattctgcgaggaaccggaattccgattgtgcatccggaattccggatggggttttgaaatttccataactgaaattccggttgtgcaaccggtctgccagttgggaaattttcaggaaccctagattttctcgtttttatgttatttggggtattgccatgctttttatcgatagggaaacttttagtttctagtttaattccccgggaagtgatttagcgtatcacttattagtgttgtgattgttatggtttaggagcctgtaaaccgttgttggcttcgtaccatccgaccatatcacatcggttaggctagagtatgactaacaactggagt

SEQ ID NO: 332515 - DNA, 1790 bp, Cannabis indica
cagttcagcttccttagagccagcatcaacgactttcatgaacatggtcatggattgcgaagccaactccacaaaacgcggaataagctcttcagaaggagtcctctctgccttgaacataaactcctcgcccacaaacttttcctgcagaatcaagaagtcgcgagttcggacagctggatcgatcatgactttcttccccttgtcatgtggaaccttagccagcttcttggaagaatccgcggcaggagggaccacaacatcgcttttcctcttctgaggaacgacaggcaatgtcgtcactgttcctgtttttggcttgtggttaaggacaggtgcggattaggaaagtcatctctgcgaggataaaaaacaaataactgtcaataataataagattttgatgcactagtttatgcatgcgatatgttacctgacgttggtcgagaagtttgctttgagaggcgtttgtctatccgctcttgttgcttctcagacggctccttgtacactggctctctttgaaggcttgcggtctctggaatcaacttgtgttctcgcagttttgaggtcatggcacagtaatcgccagtcacgatcttgcacagggaggcttccaagaacttcagtagtttctctgcgagtcgcgtcaagtgtaggtccagccggtctatctgcgacaataaaaagggcgagttagcttaaagtcataagataactcaaaaaattgactaagtaaagaaacacacgacatactaggtcgacggttaaagtcagtcctaatccctggaaccttaaacacataaatccatttggatttccaatctcccatattggaaaccatgcctcccaccccattgatctcagaagtggcccacttgctgaagcaatagaagccgttgtggagacctacattctttatgtcgtagaaatagctaaactcttctgtcgagggtgccctgtgcacgtactccatatacatagcgtaaaagcctaaggctatgcgatagctattaggggttaattggaaaggggacacatcatactgtttgagaatagcggagatgaatggatggaaggtgactgacactccgcatcggagaatggggatagagactacgacgtcctctgagggtatgatcgcagacgcatggtgccaagacgcaataaatttaacctctaaaaagggtgacccgtgagtaagtctttgcaggagaatggctcatttaactacgtgttatcaactgaatcagactcactgccttcggcatctccatcttcgtcagatccacgattaggaacctcccaatcttcacccatctcctcgacttcaacgtcaggagcgtgcccagaatgaataagatgatcacggactgacaccgtagactcgctgtctcgaatctcgatggtttctggttcagcgagctcctgcaccatcctctcaatgtctgcagaggacaacggacccagctctgtgtctctagtagtagagacctcctcttctgagatcgaggtcggaatgaagctatcttcctaatcgccatcgaacgcgttgcctcttgagccaagcatttggctatttgatagatcgctcatctgaaagatagaagatcttttcagcgtggtgaatgtgcgaaaacaaagtaagtgatctcacccgcatataaaatgtaaaactgtcttagagggctgatttgaattcttgcgaaaactaatcagcccaccaagacgcgaaatgtcaggagtgcgattagaaggatatctcaaaaaacggctgggtgtatcctagt

SEQ ID NO: 332516 - DNA, 861 bp, Cannabis indica
tttttacattcttttattttgtacactcttttttttttcttttaagattaaacacttatcttttttttaggttagttgtagactttatcctttaggctattttttttttcttttttgcataaaattttagttcataagatattttccaaaaaataaaaaaaaaatatttagtgtcaagaataattatgtaataataaaagtggtaaaaattgagaatattctgtctaaaaaagattggctttaaaggtttgtggtagagtaccctctacaatttctagtaacctcggggagttctagtaaagtgtgggacgaagcggtaccttggcaacctttccaatcggcctgggaatatctcatgtatatacccttaaattattacatagttgaactttacactaattaaaaaaaaatgaatgaagaagatcatcgccgatttgaatatttatatccaatatatcttgcttcattaaacaataaaaattctaatgctactgaaggtactagtaattttatcgaaccagaatttagtgacggggaggaagctttccaatactattctttttacaagagtgagaattccaaaaagtggaaggcttggtacgagtcgcatcgaccacgtccttgtgaacatacaccatctagtgcatattcctatgatgaggaggaagaacaatcctacaactctttcgatcagaatagtcttgatgattatagttggaagcctgagtacaactataatcctttatatgagtggaattatgaagaggaagatgcttggttttctcataactctcaacatctatacaatcgtttcctaaatgatactattgttgagttacaagcatctatggtgataaattg

SEQ ID NO: 332517 - DNA, 1090 bp, Cannabis indica
gttattttgggtatggattggcttgagaaatacaacacaactgttgattgcaaaagaaagatggtaacttttcagcctcagggcaaagacccctttgtatttgtgggtaagatgcagggatcccaaattcccttaattttagcgcttaaggcaagagattttttgtgtgaggggtgcgttggtttcttagcaaatgtagtggatactaccagggaaccaccagcgcgactggagcatgtcccagtagttcaagaatttctagatgtttttctagaggagttaccgggaccaaaacgtgaaattgattttgagattgatctaataccaggggcagagccagtatcaagagctccctataggatggaacttgcggagctaaaagagttaaaagtacaattacaaggaatgatggatttaaaatttacaagaccaagtactttgccatggggtacaccagttttgttcgtgaaaaagaaggacagaactttacgaatgtgcattgattaccgggttgaataagttaacagtgaagaacaagtatcctttggcaaggatagatgacttattcgatcagctacagggaaagactgtcttgtccaagattgatcttcgatctggtaatcaccagttgaggattcaagaagaggatattcccaagatagcttttcgaacccggtatggacactatgaatttctagtaatgtccttcagattaacaaacacccctgtagcatttatggacttgatgaaccgagtgttcaaagactttctggatgattttgttattgtctttattgatgatattctaatttattcagactcagaagagactcacgaaagacatgttcagatggtgttacaacgtctcagggagcataagctgtatgccaaattcaagaaatatgaattgtagttacctcaggtgagtttcttggggcatgtggtaagtaaagatggtattctagtggatccagtaaagattgaagtggtacgcgactggcctcgacctaagtcagcaactgaagttagaagtttcctgggattggcaggatattatagaaggtttgttgagggctttgcaaagatttct

SEQ ID NO: 332518 - DNA, 1023 bp, Cannabis indica
ttatagtctgagaggtattcatcactggatcttcgtctgtttcacccagaaggatgacattcgggggttgctacccaaaagattgatcggcttttcgtagcagcacattggcttgccgactacgattgtcaatgactgcatgatgagcccttaacgcttcgatctctttgttcctgcattaggcaaacatgcacctgtgctcttcaaacgcgagatttaccacagcaaggagttccttctgatcatgatgtagagtgttggtatgaccctgcatgagtcccagtgtcatctccaatggccatttgaacattggtagcgggcggaacgactacgctatgaacaccctggtcagctgctgaattagtattcccagtctcttgcacaccaggcgcaatctcatccacaagagttgtcacaccgtgacccgcagttgatggctgtccgggatttactgctagcggaacccttgtgtttcctggattctgcagtgcaggatccaccgtctgtggatttgtaggatcaaccacacccctacaagtttgtaccaccatcgtacttgtgattaaatttagaatgaagagaaatccttgagttcaactctcaatgagagcaccaaaatgttaacctcacttttagccaacgatagtgagtctaattttgtaaagcgacaagtagttcaatatattgaaatattataaagtaagtaaggacacaaaaattttatagaggttcaaccctaagaagttcagtaatagcctaatcctcgttatttgtattgactttagaacaaagagaaaggttcctttccttagagctcttacaaaagtttctttgaatataaattcttagaaaaaatctctcgaccctttgcccagtgaatatgcatcactatttatagcgttataagcttggagaagaagtatttcccttctcattacaattgatataagcagaaagattgcacactaaatagagaatacactgatcgtgggatttggatagctttccatatctctgtaatct

SEQ ID NO: 332519 - DNA, 769 bp, Cannabis indica
taatttcataattaaacgtgattaactgctaatttccaaattaaactaagcagtctttacaatatacttgttagtaaatttagatcctggtaaaatatattcccacaactgacctcagagccatggtaattgatttactttcaagtaatatggatttaaaatgatgtatgtgtgatttggatgtgatttatgttgatctatgtgtttattggtgattgattgatgcttgtgaaatttttataaaaaataattagattttcatctggaattatttttattggataatatggaaaaaattaagcaatttacttttttatagaactcaatttcgattttatttgaattagttatgatttttttgaaaatttgaaaaatctaaaatcgggtgcacatcactcacgcgcacggacaccgagtttcactcggtcaggtgcgtgttcggacactgaatgtacgaagaaacacgcatggggttgtctgatccccccatttcgcgcacgaaaaggctgcgtgcagcctctcgcgccaagttttctcggccagattgtaacacccaaactagcataggcgtgttaacgtgattttcaacgtactgtgcagctcgttgctaatcaactaggttattgaaaatcgtgaataattaaaattttgcttaattatttaaaacataaaatatttcatttataaaattccaggatcccatttacaaaatactttacaaaagttttctatacatataatcaaaagtttgtcgcccagcgactataca

SEQ ID NO: 332520 - DNA, 1706 bp, Cannabis indica
ttagttttttttattgtttttgtgatatttttgttggaactgttgcaggaatgagattacatatatgaccaaaagattatgtttcttgcaaaattcgtctccactgcttcatacaaggttataaataatattaagacttgtctttcttctaagcagcttgaaatattttcaaaaatatgttttggccatttcattaagattcttgatttcaaagtgcaaccccaagtttttcacgggttgttgttgtgggaggttcagcagcctaatgatgctgaattgtgggatatgattcgtggtgttaggattaggtttagcattgaggagtttgcagtgataactggtttagattgtgaaggtgattgtagtgtgttggattttaagcaagatgttaatagtctttgtatgaaatattagccgacctccacctctattactaaagaatctgttagggaatgttttacaacaaagaggtgaggtgattctaatgaggatgtcgttaagttggcagttctttattttgttgaatggtttttgcttagtggtactaagcttaaaaatgatcatcaatctattttagatgttgtagacagtggtaggtatgatgaatttgcttggggacggacttcttttgaattgactatttcgtcgttgaagggcaagcttcacagttgggttgaaagtgttagaaggggaaagagtttaggaaagagaccgagtgtattttacactttgattggttatcctcatgtatttcaagtttggttttatgagtgttgtaaatacatgaatagtatgtactaccaaaaggaaatttctggtactctaaggattattcggtggacttgtagcagccagccgaacttcaaaattttaaagactacgatttttgatttctccaaagacagggtatttcagtttgtttttttcgtttattcttagtttttttgttgttgttttatttttttaaagagtaactcttattgatatttttcttttatgttttttcagttgcaactatctaatatgaaacccacttctgctaagttcaaatccttaaaattgagcagtttcaagtttgacactgactacaattcttacaagagtatgcctgttcaggaacaaccttctgtggttgagagtgacatatctgtcaagcttaatgatttttctgaaaagttgatggtttggaacttaagattgatttgctgcatacttcccagtggaagattttatctgatttgattgagttgaaagagtttgtttctgcacagtttatttcttttgctgctcaaatggctataatgtagacacagttttcttctgtgtttgttgattctgttgctaaggtatgctagtttttttatggttgttttcaagtttttttttattttctttcatatgatgtttgcttacatttttgttataggacaaagggagtgactcttccaatgatgacggtggcagtgataatgaagaagatattaattcagagggcaatgaagaagcaggtgataatgaagaggaagatgttgaaggtgtagatttggatgaaggtagtagtgatgaggaggaggagggtagtgacgcagaggaaaaatatgaggatgataatgaagattccaagtccaaaggaaaagatgataagggcagtgatgatgaatgcgataatagtgagaagaaggtagataattagacaatgtaactag

SEQ ID NO: 332521 - DNA, 666 bp, Cannabis indica
ttttgtatgttttttgttgctccattgaccttttttattcatctccacaagaatagacatagatcttgtgagtgatcttagtggtcctcctctggttggcaaggaatcgtgggagaaggttggcatggtttcggatgaatccaggagggaagttggcgtagtttctatcaaagaatccagccaacccaaggcctgcactagaggacctttgcgccaacctctttctggtatcgagaagtttcttaaggctgggaaagaggtctcgacttcaagaaatggatctgatgatgaggagaatgaggtctgtgcagagatcaaggctctctactgcagacgatctttctcgagctacgtgtagccggtctttctccaagctatgtgtagtcagtctttctcgagtttattgacttctcctcttatcctttgtttaggaagatgacttaatggtttgcccctagtggcatttttgtaaagacaagtttgtaaccaacttgggttttttcttatcttaaatgccttctactattttcattcgaacttaatacaattgtgtttgcttgtgtttttattcacaatgtaaataactatattttgatcaaatgtacagaacttttggatttttcctattgctcgtaatcttcctgtttaagtatttaataatctacc

SEQ ID NO: 332522 - DNA, 543 bp, Cannabis indica
gttaatcctgctgttgaaaccatttgctcttctgttgctactaacgatgccccttggccaaatcctccttcaaggcgactgaaattgaatactgatgcagccgttgatgctattttgaaaacctctgggtttggagttgttcttcggaatagttatggtgatgttgtggctactatggctgctccttactgtggttgtttctctcctcaagtgatggaagcgttggctcttatgcataatctccaatgactaagagaacttcaactacctgtgcatttcattgagacagactcactcctagtagttaaaggattactctcgtcacaagagcttacttctgatttttattgcttgttaaataatattaatccattcatagcagttggcaccataaactacatttgtcttctccttgcaatccctgtaatcaagaaagaacacatttttattgtgttgaacgagttggaacaacaaatttttcttttcatatatataaattaaaaatcaaacaagtttttttttattattatttaagcgtttata

SEQ ID NO: 332523 - DNA, 570 bp, Cannabis indica
attagttggataacgagaccataatagccttccttttatactaatttccaataaggttagggtgaaattatttggaataaaaaattgataaaaaaatagagcaaaataagcactaagtggccgaccacatattgggacccacattagtttggttttgtcattttttaactattttatcttattttcaaaaataccactttttatattttcaaccctataaatgtcaaaagtatttatttaataattaaaataattatcaaagaaaatttgtcatttataatatttattaattagaatccacaaagtctcttaattaataaattaaccctaataaactatttcttcacaaataagccataccatagtgaaaattcataaactagacatagtttaattttagaattataattaattaattaaaattaattaggtgagtcttacaagcagtttttctcaactagtatggggacaaagggcctatataactgagcttctaataagcatatctagaatttaccaagtaaattctctaacttattaattcctcgttgaaccactatagaacttaga

SEQ ID NO: 332524 - DNA, 648 bp, Cannabis indica
catattcgaaccttgagtaatagagtgccatgcccacacatagcaagtcaagtactcaatcatagtgagtaagacggtggaaaccaacccggaggagagaaagagatctaagctcagatcttgataatactctgtgacagaaaggaataagggttagagatctgagtggaaggattcattatattttgctacaaccaatgtaaggttttttaaactcttatgtgtttgatttcattattttagagatattcatatttatgatattaatcaacatacttgttagtaaacctagatcttggtaaaatattcccaacagtaaggtattctgattctaattttgctggatgccaagatagcagaaggtctacatcagactacatttttctattaattggaggagctatatcccgaaaaagtatcaaatagaaacttatagcttcttccactatggcagcagaatttgtagcgtgttatgaggcatcaaatcagggaatatggctaagaaactttgtcactagactgcctattttggagaatgtagaaagaccactcaagatattttgtgaaaatacatcagcagttctgtattccaataacaataggagctcatccaagtcatagcatattgacataaagttcctagttgtg

SEQ ID NO: 332525 - DNA, 614 bp, Cannabis indica
actcattaagaaaagcatataacatatcatataatttctgacttgtatctaggcgcccatacacctatttacaaggctcaacagatgagtaagaattttccataccagggtatagccacatacactacgtacctctttgtacgagtgttggtagggtttgtttcataccctgagtacctttgagtgatgtaccacacacactcagtacctctccgtacttatgctggtatcacggtactctcagataacaatcactataccaatacactctataccttaaccgtataagtgttggtagtgcaactaacattttaagcatgcatatacacataacatatacatacactcagttattgatatcacacattatattcagttcttaccttcttaagtgtgctggccgaccttaacggaaagtctcgtgctagatggatgccctaatcacattatgaaactgggtaagttacatgctcaaaaaccctaatcccgggaaaccccaacccacaatcctaggttctattatactctctataggttacacaaactctggaattagggaaacacccaaccacggcactgaaatggacgaaaatcgaggaaatgaagtgtttggg

SEQ ID NO: 332526 - DNA, 615 bp, Cannabis indica
atagttgttgagcacaacataaggtgtttatcctaaacttaacaaaacatggatgattgatcacaatatgcgagagtactagattaatcggctacgagatcaccataaccattgacgcaacaacttggttatatggaaaatgaaattgacacagaactatggaggattgataagaatatgcataagtatgcactgtacgggctttcattgtccgaatggacatggaaggttctctaagaatttgttggccctactagcttgtgtaaaaaacctatccttatcacccatggtttttgatataaaatcgtttaggtattgatagttgttaagcccaacataaggtgttcatgctcacgataacaaagcatggatgattgatcataatatgcgacaatagtagatttatcggctacgagatcaccataaacaatgatgcaacaaccaggttatatggaacaatgaaatggccacgaaagtatggaggatttataagaatatgataaagtatccactgtaagtgctttaattgtccggaatggacatggaagattctctaagaatttgatggccctactagctagtggaagaaacctatccttaacacccattggtttt

SEQ ID NO: 332527 - DNA, 557 bp, Cannabis indica
tttttacggaactcgattccatgaaaaacgaagaagtgatgaaggtttaaaaaatcgggtgcatatggtgtcgagattacaccatcctcacgcaggagttcggacaaggagccccatacgcgtgcagattcagacaaatttttgtctgaattctcgctcatgcacgctctcttcagatgctcggacgggacgtgtgcacatcaccctgcatgcagggtcttccgcgtgcggatctgccctcgtcactccctcctgcgcgcgcgtcctgggcatttgcagccttctggggctgcagctgcagcctcctgggcagccacctcacccaatccgatttttgtggaatttttttcccaattttggatttttccaattttcaaacccaaaattaaaataaaatattatttttaatatatttaaacttaaatatcatttgtgaaattaataatatttatttttaatagattattattatttttgatattttgaggtctaaatttaaaaattaattattttattttttatattatggtcagatttaaaaatttgttaagttcttt

SEQ ID NO: 332528 - DNA, 736 bp, Cannabis indica
ggttataagaattgaagatttttacctccaagtttaagtttcaatttcccagcttcaatggcttttagagctgataacagcaaattttcctccataagattcagcaacaatgaaaagaggactcttttgaagagtctcatcttcattaaagagcttcttcaacattgtggtaagatcatctgcaacttctaaatcatttttcacaaacaactttgtgtcctccacaaaactgtaacaagtttcaactgatcatcctaaatttcacaacaaagaaagaaaaatcataagaatcaaaactcacaattccacaatactaatttgaaaccaattaactcacttacaacaaacaatagatctgatttttgtagccaagttgaattccttggatttaagcttgtatctaatggtccaacctcttgaaaattcctaattccaacacctgaaactcccttttttctaaagaaacaaacaaagaaaaagattcatagtttaatacacacaaacatatatacaaacacaacacaatcatacctataaacttacaagtcctccttgaagccagagaacaataagccaaggcttagatagattctcaactctccaaggactcttgtaaagccaccaaaatatgtgggtttctgagaaaattttaacaaacgaaattcaattctaaacaaaataaaaatataaattcaatcttttttcttacccagaaaagaaaatgaagaaaagttta

SEQ ID NO: 332529 - DNA, 550 bp, Cannabis indica
tgaattctcgctcatgcacgctcacttcagacgctcagacagggacgtgcgcacatcaccctgcatgcagggtgttccgcgcgcggatctgccctcgtcactccctcctgcgcgcgcgtcctgggcatttgcagccttctggggctgcagctgcagcctcttgggcagccacctcacccaatccgatttttgtggaattttttcccaattttggaattttttccaattttcaaacccaaaattaaaataaaatattattcttaatatatttaaacttaaatatcatttttgaaattaataatatttattttttatagattattattttcgatattttgaggtctaaatttaaaaattaattattttattttttatattatggtcagatttaaaaatttgttaagttctttaatatttatatattatttaattataagatcaaatattttgatatttaacatattttaaattaatagataactttaccttttttaatctaaaatattatattaaaattatcttatatgacaaattaaataattaataaatt

SEQ ID NO: 332530 - DNA, 535 bp, Cannabis indica
atacaagtattaatggatgaatgttttctctctattgcattcaatgtctgagttacacaattgattttccaaccctctctcacacttgagaatggggaatttataggctctaatggcctgagttacactgtggtcctaagtagacaagttgtcgctttcggactgcaaattgctggtacaggaggtggtcttgagcctcgtgcctttttctggtgtcaggtggtccccagtcgcaaaggtagtccctgactgcagaggtgtgactcagtgtaccctcggtcgggtcctcaaaccttgcaggtgcattgcctccactactcatacctccttgctttcagagcttgcatgggcgtggttgtacgcttctcattcgcacaccttgtcctttgattccccctctaacgacattctctttaaagtgtattcaaatttcaccttaagccctcttcacaaaacaacacacttggcactacacagcaccttcatgctaatggacttgcctgcgcacacacacatgcatgcatgcgagcccccc

SEQ ID NO: 332531 - DNA, 727 bp, Cannabis indica
catttctaaacaggatttcccaatttttattgcgtttgtctggcatatttggaatactagaaactcaattctttttaataaatctggtgttcctagcaatgtggaagaatttgttgttaattatttacaggattatagtgctgctcagtgtaactaccagggggatcatctggattcggaggctgcacctatctctcgtactactcagcaacaacaccctcctcccctctcccctgatactccttctctttttgttgatgcagcccttgaccaaaagaatggtgtaacaggaactggtttcattttcaagcttggttttcagactactttagcttctcactgctatcatttgcctggcgttgtttctcccatatttgttgaaggtcaagcacctctgcagagtctaaagtggtgtattgactcccagttgtctcctaagtttgtcttctcggattgtctgaatttggtatccaaagtgaatagtggatggcaggataattctgctctttctggtcttgtttcccggattcgattgctcttctccaatttccctaatgcttctttgtaatatctcccttgccaatttaatatggacgcccatgtccttgcaaaagaagccctcaggccaagagaagatagctagaggagtttgttttgctccctctttgctgcgtgcgatgttggttcttcttcttcatcagcttctttagttcaaaaaaaaaaaaaa

SEQ ID NO: 332532 - DNA, 604 bp, Cannabis indica
tttattaaaggaagattcatagggcataacattatgatatgtcaggacttggttagacattattacaggaaagcaaacaaaccaagttgtatgatcaaacttgatctccagaaagcttatgacactattgagtgggactttttagaggaagtgctaacaggcctaaacttccctagaagcttcatccaacttattatgaactgcatcactactcctaagttctctcttggaaccttacatggtttctttgaatctaggagaggtcttaggcaaggggaccctatgtctcctctcttgtttgtactgggtatggaatacttctctagattaatggggaagataggggagaaagaagatttccatttccatgatagatgctcggatcttaaactgaatcatttggtttttgctgatgatgtgttacttttcagccatggagatttcacaagtgtactatacatgttacaggcactcaagctattctctcttacctcgggactacaggccaatgctagtaaaatgactatatattgcagtaacatgcatcaggggagtgtgaataagcttctgcaactttctgggtttatgagacaagagcttccat

SEQ ID NO: 332533 - DNA, 582 bp, Cannabis indica
agcaaagtacactgcatttaccatcttgactaaggatatagaaagtgtttacatggccactcagtcgctatccccatataaggagcctgagcccatgaagaaggatgtcaacaagagagacatgaaaaagttttgtcgattccacggagactacggccacgacaccaatgaatgcaacaatctgaagcaagaaattgaattcctgataaggaaaaataatctacatgtacagaaatatgtcaagaccgatcagaatcagaggaacgacaataaccaagacttgctacctccactggcagacggacatctacaagtcatcattggaggcccgcacataattggagattcgggaaaagctcgggagaggtgtgcccgaacagcacagcacgagcaagaagaagtgatcctggccgtagaagaaaggaagcctaaaatcccatgggcaagagggcctaccataaccttcaatggtcaagacactgtcaaataaggtttccgcacacgaccgtcgttcgtgaggtccagatagctaaaatggtggccagaccatgattgataatggagcctcttccaacatctttt

SEQ ID NO: 332534 - DNA, 974 bp, Cannabis indica
gtacactgcatttaccatcttgactgaggatatagaaagtgtttaaatgactattcagttgctggccccatataagaagcctgggcccatgaagaaagatgtcaacaagagagacatgacaaagttttgtcaattccatggagactacgaccacgacactaacgaatgcagcaacctgaagcgcgaaattgaattcctgataaagaaaaacaacccacacctacagaagtatgtcaaggccgatcagggtcagaggaacgacaataaccaagatttactaccgccatcggcagacggacatctgcaagtcatcgttggaggccggcatattgctggagattcaggaaaagctagggagaggtatgcccgaacagcgtagcacgaacaagaggacgttatcctggccgtagaagaaagaaagcccgaaattccacgagtaggagggcctaccataacctcaacgatgaagacgctgtcaaaatcagatttccacacaacgactcgctggtcgtggaagtccagatagccaataaaatggtggccagaaccatgattgataatggagcctcttccaatatcttgttcaaaactgcttatgaaaagatgggactacagctcaaggatctaaccccatgtctcctacctgtctatggtttctccggtcaaggagtcgcacctctaggacaaattcgtctacccctcactgttggacaagctccgacaagcatgactatcatggcacagttcctggtattagatgttccttcagcttttaacgtaatgctaggccgaccggccttgtatgacttaaaggctgtcacatcgatattccactcgtgcctgaagtttccaacaaagaatgggtagggtgtctgagaggaaaccagcagactgctcgggaatgttataaccttgcagtggccaaggaagaaggaagtatcctccagccaaagcacatacaagggaaaaaacat

SEQ ID NO: 332535 - DNA, 1138 bp, Cannabis indica
tgtgcctccaattgagagaaaaatcaaaattagggcagaaccacgatgtccgtacctagtcgcgactagcctttaagatggtcgcgactacaggcaaacctcgaaaatccttggttctgccaaaatgtcgaagtcgagaccagagtcgcgaccacagaaaagggtcgcaacctggctcattggtggtcgcgactactgacgtctcttgagtagatttctccgatttttcgccaatttattctgtcttttcaccaattaactgaatttaaacattgataccccgggaacctgaaacaatgaaaatcaatcgtaaaactgctccaaaagacaccaatagatgagaaaattcttacttttcagacccgaaacataggctaaatataacctaacattagggtcctgtgaaacgtcgagctgcaattccactcaggctgatcgacacacctgatcacgtaaatgaggtaagatagcataaataatatatatgtaaatgtatgcttgtgttaaatgtttacactactaacactaacggttatgtgattttaagggtgttagtatagtgtaggatatcatggtagttacagtgttaccaacacgagtacagggggtacgtcgtgcatgtggtacaacacttagtaactcccaggagtacaataatggctctaccaacacaagtacaatgttggaactttggtgcatatggtatagtggtcgtacttcccttaagaatgttgttaaccatttggtgagctcggttttggggctcaggacggcttaggcataaagcgcttatataaatattgtttatatatatgttatgcatatcttactgagtctgttgactcatcagtttgctacctcgtgtaggtaaaggaaaagctaagctggaggaccagtgagatggagcttggcgaggattgtacatatcgctgcagtgcaacctggagggtttttgttttataacattttgagctgccctgtgttttctaaaaaaatatgttacttaactttatatatgtaaatgtaatttgcaactgtgttcaaatctcgggatcccgacctataagcttatataattacaatataataaagttagtttttaggttcagtaaattttcaaatacgggcgttacagttt

SEQ ID NO: 332536 - DNA, 543 bp, Cannabis indica
tccccttgatttcccctcacagttcctatcccagcttcttgggttgggaatttcaggcacaggtgccgtattgacgtgattgcgccgaagtctaccaaggccagtcgaccaaggattgcgttataggttgtcgggctgtccaccaccacgaacgtgtggggtgtgtccaggcacaaggttactagaagcctcacttttcccatcaggataagtgttgttccattgaaccccatgagctgggaaccacttggtgagaggtctcgatccgtcaggcctattacagtgaaggcctctttgaacagcagattcacggagctcccgttgtcgattaggactctggccaccaccttattggcaatgggggtctcgatgaccaacgggtcatggtggggaagacacactatttttgcgtcttcttccgtgaatgtgatggcctgatccattagtcggggcctttgacccgggagttgagtaacttcccaaacctcatcgtgtttcacggcccccgctgtaacaccctaaataacataggcgtattacgtg

SEQ ID NO: 332537 - DNA, 550 bp, Cannabis indica
tggctccagtagaacttaaagaaatgaaaattcaacttcaggggttgcttgacatagggttttctcgacctagtgtgccatcctggggagctggtttgtcaagaagaaagatgggttttgcagtgcattgactaccgagaatttaataaactgacaatcaagaataagtatcctttacctaggatcgacgatcttttcgatcaactttaggggaagatggtcttttcaaagattaatctccaatcgggctatcattagttgagaatctgagaggaggacattccaaagacggctttccgcactaggtatgggcattatgaatttctgtttatgtcttttggactaaccaatgctcctacagcttttatggacctgatgaatagggtattcaaggatttcctcgatatttgtgttattgtatttatcatgacatccttgtgtactctcaatcagaagaggagcatgagcaacatcttcagattgttctacaacgacttcaagaacataagttgtatgccaaattcaagaagtgcaaattttggctatctca

SEQ ID NO: 332538 - DNA, 1067 bp, Cannabis indica
ctcgatggtctcttcaagacggttagaaacctcgagatccttagtcagctcagctatcttcttctggctggtaaagagtttcttgttggcttcacccagctccatccaaacagctccaagttctgcccgggcgtcattagcatccttcttggccaagtccacctgcgccctcatggtgttagatagagccatgttcctggaagcagcagacttagcccgggagtaagtgtaggccaacttcagactagcttgcacagagaaaaaactttagcatttgagctaagtaaagaaaattaaaggaaagtgctaagaaagacttaccatggtgaattccttcaagactccgcccatcaacagctccaaagaagagtcattgtcagcaccagccagttgctcactaacctcaggaaccaaccggttcatatagtgggcaagcatctctttacccttcttggtctctggaagcaccgacaaaaggtggagtaggggcccgcacctgttcgggttcacttctgactagctcagacccacccttcggtagttcagacctgtccgagcttcctcctcgagactccttggacttagcagcttttggggtagaggggtttgcagccgttagctcctcggaaagatcaatgacttccccagcaggcatcttttccttagaagaggacccctcaccgcctttagacttcttgggcagaggagagatgctagagcttccgcccattctcttcttcagagcgtcaagcatctgccaagacatgtctgcaaggaataaaaaacaacatggttatagaaaacagacatcaaaaacatgaggcataatagtcaagaagcttaaaaataagacgaaatggcatgaaaagtgattgcccaagtaaggatcaaaagtccatcatcacctgacatcgctcttatttcagacataacaactctcttttccgaacacgggaggggacggccgagctggtgagatgggctcccttatgcgaattgcatgttcaacacgcctgggcggggcggaagtttcttcctcctcttgagcggagtcacctgttcttcct

SEQ ID NO: 332539 - DNA, 776 bp, Cannabis indica
gctaacgcagccaccacttgcttcacccttttgaagattcggattctcaagctgcataaaagaacacattttttaaaaaaggctaacaaagaaattctagtttaacttgagtcaatgacaagactaaaatgtgtcgttcattaacttgagtacactgccaacgccatgagcatgcacaaaattgtttgctcaaatctcctctccgtatcaaatctcatgttgttttctttttaaatgggttgtcattctcgaatatttaatatcagttcaaatatcaattcaaatattaatgggatttgttttattattattttattattatataaataatattttattattttattaaataaaaataaaaagtcacccatgaattcctcataaaccaagaatttcagttataagaatagatatgcaactctatatatattatatatatctaaaataataatataagaagaagattaattctgagctgatcaaaattaataactaccatagctagatgcatgcaaaccttttttcttattaagtatatacgtaataactttatgtaagttatgataatagctaattaagtaattgtataatacagaatttaattaatatttgctgggatatatgtctttaattacactagtgtccctaacaaatatatattagcggattcaatatatataataatatatataaatatatctattctatataaagtgtgcctatataactaaaatttttggtttttgagaaatttatgggtgacttttaatttttat

SEQ ID NO: 332540 - DNA, 842 bp, Cannabis indica
gtcgttgtattcggtttagtgcagcggagttttatttgatctctaattcagattgctttggttattataaaaaaatgatatttatagccaagaatctattgattaccgtgctccaatcaagccaacctttgaatatggtttgtctttcaaaaaaatattcttatgatctagatatgttaaaagataagttggaagaaattatatccagtcaggaattgttgaacaataatttttatcgcgttgagatcttttgttaaccttaacttcaagtctttgttgtctgttgttcaagatatatataaaaaaaaaagttactgtcatttacgaccgccctttgttgaggtatatttttttatatagttttggctgatttcttttttaaatccttgttacattagggttagtttctttcatgttttgttcagttgctctactgttgttaaacaggtgaagacatctaatgatattgatgatccaaacatgtgcttttcaagaacttgaacacgttcttcatgttcttcgtgactcaaagagctaagaatcacaatgaaggtcaaaattagatcttttttatctaaaaagaacacattatacatgataagactacaatgcagatcaaaataccaaaaggattacaatctaattttggaatcaaaaaatattcaaagcaaggaaaagattcatgcaatcatggaaaaatcaaataaatcaagtaaatagtaggaatagaaagcttacccactatacgagaaacctttgatgaagagaatgggaagcttggatcgttgaaatggtgcaaaaatcccaagagatggagcaatgtgggtttcagcctctagaga

SEQ ID NO: 332541 - DNA, 694 bp, Cannabis indica
tcagcatttaacagaatagtagtaaccaaaatggatggaaactaacattttgtatttaatccacccaaaaaaaaaagatatggtatttgagtgtataaaatcgaaaatataagttatttatgctgcaaacttctcttatttttataacagcatctttaaaaatataccatcccactaaattgttgtagaattttcacatcattctgctttaaggttacaacaaattttacattaaattggtatgcatcaaaattcacactattaatggtattggatttggaatctacactgttgacaaagattttcggtaactattaattagagctgcttcaagcaatgaatgagtagtaacgaaattttttaagggaaattacttaatattactattttttaactttttgttttaatttatagtttgggtttctaaagtaatttttccggtagtttcaatgtgggttgctcaaatttacatcacttggaacttaatatcgtgggctttgcattttaattttcctttttatcactttatccaaatttgaaaaataacacaacaattaaaaaaataattaatatctcccactaaactaaatttattattaaaactaataaataattcaacttgtattaatcatatgtgcataattaaaggcatgaatgtataattgtagccttaatcagttgctatacgattttt

SEQ ID NO: 332542 - DNA, 1769 bp, Cannabis indica
aaacctaaatcttttgagccttctatctctctctctctcattcgaatccttctctctctctctctttatctcttcaattttcgaaccctattgtgattgagtgcatgcacacacatgacaagtgattccttaatcatagtgtttaagactgtgaagaatccattcaagtgaaggagaattgggctcaaatcttggtgatactctactacagaaaggatacaagggttagagatctgagctgaaggagtcatttaattctgctgcaaccaatgtaagctttcttaaactatatatatgtatttaaattacattttttagaaattcatatttaggatgttaaataacatacatggtagtaaatctagatcctggtaaataatccctaacaactggtatcatagccatggtaacgatttactttcattaaatactctatttccaagagattgaggcactcccaattcaggattttataaagaaccttcaaacttgcaaagatcctgtaggagacaggattcagagcccgaggaggtttacaaagttcttcaaataatcacgaaaggggattattgccccttccgtaatgtgctcaaggctcgaagcccctattctagtggagccactggtactggtctcgccactggccccctcagaggtctcgcgtgtaagacgcacaggtgggtaacaactaaattcctcgacttgcacttatctaacccggcagtctcgcctatactcaatgtcgtaggtgcttagtgactcgcctacataacctgagataatccgcaccctcgactctattaactctgcctcgaaggtgacttgggatattatttcaaaatccaagtcacctggttcaaaagccattgtgactttgggtaaaaacagaggtttagccaaaggaattgaagtctcactgggaggtttaggccaagcagcatctcgcatgaaatggcgttttccttcagtaatttcttggaagaagcatctgtggcgactagcaatgtcttcttgatgaattttcactaagtgttgtctaattctagcatcatttatctctaatttggattgaggttctaaaattttgggtttgtgagggatggcaatctcaatagggtactcaatttttaaatcttttggacgataaacttctaaaccagattggcacattgctgcaaagagaaagcaatcccaattcctggaagaaatttatcaaaccaaaagttggtaaattggagattctagaaaacctacgtactgtctaaaccctaatatttacctagatatagttcggccctaaaaattgctaaaaacaagtgagataacagtgatgcagaccaagaagatagtaattaaactcataaatacaacataacaagcatatgagataataaggagaaaagttacttactgtttaaagttggggtttgggacgatgaacgaatctacaatctacaaatcctcgaacgtcttgaagatccctcctaatgcttgaggtcaaaaagtaaatcggatgaaagtcaaagaaaaaatgccaatgacaaagatggcatgcaaggtttcaaaataattgggatacgttttttggaagaaaaactcgaaaattttccaaaagttttcaaaaatggcgaaagtaatgcaaagatgtttcctttttactttatatactcttgggttaatccccgttagatcagaaaagtgattactccaacgggaagaattcaagagaggagtgaaaaagatggtcattaaatgttgatgtacctcga

SEQ ID NO: 332543 - DNA, 638 bp, Cannabis indica
aaaatgatatgatatatatttatatatatgaattctttaaaacttatcagacatcaacgtctctctctctttctctcttttcatctttctctctcttcaagcttcaaataaaacccacaaccaccatcaccaccaccctccggcgacccacctccggccactgaccagccccacgcaccgaaccactagaactcccacgtgccggtgacctcacccccaagcggtgccgcttcttttgccgtcattagcttgggatcgcaagaaaaagtttggtgattcaaactttgaacggattttccggtcacctccggaatccatttgacaagacgttttcaccactaggcttaaattgtcaagaagaacaacctacactaaaccatttttcctagttcgctaatttttctggtgacatttttgtagctccgcccctttccggtgacatcatgtatcgttttgacaacagttggcatgggtgtgatctacttatcgaggtgatcattttgatatacactacccctattttcggcaacgttttcggtacaccaatttttactgccaccgattattaatgtgtaccgcttaggtgaggcttcgaaaccccacattttagatatagtcattgttggaaattattttac

SEQ ID NO: 332544 - DNA, 456 bp, Cannabis indica
atcatcttcttcaacacaagatcatctatctaactatgacttatatgttagagcttcatctggtgcaatgaatgaaaagtcagagttggatctctatttagatgaccaagtgttacccaggactgatgaattctttgatatatgcaactattggaagataacaggatctaaatatcctgtgttgaacatgattgccagagacatatttgctgtgccagttagcactgttgcttcagagtcctcattcagtactggtggtagacacgtgagtccacatcgagcaagacttcatcctactactttggaggcattggtctgtactcaaagttggttggcaattgacaaacaaggtataattatttatttcttattatataagtttatacattaattaatagttgttttattatattattttaataattttttttacaggcacaaaaactaaactaatta

SEQ ID NO: 332545 - DNA, 378 bp, Cannabis indica
atatatatatatttaaaatatagataagaatatcaaaaaatatataacttaataataataagagtaatttgcggcgtaaatacctaagtttaattctcgattacagataaatatttaagtttaacgataataatatctaagttatatttttataacttttaggcaggtacttaactgttaagtgtcaagtcattatccacgtgttattttcttattgatatatttaaattaattttgaataaaaaataaacattttaatgacgtggaccaatcagagacagctacgtgacaatttacttgactcttaatgactagttacctacaaaagtttcagaattataacttaaatatattatcgttaaaaattaaacataagta

SEQ ID NO: 332546 - DNA, 799 bp, Cannabis indica
gttctttgtccagtagtcatctcttttgctggatgggacgaaagtttaggtcaatgtttagggcgtgagacatcacagtggggtcaataccgaccatattctcatgtgaacaggaaaaaatgtttaggttttcttttagaaattttattaaagctaattttatttcgagcaacaaacccttacaaattttgagtttgctggccagaatatttgggtcgatttccacttcttccaattcttccattgtccttacattttgtttgtttcgccaagtcggggatccatgtcttcgtccctgccttgggagactttctattgggcaatgtgttgggctttgttccctaaataaagctctattttaatgtaatcttttctattcaattatcaataaagaaatagatttaatttcattacttgtttaatgtgttatttggttcatgtgatcatttatttacttatttgattaataaattcatccaaacccttatcacaatgatattcttatttattgtgttgtcaacacagtggaaagtaaacaagattgtgtgattaaatgtattcctagatttatcagtacacagggtttaactgatatgataatctacaacgtagtttacttgcaccttggataagtgctatgtcctttctagggcattggttaaagtaagcttgggttggaggagtatgcattggaagggaccgatattgaatttggattagatatgataaatttaccgtaatatctattcaattcaatatctccaagttgttcctagattaaatgatcttaatcctgaca

SEQ ID NO: 332547 - DNA, 727 bp, Cannabis indica
ggtccaatgaacctggggctaagttttcctttcttaccaaagcgcttgatgcctttcatcggcgatattcggagaaataccatgttcccaatctgaaaatcaatatcccgtcgctttggatcagcataactcttctgtctgctctgagtcgcgagcattcgcgccctaattttatcaactgcctcacttgttctctgaacagcctcgggacccaagaactttctttaacctgcctcatcccagtgaataggtgatctacattttcttccatataaaagctcgtaaggggccatcccaattattgactgatagatattgttgtacgagaactcgatcaggggaaggtactttacccatgatccttcaaagtcaagcacacatgcccgtagcatctcttctaagatctgaatcgtcctctcgaattgtccatccgtctgaggatgaaatgatgtgctaaactttaactgagttcccatagctcgatgcagactctcccagaatcttgatgtgaatttcggatctctatccgaaacaatggactttgggacaccatgaagacgaacaatttctctaacatataactcagcataatgatcaatggagaagttcgttcgaacagaaaagaagtgcgctggctttgtaaacctgtccactacgacccatatagagtcgaaatgtcgcgtggtctcggcaagcctaccacaaagtccatagcaatgccttccca

SEQ ID NO: 332548 - DNA, 868 bp, Cannabis indica
aaatcgaggcataatcaacatttttagcaataatcccaagggcactgtgtttcttaaaagtattgatggctcttcatttagtaaggatgcaccaaggttatttaaaatgttggatgatgtcattgaagaaattggagagcatctagttgttcaagtggtcactgataatgctagtgcctacaaagcggcaggcacattgttaatggagaaaagaaagcatctatattggactccatgtgcagcacattaccttgatttgatgcttgaaaaaattggtgaattgccacaacaccaaagtgctttgtccaaaggaaaaagattgagtaagttccttcacaatcatcaatggttgttaaacttaacaaggaaatattgcaaaagatatattataagacatgctgccactagatttgcaacaacatttcttacattgcaaaacatatatcaagtgaggcaacctttggaagctgtgtttacttctgaagagtgggaaacttgtccttgggcatctaaagctgatggaaaggaggcaagacacacgattttgaaagacacatatttttgggcaagtgtgtcttatgccattaagaccataaaacctttagttgaagtgttgaggctagttgatggtgataaagagccaactatgggttatctttacaatgctatggatacagcaaaagaaaaaatagcaacagctttgggtggagaagaaaaggattacaaatagatatgggaaatcatagatgagaaatgggaatttcagttgcatagacatttgcatgccgctgcgtactttttgaatccccgttgtcattattcacaaggattttccaaccatccacagatcaagttgggtttgtttcct

SEQ ID NO: 332549 - DNA, 811 bp, Cannabis indica
gttttagatttttctttcataaaaaaaaaacccatacgtaccttgagaagtcgtcgatgaatgtaaccatgtactacatgtcgttgattaatggttgtttgacttgcccaaacacgtcagaatggaccaactccaatggtgctttgtctttgaactttgactcttcatacgttaattgatgtgccttaccgtattggcagccaacacatacaatctttgttctgacctcgagttgaggaagacccttcagcatagatttcttcatcatcaccttaagtttatgataactgacatgtcctagccttgcatgccacaaatttgttgtttcattctttcgagtattttctacataagcggactctgttgacattacatagacagactctaagcattgtcctttcatcatcggtgttctagagatttcaagaacttggtagatcttgacatcttgagggttgaatatgacatggtggcctatcaccttaagttgcgccactgatagtaagtttttcttcatcccaggtacatggtagacatcctagagtgaaactttttttgggctgaatctcgacatgattgttgttttaccgatgtgcgggatcggtaatcttgagttattggctgtcaccactacgcgaacacctttatattctgtcatgtcttgcagcttctcttcatctcctgtcatatgatttgagcagccagagtcgactatccagtcattattgtcgtcgatctttcctggaacagaagttgtcaaagctaattcttcttcctccaccacgaatgatgcttctgcgtcccattcttc

SEQ ID NO: 332550 - DNA, 556 bp, Cannabis indica
ctaagtgttggtcgctctgtgcgaattgccaatcgctttgcttcaggcatgcctatgaggcatcctgttaggactatactcaaagttgattgcacgtgtcaccatcatgtgatgccacgtcagagtgcaaaaattaggataacagacgtgctacatgaatttctaattagtgtgccaactttgctaatcaaagggttttccttggaaattgtgccaaattaaatttttgatttaaactattaaactcaataaacatatttatatttacataaaccaggatcatgtgtttaaacttttacaatcataatcaaaatacttttatagaaatatcacacaacaactactaaatagagcccaagttctcctgagatcaaacactttaggtcacaccgtctcgacatgtacaatcatcccctgagctctgaactcactccaattcaactttcgtctttcctttacctacacacaaaagtaatatttgtgagtcaacagactcaataagaaaagcatataacatataatataatactgacttgcatctaggcaaccatacacc

SEQ ID NO: 332551 - DNA, 548 bp, Cannabis indica
tttcttcaggaagcgttagtgatgcagctaaattatccaatgcatcagctttactatttttttgatctggggatgtgatttacaattatattttgaaattggccaagaaaatatttagccttttcatgataaggggctaaattatcatgcttgactgcaaatttgccacattttttttaataatcaaaagagaatcaccaaaaacctccaatgactgtattttcattttgagtgcaactttgaggccgataactaatgcttcgtattttgctacattattggtgcacatagctagaatatggaaagagtaaggtatcaggcctcttgacagtgttacaaagacaattccaacacctgccccactacttcttgctgtcccatcaaaatataatttccatgatgaagtatcaattgtgaaaacttcttcatctcgaagatcttcttgcaactccatatcctctagaattaggtgtgctgccaaaaagtcagccaaagcttgtccttttattactttctgcgggacaaattaatttcaaattctgacagaa

SEQ ID NO: 332552 - DNA, 501 bp, Cannabis indica
attttttgaataaccgcaaccatcttcccatgtcccacattgggcctaaatatacttggagacatggctctatccttgaacgtttggactggtgtacctcaaatcaatgctggcgtgatctctaccctcatgccactcttttccatcttggtttttatggttcggaccatagagttttaaagattagactccaagatcctctttttgccaattcaagaccaaatcgttttcattttgaaaatcattggctgaaagatccctctttctccgatcttctttcctcttcttgggcttattcagggcctcctggttcatcccctttgcagctttttctcgataagcaatctaactgtgttgctactattaggaactggagtagaaatcagcaccctattaaactccaaatctctcaaactcaagctgagttggactcccttttgaatgccacttcccactcccccaactcttgttccctcactgcttccctgcaatccaggcttg

SEQ ID NO: 332553 - DNA, 897 bp, Cannabis indica
tctctttctgagtcaactgggtgaattcttttcttttggcacttctgattgcctcattatagtacttggcattgaacagctcgtggaacttttcccaggtcattgttgtaacatcgtgaatcatggacaccatgtcccaccgaaccacagcgtcctctttaaattagaaagtggcacataccactctatcattgccagtgacacccataaagttcaagatcctggtgatcacagttagccattgctcggctttcataacatcgggacctcccagaaatactggaggtgcctgcttacggaacctttcatacaggggttccatttggttcattgcaaccactggttcggcctgcacagtaggggcaggtgccactggtatttctggaacaggcactgcaggagcaccctaatgtcttaactgctgatttacttcctcttgttcattgattttggtttgcatttctgcaaacttgttttcccactcttgggtagcttgggtagcctgtggcgggttagcatcaccccgaccacgtgccctgcccctgggacctctacctcggccaccaacatttaggggaatcctagctccctaaccttcatttgatccaaccgaattgccctggctcctggtgtttcgcctggcgtccttactaatctgaacagcctgcataaccaagagctagtctggttagatcgtgatcaaagaaaacttactaatgccacttatttggaaattaaaaacatgcgcctattctactatcaggctactaacatgcttcctaaaaggcttttcttaaatcatactactaaataaactactaagcaatgaaatcttactgaaccatgaaacgagctgactgctgatgatgattgtacatgtcgtgacgatcttcggaa

SEQ ID NO: 332554 - DNA, 688 bp, Cannabis indica
gacaattgatcaaagcatttgcagtggcaaggatgtggaagatgttgacctcaagttcatatttccaaatgatatttttattagaccattatgataattgataaaagcatttgtagtggcaaggaatggtcttctcaatttgaacaagaacatccttaatgataccttaaggatttttgatggagcagtcagaaagttgtagcacaatagatgtttgcttcatttctctaagaccaagttgccagtacatagagtaaggcatgagattcacactcgcgctaaggtcaaggaaagcttggctgacttcatgagtcccaatttagcatgaaatggtggaagaaccaagatctttgtattttggcagtatattttgttcgatcaccggactcacttgttcagttaagaaagaagtcttcttgatatggtgctttctctaagtagtgcacaagtccttgatgattttggcataagctggcacttgttttatgatgtagagtaaaggaagattaatcttcacttctgtcaagtgctcaaggagttctactcagtttttaagaattttcccaacaggtttaagagcctaaggaaatgacactttaggttgagcatttattggtgcactgtcaggggaaacttttggattgaagtagtggttttgatggatggatcttccaaagttttaccactt

SEQ ID NO: 332555 - DNA, 1058 bp, Cannabis indica
gattttttaaaaccaaaatgtctacttccgcatccgattccaaatcttccaagaaaggagaagttcgcctggccaccctggaggaggtcatgcagggtccggtggcctaggagaatttcaagtcccgtgccaatggatgggaggcggctgagctccactccacattgacttgcgctcaccagctggaaaagattgtggtggtggcaagcatcaaaccttcggtcttcgggacctaccaccggctgcctcgggacgaggagacacccaaccacaattacgggggcttcggagcttggagccagaccaacttgatatccggggctatgttccctctcgaggattattttataaactttcttgtttttgttggccttgcgccgtaccaactgatccctcaagcctaccgcctgcttttaggcttatttattttttatgccgcccggagctggggctcgcccagtccgactgagatattgtatttttatgagcttatttttatccccaagaaggggtattaatttaaagacggtttttatggccttcgggcgcaccctttgaatgagggcccagtccctttcaaccatcagaagcatgtgaaggagtaccgtcaccgcttcttcttttcctccagcttccaggccatggaccgcgcggagctgctcacagagtgggttaggatccatccttacatgcggaccgcgcctacccaagtatttcttcagtgggccaagaccttctccacgtacgataagaaggccctcgatgttggggagttggtcacgacagagaactgttggaaggtcaagctgatatcggggaaccagtcggtggatgacttcaatctctccaaagtcatctgcccgaatgtgagggctctggccgcagaaagggcgttccgggaagacattatcgccacggcggaggaccggtaccagaagtacctctttaagagggaacaggagctgacctatatcaaggtccaagcgactgccgggaggacccttcgtctagaagctccgccggagcggaggcccccaggcccaagcctgtggtcccgg

SEQ ID NO: 332556 - DNA, 416 bp, Cannabis indica
tttttttttaaatgatttcttttttagtttacaacaatgattatactattaattttttgtctaacattttgtattaccaggatcaaataatgcaagtgagatagagaggcaacaacttcaaaatatgttactaccttcgtagcagtctccactaccttaatacatttcaccaccaacaccataatatactttactagtattacaacactccatgatagtggtgaaagttgaagacttgacttgaacattacagatttgttaatgaatatcctgattgaacaataaaaattaggggtgttcaataaaatttacaaaccgttcaacccgaataaatcgcccaaaccaaaccgaataaaccgacaaaaaatataacccgaaataatataatgaaaatccaaactgcccaatgaatatat

SEQ ID NO: 332557 - DNA, 700 bp, Cannabis indica
atattttaatagttgccgaaaatctcggtcaacatatacgatacaattaaaagatattttatatgacgacaacaatgaattatatataatatactaataatattatatgtcacgccaacaaaagtatattataaaataaaaactaaatatcatctttaaaaaaatattactataaaataaataattgttcattggatcacatccaatggatttagacccaaccgatccaatctaattatttattggatattaaatttcgtcatccaatccaatccaatcgaattgagtcattcgatctgatccgatccaatagatgtattggattggatcggttccaaccattggatgcattgactggttttttattggactgaattggatctatccaatctattttagctaccatttaagttaatttcattaaaaagaaaaatatatatataaaaaaaatatgtaatgggtaaattgcggcaaaacccccaaaacttttattttggttttacttaacccccaaaacctaaatttgggcagtaaaaccccaatacttgtattctgttagcaatttaaccttttcgtccattttaattgttaagtgccatgttggactcgacacagtgtacacatggcacaattttattggtccacataaaaattatttaaaaaattaaaaatcaaaataaaataaatttgaaattaaaaa

SEQ ID NO: 332558 - DNA, 1189 bp, Cannabis indica
cctcgtaaaataagttccaacacccggacccaggactcagaccccgacctggacccgatacctgggacccgaacccgtcccggtacttaggacccgaacctgtagttggtgttgggatcgagtgtattaaaaatatattataactttacacaatcaattaatacaagtcaataccaaatattgtattgtattaaataatactaatacaatacaatacaacataatccaacacaatacaatacaatacattacaatacggcgtaccaaatgagccctaatttcattattttacccttctcgggtcaaaattactaaattacccctggcttaccaacgagatcttaatatagcataaatcatataaattctcatatactaaattatataataatataatttctcaatgatacataattatctaattagggttttgctaatccatttacataattttagggtattacaattgtgttgtcaacacagtggaaagtaatcaagattgtgtgattaatagtattcatatgatttatcagtacacatagtttaactgataggataatctacaatatagttttctttcaccttggataagtgctatgtcctttccagggcattggttaaagcaagcttggtttggatgtgtggattatacatcggaatggaccgatattgaacttgggtaagatataataaacttaccgtaatttttattcaattcaatgtcacctagttgatcttcaaatgatctcaatcctgagatggttaggttctagatcagttgtattatttatattattcaatttgtttgttatagttgactaatagatcttctcgtgacatacagattaaggacatggtagttcaattgagtggagcgttaatcataaatacataatatatagcttctatatgtacatagaagtgaaatgatgaattcactacaacatttattagaaataggggcggacacattaccggcagagcatgtctgcccctattaatgggcttattaccggcggagtagaacaaattattatttttttaattaaaatgaacaatagcggcggacagtaattattatcggcgaaatgtctcgccggtaatgggcaatgtggtttgtgtgggaaaattctcgcttttttttactttgaaaataattagcggtggacttttaccagcagattccgcc

SEQ ID NO: 332559 - DNA, 773 bp, Cannabis indica
aaacgtttccaccgccttaattacgaatcaatccacccgttgattcttgggaattcgaatcgtgcgcctccccagccgttcgattggtaggtgattgcgcctgttcctcatgcactttggcctataaaagccaccacctttccttcatttggttactttccttttttcgccaactttcttcgagttttccagagagaaagaaatcctcagaccagaaaaccttcaaacactttacagatttctttgctaacctttgctcatcactgtcagtttacatttctttgtgtgatcaacagcaaacccccagttccaacacttcatgtaagtttctcgcatcccttactttactgttgtgttcatggcatgctttactatttacttgtttttctgggtttagcgtttgaagtttctgggaatgtttcaccctgagtttttacgtaatacgtctagatttcccttctctgatgttagggtcactctttttacacagtatcgttattttttatgacggctcactcagtctctgtgtgcgatggccttcaagggcatagagaagactttgtttttctcgattttctgcccttcctctttctttatcttttatgcgcactgtcactatctgtgagacttttgcacccgacttttgtccagggaatctttctaaggttttcttgttgacaaatgtccggagggggcctctttccagcggataggggacccccattccctttttcgatatagagtttggtagggggcctaattgctggaatttt

SEQ ID NO: 332560 - DNA, 846 bp, Cannabis indica
ataaataaataaccaagtctacatgctgggggacttggatagatctacttcttcttcttcctcgacctcgccatcttcttcctccatcatggtattctcgcaaagggctaaagtttcctcttctttttcctccaagaagctggtgtccatattagggttcgccatccaggtccgatatacagtgcaaaaactaaccttgtcgcaccgttctatggtctcgacttctttttcagcaagcttcttctcaaactcatctgcttgggctttgatggtcttctcagcctccacttttgccttctcgacttcttctttttccttctcgacttcctcttttgccttcttggcttccttctttgccttttcaacatcctcctttactttctcagcttcttgcctaaggcggttgttttcttgttgggcgttatcccggtgcttactcacaaccttgcattgggataataacgtgtggacctcaccctcaaagtattcgagccgctcaaagagtagtcgattggaagcaaaagaagcaaaagaagccttgagaattacaaacagatgaatatgaaagaggtataaaaagaataatataattataataacaaagccaacataccatgaagttatagtccaagctccttgaaagcatctcttttgggctcctaagattgagaaattctcaatcagggggaagaagagcttgaagtttgcgccaacaggcaactccatatggttgggaaaaattcagacccgacctcccctgttgcggccgacaaggtctcaatggtcttgctcgaagaagcagtagcgggagttgcctcgggacaggagcgttggcgtcgaaaaacc

SEQ ID NO: 332561 - DNA, 698 bp, Cannabis indica
aaaagtgctcatcatatagaccaaattttaggtgatccttctcaaggtgtcactactagaaactcccttagaaacttgtgcaatttcattgcttttatttctcaaattgaaccaaaaaattttaaagaggccgaagttgaagaattttggcttccagctatgcaagaagaaataaatcaatttctaagaaataatgtttgggagttagttccaagaccgtcacatcaatcagtgattggaacaaaatgggtctatagaaataaggtagatttgcatggggtcattgtgccctagtagcaagacttgagtcaattagaatgttgttagcttttgcatgccacaagaattttatcttgtaccaaatggatgtaaaaagcacattcttaaatgggtacaatatgagaggtttatgtgtctcaaccacccggttttcaagataacaaataccctaaccatgtttataaattgaaaaaggctttatatgacttaagcaagatcctagagcttggtatgaaagataaaacacttttcttatcacaaatggtttttcaatgggtaaattggataagacactttttataaaaagaaaattgaaagacattattatagtacaaatttatgttgatgatattatctttggtgctagtattgatgctctttgtgaagaattttctaagtgtatgcatagtgagtttgag

SEQ ID NO: 332562 - DNA, 511 bp, Cannabis indica
ggcacaaaacccaacaaaaactaagagatggcatgataagaggatcaatacaaagtatttgaagaagggcagcaagttctattattcaaatcaaggttaaagttgttaccggaaagttaaagtctcgtttgtcgggaccattcaccattgccaaagtgtatccttttggagttgtggatgtcaaagacgaatagtccataagggtatttaaagtgaatgggtagcaactaaaacactatatcgaggggaaggtcgatcgagcaaagacctccatcacattggaagaggcttgaggaagaaggacctcgggttgtcatggcttgagtgtatcacatttgggcagctcgagagtggaggaacaagattatattaagttatatatatgttatgtaataagtttggggtgtgccaccccttaaaaaaaaaaagaagagtatttaaaattaagtttggggtgtgccactccttgttaaaaaaaataaaaaagagaaaaagaatatatatatatata

SEQ ID NO: 332563 - DNA, 1028 bp, Cannabis indica
agaagtatgcaaagaacccattaactcctccaccttcatcttcctaaaatctttggcttcctctatagccaagagtttagtgtcaaatctgtctagaagaactctaacaatttttatgacaagaacaaatgtgtcaagcttttcaccaagagcaaaatattcattagctatatcatataatcttccataaaactcagacaaagttttagattcagacattctaagattatcaaattttgtctaaagcataataaacctagaacgcttaacatcaaaagttccttcaaatttagtttgaagaatttgtcaagcatctttagcaaattcacatgaagatataagtttaacaaaaccctcacttactccattaaatatagcatgcaacaccttattattgtaagcagacaatttatcatcttcattaggccattaagttcaagttttagtttttcattatcttctaaatctttcacaaaagggtgagaccaacctgaaagaattgatcttcatgcttcctcatcttgggatttgatgaatgccctcattctaacctttcaatacatatagttagagttatttagaagtggaggacgaataatagaacttccttctacaaagagaaacatattacaaaaacacaagaaaacattaaaagaccacaagagtttagtgtccctctctgataccaattgaaaaaccatgtttttgcaaatgctaatatatttattaaattctagcaattaaaacagaactgttcccatctgtagtaacagaatagaaacttgttgttgcataacacaaattcgcataagtaaaatagaaaataacagtacgcaaatgtaaaaaacttgaacacaaagagaattatacgtggtattagtgttctttgaaacactcctatccacggggccacacccagactcatgaaaatcaaattagaaaaagtctcaaaataattactaaaatacaaattgacttaaacaaagtctagactctttatagctttgtcgcattacttgtaaatttag

SEQ ID NO: 332564 - DNA, 918 bp, Cannabis indica
ccttttgtggggatgatgatatgaaaatgagactacaattcacagagaaatagatagattgatagacttagcttcctctaacatatgtccctcactacctagtatacaaaaaagatacaaagttcaataacaagtgggtatgataaataaactatacttaatttctttttattatattatccccataccccttttttccccttcaataatataattctttttttttctatggatattggaattcatttataaaaaaaaaattctatggatattggaattcatttataaaaaaataaaagtctccgaatcagaatcacaggagtaagagatcccttgataagaaattaataagttggttaaaaataaagtgcaattacaaaaccatcactggtagttttttttttaattcaacccaacattattggggactatacttcaaacccaagtaatgcagtatattgtttcaattgtaccgctgaaacatcttacttttgggaaaataagcaataaccaatgaaaaacttattcttcaatactccaaaaaaaaatccatactaattataaaataatagaaattttcactggtgatttagaagttgtttggaaatagtctgattcaaaagactgaaacattttcattaatcaaaacttgtcttttccacaattcaattttcaagaggtgaatctaaaacaacgtgtcataatccatacttttcaagaatttaagaaaagccacatcatatacccaaaatatgttagtaacagaactttaagcgtatatcctttgtgaaaagccacattaaatgcataaaacttgcattgaggcatgcttaaataatatacatacatatccaagcaaaccgtgtatacacttgccacaaaaagaaaaatacttaagtaagcaactgatgaagaacc

SEQ ID NO: 332565 - DNA, 602 bp, Cannabis indica
cataatttaagtaagtactatatcgatcattgttatatttattttatgtatagaacaaatctattagaaatagtattaataatgattacaagtaagatacggtgatgacatcaactttaaatacagtggtaacgagatatacagtgatgatagttgttttgatattatatgatgagttttctatatatttattgccttctttctattaatttagatatctattttgtgtaagtatttagtttttaattttcttcactataatgtacatttaaaaaaatttcgtgattttatatttatattagaaattttatgattatttttttttttttgaattatttagagtttcgatataattaatttattattttttaataaacatatatttttctttttaaaaaaaaaatgcataaaaataaattcaaaattatctgataccgattttattgtttaattaatatttatataataatttaattaccgtacgcgaagtgcgcactgtttactagtatatatatctattctatataaagtgtgtctatataactgaattcttggtttatgagaaattcatgggtgactttttatttatatttaataaaata

SEQ ID NO: 332566 - DNA, 933 bp, Cannabis indica
gttttatagacacctcatcaaatttaggtaacatgtgactaaaaaaatatttggacaatttaggttagagccagtacctcatcaaacaatcagttttgaaatgagtttggaaaacaaaatgttccatcttctcttaatcttatatcatttatactcttatttaatttcttctttttattctcagaggttgtctctgcaatttgtttttctttctccattttattaaaatatttttgagcatggctagccacttggactggagttcttgtaccaccaagtaaagtagatatttctgtccaattaccagaaccaaacttactcatcccttgtaaaaaaatcctacaaatataaaacactaagcattattagtttttgataatacatgtttaagaagtaaataacaataatatagtattttaggtgtataactacttacatgtgttcttttacagtccaacgaccatggtttgaagaggttgattttcgtttgcgagttgaaagagtttcttgttgttgatattctatagccggcgcaggagtgtgagtgagaataggaaatgtatgtgttgtcgttaccatttgtgcatcttgcttgttgttactttggtcccaaccactctcactactataatccaaataataatcagtaggataagtaagtttaggtactaattgaggtgtataacaaaattggtagggttgttggttgtaatcattactttggtcccaattaccactctcactactcatgttcaaataataaggcttgttcatttcaggcactagatgagatgtgtagaaaccttggtagttgttggtgttagtagtcgaggtatcactccaagaactactactcgcctttatctcatgattaggtttaacttcttgattaggtttgaagaattcctcagggagatcatcgaggcctatgcc

SEQ ID NO: 332567 - DNA, 568 bp, Cannabis indica
tccaccatgaagtactcattagctaaattcccaattttgttgatggccgaatcatcgatggacttcaaatcaataaccagctgactttgtgaggagacataccccacttttgggaggcgtagatgacgaagagggcaaacaaatacttaatgcccttaggagtgaactgggtcgggcagagaccaaagaagtctgccacattcttgaagtattgatgcaaaggcatcaatgccccttgctaggcatgggcacccgaccaagtgcacgtcccctttttcagggtttgtggctctattattgtgggcgggaatgtagcaatccaatttgcctaggcagccaccctggtcgagagtctgaaggtgctcctcagtaaccctggatggaggacttacccacctgacgcccaaggcaccttgccttatatgaggagccgcagcagtaagctcctcactgatgtagtccacgccctcaactaggatgtccctgtcagcattgactggctccccagcctcattgtactccccatagtttgggggttcaacctttacctcttcctccgcctcggagg

SEQ ID NO: 332568 - DNA, 707 bp, Cannabis indica
tgaatatgagacaaagatgttggttggagttagtaaaggattacgattgttagatcctctatcatcctaggaaggccaatgtagtggccgatgccctgagcaggaagggtcccgggtaggtagctagtataattcagatttcttctcagttagcagaggacatggtcagatctagcattgagtttgttgtaggcaagcttcacaacttgacgctgcaatctgatctgttagaacgaattaaagtcgctcagatgactgatccagagttagtaaaaatcagggaagaggtttcagctggtcaagccagagattttaccgtgtcagacagtggaatgttattgtttaaggccagggtttgtgttccaaatagtgtggaacttagaaacaaaattctcgaggaggctcataccactccatattccctacatcccagcaccaccaagatgtaccaggatcttaaaccttacttctggtggagcagaatgaagaagaatgtggtagaattcgtatcgagatgcttaacagatcaaggctgaacatcagagaccggcagggttgttacaacctttaaccttacctgaatggaaataggtggacatcgcgatggactttgttgttgggttacctagaaccacaggtttgttcgattctatttgggttgtggtagatcgattcacaaagtccgctcattttctaccagttaaaac

SEQ ID NO: 332569 - DNA, 567 bp, Cannabis indica
taggatgttaatgaaacatacatggtagtaaatctagatcctggtaaaatattttcaacatgtgactcttacaaagggtctcttcaatttcagctcattaatgttgattgatagttttaccacatcgcgtcttaaggtttgcatgtgaagatagtttttcagacagtaatgagtacataacgtacacttttggggggaatctgagatatttaaaattttaaatgattacttctccctttcgaactgcttataaataggattgaaaaccctaattaatcactttagtcattctcattcttgaaaaactagagcaaagaactttttctctctcaatttctttgaagaattttcaaaaaacttgggtcagcaccattctaagagatcaaaagcttaaaatcagtgtgttgacttcgcttttagcaaacgacaatgagtcttttttataagagataaacgatatgtcataatgaatatataataacgcaataatacgacacaagaattttatagaggtttagccccgagcagttcggtaatagcctaatcctcgttatttgtattgactca

SEQ ID NO: 332570 - DNA, 517 bp, Cannabis indica
tgtgtagaaaatttaaataataagtttttttttttttaaagaaaaggtaattgtgttgattaaactttaagttgtaatatatactaactttattattttgcgtaacataaaattgaaaagtttagtttgggatatgtacattagtgattacaattaaaaaaaaaagttttgtttaaatagtttatgagatatattgtgttactaaaactttagttttataatatgtatgtggtattattatatttcttgacatattggatgatatagtaaaactttaatattgtagattgtggatttaattagcaagtattcattttacaaattgaagtgaagtttgtttggtggttcactgaaaggggtgtgtacaatcactcatttctttacttaacgacataatattgttcatcttagaagagtttgaacatcttaaatattcatctatactgaagtaggttttgagattaagtgtgtgttgcgataataatggaaggttgaaacttgtgtgttgtagtgaagt

SEQ ID NO: 332571 - DNA, 659 bp, Cannabis indica
tgcggagatataaggtaaaacttactatatgatatttgttatttgtagatataatatatgaaagtagaaaatgttatagaaacagagcaaattctgcctaattttcaattatattttttgtgtgttgtttatcgtgttttttatttgttgatgtaggtacttataaaattggaaaatataatagaaacaatggaaactctatctaatttttaattatgtttattgtgtgttgtttatcgtgtttgttatttattgatatacgtacttataaaattagaaaatgttatagaaacagaggaaactctgcccaatttttaataacattgaagatttataaatactaaaataatttaacttgtttaaaaattgctttgaaataatttttaacttgtaataccattaaattattttaggtaattatagattaatatggatagagattggatgaaaaagaatagatcgtcaaaaaggtatgaagatggagttaactatttcatgaattttgccatgcaaaataaagaggatcctactatgatatcttgcccatatatgaagtgtggaaatttaaaaggaacttctgtccaatgatgtgtactttgaatgtcaggggtgagaattgattttaacttcaaaataaacctaacccctcaaaattacaa

SEQ ID NO: 332572 - DNA, 671 bp, Cannabis indica
ccaaggtgtaagtatactttatcgctgactatcacatcagtgtaaatccagtgcactgataaatcaagggacattatcttttgaagcatataatcacaattaccttctactatgttgacaacactgtaattgtgaataactatatggtctagatttaaaagattttgtacacattaaatcataaacatgaaaactacatgtaaacagaaatgacttctaatcttctattgataacaaatccgattgtattgtaatgagttttatttagggcataaaatcccaacaaactcccacttgcactaacataaaacaagtagtgcatttcaatcaatcaattgtcgtgatatcaagatcaagtgtagtgtaattgactaaacccaaattcctgaaactgtaaggatgtggtaagctactgccttgtccaccattacttcctatgttttcataatgcattactcatctagggatactgaattctttactgtttataaagtgcatctgaataaacagaaaacatgtctctaattctatccaaaatggaatagagataacacagttaagaactttagttagttgaaaccttttagtgcttttcgaaagcaacaaagttgtgtagcttcactgacggagcttaaattactatagataggttattactgttgggttttatg

SEQ ID NO: 332573 - DNA, 650 bp, Cannabis indica
cttttgtttcattttgtttttttgttctgtttgtgttttccagttttttagatattttgaaacttcagtttcgttttagtgtctcttctcagtgggttttagttgttttttaatagtttaatccgtttatgtatgttgtgttttgggaatattattaggtatagttgtttgctgttcatttttaggtaacaattcgattttagatttttgtagtttatattcgtagaattgtttttgtttgtcactttgtttttagtttttctttttatagttttattatagtttgtatacttgtttatttgcaatttatatttatttttgccatgtttgttaacttgcaggtctgggattacaaatttagtccctctggccgttgtatttatatttatgttttccacccccaagttgtacatagcctactgttgagtgaagtgtaccagcccaatcttaaagaattttgggctaaggttgctggccgttgtatacggtttagtgtcgaggagttttatttgatcactgacattgattgttttggtgattgcaacaaattattgttttcccaggaatcaaaccagttgattgaggtttgtttctgtggtgtaaaaaccattgatcataaagctattgaggatgcttttttgggtagtagg

SEQ ID NO: 332574 - DNA, 730 bp, Cannabis indica
aacagtatacaatttcttctaaatggcctactaccccacattaaaagcaggctcaagtttagcattcaccctaatgaaatctcttgcatctgagtccttacactctggcaagagaggttaaatcaaccgcccgagcttagaactggacaacccccttttctaagcaactatatcctcatttcgagcgatatactcttcccaccttcaactagattagactccctagcggtcttaacagccatttcctcaaaacagaacttcgccattcgatcgcgtttagtgtcattctccatcaccatgctgcccgagatcaactatgtacgttctactacctttctactcagataatctcttacttcatagcatacatttaaacttagtcttgtggtattggaaaaattcatacccacacgacgaattccgagcctagtaagctcgccattatccttactagatcgccccaggtacatcttccagtacactcgcgaccatttctttcaatcatcaaaatctttcaagctagaattaatgctaataagcattactacatatacataaacacatttaacaattttatcataacttatcatgcttccctaacaacttaaacatttcaaataagcaggcaattcatgcaattaataattaatgtatttatcaactatcatttagcacttactaagccatgagtcgaacgagtcttcgcagccaatgtacatatcaaaccagt

SEQ ID NO: 332575 - DNA, 520 bp, Cannabis indica
tataaaccgactaaaccgactaatgtatagccctagtgtcaatggcaatccatcaacaaagtccattgtaatctagtcccacttccattctggtataggcaaaggttgaagtaaacttaaaggtcgctgatgcttagccttaacatgctgacaaactatacacttagctacaaagctagccacatctcttttcataccttcccaccaatattgtctcttcaaatcttggtaacatctttgtacttctaggatgtatagcaaacttgaatctatgggtctcaatcgaaatggactccttaagattaggcctcaatcaaaacggacaccggaggtggccagaaaatctgttcaaagtttgaacctccaaactttgacttacgattctgggctaacgaaggcgaaaggagcagcgtcgcttgggggttaaggtcgccgatgttgggttttgtgccctaaataaaacccatttcaatataatcagatttactactaataaagatcagaaataacattttatgtt

SEQ ID NO: 332576 - DNA, 782 bp, Cannabis indica
gaattgttagcataatcctataagcaatcaaagcattcgagtaactaccattaacttcttttatataattcaacacatcaattgccttttttgttccttttggcaagttatgtcgtagcatttgtaactattgatataggttatccttattaaaatttgaaatctcgccatggctcattaaattggtaagattatcacaaaatctcttcaaactatctccatctgtagacttcaatttctccaagttaagcaaaagtccaaaattttcttcaaacctctcgaattgttcaaacctaattttagaagaaaatatattattatcaatatatatacactatacatataatagatcatttcatatgagtatatatttagtcaaacttggattcaaatgaagaaatagcttgatcaactatgtagagaaaatagttaattttgaaataatccacaggtgattgtacgactgcattgcaagtactctcatcaaattgtttctttttgtgacatgttcgtttttcaataaacacaggttcaattttcatttcacttgctatctttgtagctgcaaccatagccttttcatacccaatttctctatatttttgtagaaacaaaaggagagttttcaactgtctaataactacataaatttcatatcttcactttgaagaacgatactaaccttattcacagcagatagtagatcataccaaatgaccaagcttagtaaaatttcaaaattttgaatattatatgttgctaaagtctcagcatcatttttt

SEQ ID NO: 332577 - DNA, 697 bp, Cannabis indica
gactagcatattgagtataggctgacattatggtcgatagtattgtcttatgaacgttctagactcggtaccgtgtgagacacggggattagggttatgatcgggtgtatgggcgccaggttataacctgggttatttgtatgctatatgttatgcttttcttattgagtctgtcgactcccagtgctatctttatgtgtaggtaagggcaaggctaaatttaaggaaccgtgagtgcgagcaggtgaagattgtacatgtcagggcggttagacctggagcgtaagatctttgggacatcaaggcttttgctgtatagtcgctaggtgacaaaacttttgattatatgtatagcaacttttgtaaagtatttctgtaaacgggatcccaaattgttatatatgtaatagtttatatttttaattaaataagcaaatttgaattatccaggattttcaataacctcgttgattagcaacgagctgcacagtacgtttaaaatcacgataacacgcctatgctagttagggtgttacaactagggcttatggctgaattatatggattaaaaaagaataaaatatagggcaaaaatcaacacttagggtcggccataaagggaccaaactcttgttacaattttgccactttatttcaaccacttattcttctttcaataataccatattttcctatt

SEQ ID NO: 332578 - DNA, 527 bp, Cannabis indica
tttgatctcattcattgtgacatatggggtccttatcatatagcctctcacactaaccacaaatactttctcactcttgtggatgatcattcaaggtttacttggatttatttaatgcataataaatctgatgctaacacaataattcctcagtttctgtcatatgtccaaacgcaattcaaatgcatattcaaaaccttcagatcagacaacgcgcctgagttagtattcaaagagttgtttgccaagaatgggatcatgcatgaatttacatgtgtggaaacacctgagcaaaatgctgttgctgaaagaaagcatcagcatttgctcaatgtagcccgagcattatattttcaggccaaatttccaataaagttctggagtgagtgtatcatggctgcaacttttttgatcaacagaatcccaacacccttactgaagaataaaacaccattcgaatgtcttttcaacaaacaaccgaattatgagcatctaaaaactataggatgccttgcttttgcctcaac

SEQ ID NO: 332579 - DNA, 524 bp, Cannabis indica
catgaacacatccaaatcaaaaaatcatcgttttaaatccatatttcatgaaagtaaatcattaccatggctctaaggctagttgttggaattattctaccaagatctagatttactaacaagtatgtttcaattaacatcctaaatataaattctctaatacaatgaaattaaacacataagagtttagaaaaccttacattgattacagcagaataataatgactccttccactcagatctctaacccttgttcttttctgtcgcagagtaataataagatctgagcttagatctccttctctactttgagttggttaccaccgtcttccacactatgattgagtacttgcttgctatgtgtgggcatgacactctatcactatggctcaaatatgatgaagaccaatgaagggggttcgaaatcactatagaaggtgtctctcatctactagttgtctgacaaatttagaaactagatttggtagtttgaaaaagttggatgagaatgaaagcatcatgtt

SEQ ID NO: 332580 - DNA, 554 bp, Cannabis indica
tattctcgagaatgattgaattgaaagcatgtagttcatatcttgttgtgattattgtcctttaagtttaattgcttaacgacaatgatttttattggcttaattttttaagcatatttttctagttaactgaaacctttgatgagcagcccagtccaactaggattatgtagctaagtctcctccataactctatagatatatattattccatcataattgtatactttttgataatcggataaataaaaactgcttctgatttagagatctagagagaaaaacttagttgatagtatttcactatcaaagtgtgctaattgctatggatcaatcaggtacgcatacctaattagggtaaataccattttggaccttgtgttttacaaaagttactaattggaccctctattttgttaaatgacaaaattgaccctatatttttcaaaatggtaataataggactctaagcttaatttttaacaattctattttttaatgtaaccaactttaagacaatttctaacactaatagttacaaaaaaaaatgtaac

SEQ ID NO: 332581 - DNA, 853 bp, Cannabis indica
tttttcaaagtcaaaatcaaatgcggttgtgtgaaaattggttattagtttatacaagatgtataatgttattagtttgctctgttattgaaataaattttggagacttatttccaagcttatttatttttagactataccagccaatgtgtttttgtatggattggtttttctctatagctcaaaaatttcagggaaaaacagtagtgtcccccattttactaattgctgttgaattgattatacccctatttatggtggatgtggtttttcaaagtcaaatcaaattgggtcgtgtaaaatgtctcaatagtttatagcagatgtcttatgctagttatttattcagagatttgtgtttagcttatttgtgaactgtactatgttttggacatccttttcttctgtttctgagataaattttagagactattaccgtgcttctttatttttgttgatggttaagtcataagtgacactgttatttgtttgattctgttgctgttataatcgttcatattattatactgatgcagggttgtaagacaaaacctgggttaaggaacataatatgttcaatccagaaagaacagaaaggttggtggaaaagattgttgaaaacagaagaaaaaccagcaccttatctgaaagttgattggaacaagtggtgtgacgaagatgaggaaaagtcaagatgtaagtagatatacccttttcatttatcgggtttatttttgaaatatactttctcatatgctgctgcattggtatttggatctgaagtttgagttttgttaaattatcggagatgcggagaagaaaaaaagtaggctatatggtgtttattagttca

SEQ ID NO: 332582 - DNA, 730 bp, Cannabis indica
accagatgctggctcgcgattactatcgcatagagttgcagcatggaaaggccaatcatctgttgatggcgatcttggcaggagaaaacgagaagaaagaggaagatcttgatccccgagttcaagatgaaagaaacttgctaaaaacaactgaagaattggaagaggttattctggacccaggaaaccccaccaaatgtgtgtacattgggaagaacctagatgagtagctcaaatagcaattaataagctttttgaaagcgaaccaggatcaatttgcctcgagtcatggggatcgaccctaagattatctgccatcacttaaatgttgatccaaattacccagtgaagggacaaaaaaggaggcccttggattccgagaggcaaggggcactaaaataggaagttgacaagttgttagtcaacgattctatatgcgaggtattttatccctcgtggatagccaatcctgttctcgtcccgaaacctaacggaacgtggagaacttgtattgactttttcgatctgaataaggcatgcacaaaagactgttttctacttcccaagatcgaccagttagtggatgcaactgatgggcacgagctcatgtcgtttatggacgcatattctagatataaccagataaaaatgtatgtcccaaatcaagaacatacaagcttcgtaaccaacatgggactctattgtataaagtcatgccgttcagactgaa

SEQ ID NO: 332583 - DNA, 606 bp, Cannabis indica
tttcatattaaaacaacagtaaaataacactacaaaacagtaatttaataattttttctctttgccagattttatggtttttttctggtatttctataattccggtgttgatttgtctgtccccaatcacgaaggagatgtgtcgtttgtgttttgttactgtttacagtataaaagtaaatatattgggactgggcagaataaaagaaataaaaatgggcttggacagtaaaaatgtaaagtttgccgtgtcccagtatttttgaaaacatttgataaaaaagcagtatttttgtaagtttcccatgaatatattaaggggaaacttacaaaaatactaaattttgacttaatctttacaaaaatactgttaaaaggcaaaaataacttttatactgccttgagatttttttttcttttgtactgtaaataccgaaaataaaaaatgaggtctccatcttccacatcaacagacagaaatgccacagcaacaccagaacagctgaaaaaccaccattaaatctgatgagatgaagcagaaatattaaaactattaatgttggggctgccatggtttttctaatattatttttgggttgttccact

SEQ ID NO: 332584 - DNA, 610 bp, Cannabis indica
ctcacttagataggttaggtattagacataaatgctcaaccaactaaaattttgaaggaaaattgagtttatatagtgttggggtgaaaaatagccgttggacacaaaaaatgagactcccacttggcaaactgattcaccggttacaaactgggtaatcggttatggagaaccggttaaccgctttgaaaccggttaacctaaatccagatagtgggaaaaagcctaatttttcgcactaaaacagccataactctctactcgattatccaatttcaaaaattccgattttgttctcttagttaaatgaaatgtgattcagatatccagtcaaaaaatttttttgtactatcgggtgagaaaacttgttgcacaagttagtgaatgggccaaaatttaaatttataaaaccttgtgtgctatgaaaatcactttaacaagactaaagtaaatttataccatttgattttgagtagtctttatagagatgagcctcctagattgatttgcatgtttttgatcccatattgactttgactttgacttttgggttgacttttgattttgggctttagaagacctcttttgaatagggtcttgagttgttgat

SEQ ID NO: 332585 - DNA, 541 bp, Cannabis indica
cgatcgttagagatagttaatgatgataacatgctcacttttagacaaaggtggtgtgtagacttattttaccaaaacttgacatggtagttttatgtaatttattcttatatacgcgtcaacttttgcaattgtattatattatactgtgaaatgtgaaatcgctcaactgtcgctagtatatcgcatagaaatcgcaaataatatcaacgttgaaataataacttccttagctcgctaaaaatgtcgcacatacgtcgcatagaaatcgtaaaaagtagacagctagtatattaggcatgtcaccagtgaaatcgccaaatatcgccagaaattgcacaggaatcgcaaattaaaaatttagatggtgaagaaaatcgcacaatgtcccatagatatcgcatacaagtcgcgcaaaacaacattaataaaatatgcagtcaaatcgcacaataatcgcagaaagtcacaaacacatttaaaatatccacaacaatataagttatcgtcctgttaaacaacaaccagcaatacaacacat

SEQ ID NO: 332586 - DNA, 546 bp, Cannabis indica
aagaatatgcacataaattggatccaaaacataggctaaaaatagcctaacagtctactttgtttaaatgtacattataactaactaataattttattattattattattatttttttgaaaggactaactaattcatttataatatatttatagtcattaggcacaaggctatttaattgaataaattttatgtagaaaaagctttgattggttcagagctggcaagcattaattaattttcttatctttgtttcctatttatatctatagtatagattgaaaaagtattatctttgtatagtaattaatattaagtattgaagataatgttaataattaagtgcacgcttcacttcgaagtttaaattaatattacgacctatctaatcattaaatatatccaaaccaatttccataatattatttaagggtaattagcaatttttctctccgaattttgacatgtactaaatcatgcctcctgaactattttagccgttacaaattccccctgaactattaagattgttaaatttaaggactt

SEQ ID NO: 332587 - DNA, 444 bp, Cannabis indica
gtacttgacttgctatgggtgggcatgtactctttctgtaacgccctgacctacaaggacgccacgtgtgtgctttataaatttatttataattattctattagtttaggaaaagtgtggtctgattaaaaactttctgattaaattaaaatatgactttcattcaaaataccaccaaaatatggagatcccttgtttataaattcttttacaactagttccaaaactgttattacaaaagtagaattacatttccaaacatagtcaaagggttgatcctatcccctggaaaccgagacaccgcggttgatatgtacattgttttttggtctggatgatacgtacattttgggaacatggtagtacaattgagtgggagcgctaaccatatatatggaatctatagcttctatctggacatagaattgaaatgatgatttcctt

SEQ ID NO: 332588 - DNA, 598 bp, Cannabis indica
atgggtgactactcaatagttacatttttttttgtaaccatgatggttacatttttgttgacctgtaatagcaggttatcaacatgtaaaaattccttttttagaattaaattatctataattaactatttcttaaaataattaatttttaatttgaatatttaataagactctttttagcaattaatattaataattttatttttatatttaagtctctattatattttttttaacaattaagtcatttaattataatatctacaataaaactctattgttttataaaatttaaactttcaccctttctaaaatatatttttgaataattgatcacaaaatttgagaatagtgcaaaatactagaatatgatcagaatttattatttatacatcacatctaaactcccatttaatccgtatatcgttttagacacaacttgaaaataaataacaatttcatatatgtatatttttatcaataacacatattcgagatcaataaccagtaaatgatgtactaactttgctgatgatatatagtcaaaatcaataattaataataatcaataacatatcggttgctaagtttataaaga

SEQ ID NO: 332589 - DNA, 761 bp, Cannabis indica
tactcaaacattttctaccgccttgatgagtgtttaattcaaccattggatctgtagaattcgaatcagttgccatcataaccgttcgatggtggctgatcacagctgtctcacacctattttggcctataaaagccagccttcttactttatttggttactttcagcatttcaccaaatttcctcagagttttccaaagagaaaataaacttcaaacaccattgatttcctgctcttattccttcgacgctgccagtctacattttaccggcgatcaacaccaacacgcgttcttaaaacttcatgtaagttcttcatatctcgtatacttgcttactgtttgattatatagcacatattacgatttctgggttgagtgttgaacttttgggaataactttgtttgagtttctgaatgacgcgttaaattccttcttttttgcgtttagattacttcttttcactacgttttggctggggcatcatcctcatttcatgtaatgaccactttagggcttagagtagatctcaccctttcagttttaccccttttgccctttctctctttactttttgcaatgtcactacctttgggatttcttgcaccccactcttgtcaaggagaaccttttgaggctttcttttttggcaagtgtccggagggagcttctttctagcggttaggggacccccattccctttttctgaattagggtttggtttggggcctaactgctgggtttctttcgattttttcaga

SEQ ID NO: 332590 - DNA, 525 bp, Cannabis indica
gagctccactctaccttgacctgagctcaccagctagagaagatcgtggtggtggcaggcattaagccttcaacctccaggacctatcaccggctgcctcgagatgaggagacgcccaaccataattatgggggcttcggagcctggagccaaacccacctgatgtccggggccatgctccctctccaagattactttattaatttccttgtatttgtcggccttgcgccataccaacttattcctcaagcttaccgcctgctttcaggcctttttatattttatgcgacacggagctggggcacgccaagtccggcagaaattttgtatatttatgaactcgtttctattcccaaaagggagataaacttaaggacggtttttatggcctccgggccaatcctttgattgagggcccaatcccttttaaccagcagaagcacgtgaaggagtatcgtcaccgcttcttcttctcctctgttttccaagccatggaccgcccggagcttctcatggagtgggtta

SEQ ID NO: 332591 - DNA, 1231 bp, Cannabis indica
attaaacttattacaaattgcgtattcaattaaaataacttaatttgaagctgccacatgtcaatgttggattgatttcatgtggacacgtggcaagtagagaatggtgggttggctgaattttttgtgtcattggacacatgtctcgctggtattgggtgaaagtggagcaagttcgacaaaaggacacttggcgcatgcagaggagagaacacaaaatgcatatttgactttttgaccatccttgatccctacgtgaaagacaagcccacttgtgttggtagtgtgtgataaacacacttggacaagctgtagaagtgttttacacatgcgcgtagggaagtgaaagggggacaagggctgatggaagctgatgaaggggctgattggcgaatggataggcgccacgtatatgggctgtcttttggaggagtaaaaagggccggctgggcttggtctttgggcctttatcttgctcttcaaaaataccagctttcaagtacttgagcctcgtttttatcattcttttttattttttttctttctttttataaatgctattttctcaattaaacacaaataaaatacagtactctcaacacaaaatatatgacatgaaaatatttattttaaaatctaattaatttataattgtttgaataaaaataatacattttttttatctttttatttccttttctcaattatgccatacatactaatttttatttataaacaaagataaaattaatcttaaataaaatattttcaatataaagatatataactataatttcatgaaaatattatacaaaattaattttatttttgtatttttacactataaaatatgtaatattttggcatttaacacaacccccaactagcttattgctagtccctagcaattcaagcagataacaaaatattaccaagatgaacaaatcaaaacaaactctgcctaatcgaaataaaataaaatattggtgtaaactctagaaagtaatatattaaaacttacagtagatataattctagattttgtgtgtgtgtttcaaatcatattctttgctttaatccataacaaagataatattgaaaaatcattaaagcaaaaagtctcaactccaaatcctcacaggtattgaaatatttgaaaagatgaagggttgtcaatcttggagttggaaagatatattaattgacggtcaaatggataaagatttttagg

SEQ ID NO: 332592 - DNA, 1156 bp, Cannabis indica
atgtctgatcttcggcctatcgcttttatgtaatgtcttagtttaaaatcatcacaaaagtcatggttaatagaatgaaaccattcatggactccatcatttctgaaaaccaaagtgccttcatcccaggtagactaatctcagataacattcttgtttcttttgagattttacactacctaaagaggaaacgaaaaggtaaggaaggtttcatggctctaaaacttgacatgagtaaggcgtatgatcgaatcgaatggaattttcttgaagcaatgcttcgaaagcttggttttattgagaattgggttcggcttatcatgaagtgtgtgaaatcggctaactattgtgtgactcatggtaataacgaagttggcccaatcattcctacaagaggtataaggcagggtgaccccttatccccatatctttttatcctttgcgctgaaggtttcacagctttactgaagaaatatgaacaaaatggttggcttcatgggtgtaaagtggcaaatggtgctcctagagtatcccatatgctttttgcagacgatagctacctatactgcaaggctactgaatctgaggctcggcggattattgaagtactatccaagtttgaattggcttctggtcagaaggtgaatctagctaagtcttcaatcttttatagtactaatactttgaactctataaaagatcgaatcaactccattttgggcatggtcacggctactgaaggaagtttgtacttgggtcttcctagctctatgggaagaaacaaatcagcagccttgggatttttgaaaaacaaagtgaagagtagacttctaagttatggtacgaagtttctttcaagggcagggaaagaaattttgattaaaacagtcgcacaagctcttccaagctatgctatgagtgtatttttgatcccgcaagaggtcacgcgagatatggaaagcttgatgtccaaattctggtggcaatcatcaaataattcttcatcaggtattcattggatgtcatggaaaaagctttgcaaacacaaaactaaaggaggcatggggtttcgaaatttgagaagctttaacttggcgcttttgggaaagcaagggtggcgtttgcttactaatccagaaactcttgtggctaggat

SEQ ID NO: 332593 - DNA, 1680 bp, Cannabis indica
atcaagaagaagtttgacgctgccaaaggcagatgggttaacgagctaccttaggttctctgggcccacactcctttactcgttagcattttggctcgaacgcaatgctgcctgttgaagtgagcatatcaactcacaaaagagagttttataatcaagaagaaaacaaggaacttttaaaattagccttggatctacttgaggaaaaacgaactgactcacaaatcaccaacgcagcataccaacaccgagttacaagatacttcaacaaaaaagtcaagaaaagactattcaatgttggagacttggcgctaagacgagtctttgcaaatacgagagatgcatcagcaggagtgttcaacccaaattgggagggtcgatatgtcatcgaagcagtagttggagtcggagtttatagattggctcgactttatcgctctctaataaagaactattggaatgtagaacatttgcgaccatactaccaataaataaatgatgtaactcgcattactgatgtaaactttaaacttcaattatgaataaagagaatgatttatattaagtaattacatagttttgttctttaaattttacttaaggggcatttatgtatgattaaccggaattcatctagaaatacattgtataatgcaaacccgtcatttcaattcttttttgaaattcaaaggttctcgactaaacctctttgacgaaagtggagtcaaactgttataactccctgaccaaacctttttgacgagagaggggtcgaatcgctataacaccttgttcaaacctttttgagaagaagggatcaaacaaatataatttttgattttaaacctatctgatcggaaaggaaaatcaaaagttagaactcgcgtataaaactgaatcatgatgccttcataaaagtacttaaatggagaaaatcgatagataatataactattcatacgagcaaattaaatatatagaaagtgataaaatcattaaagtatatttaagtttgcttaaggaagattataactgctgtagcgaggcagaattgacaactgctcaaaaatcaaaaagtttggtagattgccaactagttaaacaggaagattacgagcaatggaaaaaccccaaaatactgaacatttgattaaaattgagttgtttacattgtgaataaaaacgcaagtaaacacaattgtattaagttcaaatgaaaatagtacaaggtattaagataagaaaaaacctaaaattggttacaaactagtctttaagaaaatgccactaggggcaaaccattaggtgatcttcctaaacaaaggatgagaggagaagtcgatgaactcaagaaagaccatcttcgtatagcctgagaaagactgtttacacgtagctcggagaaagactgactacacatagcttgcaaaagactggatacatgtagggagccttgatctcttcacagacctcattctcctcatcatcagaagatctcatttcttgaagccgagatctctttccaagcctcaggaaattcctcgataccaaaaagaggttcgcaccaagatcttctagcataggtttgggtcttaggttcgctggattctctgatagaaaccataccaattccattcccagctttatctgcaaccatgccaaccttcctttgaaattctt

SEQ ID NO: 332594 - DNA, 877 bp, Cannabis indica
attatgtttatgtttatgcttttccaactaagtctatcgattcacagatattatttatatgtgtaggtaaggacaaagtaaaggttgagcagcagtaagctcaagctagataaagattgtacatattaagatggttagacctagaatgttcagaacttcaggacgatagggatttttttgactgtcgttaggcaacaacttttgcataaatgtattttggaaaacaattataactttttaaacgggatcccaaattatgtaattatatctatttatttcaatttaagttcatttatgaaaattttgattattcacgttttttaataaacccttggtttagaaaaggagtgcataataattagaaaatacggtaatatgcctaatctaatagggcattacatttgacatacaacaaaagttgatgtttgagactttctatgtaacggtcagtattcccgtgatccgtaaggggaaataccgggtaagttgttcaatttcacatcgcctagggaatgacaagtgtgatgattctgagattgtgtaggtattggactaatcagttgaagaagacttaaatggattgattgtactacctatataaacaaggtgtatcttattttttggcatctcatcatgaaaaaactccacggttaagcgtgcttaacctagggtaatttcacgataggtgatcctagaaagttttcccaagaagtgtacaagtgaggacaaaacacgctggaaatattcgttttggtttgtagggtcaagtcattatctatgaagcaaccaaagtgatgtactcgtgtataagagccatcatttcgtgggtgtaagggcccaatggaggcttgaagcagggacattacaaatggcatca

SEQ ID NO: 332595 - DNA, 532 bp, Cannabis indica
taattagcctatacattatttatgttcctctattaatataataaatatttaatattaagattcatatattttaatttaataattattataaaaaaaaaatagctaatcattcacacttaacacctattattacacatgatcaattagcaaattagcagcacaacctaaagccgaaagttaagtctaaactacttttagccgaaagtaaatgtgtgaattatggaccattaattaatccaagcacctatactattagcttaacaaaaaccaataacacaagtaaatcataatatatatatatatgggtgactattcaatggttacatttttattgtaaccatatggttacatttttttttacctgcaatagcaggttaacaataggtaaaaattccatttttagaattaattaattataattaactattttttaagtaattaaataaatatttaacaaagacctattttagtaattaaaatttttaaataatttttttatttatatataaatccttgatttaattattttaac

SEQ ID NO: 332596 - DNA, 635 bp, Cannabis indica
atgcactaagtagaaagcctcattgtactttggcatgtttggctcttgaggactggaaaaggacaatcacaatggatgattatagcttgcaatacgatgaaggggaagaagtagcttgtatctctaacatagtggctacaccagtactacttcaacaagttaagcaatgtcagtggcaagatgaaaagctaagacttatttggaaccgaatccaggatggtgagcaactagacgggtggacagttaatggtgaagggtacctataccatatgggaagactagttgttgcagatatccctgatcttagggagaccattttgattgaggcccatagatcaaaatttgttgtacatcctggaagtacaaagatgtaccaagatttaaagagacaatattggtgggaaggtatgaaaagagatgtggccaactttgtagctaagtgtatagtttgtcagcaagtaaaggctgagcatcagagaccctcaggtttacttcaacctttgcctatacctgaatggaagtgggacaagattacaatagactttgttactgggttaccatggacatctttgaagcattacgttgtttgggtgattgttgatcgtttaactaagtctgcccattttattccaatc

SEQ ID NO: 332597 - DNA, 633 bp, Cannabis indica
ttatataaatatatagatttaaaaaatagttgtaaaataaaaacgagattcataaattgtataattttatgtttatttattatacgtttattttaattaatcatgttttccaataaatcttttgattaacaaagaaatacacattaattaaaagaaatcattgtagcatgcctaaattagtaggacgttacaacctatctcttacaatatgaatttttttctactaatgcacatataattataaatattaattaaatactaataaactattaattatctgctaattttcatgactaaatatgtggtaattatatttgtttttaaattaaaggactgtaattaaaagattattcttataattttagataggtcaacttaatgtttgttttggtataatcaagattggaatggaatgaagattacaattacaatgtttggttggaccttttaacttttgtaatcctacattgtaatgagtattacaccacttgcatgaattcttattacattacatgggtttgactcataaatgagaattacaattaccaagtagaacctctatttaagaatactctattcaagaataacctctaatttgttataaaataatcaagtcccgatttgggccagtta

SEQ ID NO: 332598 - DNA, 809 bp, Cannabis indica
tattattattacttttcttgctcagtccttgtgaatcacgggtgctatgtggtgcaggtaaatgcaaaaaaaaaacctagatcaaccatgatgaggtggcagtcttctccagcaatgtacatattgacctcgccggcctgcgtgccgagttgccaggagttgttttgggctgtatctgttgtgtattttgattttatagtttaaatgcgttgtcgtatatatttctttagcaaaactttttacaacagggattcccggaacacactttttatgccgttataatgtccatttttagtgttttattttagtcaagtttttaatattatcacggtttttaataattaattattctattagtattaaactagtttataaaatcacacacgtggcgtccctatagattagggcgttacaacttggtatcagagcagccatggttttaaaggtcctgaagactggtcgaatatgtacatttgctgcgaggacaggtcgactcatggtatagtaagtatttatattatttgctattggattacctgcctaagcaattataaagtatgttgggaaaagtagcatagtgttaattttgataacaatatgtgtatggtatattcatattgatatgatatacgtctaagttttaaattgttagaagatatagactaaatgtgtgagaagttatgctgtaagggcaatcgaatagtctgattagcgagttatctatgctcggggaaaacggtatgaaagagaattctttattgccataatgctgggaacatgtaaattctgttatgcaggatatgattaga

SEQ ID NO: 332599 - DNA, 547 bp, Cannabis indica
ttaatttataacgatcaacaaacaaacgcaattatagctttgcactccggtataggtttttagggtataaaagattcgaagttggtgttgggaaacagtagagaggaattcaacgcgtggatgagtgttgattgtgaagccagagccatgacctatatgaagccaattgtaaaatatcagattactcgtggaagatgatggtttgctcccaatacatatattaatatatacatgtaacaatgttatatatgtataactaagagtcacgggttcgtaatcgtttatataaagatatataattatgtacatatatcgttgttagttgaatcacttcacattccttcacgtcaaatgcatcctaacctccacctctcatcgttgttatcaattctctcttttaattttctttttattattcttaatttcaaattttactttgtatgttgttaaattattgaagcttacgtgtttgttaatctactttcttcttattgttgggttgatttgattaatttcaattttgtagtttgggttttcaagtggcttt

SEQ ID NO: 332600 - DNA, 684 bp, Cannabis indica
gaggtagagtttgttacgagcagtctgtatttttttgggtttttttattttatgcgattttatgcgacattgtgcgatattgtgtgcgatgtcatgagcagtccaaggttagggatgaaatgattaattttggcgactttgtacgatttaaatgcgattatgtgtgcgattgtaatatttggcgatttatgtgcgatctttgtgcatcattatgcgattttgttgagtatgtgatattgtgcgacgttatgcgatttctttccattgttgtgcgattattgtgcaacatcataactggtttatattatgttagcttaaggcgatattgtgcgatattgtgcgatttactgtgcgatatagtatgctgattttgaaatgtaagtttgtttgtatttctttgggacagattcatctgtatttgtgcctgtactgtttgatggcgtttggactttggagggtttcaactgggtatttgattcctcaaaaagtaagacattgatattagacattgactgtacactgaaaagttgcgtgaagttttgcatgaggagttggaggtggaccccttggtgtatgaattaaagttaaaagttctttacatgtacatgaaaggcactaagtttccacctgaggttttagtgaaagatagtcaactacgagtgttcttgagcatgaaggcaaaaa

SEQ ID NO: 332601 - DNA, 581 bp, Cannabis indica
caacttgaggaagctcttatggtcgcttgggccatttggaatgcaagaaacaatttgctatggaatcaaaaatctactacagcagctgaggtaattctttctgcaagaactcatctttaccaatggcagtgtgctcaacaatctaaattggagcctcctttgtctcatttcgagatagggaaggaggcagagcactggacgaaaccggaaaggaatatggtaaagattaatgtggatggggctatctttgaggcaatgcattcttttggctttggtttcattgctcgagactgtcatggagagatcattgaagctggttcttttaataagaatgggacatcttctcctgagcttgttgaattgattggcatcaaagaggctctcagttggatcaaggataaatcatggggcagaattgtgcttgagtccgactgcttactggcggttcaagccatacataccagtgttgctttgccttctacatttggtatgttggttcaagattgtcaacacttgctttcacagatgtctcatgttagtttgtgttttgttaagcgttctgctaataaggccgcgcattt

SEQ ID NO: 332602 - DNA, 673 bp, Cannabis indica
tcttatattgccaaaaagtaattgagtaataaagagttcttttctacaaaataattgatatttgtccataaaccaaattgcaaagtcattttcatgatagcttttgcttttttcaaaagtgaaaattacacctaatatggtattttaaaatatttttacataaatatggcaattttaagtttggccattttgtatggcatttttttattttcagacttatatatggtatatactatgccatatttatgttattattagttttgaataccatatttaatgcttttgtattttttctaagtcaaaccctaattctttcaaagttgtttatctcttagctgctgcctctctctttcttctctttctccggtggccgatttttgctccgattattgttagcttcggtagttgaagatagctccagcgaccaatagattctcgcccaaccgctattagctccggtgaatgcttgtatctcgtctagacatttccaatcggcaacatcgaatttaccgtcggaactgtcggaggatctatggtagaggttgccaaagtcgtggaaggagcagtcatatttgttctcctactccagacaaatgtaggagaaaaggttcttctttttgaaagaactaggggaaaaaaaggaaaaaaggaaaaaaagatttccttaatgttt

SEQ ID NO: 332603 - DNA, 1525 bp, Cannabis indica
aataaatacaaattaatacaattaatgtatgataattaattaaatggtaattccttaatatgaaattaatggcagatttttcaaaattaatttagacaataaattgcatgaatttggtaatatataattaaatgcacaattatacaaattagcacaattattacatacctaaataaatatgtaataaattaccaaattaaacaaatttccatttttaatttacactagacatatgtattgaacaaaaatagaaaattgactaaatgcaatttatggactaaattaacaaaaaataggaaaataattaatattccaaataaataaaaaatttgaaatttttcccctcttttttttttttttgtaaaaatgcactgcacaaacgacatgtcgttttttgaaaaacgcaaaacgacacgtagttttacaaactaaagggctgatctcaaaaatgaaaaacgacatgtcgttatctcgtttgagaaaacgacagcatcacaatcctgaaaaacaaaaaggaaaaacgacctgtcgtttgatcaaacggcagcagccaaaaaactgaaaaacgacatgtcgtttgtggaaaacgacacgtcatttgggtcgtcttcttcagccaatccgggtcattttgacccgtttttctgcacgcgggtccaacagtccaacggacccgacccaaatccgatcggaaaagacaattctgacaatcaaattgcgtgttttcaaatctaaaatgttctaaatagaataataaagagattcacatagattttatgcacgaaaacacgaaaaaatatgaactttaatatcacaaagttaatcgggtccaaaaaagttttaactgaaattttttttccatctttaagtttttcaaaggattttcaatgcttacatcgatctataatactatacgaatataataatatatttaaaattcgaaataaacatcgaaaaaatgaaaacggaaaaatcaaactttagatcgataaacatcatgttatatatatatatatgcatgtatatatcacataaaatattataaataaatgaaagtgagtattataaatcttattatgcgataaaacatatatataatgtacaatatatataaatatataccgaataaaaagtatatattataccgaacctaaaatgtatataatatacatataagaatggtatgaataaaaaagtatatatgtatatacgtatgaaaatatatataatcgggattgtatgaatatgaatatatatatacacgaacgaaaatatatatatatatgaacactgtatatgtatatatatatatgaaactcaaccaaaatcaaggtaaagataaaaccgttctgatactaactgttagactatatatagagtatgtaatacagcatatatatacgatatgaaatgcagaaaataaactataaccatatcgataatatatgcaatgagagatcgatatacctccagccattgatctttcagcttcgatcccggcgatagcttcggtattggagttcgg

SEQ ID NO: 332604 - DNA, 1302 bp, Cannabis indica
aaaaatcttaagttaaaacttttttttgtgagaagtgagaattgagaaaatgactttttgaagatatattgatcttctgaatttttaaaatcaaaattttcgaaatttaaaaatatgacaactactagagggatattttttgtaaggatagagtctaattgtaaatttattatctttatatttccttatcacacatgttccctcttgtaaaaaaaataaaatatatatatattatgtccatgttgggctttgtgtcctaaataaaactctatttcattgtaatcttttctattcaattatcaataaagaaacagatttattttcattacttatttaatgtgtttttttggttcatgtgatcatttactgtttatttgatttataaattcatccaaatctttatcacattgataatcttgttaattgtgttgtcaacacagtagaaagtaatcaagattgtgtgatgaaatatattcctatgatttatcagtacacaggatttaactgataggataatgtacaatgtagtttacttgcaccttggataagtgatatgtcctctccaaggcattagttaaagtaagcttgggttggatgtatggagtatgcatcgaaagggaccgatattgaacttgaatcagatataataaacctactgtaatatctattcaattcaatatcacctagttgatctttgatcaagtgatctcaatcctgagatggttaggttctagttcagttgcattatttatgttcttcaatttgttcgttaaagtcgaccaaattgttctactcatgacatatagattaaggacatgatacttcaattgagtgggagcactaatcatagatacaaaatccatagcttctatcctttcatagaagtgaaacgataatttccttcgagcgtggcttaatagagataaatgattgagtacttatttcagtgattatattagttcactggaatatcatttataggtagctaagtgttttaaggataaaatacgttgaagggtgtaacggtggattagtccctactcaatgtagatcatctatataggatcattgattattaggattataacaaatggataatctcatagcgtatatatatcgtggaacatatagagtgttcaatataattagagtccaatttcaaatctatagtggtgcaaggaggaagtaataagttagaaaatttacttggtaaattttagatctaatgattcgaagctcggctatataggcccatggtgcccatactagttgagacaaattgcttgtaagactcagttaatt

SEQ ID NO: 332605 - DNA, 552 bp, Cannabis indica
agtctataaagctagatactttctccactccgatttcttgtcagcaaagctaggaagtaacccaagctttgtctggagaggtatttggactacccaacctctactccgttcgggtgtcagaagaataatcggatcaggggacacagtaagcatactaaaccacccgtggctacctgtacaggataacccatatgtttcaacaatacaccctggtttaatgaaccaacatgttagctccctttttcatgtgcatagccgctcttgggactatgaccttgtacgagatatgttcaataatcgagatgctgatattattttgggcatcccactaagctcaaatgtctccattgatacatggtcttgggagggggaaagaacgggcgagttctcggtcaaaactgcttataacatgctccaaaaacaaaagcgcaccgaagagatggtttcaaactcagacttctggcggcaactatggcaattgaaggttcccccaaaagtcaaaaaactttttgtggagagccgttacaggtacattaccaacttgtgtccaac

SEQ ID NO: 332606 - DNA, 1492 bp, Cannabis indica
caataaagtctcatgttggttacagaacatgtaatctgttaatcaaggacatgcattttaatatggttatatccagaatatgcatccatgaatgtcataagctcgtgtccaccagttgcatccattaactggattgatccttggtagtgcaaagcaatcctttggacacgccttgtttaaatctgaaaagtcgatacaagttctccaagttccatttggttttgggacaaggaaagaatttgatatctatgaggggtagaatgcctcgcttataaagtaattagtcaacaacttatccacttcctcttgagtaccccttgtctttaaggatcaaagggacgtcttttctatctcttcgttgggtaattcgagtcgatattcagatggtgacaaagaactttagggtcaatccctatcatattggagtggctccaggcgaactgatcctggtttgccttcagaaaacttattagttgctattttagtttttcatccaggtttttcccaatgaatacacactttgtgggattttctaagtctaaaatgacttcctccaattccttgattggtttcaattgattcttttcatcttgaactcgaggatccagatccttgacatgcttctcgccttcctcagttgtgattgccattagttgatgaccatcttttaattctttagctctatgaggtagcattcacgagccagtagttggtcacctcgcactacacccagaaaagttgatgtttgaaacttcaaagataggtgtttcattgaactaactgcccctagtccaattagtgcaagtcgacccaacagtatgttctcggccgatggtaagtcgacaactagaaaatctttcattatggtagtggataatggctcctcacctacaattcatgagagttcaattattccttcactggcgacactatcacctataaatccacatagatttaccgtgcaaggttttaactttttgctttccagtcccattttcttcaatttatccttataaaggatatgctggaattattttacgaggatcttagatctactcacaagtatgttgattaatatcctaaatatgaacttctaaaacgattataagtaaacacatataaagtatgagaaaccttacattgggtgcagcggaataatatgtctccttccactcagatctctaacccttgtatcctttttgttgcagagtattatcaagatctgagcccgaatgtccttctttgttgaatcttgattcttcacgatcttccacactatgattgaggtacaacttgttgtgtgtgggcactactctatcactaagggatttcgaaacaatcaaagaagaaggaagaagaagaggtggcgacaaggtttagaaagatagctcaggattttctctgaaaggaataagatgaattgtcactttcctgaagccatcactttctatttatagaataccacatatggttaggtttgaattacttgaca

SEQ ID NO: 332607 - DNA, 593 bp, Cannabis indica
aaacacccaaattatcatatttttatcccaaagaaactggtaagagatcaaaaacttccactttatgtgcctaccattatttttcttttcttttatgattatttttttttctattcttctctctctttttttcttttctttttttttcttttcgagaagaattacaaagttatttgttttgttttttttcttttctagagatgataaagacacttccacataatttcagaagtccatcattacctgacatcgatcttatttcagacataacaaccttcccttttccgaacaccggaggggatggccaaacatgtgaaaggggctcccttatgcgaatcgcatgttcaacaggcctaggcgggatcgggagtttcttcttcctcttcaatggagtcacatgttctccctcatcctcatcctcaggattcaagggctcctgagcatactgctcagcccttgcacctgttggattttgtgccctaaataaaacccatttcagtataatcagatttacttactaataaagatcagaaataatatttttatgttgcatggttcacatgatatatttcatgattatatatataatgtat

SEQ ID NO: 332608 - DNA, 670 bp, Cannabis indica
ctcagaattcgggaggaggacataccgaagactgcttttagaaccagatatgggcactatgagtttctggtaatgtcattcggattgactaatgctccggcggcctttatggatcttatgaatagggtattcaaggatttcctcgataactgcgttatagtatttattaatgacatccttgtatactcttagtcagaagaggagcacgagcatcatcttcgaatggtattgcagcgacttagggatcacaagttgtatgcaaagttcagaaagtgtgatttctggttgtcaaaggtatcttttatgggacatattgtcggaaagagcggaattatggttgatctaaataagattgagtcagtgaagaattggccgagcccaaaatctgtgacggaggttcgaagttttctcggtttaacagggtattattgacgttttgtcgagggattttctaaaatctctatgcccctaaccaaattgactaagaaaaattagagatttgtgtggtcagacaagtgtgaaactagttttcaggagttaaagcaacgtttgataatagctccggttttagctttgccatcagatcaatggaaattcgttgtttattgtgatgcatccagacaaggtctgggatgtgttctaatgcaagctgacaaagtcatagcctatg

SEQ ID NO: 332609 - DNA, 725 bp, Cannabis indica
atagtgtggaagattgtgtagaatccaatcaacaagatggagaatcagcaacaagaagcagagaaagagatccaggttcagatcttggtgatgctctgctacaaagaggaatcaagggctagagatctgaacggaaggagtcattatattccgctgcacccaatgtaaggtttactaaactttatatatgtttatttcattattttagaattcatattaggttgttaataaaacatacatggtattaaatctaggtcctggtaaaatatttccaacagttataacctttccataaccaaggctaaaaaggcagtatcctctagctagagttcggacaagggaaaaaagattaccaagtagggaacctcccaaggcagggatgaagatgtggatcctcgacttggggaccaaagaaacaatggtggacccatggatgaactagaagaaattgagatggacccagatcttccgacaagaaagcttaaaatcggaaaaggtttgttgctcgaagtaaaatcagaattgataaaatttctgagagcaaacttagacgtttttgccgggtcacatgaggatatggtcggaattgatccttctataatttcacacttcctaaatattgatccaaacttctgaccggttcaacaaaagcgaagactattggacaaagagcgagcactagccctgaaggaagaggtagaaaagctacggaacaacaatttcat

SEQ ID NO: 332610 - DNA, 299 bp, Cannabis indica
atcttatcgtgaaaaatatcttttctctgacattgatgatgttgtatacagaaataaatatttgatttgggacatgacaaagaaatgaccaattcaatatataatttttattaataaactccaattcaatatacaatttaatatttgattgggatgttcactgtgcgggtggtccagtttttttcatttttttaaaccaatatgcacgtgcagattttctaatttcctaaatcgcactgcgaagctaaaaaaccgcagaaatcgcactgtaaaaaaggtgcggtgcgatgcgatttttg

SEQ ID NO: 332611 - DNA, 663 bp, Cannabis indica
ggtcgtctaactggaggttcgtcttgtacctgtggtgcatcattcgggactaccctcgtagtagcagctacgcattccaattccccatttctctaatttgactcagtaagtctttcctgaagttgatgattttccaattccacaattagaatatatcttgtgggatcataagcatctgaatttctcctttttggaatctttcctcatttacatctctttcgaaatcccattcagcaggatgtcttcttccgttttggccttcttgaggttgagtcccttgaggctctttcctaggacgatgcaccatctaatcttgatcaacattaacaataaatgagtcttagtttccaatggtgggaaaatattcaagtttttctttagtggggagatgtcattttttttagagtcttagttttcaaaaaagggctctcaatgaaaagtaccaaattattaactaagaatttcgttaaaaataaatgaggccttttatgaatccaaagtaataaaattcaataaagcttttgaagtataataaacaatagaataataaacgtaagatatttacgtggttttgtagttaactttacataatctacgagtcattcatatttttaatatttgtttacagagtacaaaaattcaagagtatataaagaataagag

SEQ ID NO: 332612 - DNA, 398 bp, Cannabis indica
cttcagtgtatccttcaaggttttggtgattgcctcaacttgaccgtttgccttaggatgcaccactgtacagaaacttttgataataccatggttcgcatagaaatcagtaaaggattggctgtcaaactgcttgccattatctgagactattttgtatagtagtccgaaccggcatattatgttgttcacaataaagtcttgaactttctttgacgtaatggttgtgagtggttcgacttcagtccacttagtaaagtaatcaaccgctaccactgcatactgcactccacctttacctttgggtagttgtccgatcatgtcaattccccaaatggcaaagtgccacggactttgcatctgtgtcaattccccaaatggttcaattaataaatatg

SEQ ID NO: 332613 - DNA, 504 bp, Cannabis indica
ctgacatgaagatctttctgctaaaagaatttaccagttcagatgtggaggatgctctgcattctatggctcctgataaatccccgggaattgatggcatgtccgctatgttttatcaacaacattgggatatagttgggcctcttgttactcagtgtgtgttgcagattttaaatgatggggctaaccttgatgagattaattcagctttgatcactttaattccaaaagttgaacagcctacgagaattagtgagtatagaccaataagcttatgttcggttctgtacaagttagtctcgaaagccattgtaaatagatttaagacagctcccccagcggctatttctcagaatcaaagcgcttttctctgggaaggttaattactgacaatgtcgttctagcttttgagttagttcactatctcaagaacaaaaagcaaggtcggttgggttatgcaacgttaaaattggacatgattaaggcttttgatcgggttgaatg

SEQ ID NO: 332614 - DNA, 699 bp, Cannabis indica
gatgtgttctaatgcaagctgacaaagtcatagcctatgcctctcttcaactaaaagattatgaggagcgctatccaactcatgaccttgagcttgctgctgtggtttttgctctaaagatatggcggcaatctttacggtgaaaatgtgagatttatacctatcataagaatctcaagtactttttcacccaaaaatatttaaatatgaggcagaggaggtggctggaattggttaaagactacgactgtgagattctgtattaccccgggaaggccaatgttgtggctgaagcgttgagtagaaggggtctcgggcaggtttgtagcacgatgttgatagcccctcaactagcctctgaaatggttagtgcagggattgagtttgtggttgggaaattgcacaacttgacacttcaatctaatctgttggaaagagttagaaaagctcaacttgaggatcctgagctagtcaaagttcgagatgaagtaatggcaggttggcctaaagactttttagtctcaaatagttgaatgttgttgtacaaagctcgagtttgtgttcctggtgttgatgagcttaagaaacagatacttgatgaagctcacactacaccttattcactgcatccgggaaccaccaaaatttatcaggattgaaaaccctacttctggtggtatgggatgaaaagagatgtgg

SEQ ID NO: 332615 - DNA, 767 bp, Cannabis indica
aatcgttaaaccaagaattgcctaacactggaacattctcactaccaaggagaaatcttagatatggagtcaaaaacagagcaaaattaaaattaatgtgtacaagtattcctaagaagctaccactgtcagcctaccagaagtcatgaattttaacaatgctaatctcatctgctcattataaagccaccgtcactcaaaatagcacaacaaaagtaacaaagaagtataaaaatttcatccgatgattgcctgttattgaaaacaccaaaatctcaactgttaagaataatacgattactgccaccaaatataatcgtctcagtcttttcctgtagtgcaactccttggaattttctgaaatcgtcgaagcagtttcttgatcaaaatcgaattcatcatcattataaggatgaacttgatgagtatgaatccctgccatatttacatatatggatcgatctcttggaaaagaaatgaagtactataatttgtagtttatattatagagagaagttttcacgtaaagaaataggtatatggtttattatatttacagagttacttgaagagatttggagggtaagaaggacacttttaattattataatatgatgatatatagtaataatatgtgatgagaaatttccaaagcgtggaaaataaagtattagatatatgcattgggtgagatcatgagatttggaccaaagattgtttaatttttttgggtttaattattaaatatatgcattgggtgagatcat

SEQ ID NO: 332616 - DNA, 984 bp, Cannabis indica
gatcatgtattttgctcagatttgctatcatcttctctccccgagctttgtattctacatgatttaccaccagctgggaatcactgcagattttaatgtgtttggccttcatctcccgggctagctttagcccggcaattagagcatcacactcggcttcgttgttagatgctttgagtccaaacttgactacagcgtgcaggtgttgcccccaaggtgtgacaagggcaattcctgcaccaaataattgatctttagttgacccatctatatgtagtttccaggtcggcttatcttcactgttactttgctaggtgtttgtaccggctcagggttgctttctggtatgctttctttcttgcccgtgcattctaccacaaagtctgctaaagcttggcctttgattgctgttcgcgattggaaagtgattccatattggcccaactctaccgcccacttgagtagccgtcaagaagcatctggcttttgcaatatttggcgtaatggttggtcggtgtatacccgaacaggatgagcttggaaataaggccttaaatttcttgttgctagaataaggcagtatgcgagcttttctattaatggatatcagccctcggcctcaataagtcttttactgatgtaatagactgggtgttgtacgctgttctcctctctgattagcacggcggttacagcatgttccgtgacagctaagtatattccaagttattctctgtctagaggttttgagagtacaggaggttttgcgagttgtgcttttagctcttggaaagctttttcacattcctccgtccacacgcactgcttgtttcctcgcaagatgttgaagaatgggacacacttatctgttgattttgaaacaaatctgctgagcgcgccgatctgactagtcaagctttgcacttcttttgtttttgttggcgatccgaccagtcaagctttgaatcttctccggattggctt

SEQ ID NO: 332617 - DNA, 614 bp, Cannabis indica
catttcctaaaagaaaaaaaaaggaagataaataaaccaagtctacatgctgcgagacttggacagatcttcttcttcttcctcgacctcgccgtcttcttcgtccatcttggtcttctcgcaaagagctaaagttttctcttccttctcctccaagaagctggtatatgttagggttccaaagccatgcctgatatacagtgcaaaaacaaactttatcgcaccgttctacggtctcgatttctttcttagcaagttttttcagcaagcttctcctcaaactcctcggcttggactttgatggtcttctcggcctcctccttcatcttctcggcttcctctttttccgtcttggcttccttctttgctttctcgacttcctcctttgcttttttgacttcttgcatgaggcgggtaatctcctgttaggcgttgtctcgttgctcgcacacaaccttgcattgggatactaatttgtgattcttgccctccaaatacccaagtcgctcaaagagtagttgattggaagcaaaagaagcaaaagaagccttgagaattgcaagcagatgaatataaaagagatataagaagataatataattataataacaaag

SEQ ID NO: 332618 - DNA, 1381 bp, Cannabis indica
cttcatagattcatactcgggatataatcaaatcctgatgtatgaaccagatcaggaacttacctcgttcattacagatcgaggtttgtattgttataaggtaatgccctttggtttgataaacgcaggtgcaacgtatcagaggctagtaaacatgatgttcacagatttgattggagatactatggaagtgtatgttgacgatatgctcgtaaaatctcaacatactgaagaccatgtcaaccatttacaagcaatgttcgaaattctatgatgatataaatgcggctaaatcctcttaaatgtgtctttggagtcggtttagggaaattcctcgggtttatggttaattatcgaggaatagaggcaaacctcgcgaagatcaaagcattagtagaattgcaatccccaactatgccaaaagatgtccaaagtctcacaggtaaaattgccgctttaaatcgatttatatcacgatcttctgataagtgcaaagagtttttttagattttaaagggcaacaagaagttccaatgtactgaaaaatgcgaagaagcttttcaagcactaaaaaagcatttggggcaacccccaatattgtccaaacccatgtttggggaagtgttatccatttaccttgcagtgtcaaaatatgcgattagctcagtactaatccgcgaagaccaaggtcgacaatacccagtaaactatgtcagtaagcgtttgttagatgctgagactcgttctcctcaaatggagaagctagcattttccctggtaatatcgtcaagaaaactacgaccttatttccaggtccatagcattgaagttttaacaaagtaccctttgagccaagtcttagcgaagccagaggcatcaggaaggttgttgaagtggtcagtagagctaagccagtttgacatcaagtacaaaccgagatccgcgatcaaggggcaggccttggcagacttcattctcgagtttccaagtacagaggtggctcccatagaagaaaaaactgatactgtcataccaaatggagatggatggactttgtacgtcgacgaagcttctaatagcgaaggctctagtggtggaatcatacttatcagtccgaacaattttaaggtacacgctgctttacgattggaattttgtgcatctaacaatgaaggtgagaatgaggctttgatcgcaggattaaagctcgcccttgagatgaagataggatacttacaggcttttagcgactcccaaatcgtcgtatgtcaagtaaacggagaatatctggctagaggcgggcgtctggctaagtacctcgccatagtatgcgagttgttgtagaagttcaagaaagtagttgtctcccgagtaccgcgtg

SEQ ID NO: 332619 - DNA, 638 bp, Cannabis indica
atgtataattaagtgcgaattggattggatcggttactttttgaggtcaaacaacattcaatccgcacaagtgcggattttggatttttcaatccaattcaatctgcacaagtgcggatatctgcattttgcggattagattggattggatcgtgcggattggattggatcggatactttgtgaacacccctacaatctgctataagttgatgatatactgtttgtctttttacaagtcagttgtaattttaacgttgcactcatggaatcgtcttaagatttggattggcaatattcctttttttttttttttttttttgtgaataaaggaggtagatccaaccctattatgtgatgtgcaattaccttttaatcaattacgatgattttacaaataaaaaccaacttattgacaaactaagtaatatagctttagtattatagtaaaaattaactatttattaatataaatataataaatagtaacttaaaaaaaataactcttagtgaaattatattatttaattacattattaaaacataaaaattcgaaagaaatttattaagtttattcattatattatttaattattattagtaggagtaggaggtgtgcataaattatccaattcaatga

SEQ ID NO: 332620 - DNA, 778 bp, Cannabis indica
gaccactctctcaactaagcaacaactgataatagaaaaatgagatttgtatggtttttttttatatgaagcctttttttttatatatcactctggcttttgctttagtacccagacatggctttcactctcttccagagatgtagccgtcctctttgagtaccaagaactaatagagaaggagcatactacttattagaaaaaggtgtaagagagctcttcccattgcatctggaagaggtagcctttttgactggggaagattcaagcgtagtatcaatcaaagtagcatatagtagatggggaaagacagaataacccattgctgaagaactgtgacatacaagcatactcataggcaaaattgattgatcagatgacactaagaacagtttagatagtacagagaccaatacatgttcttaaatgagtaaaagtttgagtatctaaagctttagtgaacagatctgctaattgattcgttgtgggcacatgagatattgacaacatatttgactcaactagttctcggataaagtggtacctgatgtcgatgtgtttagtctgagagtgctgcacagggttcttagagatgtttatggcgcttgtactgtcacaaaagatggtcagtgtgtgttgaggatatcaataatcagtaaacattttattcagccatattaattgagtgcagcagctggcagctgcaatatattctgcttctgcagtggaaagggagatagactgctgttttttgctataccacgagactaggttattc

SEQ ID NO: 332621 - DNA, 648 bp, Cannabis indica
ctctgtgaaaaagctcaaaaaaggcctcctgacctaaaagtaattgatgacaccgaagataataatcctcaagaaggaatcagtcatcatcctgaaaaagaaccattgagtcctcagggatctattgagtcatcacatgaatagactacaagcccaggaaaacccaatattagggtccttggcttgacggaccttgggtaaacaacaatcggccacttcctaaccaggttgactgtagtttgtcatctttgtcaatactcctcaaatacagtcgaatcgtcttactccattccaaataattcgaaccaatcaacttatggtccgtgattttagacatcacgggaaccacatcagaaacaacgattgatttcgaatctgattttatctctgccataatctcgaaaccaaaaaaaattgacagaaaaaggaagagaacaaactcaaaggaatagatacccaaacacaaagaagacaaaagtatcaaaccacaaaatgcgaagaaccgccgaaaaccgaagcaaggaggacgagaaaggagcaggagtgggacgggcgtcgaccgacaccggagaagacgccggacgcgccctcacgcgccggcgcgtgggacggttggcagcggcggacgacggcgcgtgggccccacgc

SEQ ID NO: 332622 - DNA, 501 bp, Cannabis indica
agtaatagtatatggtatcaagctaccacgtcaatatatgccttgagaaatgtatgggattagttggacttattccaaccaatagttagacacgtggagcatacattaaaatttcaaaatttaaaagcttggattgcagaaaataggagggaatattattgttgagctaatatatagcaatagttacgtgacatggatgtatatccgagatagtggtggaaggtgattcaaaatctaaagatttatgctaagagtatatacacgtgggaagcatgtatgaggtgattaattacttcttcttcccattattttgttgattgataatgtagaattatgtagttaaataataaagagagtaaacaaatggatagtgatatgtatatatatatatatgtatatacttgaacgtgggcatgaaatgattgaaggtgcaaactttaaatttaaaaatttgttagcaatagttgtgattcgaccgagtatagagctataggtgggtta

SEQ ID NO: 332623 - DNA, 613 bp, Cannabis indica
gggtgtacttgaacactagtgttgaggatatatccaatgtgacaatagtctcatgatccgtgttaattctatttttagtatctttaatttgaaaaaacattttataatttatttatttattcggttgaggtgtgcatttgactttaacatttggtattatttgatttttatataaaaggaaagtcgtctagtttttctatttataaaaaccaaagtataaagagtaagttgtatgacccatcatttttctacctgtccagatgtgttaatctgatcttgtatgagttttctaatatgttagatcagattttttgtgaagaaaaccgaagcaagattttccttttctataaaaaaaatttgctcttactactcacggtacaatgatcatgctagagatatgaaattttatgagaataagagttttactgtgaagaaaaatttcaatgttattgctcataagccttttaggtgtataatttgttgaaataaagacaatgggtggatacattgattaggtttgatggttatgtggatcgaattttaaaggagtttattctaatataacttatgagagtctcgatgaggactcttttatgtttggtaaagtttttgt

SEQ ID NO: 332624 - DNA, 822 bp, Cannabis indica
cctacttatatacactcctctaactcattcgaaccagtaaatacaaactcattcgcctacttatatacactcctctaactcattcgaaccagtaaatacaaactcattcgcctacttatatacactcctctaactcattcgaaccagtaaatacaaactcattcgaaccagtaaatacaaactctaactgcatacctccacagctctaacgcgacgatcaccaatatgagtcgatcttcattctctgatttaaagagaagtctaagcatgactagagcttcattttctgatctaaggaggaggactctaagtacaaggaggtcatccttttctgatgatgtaccaacaactgtaagtacaaggaggtcgtccttctccgatgtaccaacaaggaggtcgtctttctccgatatgccaagatctcaaagtatgagatatgcagcgacatcaccaaagtttactgatgttcaaaggccaagaggccaaaagaagaaaggcgctctaaaagaaatgaaaggagctcttaataagatcttcaaaggtctttttaagagtaaaaaaaaacacctttccgagaatgcggagacgggaattccaagagcgcccgcaaattcagaggcaagtgatcacgatcctatccccgataatataacggaagaagaagagagtttcgttacacctaggaatagctttgaatttgttattcctaggaatcttgagattgaagagcatccattttggaaaaaaatgtaataataaatattttattataatatatatatatatttatgtttctgttataaattttattaatatatatat

SEQ ID NO: 332625 - DNA, 711 bp, Cannabis indica
tgcataatgcatatatatatataatcaatgaatatatcacgaaaagatgatcatttattataatttatctaaccttgtaatatgtgtagtgttatcccaatttttgcactctgacgtggcatcacacgatggtgacatgtggattcaactctgggtacctgctcgcaagacacaggctgaacaggacaccacatacatttcctcggacgaagtcctcttaaccgagcagtgagcaatccatgcaacacaccaacacttagcaaatttagctttagcatcgtgagtcatcaaagaaatccatataactttgggatcagattacagagatatggcaagctgcccaaatcccacgattagtgtattctgtatttactatgcaatctttctactgatatcaattgtaactagaagggaaatacttccctcccaagcttatagccttatatatggtgagtcatgctcactggacaaagggtcgaaacattttgtctaagaattcatattcaaagatttaattgtaagagctctaagaaaaagaaccattcttcttgttcttaagtcaatacaaataacgaggattaggctattaccgaactgcttggggctgaacctctataaaattcttgtgtctttatttgctttattatatgtcgcttgtgcaaaactacttgtcgcttacaaaatagactcattgtcgttagctaaaagcga

SEQ ID NO: 332626 - DNA, 1783 bp, Cannabis indica
gcagactaagaaactactttaaagtggtcacccgacctaagtactttgtttcttttatcgaaacctttgggcatagtccgcccagaaggccattcacttaaaaagaaatgttcatttagtacttaaagtggtcacccgaccaggtactttattggtagtattttcttaaatgttctccattctagtaccgtggtactggaatgagttgcattttttcgtcatacttacctaatttgtatgctccagagttgagaacttcgaccacttgatatggtccttcccagttaggtcctagtacacctgccgtactgtcttttgtgtttaggaatacccttctcaggaccatatctccgacgaagaattctcgagctttcacttatttgttgaaatactgagctacgttttgttggtgggccatcaactttaagtttgcagctgctcatctttcttcgatttcatcaagtgattctgcaaggagtatgtgataggtaccttgatcgtacgtcaatcttctgtgggaaggtggctggagttcgacgggcagcatagcttcataaccgtatgccatttcaaatggtgtctaaccagttgctgttttttccgttgaccagttgctgttttttccgttgtacggtatgaccatagaacttcagggagctcttctggctagtttcctttggcatcttcgagtttcttctttagtgtatccttcaaggttttgctgactacttcaacttgatattttgcttgaggatgtgccactgcggagaaacttttgatgacaccatggttcgcacagaaatcagtgaaggattgaccgtcgaactgtttgccattgtctgagacattttgtacggttgttcgaacaggcatatgatgttcttcacaataaagtcttcaactttctttgatgttatggttgtgagtggttcggctttagtcaacttagtaaagtagtcaactgctaccactgcgtactcaactccgcctttacctttacgtaattctccaatcaggtcaattccccaaatggcaaagggccacggactttgcatctgtgttagctcgttgggcagagctcttggtatctttgaaaatctctagaatttgccgcacttcttaacataggctctcgaatcttcaatcatcgttggccagaagtaaccttgccttagaattttcttggataagctttgtccggtggcgtgatttccacaaaattagtcgcgaacttcagataggagtcgtgcagcttcgtcttgagtgacacatctgagcaatggcatcgagaatcctcttctgtacatgactccctctactatgatataccgtgctgccttccttctcattttccgagcttcatttcggttatctgggagttcactagagttgaggtaggctgctattgacatcatccaatttggggatgtatcaatcattttgatttcttccgtgccagtgatgctaggattttcgaggaactggataggaacgatgttcgccttgtcacttacattgttgtttgccaatcaagctaacgtgtctgcagttgtattttcttctcttcgaattggtcttagaccgtagcttttgaattgtgcgagcaggtcgtgtattttgctcagatatgctatcatcttttctccccgagcctcatattctccggatacatgatttaccaccatttgtgaatcactgcagatttcaatgtgttcggtcttcatctcccgggctagttttagtccagcgataagagctttgtactcggcttcgttgttagatg

SEQ ID NO: 332627 - DNA, 873 bp, Cannabis indica
attaaaggcatagaaagcaaaagggaagacagtcttgagctagatttccaaaaatggaacaaagaggcagagagctacgaatagcttgaatagagactagactgtcagattccagaaccacatgttgccaaccgttatgtttgatccaacttagggcctctttgatacccatgatctcaacaacttcaggagtaaaggcaccattagcgcagtgagctgtagcgtcaataagagaccctgagttgtttctggcaaccattccataaccatattggttttcactagcaaatatcgcagcatcaacattgaccttgattgtattagtttctggtttagaccatagctcagctccatcatcagaactaccaaagtagatatgagagagagaggtgttatcctgagctttacgcagtgatcaagagcgatgcgggctgaagacataacatttgcaacagtaagaaccttgtctttccacacaattgagtttcttgccttccataaggaccacgcaaccatagccaacgaacagacccgatcagaatcaagagactgaaagaggctatccagccagctggcaaaggagagatcaagagagactccggcaggtaggcctatatggtgccaacaagaagaggcaaaaatgcaagaaagcaggatatgtgaggttgtttcgggagcagcttggcagacagggcagacaggtggaacatcaacatgcttggttctaagatttacacaggtcggcaagctccctgaagcagcacgccaaaggaaattacgaaccttcggtgggatttttagttgccaaaggtttttccaaaaacctgaattgttgctaccagttctgggatctttagaagcttggaggatgcg

SEQ ID NO: 332628 - DNA, 1053 bp, Cannabis indica
agtttctattcatttacaaaatatttgtcgcccagggactaaacaacaaaagtcctgatgtcccaaggatcgtacgctccaggcctaatcgccccaaaatgtacaaccttcatttgctcgtcctcacgattcctcaactttagctttgcccttacctacacatggaaacaacacggtgagttgacaaactcagtaagaaaagcataacacatatcatacaaataacccgagttataacctggcgcccataaaccttatcttaaccctaatcccgttgtcccacagggtactgagtctagaacgttcataagacaatactatcgatgtgacagcatcgatcagtattttagcaaacatacatttattagtaatcagcacaactctatgtctactattactcctatcaatgtaatctaacaggcataacaacatgtacgctaaacatgtaataacatatgcatgatattatactaaacttacctcaattccgaattccggtgttccggtcaacctgagtggaacaactgctcggcgaattataggctcctaaatcacattgatactaacacacacaagttactcgctaaatcacaaccgggactaaggtttaaaatcaaaaccctatctactgcagcttaatataatactatcccaaactagcagggaatcaactaattagaaaccttaaactgacacgaaacgacaagctgaaaaaacagttttcccccctgctgcaaaattcgggtaacaagttttacaagcacccagaaaacaaacaaaattcaaacccctaaccaaatcgtttccaaactcaaccaaactttccagacctgcatattataccccaataaacatattccaagcaacaaaacaacaatcaaagctcaaaatcaattttcaccattaaagcttcaagcttgagttctaaaactcaaagctttctaaaaccttcaaacaactactaattcatgcttaactcaacataataaatcatattctaactacagaaacatgattcaaagcctttctctttttttttttgtaaaatgatta

SEQ ID NO: 332629 - DNA, 1286 bp, Cannabis indica
tagcatttctgaaagaaatattatttttgactctctgtattgtaaaagttatcggttacacaatatattttgttaaataatattatagaccatgtatttattaaaattgtacaaattagtaccttgggttgatatttttggttaaaataaaaattaataataattgggtctagagttgttatgataaaactgagtatattttctgcttttatcggtgctaaaaattgtcttcaaataagttatattaaaaaattattaaaattgagctcagatactattttatactattatgaaaataacatggtccaatttattattttacaaaatagatagttcagccggtaacttttaataaacaaaggatataaaatggtatttacctaaataaatttatctcttatttaaatttagagtaatttgcggtataaatatttaagtttaactcagataaatatttaagttcaatttttaacggtaataatatctaaattatatttttaaaattttcataggtactcggtcgttaggtctcaagtcattatccacatattattttcttattagttgaataaaaataaaaatttaatgacatggacaaattagaaattgacgtgtcgctattaatttgatacttaatggtcaagtatctatggaagttccaaaaatgtaatttcgatattattatcgtaaaaaattaaacttaagtatttattcgtaaccgatagttaaacttaagttttatgccacaaattattcttaaatttatactctagattaacaatatatcgttagtaattagtgatttttaatattattcattatatttaatattgaattgcaccaatagcaatatgttacatagtaaatatatagcatttcgcttgtggttgttttataaaaattttaaaggggaattgtcatgtacactatagttgtttttattttgaggttatgttgtttctatcttataaaaattattttcattttgagattatgttgtttctatacaataaattattttcattttgaggttatgttatttttatttggaagttgttatgttgtttctcctttcgaagttatattgtttatatttttatacatgaataaaaagttaattataaaatataaataataaaaaaattattttaaattatatatctattatatatgaagtgtgcctatataactgaattcttgcgtttatgagaaattcatggataacttttttttaaaataattttctattcaaaaataatatatttttttattaagatatattttaa

SEQ ID NO: 332630 - DNA, 1070 bp, Cannabis indica
ttttatttttaaaaataattaattttttaaatttttttttaaatatttattacgtgaaccaataaaattgtgccacatgtacactgtgtatacgtagatattccaccatggcagttaacagctaaaaatggatagaaatgttaaactgctaacaggacacgagtttaagaggttttactactaaaattttagaattgagagttagttacaaaacctgaccacttaaagaagttacgtcgaaaataactcttacatataatatatatgttatgtaggttgctttattatataataatattttgttcaattatacatgtcaaatttgtaacattggtagttaccttgcgaagcatgtttgaaacaaattagtgtagtaaaattgtgtctataattttttaataactgtctttgtaaacattatatatacatgtatttatgttatgagaaaattttacaatcaacttttttaaaagaaatgtaccgatgtacatcttatttatttcgatattcgagaaattttttaatctattttttttttttacaatcgtatatgttgtagttatttaagatatcttataaaatttgagacctttcaaagaaatttaacatgccaaaaaataatagggttcaaatagtttgctgcatgcgtgacttttttattttaaacacgtgtgaaatagactgtttgaacactattttctatattgtaaattatttcaaatttgttagaattttgtaagatgtcttaaataatactacaacttacacgactataaaaaagaattagactaaaaaattattctgaatgccgaaacaaataaggattgtatcagtacatcctttttaggagtgtgcattgtagaaatattatgatattttccaaagttgactatcactacaaaaaactgttacttttagtgacaacctttaatcacaacataatttttttgtgactaaatatgacttttagtcacaacaaatgttacttgtgactaaaatatagtatttagttacaaattatcactaatttagttttagtcacaacaagtattgtgactaaaaatacattt

SEQ ID NO: 332631 - DNA, 844 bp, Cannabis indica
aaaaaaaatgaacacaaaggttttttatgtagttttgcagttaaaattctgcatagtctacgagtcaatcttattagatttctgggtgtttttcagtgccttttttcttatgaattttttcgtccctttctcagtctatcttgcatcttcttataatcacatataggcagttaattactgagttgactgatattcttacaataattatcccctaaaattgtgggatctgattacatatcacgtaaaattaatgcggttattatttgaatatcacacagctgtgattagtctgcttttaatgaatcaaaataaaacgtgtattaaatacattgcaaaccgtatttttttgggatgtcttgctgggaatagagcaacggtaaccttgataccgagctggagcttttcctatttcttttcaaggttgataatgtaaatctcgtcgcttttactctagaaacataaaaccctatctcacaattgcaatttttggtgaggaggtgatctttttcgtgtgcatgtcttcctatggtgaggtggacgcctcgctatcacttgctttgattcacccgtctgttacactttgtttgtatactgcatattatacgctaagtgtattcacattcagtatatctcatccacgtaatcgaggttagtgcctcgtcttatacacttaaagttacatggtttctcgttgatgcgcaaggcaatagtttgtatagtctttatctcgcataagactattcagtcagccgagttgtaaatatactctgtcaattatgcttttaatgagttattccacctcaaatgtaattataatttcgtgccttggtttgtattcttccca

SEQ ID NO: 332632 - DNA, 566 bp, Cannabis indica
ctttattgatgttaaataaaatggattacattgaaatggagttttatttagggcataaaacccaaccatctgaacatgaagaagcctgacctccgtcaacgactcggttcaaggcaaaaggattcattccatttgcaaatgagcgagttggagaataagttcagagtgcatcaagtcatgaaacccaggagacgatcggggcacgatattgttggaaaacctaatttggaggccttgggatcaaagaaaaaagacgagtccaaaaggttgcttaaggataagaagcccaacaggtatatccctctttatgccaaatataccgagctcaatgaaactcgggaaaaagtctacctcgcacatgtacaagaggctatttttggcgagccaagacctatgaagcatgcgaggcgcaagagggatccaaataagcggtgtgaatatcatggtgatattggtcataccacggaatagtatcgtcagttgaaagatgagatagaagttctcatatcacaagggcaccttcaacgatatataaaggggcaggaagatgcctatgatcagttcga

SEQ ID NO: 332633 - DNA, 1054 bp, Cannabis indica
aatacactccgtaaaagtacaatcacgagacaaaatcatgtctcaactaatttatttgttttattttctttataatataatgtatactattcagagtcgtctcaatttttaataaagccttaggcaaagcttaaatacagttttagaagaaaattaaattaagcttttttagtaaaattattaattatataaaaatttattgagttatttttttttaaaaaaaaaaaacctattaattaattaattaaattatatcattaagatttttattttttatagtaattttatattaatcttcatatgttttattaataatcatcacgttttgtttttttttttcttcatgaatgaatttcaatttatttataaaaaattttcattaaaaaaacaacaattattaaaataatcacaataaaataaatataattttaaaaaaatatatattatgatatatagaggctatttatatataaattttcaataaagaatcaataattattaattattagattaacctgaaatgtaattgttgatatttagtagtaaatattaatgtttaaaatttattgaattgaaaatatattattcatattattaaaagaaatgaatattacacttaaaatgtaagttcttaaattttgtgaagctttagacaattgtcttatagttaattagactctcatactattgttatattaaatattttaataatttttttttaaaaaaattctaaatagttttttttttatatatatatatcaaaatttacactataaaaatatttaattttagtcacaacaaaacttgtgacaaattataaattattattcctatactgtgactaaaaggttcgtagcaaaaagtattagttgttacttaatttctttatcactcataaaatatgcaataacaatattcaatttcatagataaacatattacatatagatctaaagaatgtctttgttgattcaaagagaagaagccaaatagcgaaagcgtactttaatccataaatagtgatgatcttaatccatcttgtagagataatcttt

SEQ ID NO: 332634 - DNA, 1347 bp, Cannabis indica
attttattattcaaatattattatttatacacaattagaatcaaaccgtcacgcattgttcataaaataaaatccaaatcactactggaatctaccacgaataagcatcagtatacaaatatctagtaatacaaaactattataccaataatagaaatcatattcatttaataatataaattgtattatatatgatacctcataaagtaatcatctttattacatcacattgcctaatcagacaagttgatgctttagtctgataaacctatattgcattgcctaatcaggaaagcctgtgccatagcctggcacccacagatcacataattgcatcacctaatcaggtgagcccatacctatgctcaatactcatatgtcactaaatctcattcctacgtctggtacgttgtcaggaagaaaccctacatcgatttcaatctatgccataacctcgcaattttcatatcactgacgtttgtatatacacgtcgctaggaggaaaccctacaacgatttcattctatgccataacctagaaattttcatgtcactgacgcccatctctacacgtccccaagaggaaaccctacaacagtttcattctatgccataaattgacgattttcatatcactgacacatgtatctacacgtcaccaggagtattgcatcacctaatcaggtgagcccatatattatgctcatagtatcatcacaatatcattgattagccaatcaatctttctgttatataacaataataatcatgtctcaatgtcaatattaatcaattcataacaatattagttgtattacaatacaacgtagtatgcagtacaatatatttttcttacctttaatacaggttcatacatgtcggtcaacccaagtggagaattatcctcgatgatcttggacctatatcacaacaacagtaaatcagtaagtgtttatccaaaaacactgcttactattcacataagacaatctaaggttttctatcaaaccctgcagtacactaaaataaaacttatgttttggctctaaaatagactccatattgtagagctcgtttcaagcttcaaaacggtgtatagaacgtccaaaacggacacttaagtcaaaagttatgacaaaaatacgatatctgatatcttatgaatttccaaaaactatgaaatacgaaaatctcaaatttcacactcaccgaaacactaccaaaacttatccaaatcacttcaaattttacaggacacatacataccataaatattaccatcctcatataacaaaaattaaaatcgagcccttaaataaaaaacgccattaacattcggactaagct

SEQ ID NO: 332635 - DNA, 758 bp, Cannabis indica
tcagagaaaaacctgagtgccttctaccactaagctagccgccacctctcttctctcttcttcacaattgaaaccgaaccccttaagtgatagagtgagtgcccacacacatcaagtggtaactcaatcatagtgtggaagatcgtgaagaatcaagattcaacagaaggacaatcgggctgagatgttgatgatactctgtgacagaaaggatggtaaaatatttccaacattggattgctacattcccgcccacaacaatcatgccacaaaccctgaaaggggcattgatgcttttgcatcaatattttaagaatgtggcagacttcttcggcctttgcccggcccagttcactcctaagggcattaaatatttgtctgccctcttcgtcctctacgcttcccagaagtggggtatgccttctcctcacgaagtcagctggtttttttgatttgaagtccacccctaaataaggcaggtcggggtacttctatttctctcaaccagacttcaagtggttgacaggcactgatgattcgaccatcagcgaaattgggtgttttgctgatgagtacttcatggtggacgacacgagcatcactcatactcggttccaacagattctgacatatcaccgccctcccctcactcttgctctccgggatagggcacaaaggcttgctcgactgccgggggaagaccaaaatattatcccagttaacctccgaggataactttgtgaagtacgggctctatc

SEQ ID NO: 332636 - DNA, 929 bp, Cannabis indica
ggtgttgccccacaagtttaaaatgccaacatggaaaatgtacacaaggagaagatcctctttcccatcttaagtacttcgaaatgcaaatggatttccaaggggtacgaggagatgtatgttgtagaactttccctactaccctgtcggaagccgctcagcaatggtatttcaagttggctcatggaaagtttagttcatggaaaaccttctcttcgtaattccatgcacaattctcttcctcacgccaacttccattgcatctaggagacttggtcgaagttaagcaaagaccaggcgagcctctccgggcatatatcagtagattcatgacggagacgactaaagtttcacgggtaaccgaagatgcaaagttatcagcgatactggggagcattgagtcctcggtgaactttggaaggatataaggaagaacgggccggtagactcaatgagtgatttccttgaccatgccgatggcttcatcaagctcgaagaagccattcaacgagcggaaggtgagcaaaagcctggcaagtcaaaggctccttctactagaacatccacccaacttccccattacccgaataattcaagttcaagtgataaactttccaacaacaaccacaagcaagggaatgggaaaaagggaaagttcaccggcaaatccgaacaagctccccgggagaataatgccaagtacactgcattcactattctgactgaagatatagaaagtgtttacatggcaactcaatcgctggccccatataagaagcctaggcccatgaagaaagatgtcagcaagcaggacttgacaaagttttgtcaattccacggagactacggccacgacactcatgaatgcaacaacttgaagcgggaaattgaattcttgataaggaaaaacaacccacacttgcagaagt

SEQ ID NO: 332637 - DNA, 903 bp, Cannabis indica
atattatactgtgaaatgtgtagacttaatgatgataaacttttgcaattgtattatattgtactgtgaaatgtgaaatcactcaactgtcgcacatatatcgcatacaaatcgcaaatattatcaaagttgaaataataacttgcttagctcgctaaaaatgtcgcacatacatcgcatagaaatcgtaaaaagtagacagttagtatattaagcatgttaccagtgaaatcgccaaaggtcgccagaaatcgcacaggaatcgcaaattaaaaattaaaatggtaaagaaatcgcacaatgtcgcatagatatcgcaaaaaaatcgcacaaaaccaaaattataatttgagctaaaatcgcacaataatcgcataaatatcgcacaaagtcgcagatacattaaaaatattacagaaacggttcaaactcgagctttgcatgtagctctgttgtgccctgcactgtgacatagcgaacagtgacgtggctccactaccacctgaccactagacggtcgacgcttcgtcggtcttctacctccattgctcttcctaggccaacctactgttttttctctactggtacctcgattcttatgttcttgatgtgttccggtagtacccactcatcctcctcgccaacaatattaattgtggcatcgtagatcttcttccacgtttcttttgtgtaatatggagagcaaagtgtgtacacgctcacattctgactaactgctgcggcacatgcatggggacaagggattttgagcgtttggaaaagtccacaagtgcatgttctctccactaagttcacatcaccacctctctcaccttgaggactcgtaccaacgttaaacaattgggcaccattacgaaggacactcctgaacataccatcttt

SEQ ID NO: 332638 - DNA, 1815 bp, Cannabis indica
catatttatcataagaacttttaaaatcccatactaagtgtaatttcctcttttttataagggtgtttattatacttacaaatattatttgtgtaaaattttaaataatttatagtgttcaaaaacgattttaaagttttttgtacagtaaacttgaatgtagaattctgttttccataatgcaaactttaaagtttttcaaaatttaaagtgataatactcttccaacatgtgattttaaatatattatagtaggaattgagtattttacctatcaatagggatattaatttatagcatttaatctaatagttcaaattaattcttgaaaacaataccaaaattaatattttttttatttataattaatctttaatattattaatggtaggttcaactaacaaactccaaacctaactccaaacctaatgtttttatctttctattttatttctatttaaaatttagttttaattatatatttttttatttcaaatttacataaaaaaaatattttaattaaatttatttttaaaacaataattatacttataaaaacctataacatattcaacttataataattttataataatcactcttaaataattaaaatgtcatgagttcaatactttagaagtaatattttcttttcttttctttacttatattaaatttaagatgtcaattaatttaatagttttaaaattcgatcatactatattaattaattttatttttcaaaattataatgttcaatgtatttaaaatttttagatataaaattaattatttacatcaattacattatttataaaatcatgcataaactagtaaataatatacattcatagtatccttattcttcaacgtagtttaaggtaaatgttcaatgtatttaaaatttctagatattaaattaattatttattttaattacactatctatataaataagggagggcgctttttttttttttttttctacattgtataacatattaaaattaaatgcaaatttgtattttagtattaatttaataattaagacactaaatacaagtttttattagtagaggttcaaaaaataaattttatgctaaagtaaatatgcttttattgggcttagaactcatgacctatacaaagtggatgaaataactttaccattatgcaaaagcttgtattgtgttcataaatatcacttttatttataaatatatgttgtaactagctaaaatgcatatacatttttttcccgatcttttttttaggggggccgactgccccacctcgcctctatgcgggttcgcccctatgtaaccttatctattttgcatctgaaacaatacgttgttatagtgttatagaggacttagctacataaccctagttagactaggcctgctcatctaaggaaaatcagaatataaagggaaatcagaagggccttctgggaacgcactgttttatctctccggtctcgtggtaccaggcatgtcttctgggtacaaattactgaaggcggaatgctttacgacttcggaaccaagatatgttcatggaaggacatatccaggtgggattggcccacttctcatttggtgagggtcccactgataggtctgcggtgctgacctggagtccacgtgtctaatatcaaaaatgcgaataatagttacaatttggttaagaacattctcaacggaagtacgaccactgtaccatatgcactaaagtatcaactccatactcgtgttggtagggtcattatcatactcccgggagttactaagtgttgtaccacatgcacaa

SEQ ID NO: 332639 - DNA, 541 bp, Cannabis indica
aaactcagagaagctttaaatttatctgttatgaaatgttaggtacaaaatgcaatttaaatgcaaagacatgaaagcgatggcttgggtcaactttgagtagagaagaagggatattcaatgcagaagcatattatttttcttggggtcttttaaaacattttatcaaacacttgcagagcattgagtaatagttgaacagttccatgaaaagtagaagcaagaaaactaaccagaggagagggcagaggtggctgtccgaagaaaaggggtcagaggacgtagagggacgacgggacctcacgatgttttataggctcctcttttcgcttcgacggcgtaaatcgatgcctcctcttcaggtaagatggaacaatggtgaagagaaatggtggaggagaagacaaagaggtaagagagaaaacaatggtgaagatggaacaatggtgaagagaagacagagaggtgaagagaaacaatggtggtggagaagacaaagaggtaagagagaaaatgattttctggaaaatataaaaaaaaa

SEQ ID NO: 332640 - DNA, 507 bp, Cannabis indica
acttacattgtattgttattggtgtctagtattaagtatcatattatttttagtgtaattaagtatcagagaagtcccatataatttaatgtaatagttttagaaagatcattgctattgggcaccagtggtgcctaacactcttaaaacgtgtcgtcttatgattagctagcgatactccttaaaagctattacattaaactatatgagacccaatactaaattacaccaatagcgatattaacacgtaggaaagtgcttagcaccactagtgtagcatttttcttttagaaaatatcactaatcagtcgtagaggtattattttcttgcatttttagtgaattctacataagaaatcgtcattgcaactagcgctgcaacctaaattgtaataaaaaatcgcataaaaacccctactgcaactagcgctgcaaccactttaaaaactcaaactgtaaatttgaaaaaaaattaaaaaaataatatataaagtaattcccaaaaaa

SEQ ID NO: 332641 - DNA, 1065 bp, Cannabis indica
cttcctactgatcctgggctgcgagttccgatttcaaattatagtccaaatactcaagatcaatttcgaagacattatttgcaacaagggccttgtcaatcaaaaattcatgaatttcctcctaaatatttttttgaggcgtggaccgtcaatttaacattgaatggtatgatcaatttcctacttagttagagtatagcatcaataaagattctgcattttgtctgtattgttatcttttcaaacaaaataaaggaaaacaaggtggctgccagacatttgttagtaagggtatttcaaattggaagaagccaaaaatatttgcactacatgttagaaaacatgatagttctcattccaaatgttacaagaagtgcgaagctttgatgaatgaaaaacaacaaatcgaacacattcttttgaagaaagagaacaaagatcaaaaaaattatcatgtgcgattaactgcatcagttgaaagtattcgatttcttctacgacaaggtcttgcacttcgtagtcatgatgagtctaaagattctaataatcaaggtaactttcttgaacttctaaaatttttagctgatcataatgaggaagttgctctaaaaaatgctcctgaaaaccttagattgacttctccaaagattcagaaagatattgtaaatgcatgtgttgttgaaacaatcaaccttattattaaagacatggaagatgttgtgttttttattttagttaatgaatctcgtgatgtatctataaaagagcaaatggttgtaatgtttcattatgtggacaagaaatggtatgtgattgaacgatttataggcattaaacatgttgaaagtacaacaacaatctcactaaaaatagcaattgataagctattttcaaagcatgggttgagcatatctagattgcaaggctagggatatgatggagctagtaacatgagtagagaatttaatggtttgaagagtattattatgaaggagtgattagtggttaaaaatacacttttatttattttaaatgataaaataaattgagttttaattgatattt

SEQ ID NO: 332642 - DNA, 551 bp, Cannabis indica
gcagcatcagcgtcctcgggaaaaagatttcccccacctccttgagtctgcgtgagtgacatagctcgaaaagcctcaggcatctcagccacctccgccccaaggatcgagaagtcgaagtctggaatcttggaaagagttgtgtagatgtaatcagagaccgcttggtcgtattgcttcttttcattctccttctcaacctccaagtcgtgagacatctcctcaatcttccccctagatttcttggcttcaagttcgacttgcttacggaattcctcgtgctctttgtccttgttagtcgcttcctgcttcagcttcttgatgttcacttgaagctaggcattctgcttctttaaaagctcgacttccttggagccagcaacgaaggcctttgagaacatagtcatgaactgcgaagccaactctgtagagcgaggcataagttccttagatggagtcctctcaaccttagacatgaactcctcgcccatgaacttctcttgaagaactaagaaattgcgagctcgaacagctggatcgatcacgacttt

SEQ ID NO: 332643 - DNA, 2260 bp, Cannabis indica
cgaacagtggatcatcacgactttcttccccttgtcttgcataggcttagctagcttcttggatgaatccacggcagggataaccacgacatcgctttttctcttctagggaatgacaggagaagtcgtcgttgttccagtcttcggcttgcgattgaggacgggtgcttgcttcaaaaaagtcatctctgcgcggacaggaaaagataagttaaaataacaataaattaaaatgcataagtctatatgtgcgatatgttacccgatgtcggtcgagaggtctgtttggaaagtcgcttgtctattttctccttttatttttcagacggatccttgtatactggctcccgatgaaggctggtgttctctggaattaacttgtgttcccgcagtttcaaagtcatgcatagcaattgccagtcgcgatcttgaacagggagaaaactgagaacctcagcgacttctttgctagtcgagtccaatacaggtcgagccggtctatctgcgaacaataaggaagagcgtgttagatcataccacaaggtaacatgaaaattaactaagtgttaaaatgtgcgacgtactaggtcgacgattaaaatcagtcctaattcctggaatgttaaacacataaaacaacttagatttccaatctcccatattggaaaccatgcctttcaccccgtggatttcagaagtagcccatttattgaagcaatagaagccgtggtgaagacccacgctctttatgtcataaaaatagctgaagtcctccatcgatggctccttatgtgcatattccatgaacatcacataaaacccgagggctatgcggtaactgtttggggttaattgaaagggggatacatcatatcgcttgagaatagcagcgatgaatgggtgaaaaggaagcgatacccacaacggagaatgggtatagaaacaaccacattctttgtaggaattatcgcgggattggtgaaaggtagatgcggtctctgggtaggacgaggacgtatggtgctaaggcgtagtagatttaacctgtaaaagcagttaggtcggacttggtgactcacgaaaccgaatcctcgcatgagaaaggctcgtccagttgagtgttgtccaccgagtaagtcccactcccttctgcgtcctcctcttcctctgactcacgatttggagcctcccactcctcgcccatctcctcaacttcggcatcaggagcatgcctgaaatgagcaaggtgttcacgagctaacaccgtagactcgctattgcgaatctcgatggttcctggttcagcgagctcttgacccatcctttcgatatctgcggaggacaacgggcctagctccgcgtctccagcaattggggtctcctcttctgagaacgaggtgggaatgaagttgtcctcctgatcctggtcgccatcgaaagcattgcctctagagccaagcatttggctgtccgacaaatcgctcatctgaaagatagaagatcttttcagtgtggtaaatgtgcgaagataatacaagtgacctcacccgcataaaataaagaaaattcaagattttcttggaggactaattcggattctcgcaaaaaccaatcagctcaccaaggcataaaatcgcaagtatgcgactagaagaatatctcaaaaaatggctgggagttttccagtgacccaaggggcatgcgttttcgagcatgaccctgaagttactgggaaatacccaccgttttgaggaatctaaccaatcgcaacctgcgaatatgtcacgcatacccaactagcgatatacctcaaaaaacagctgggagtttcccagtgacccaaggaacatgcattttcaagcatgaccttgaagttactgggaaacacccaccgtttcgagcaaatctactagtcaaagaatacggttatatgggaacggagaacactggcgtatgtcgcaaatggctgggtgtatcacagtactccaaggaacatgcgatcacatgcatgagcattggaatacggtgacacacccaccatttgaaagacttaaccaacattcccacaacaaaatacacaaagaatatataaccctaagttctagacaatgggtaaaaatgataaagtctctagaaaacctaaagggggcatatatgcgagtattcgaagtgctcatccgaatacccgcgagtattccaaaaataaacaaataagaaaggtgtgaatattcaaagtgttcttcctaaagttcacggttat

SEQ ID NO: 332644 - DNA, 980 bp, Cannabis indica
tagatatggttaggcaataattattttaagaataaaataataaataaataataattatcctaattatatatcaaaatatctcaaattaagcattattcaaatttctacaaaatatctaagttatttaaatatttaaatactatttataaatttctaataagtaaatgatataaatatctattttctaaattataattataaacaataaatattaacaaagtaaccttatttttaattgaaaaaattatggtagaatatctttaaaaaaatttaggtaaattttaaatttattaattatttaatttatcttataaggtaattttaatataatacttcaacttaaaaggataatgctatcttctaatttaaaatgtacctaagattaaaatatctaaccttaaaattaaataacatataaatattaaagaaattcataaatttttaaaatctgacaaaatttaaaattgatatttaagtttaaatatattaaaaataatattttattttgttagggtttgaaattgggaaaattcgaaagaaagaaaaaatcccacaaaaatcgcagtaggggtgtggctggctgcccaggaaggctgcaagcagcccttatgcgcgcgggcacaaaagagatgtagagtcccttcgccgaggtttctcggcgtgtgcagggtcttgatgggtgagttacagcctcctggcgaggcactcatgtctgaagcccatactcaccgtgcgcatcagacaaaaaatgtctaaatttctacgtgtggatcaccttgtccgtaggtgtgcgcgcatggtgcacgaccatatgcacccaaaatttcaaaccttcatagctatctcaatttttatcgaaatcgagttctgtaaaaatcaaaattgcttaattttccacaaggaatccaaataaaatattttcaaaacaaaaataaaattattattatggaaatttttcgtaaaccacatacattcatcaa

SEQ ID NO: 332645 - DNA, 615 bp, Cannabis indica
cttccatgagaattggataaattcggggggcgtcgtaggtcccgaaaaataaagggaatgggaaattaggggaaccatcgaaaggataaaaaagcaacaaaagaaagcatgacaaatacgtgccaaatgtatacattcatatcaagcttaaatgaaaactcaggaaaatatttacctcgcacaagagaaaaaggtagccttcggcgaactcgagcctatgaagaattcgaggagcaaaagagatcctaacaaatattgtaaatttcataaggatattgggcatacgaccaatgaatgtcgccaattgaaaggtgagatagagagtctcatcgctcgaggccattttaaatagtatgtgaaaagacagggccaaggatacaaccagccccgtcagcctagtaacccaaagaactaggggttacaacctattcctgtggaatgggaggacatcctggtcatgttgggagggtcacatattccagggggaaggagtaacgctcagaagagatatgtgaaggagataaagaacgagcagtcggtctttaccccaaaaccttcagagaaggtgaaaatcgaggaaccccccattacattcacagaggaagacgaaaagaa

SEQ ID NO: 332646 - DNA, 849 bp, Cannabis indica
attcacaaactggtaattcacccaagacgacatttttcaatggaccatctttggttaacctgtgaagtctgtcatagcctatatgatctcgtcgtaaatgcgatagatatgtttcatcattattatcgatctcttttcttttatggtttctaggtttagcaacattgagaagttcgttattaagcgcaatttgtatttccggtctcaaaacataaagcccttgttccatgtaagcaacacataattgaagtgcattacgagaaatagtgtaaatagaactcgaaaaattcaattgataaaattgtgtctgtaaacataaaacactaatcaagtttctattaaaatttagaataaacaaaacattgtctaaaactaaaaatttcttttgaaacttgaggcgagcttttcccttagcttggaccgatactaattcgccatttccaactttgagttttaactcccatagatttaaataatcccatgtttcaagcagctacaatgaagaacaaacatggttagtagatccagaatcaacaatccaaaaagatttgtcattttctaaaacacatgattcaaaaacaaagcattaccttcgttcgaattgtctaaaagtctaggacatcgttcttcctgatgtcccttcttttcacaatatgaacattgaagagtacgactatccattgtttcaatatttgcagcaatgtcagaagcatcatactcaattactatcttccttttattgtctacaaacctggagggaggcctccttgcaggaaaagttttctcgtaaacatgcaattttgtattcagtttacctatgtcggatgagttaaaattattgatcatata

SEQ ID NO: 332647 - DNA, 640 bp, Cannabis indica
tgtttgagggacacacgttgtctagaagcttactagtgttgcctagggggcaattcgatgtaattcttggtatggattggttgtctaaataccaagctattgtggattgttcacgcaaaaaaagtgactcttttaacccatagtggtgatttcattgtttatcgatccaacatgagtgcaatgagacaagatcctatcttaagggcatgcttaggtggaaagagaaacttagagtgttatgggaatctgtttgcgatcgagaatgactctagggatttagaccagttcccttggatatcagtggttagtggttttttggatgtatttctaaaggatttaccagggttaccaccagatagggagatcgagttttgcattgatttaatttccggagctcaaccattttctattgcaccttaccgcatggcccctccaaagttggttgaattgaaaaaaacaattagggaagttaatggataagggttacatcagacttagtacttctccatggggagctccagtcttgtttgccaagaaagcttatgggactttgcgactttgtgtcgaccataaaaagttgaatcatatgacaataaaaaaaaatatcgtctaccgaggattgatcaattatttgatcaac

SEQ ID NO: 332648 - DNA, 566 bp, Cannabis indica
taatatccaaacaaaaaaaattaaatactattttaaattggatattacagtctatcatggagtgctatgagattgatgagaggcttcaagagaagaatgagattactcaagtttcaaaaaaaaaagtcataagtggcaacttgcattgtgaagaaagctggaagcccaactgagaagaaagttggcccaaatctaaatataaggttatgatgttatagatgatattaagataaatttggagagcattgctttgttataatattatttggaagctatcatatttcttgttttttatattctttctttcatatgtccagttatatgcctgctacccctattctttataattttattattaccggctcgaattaagtatccatagtaagtgtgtagcattatcattttttaaatatattttaagctaatctccattctcctcttctctttctacaaattttaaatttgacttttcactattgattttcaaataaccccacacactaattaaaattagtttttaaaccattttaaattatatgattatttattgaatctttctcaattaa

SEQ ID NO: 332649 - DNA, 843 bp, Cannabis indica
atttagtacttaaaatggtcaacccgacctggtactttattgctgaaacctttgcgtgtagtccgcccagaaggccattcacttagaagcgaatgttcatttagtactttaaaattgtcaactcgacctgagtaattaaaatggccaacccgacctgagtacttaaaatggtcaacccgacctgagtcttaaaatggtcaacccgacctggtactttattggtagtatttccttaaatgttctccattccagtaccgtggtactagaataagttgcattttttcgtcatacttacctaatttgtatgctctggagtcaagaacttcgaccacttggtacggtccttcctagttaggtcccagttaggtccgaacaagatacctcatatgcatgctcgaagccaagcagtcaacaatccgcacagagtgaccaacacttagcgaattcagctttcgcatcgtgagtcatcaaggaaatccctataacttggggatcagattgtagagatatggctagctgtccaaatcccacgatcggtgtattctgcatttactatgcaatctttctacttatatcctttgtaacgagaagggaaatacttcatttccaagctcatagccctctaaatagtgatgcatattcactgggcaaagggtcgtaggattttacttgagagatattgtctaagaatttatattcagagatactgttgtaagatctataagaaaaggaaccttgctccttgttcttgagttaataaaaataacgaggattaggctattaccgaactgctcgaggctgaacctctataaaattcctgtgtttttatattgttttatttta

SEQ ID NO: 332650 - DNA, 740 bp, Cannabis indica
atgctaggatcgtgggatcgagagcccgtacacaccgatagtggaatcgtgtgtatgccacatccacgcgagttgatccctgagttatagggattgagctggtgactcacgaagtgcttggttgaattcgctaagtgttgctcattctgtacggctcgttgagtattccatcatggacatgccagcgaggcatcctgctcggcatgctgatgcgaccaggtgctcttagtagatgccacgtgtcaccattcttgtgctgcaacgtcagagtgccaattttgggataacaaatgctaacaacttttcaaatttaatgttaattttaaaaaaaataaaattaaatatccaataaaataaaatgataaataaatatcatttatctaattttataatttaatttaaataaaataataaaattttgaaagttagcaaaatatcgtgttacagtttaaaagttctgattaaaataatcttattttaaatttcaaataaggtcattttataaaaattaattaataatttaaaaaataaaatatctcaccttaaaatttaaaaaaaaaaaaagataaaataatcaaattttaaaagtaagataacaaattaagcaaaacgatagatttttacctattttcaaggttcaaatatcactaatatcttaaattaatacaaaaaaaaaattaattagtttaattttgataattagatttgaaatatgaaaaaaaaatctaaatacaaaacta

SEQ ID NO: 332651 - DNA, 805 bp, Cannabis indica
agagagataatatgtatagctttaattaattacctggccatcagcaatgatcacaagaacatgatattgaccacctttgctatccacaatactaatagcattctcaatgatcggagcaaaggatgtcggcccttaaatacaataataatgtataaatacatatatgatctatgcatatccatatgtttatatgtaataagaacaaaaaattctaataattaattaagtacgtaccagataaatttatccgaggaactaattctctgtaacgagagagcaattcctcaaagccacggcatggcttatcttcaggaaagaagctaaaaacatctttatcatgagtcgatgctgtatatatataagatgatagaaattaacgatggagtactatatatacatgatacgtaataatatatttataaatactacgtagtactcacaatcaccaaagccgtaacaaggaataaggttgtcctcgtcgaatgtggaaagtgtcctgccaatgattgagatggcttgttcataaggattaaggtcttgtccaagaaaatgaaggttctttctcccgaaacaccttgctccagtccactcgttgctctttgtgaaatcaatcccaactatcagatttgaagactccaacccagcttgctgaagcgcttcagccacctaattaattaattaattaatccaaatataagttaaaatgtaaaagtgtgtggttaaggtccatcaaattctcacgaccaactcagctattattatttcaagagaattgtagttgtcaccaattattgagtaattctct

SEQ ID NO: 332652 - DNA, 1050 bp, Cannabis indica
atttggaaattaaaacatacgcctattttactatcagacaactaacatgctcctgaacaggcttttcttaaatcatactattaaaataactactaaagcaataaaagcttactgaaccgtgaaacgagctgactgctgatgatgattgttcatgtcgtgatgatcatcgaaagacaacctggcggctctaataccaaattgtaacaccctaactattaaaggcatgttagcgtgatttttaacgtattgtgcagctcgttgctaatcaacaaggttaatgaaaataatgattaattaaaattttgcttatttaattaaaacataaagtaatacatttataaaattttgagatcccgtttacaaaacactgttacataagtttactattcatttacaaaatatttgttgtcaagcgaataaacaacaacagccctgatgtcctgaggatcgtacgctccaggcctaacagccccgacatgtacaaccttcacctgcccgctctcacggctcctcagctttagccttgcccttacctacacatagcaataacactaagagtcaacagacccagttagaaaagcagaacataataaacatactaacattcggggttatagtcaaaagcccatacacctaaccataaccctaactgaatcaggatcgatcttgacaaagtataactaaccacgaatccagcctacactcaatactctaatcgcactgatgtggtagcagttaattcataatatctgatagtctagcatatatctgttggcctcttggtgcatctctatatacacctcactgatgccctgatacgctaatctgagggctatagatttgcctattctgacgggaactaacatgtacgctaaacatgcataaacatatgcataatattacactaatcttactttgattccgaattcaggtgtgccggccaacctgagtggaacaactgctcggcgaattacaggctcctaaatctcatcaatcataacataggtaagtgacacgctaaatcacttttcggggacttaaatttgaaac

SEQ ID NO: 332653 - DNA, 2013 bp, Cannabis indica
agtctacaagcagtattatctcaactagtgtggcgaccatgtgcctatataattaagcttccaataagtagctctaaaatttaccatgtaaattctctaacctattaattaatatagaacgctctatatacttaacgatatggatacgctatgaattatttattgttataatcaaaatgatcaatgatcctctatagatgatttatatcgagtagggacaaatttaccgttataccgtattttatccttaaaatacatagctacctctaaatgttatttcagtaaactaatataattgatgaaatgagtactccaccatttatctctattaagccaagctcgaaagaaatcatcatttcacctttatgcatttatagaagctatagattccgtatgtatattaacgctcccactcaatagaactaccatgttcttaatctgtatgtcacggaaagatccaattggtcaactttaacaaacaaattgaagaacataaataatacaactaaactagaacctaaccatctcaagattgagatcattgatctaagctcaactaggtgatattgacctagatacatattacggtaagttaatgatatcttatctaagttcaatatcagccccttccgatgtatacttcatattccaatccaagtttactttaccaatgccctaaaaaagacatagcacttatctaaggtgtaagtaaactacattattgattatcatttcagtgaaaccctctgtatttataaattgtaggaatttatttaatcacataatcttgattgctttctactatgttgacaatacagtaattaagaatatcaatgtgataagaattttaacgaatttataaatcaaagatttgactaggaaataaacgtgtgaaccaaataatacattaaacaagtaatgaaataaatatgtttctttattggtaaatgaatattcaagaatacattgaaatagagttttagttaggacacaaaatccaattaactcccacttgcactaacataaaacaattagtacatttcaattaattctagattctctctctgcttttcaaatatagttactgtcaaaatcttggtgaatagatcaagtaagttgtcttcagtatcaaccttttccaccagtacgtcccctcttcccacatattctctgatgatgtggtatttactctcaatgtgtttactcctcttgtggcttcgaggatctttactgtttgctatagccctagcattgtcacaaggtaaacctagtggtttttccattccaggaacaacaccaagttctgtgaacaactttcttagccaaacaagttccttaatagcctcagcggtagctatgcatttggcctccatggtagagtcaaatattgtggattgcttgacacttctccaaataactgctccacccctaagagtaaataccatcgcacatgtagccttcctatcatcaagaaaggcctagaatctgagtcggtctagcctatgagatttaaaacaccacccttatagactaatgcataatgccttgttctctttaaatattttagaatatgcttaactgtagtccaatgttcctctcctgggtttgactgatacctgctcataattcctactgtatagcaaatgtctggtctaatgcatagggtagcatacattagaattccaactgctaaagcataaggaaccgtttccgtatcttctatctcttggggattagtgggacactgtcccttagataaacacacaccaggtctagaaggcataacttcccctttggcgttgctcattgagaatcactctagcaccttatgaatgtaagttgcttgcaagaaagaaagtgatctgttcttttgatttctaatgatttgaataccaagaacataactagcttaacccaaatctttcatttttaattaattgtttagccattccttaatgtaggtcattttcttgatattgttactaatgatcaaaatgtcatcaacataaagga

SEQ ID NO: 332654 - DNA, 722 bp, Cannabis indica
ccttaaaaagtactttttaattattaagaactttttaaatgatatgagggtatttttgtcttaatccaattttttttaaaaaaatacatgccttgggttttggtggttcagaacttcaaggcacatcattagcattaaatgtcccgtcttttccaatttgaagtattcccatccgttagatctaatttctttagatccaacggttattagtgattaggtataaaaagtagaagtgatagctcatttcgctatttttgcttttcaaaccttcaaatttttctgcaaaaggttttttcgattgcttttctcctccatattagcatgccctcattatctttgacttacttcctgcgtagttcaacggatttcaccttcaatcttaaagattatcggaacacattaattcactcatcacaatctcaatcacgaagttcttctttgtctaaaaatcttcatcagaacagtgagtggttcatctccttctcctttatacctttttttatatttgcaatctgatttttgtagttgattgtcttcttttatctactttgtttggttatttctcttttaggtaatttttattctgttagtttaaagactcagtcaattgattttaattaatcaattataattctagaattagactgtatcttatttatgaattttcacttagtaagggcttaattgtgaagaaaagaggttttggggtcaatttgttaatt

SEQ ID NO: 332655 - DNA, 794 bp, Cannabis indica
tttctttgttggtattataatttttattactacggtatattaaatttttctgtactacgatatatctaatactgttgtatatatttaaatgatctaatatatttatttatttttgttacaatataatatatgacaatactaaaaaaattatgaaacttaattttgttattatatatatatttttttaaaaaaaatatgtgataaatctatttttataatttttattagctaatttattagatttgaccattttctaatttttttaaaatgtagacattttacaatttagctaccaaatttagggccattttgcatcttaacccaaatagaaaaaatccccataaaatatcattagggttaaatagaaaattcttctaattttgaacattctcacaagattccactggtagctgtgttgggcttgtggctatggcggtgaaggattgtatgcagttgtaatctgtcaagtgtgtcctcaaattaataatgtcgatgttgtagaagtattggggtccataaaaatagttagtcatgtggtcaacatgttacattaatacgtaataaattaataatctttttcataaagaataattgcttcaaagaaaacaccataagaaaatatatacattgacatataatcaacatacataaaaaaaaaaaacatatttttcacaattataaattttataaatcatcttctctaaacttcaaatctaaaaaattataactgatgaaccccctttactaatctgaaaaaaaaaaaaaaaaaaataaaccataaataatttaaacat

SEQ ID NO: 332656 - DNA, 667 bp, Cannabis indica
gagggataaaacacctcgtgtataaagtcgctgaccaacaacttatccacttcctattttagtgccccttgtctctcggaatccaagggtctcctattctgcctcttcgctgggtagtttggatcaacatttaaatgatggcatataatattagggttgatccctatcatatctccatggctccaggcgaattgattctggttcgtctttagaaaacttattagttgctatttgagctgctcgcccaggtttttcccaatgtatacacactttgtgggatttcctgggttgagaataacctcttccaattcctcaattggttttaataggtttctctcatcttgaacttgggggtcaagatcttcgtctttcttttcattttcttcagccaagatcgccataaacggatgatcggctttcctatgctgcaactctatgtgatagcaatcgcgagccaccatttggtcgccacgcaccactcccacgccttctggtgtttggaacttcaaggataggtgcttgatcgaactgactgcccctagtccaatcagtgttggacgacccaacaatatgttgtaatttgatggcaggtcgacaactaggaagtcttccataacagtggcagataggggagcctcgcccaaggttagtgcgagctcgattatgc

SEQ ID NO: 332657 - DNA, 820 bp, Cannabis indica
ctttgtttgtgtcttctaatcttttgaagcctaaccctccctggcatttaggcagacaaaggttgtcccaactccttatggcattgaatctttctttagcattccctcttgtccacaagaataacccatcaatctctctacatgtcgacacagggattttacaagttgacatagtatatagtggcaggctcaaggccactgacttcaccaaggttgttctccctgcgaaagacaagtttttaactttccatccttcaagtctctttaacaccttttcttttagtcgccagtagtcttctcttttcctacgtttgaatacaaacggatttcctagatgaagttcttgaccagtacattcttcaacctcgaggagccttagaatatgttctctcttactccagttcaggttgttggaaaatagcacgctggactttaccttactgcactcctgacccgaccaagcctcataaatcttaaggcaatccataaatgcagtggcatttttgtcatatgctcttgcaaacaaaatggtgtcatctatatgttaactcaaacctttaggtctccttgttttgatgattaacaaatatttgattattatttgttactaatgatttgttgattttgtagcaaaattaaaagagaaaataaatatttcaagataaattggtattttttaccaaacttttcaaagcaacccaaaatggattcaacaatcatatcaagagcaaaagattcatcaagggatcatcgactcaagaccctattcaaaaagaggtcttcaaaagcccaaagtcaaaagtcaacccgaaacgtacaa

SEQ ID NO: 332658 - DNA, 287 bp, Cannabis indica
ttgccaacagaaccatttcatcatcattttcatcatcagaaataatattttcagaagcattaaaggcaatacctttacttttctcattcgagagactttgcttactctttttcttgatctgttgattcaactcaaaagttcttaaagaccccatgagttcctcaaccttcattttgccaaagtcttttgcctcttccattgcaagcaattttgtgtcaaacctgtcaggaagaactcgaacaatctttcgaaccaagacagattcatccaatttttctcccaaggaa

SEQ ID NO: 332659 - DNA, 669 bp, Cannabis indica
attcgaatgagatgaaaagatctctttttttattttttttactaaaggcaagtgaattattaagcttccaattttgagtccatcactatgtatatataggaaaccttctaggtttaggtttgacttatttggctttaaaaaattgataaataaattgtaaaatagagcataagtggccggccttgaaagtgggccctaccactttgcaattttgccatttttcaactatttatcttatgtttctcaaaaatgccataatttccaattcaaccacttaaatgccaaaactatttatttaataattaaaattaatattcaaataaaatttcttatttaatatatttattaattagacttaataaagtctcttaattgacaaataagccctagaatctcttttcttcacaattaagccctagcttagtgaaaattcataagccctagaatctctttgtatgaaaggtttcggaagcaagcacctccggtctttctgggaggtccagatgtggtgaaggccgaacagtggctaacggtgatcaccagaattctgaattttatgggtgtcaccgggaatgacagagtggtgtgtgccacctttcagttccaagaagacgctcttgtctggtgggacatggtgtctcagatccatgatgtcactaccatgacctg

SEQ ID NO: 332660 - DNA, 671 bp, Cannabis indica
gtctatgccgatcagaattgagggtagggagttgagtgctgacttaatagaaatggatttagcgaatttctatattatacttggaatggatttcttatccaagtactcagctagtattgactgttgacggaagatggtgttcttccaactcgagggcgaggaaccgtttgtttttgtgggatcggttcaggatctcgaattccattgatttcagtattaacagctaaagatttattacaagatgggtgattagggtttctggccgtagtatcggataccacatgtcctgagtcagttcggccagaggacatcagggtggtttaggaatttctagatatttttcctgatgaactttcaggtttaccacggtagagagaaattgatttcatcatcgatctagcacctggagcagaaccagtttctaaggcactttacagaatgactccagcagaacttaaagaattgaaaattcagctccaggggttgcttgacctagggtttacacggcctagtgtgtcaccctgggaagctcctgtattgtttgttaagaagaaagatggatccttacacaagtgtattgattaccgggaattgaataaactggttgtcaagaataagtatcctttacctaggatcaatgatttttttatcagcttcaagggaagacggtc

SEQ ID NO: 332661 - DNA, 1216 bp, Cannabis indica
tgcatcaatacacaccccaaaccttgtttggatgcgtcacaataaactacgaacttctccttgtctgaaggcaaagctagcactggagcggtaatcaacctccgctttaactcctgaaaactagctttgcacttgtctgtccaaataaatcgctgatttttctttgtaagttcggttaggggcattgaaattttagagaacccttcgacgaacgtacggtagtacccagctaagatctgaatggtcctctcaaattgtccatccgtctgaggatgaaatgttgtgcctaatttcaactgagtacccatggctcgatgtagactctcccaaaatcttgatgtgaactttgaacccctatcagaaacaatggactttgggacaccatggagacaaactatttttctaacatacaatttagcttactgatcaatggagaaattcatccgaacaggtaaaaagtgcgataactttgttaacccgccaactatgacccacacagagttgtactgccccatggtcctaggcaatccaaccacgaagtccatggcaataccttcctatttccatttcagaagattcaatggctgcaacaaccctgtagtactctggtgttcagctttcacttgttgacaagttaaacaccttgcaacatattcagcagtaccattcttcattacaggccaccaaaacatggccttgagatcttggtacatcttcgttgttcatggatgaactgagtaaggagtcgtatgagactcatttaagatttctctattgatgtcatcatccataggcacacaaacacgattcataaatcgtagcattcttgtgtcatccatagtaaaatcactagtctttccagccaaaaccctacctcaatatttcactaactctggatcttgcaattgtgcttctttgattcactccaaaagagtatattacagggtaatattagccaattaccctacaacgaactcaatcttagctcgggtcatctcatctgctaactgtttggagatctacttcactatatttatctgactttggccttttctactcagggcatcagctacagctgtggccttcccaggttgataaagaatctcacaatcgcaatccttcaccaattctagccaacgactttgtctcatattcaggtctttctaggtaaagaagtatttcagactcttatgatcaatgtatatctcacatttct

SEQ ID NO: 332662 - DNA, 688 bp, Cannabis indica
acagaatattcttttatttttatttttaagtatattctgttaaaccaagaaatgccgttagatagacacttttaatatataaagatacatatgtttattagccatatatcggtatatttttgttaaaatgtatatatgcctataattatcttaactgaattaaatcccattccaagcttcagattatatagttttatgtgcattataatattagtggttcggctattgtgcatgattcaatctttaaagaaaattatgtggtaaaatatatttttttttttttaagatttgccattatttatacagatatttgtcttctcttaagtttaatatacatgctacggtaaatttattttaattaaaatattttagaaacaattaaatttaatttttggtgtttgtttatatctaatattttaagtaaattaattgaaacaatatgttgccaaagtgacctcttttgtgtagattaatttatttaaatattaggatggttgtatgtttgtaattgatgcatatattgactaacccaaaggtaagtgaatattttgttagatttcaaacacatctgtggcgataaatatgtgacaattataaggtattttgtgtgagcaatacgttagtccaaagattgacctatgtttggcacagttttattgtcaatatttgattgctacactaagagtac

SEQ ID NO: 332663 - DNA, 677 bp, Cannabis indica
gtgctcacttgggggttacccataccgtacaatgaattaaactatcatggagaacttatttagagaaattataatgtttagtataagctactaaacctacctctaagtcaagtgtaggcatacatcagcttggcataaagaaaagtaaatcctgacacttatatgtcaaggcaataaaaagatagctaggattaaggaccaactggttggtcacatatctatgataaaaggctaacttggggctaaacaatagtaatgttcaaaaacatagtgctcataggccaaaagtaagaacatgaaagtcatgcgaccaaaaataagtaatgttcaaaggtaaaaggccaacaggccatacaagagcatgaaattaatatgtttatgaaaataaaatcaaaatgcaagatactaataaagtgtgtctaagagcatcttcaatggaagtgtaaataagtggtgaaaagctaaaatatagctcatttaacaaaaagtgtgctccaatggtgtgccaaaaagtgatgtaaatttggcacatagaaatttttgtgccaaatttggcacaatatttgctataatgtaaaatttacaccataataaatgcactactttttcatttacatttatgtcatttctattattttagggaaatttcattatttgcccttaataatataacccat

SEQ ID NO: 332664 - DNA, 620 bp, Cannabis indica
tcattggctagccatggatcattcaatatgtacgttgtagacccatcccctaccagctttcgaacccctgcccgaaccaagtctttggcttcaaacacactcctccatatataactcggattggagccaagtgtagccgaaaggaaagaacccgaagggaagtatcgggctttaaaaattcttcccatcaaactctcaccacaagtgagaagcctccacccttgcttagccaataaagcaagattgaaatctctgaaatcccgaaatcccatgccaccattagctttgtgagtcgaaagcttatcccacctcatccaatgaattcccttgttagaattagatctccaccagaactgactgatggcacgctcaatatcattgcagattccaacggggataaggaaaacattcatggtgtaggcaaagcttgaacaactgatttgatgagcatttctttaccagctctagaaagaaacttgttgtcccaagtctgaattcgctttattcaccttgtccttcacatagccgaatacagagtttttattccttcctatcatactaggaaggcccaggtacttgctatgctcatccgcctccgaaatacccatcctagcacaaat

SEQ ID NO: 332665 - DNA, 646 bp, Cannabis indica
ggaactcgtgaccggggattagacggctgaccgttggttgtctgggaagcattcaccgttgggtcatcctcggtttctcttaggggaatgacgctcagcgtttgctggcctacagtctgataggctcttcgtatcagcacagtggcttgccgactacgatcttcaatttctgcatggtcagcacttaatgcctccatctctttttcccttcactcgacgaacatacgcctctgtttgtcaaacgcgtgatatactacggtacgtaattcctcctgatcgtgatgcagggtattgttgtgaccctggatgagtccgagcgcagggcggaggttttgcaattcagttgtgtctccgatggtcgtctgggcgttgatgcctggcgaaatagtcatgttatgaacgtgttggctgtgtgcggaaccgttgtttccggtctcttcgacaccaggcgcagtttcagtaacaggagttgtcccaccattcaccacgcttcccgtctgtcgaggattgacagcgggtggaaccctcaaactccctgggtcctgccacgtcggatctagcgtttgtgagtgctgggtcggacaggcctctacgagtttgcaccatcgtgtcgagtattgaaaagagcgatctgtgattcttctct

SEQ ID NO: 332666 - DNA, 515 bp, Cannabis indica
aatagctaaacaactaaaaaaaaataaaataaaaaataataactaattgtcctccacgcatgaatcaactactgactcttcaagtccttctcctgaatatgttaccattcccacatcctcttgaattggtgttggttcgactgagacttcttatcctggcgatgggtggtatgtcgataaattttcattttctaactctgattcctcgatctctacctcgaaatgataatctggtatatctccatttgacttgttaccatttattgttagagacagttctgcattttctaattcctcattatccaacgatggggaatactctgatttgtctaaattttctaccttctcttcatcttcagattttgagtctgaaaggagttccatcgtttctactatctcttctacttcaatttctggtgggctcttgaattccactactaacatattttttgtcacctcgaaatagtcaggcctttttgtttctttacagtcccgttcagttgtagggtcaatgg

SEQ ID NO: 332667 - DNA, 1170 bp, Cannabis indica
gtaaaattaattccaacaactgcttggctcccgcacctcccttcaacttagcttcatgcttgagttgaatgagttcattctcttgatgagctccctcagcctggccagcactggatttcctctttttctccatcacaaggtgaggaatgaaatccttttggtagagcccgtactccgcaaagttgtcctctgaggtcaacaaagtgatattctgggcagcacccgacagctgagcaagtctttgagctctatccctgagagtaagtgtgaagggtggatggtgatatatagggatctgcttgaagcgagtgtaggtggtgcccatgccatccaccatgtaatactcgtcaacaaaattcccaattttgctaacagccttgtccctggtgcccgtcaaccactggaagtctggctgagaaaaatagaagtatcccgacctaccttacttgggagtagacttcaaatcaaaaaaccagctaacctcatgaggagagggtatatcccacttctgggtggcatagagaacgaacagggcagacagatacttgatgcccttgggagtgaattgggtcggacagaggcagaaaaagtctgccaccttcctaaagtatgggtgcaaaggcagcagtgccccttgtttgtaatgagcacccgaccaggcacacatccccttctttgggttggagactcggttgttcgaggcggaacattacattgcagctcgcccagatagttgccttggtcgagatcccgtaaacatgcctcagttaccttggacggaggactcacccacctggcacccaagacactttgtctcctttgaggaactgcagcagtaagctcctcagtgacgtagtccactccttcgaccaagacatcaccatccacgtctacaggctcctcagcctcgttgtattccccaaagtttgggggtgtagcctcctcctcttcctccgcctcggaaggactaccaggacagacatcaccatgttcctctatctcttggaattcagcgtccccttcatgatccccctcctcctgcacgggtggatcctgttcggcgctgggcaaggtggcgtgctgggccacatgagggtcagacgcgttgacttaatgcattgtccgtttagtgcgaccgatcatcctgtggctggacgggaagattgaatt

SEQ ID NO: 332668 - DNA, 845 bp, Cannabis indica
tttctaaaagagaaaatgaagaagcgaataagcagttgggagggcaaatttttatctcgtgctggcaaggaggtccttataaaatcggtagtccaatctcttccttcgtatgccatgaatgtcttcctttttcctattggtacatgtaatgaacttgagaggatgatggcaagtttctggtggaaatcaaagagagctcataataatgggagtggcattgtttggatgagctgggacagaatgacaaggtctaaagctgatggcggattgggttttaggagtttgagagattttaatctcgctatgcttggaaagcaagggtggagacttttattcagaaatgattctcttgtaagcaaagtcttcaaggctcgatactacccacaaggtgactatttgtctgctgagttggggtctaatcctagcttcatttggagtagtatttttgctgctaaggacacagttcaacttggtctaaggaaaggcatagggtctagtttgactgtgaaaataaccactgatccttggctgcctttacttgacagagcttctcctgttcccactgttccgagacttgagaactttatggttagcagtttgtttcaaattcatagccgctcctgggaggctgaagtagttaacgacctctttactcctgatgatgctgcaactatccttggaattcaaataaaacagtcagttgcgggtgattattggtactggtttgtggagaaaaatggtctatattctgttcgtagttgttaggctaaaattagtctaagattcgggtcatatttcggttagttttcactctttgtttctagttttagggctatattacgctt

SEQ ID NO: 332669 - DNA, 564 bp, Cannabis indica
aatactgccaaatatctgaggagaaacaagaagtaatgacttattaggaaaaataattttaaatggaatatcaccattaagtacagaagatggtatacaatttctataaaaactgaatcgacccaaaaagatttaggaacttgcatttgaaataagaaggcatagacagtttcaaaaagatgtctacttttacgttttgctataccatttggggtggagtatcaatgcaagaagtttcatgaaacatgccattagaggtcatataagattgaaaaagagtagatatatatttttttggcattatcactgtgcaaagtacgaacacacatattaaattgattttgaatctcaacacaaaaagatcaaaatatagaaaacaactaggaatgattttttattaaatataaccaagttacatgagaatactcatccacaaaaattacaaaatacttgaatccaggtttagacaaaataggaggaggacccccaaacattagaatgaactaactcaaaaggaacactagcactcttatcgactcgaggactcaaactaatacgatgatg

SEQ ID NO: 332670 - DNA, 526 bp, Cannabis indica
ttgtttaactataaaatggttaaaattagaaaaaataatattacgtgtacatcaaaccatccaaccactatataagtaaagatttagattttacaaaaaggcatttattgaaaccccgtattagtattacctactaaacatggacccttacccaaaattcaaccctttcgaatcaagtcctgaaaagtccccacctcatcctttttcttcaacacgagccgtaggtacaccttcaaggagtcctagactccgttcagcttcgatttccggatgtgtgaactgtgctaggctagagggtgttgtgcacgaacaagaaaaactcatcaggaaggcacatgttagagccacagaggctaagcaggagtcattaaaactggcggagcacctctaccattccgcccatgccttgcaacatgccaacacttcaagagaaaaattagaaaatatcatggacgacaatctcgactacaccaaggtctccataccccattacccaatctatccaaaagaaaaaccatcaaacaat

SEQ ID NO: 332671 - DNA, 645 bp, Cannabis indica
aaaataaatttccaacaatgcttgctctgtgtttgagagaatgactaatagggatttggtttcttggaatgcgataattggtgggtatgatgttcagggttactctgaggattcgtttagagtgttttgttcattgatgagagaaggtaatttaagatttttttttttttgttaaatttcttaaacagctatgcataaagactttgccactctcttatttctttggttcaacatttttggactaacatgcatttgccagctctgtaatttgattctctgtcaatcatatgttgacaggatgtatataaataatatatgtacatataatgttataaataatagggtatgggcggcgagtcagagttcaaaatcagagtagcggaccacaaatttgatggccttgaggaggcgtgggtagatttctacttcggttgagttgatcgccctttgaatgagggccctgaccttcccacggatgatgttttggggcaaaatgaaaataggaatgggatttcggaggcggaagaggcggtgatggtttaagagcatggtgagaatggaagaagaagaagaagaagaagaagaaggggttctgtcgagattcgagaagaaagagaaagagaaagaaaagaaaagagaaaaaaa

SEQ ID NO: 332672 - DNA, 514 bp, Cannabis indica
tttgagaaagtctgactgtattgaaacaaattgggtccaatccatttttttctattccgacattccaatggggactcccgaagagtacttgctccgtcgaaaaccagagaagctagttcacttgaaaagaaaatctgattatttgaagaaaccaatttccaaatatggtctaaacgaaatcttcaagaaaatggtggagttagaatatccagctctgcttttcaatccttacggtggtagaatggctgagattgcacccaatgcgacgccgtttccacatcgattgaacctagcaaagattcagtatgtgttgaattgggaggaatcgggaatagaggcttcgtgttactacattggtttgatgaggaaactgtacgaccacatgactccgtacgtgtcaaacaaccccagagagtcttacctgaactacagagatcttgatttgggaatcaacgatcacgattggaagactaataattatcgaactgctaatgctcttggggttagttatttt

SEQ ID NO: 332673 - DNA, 517 bp, Cannabis indica
aagatgaaactctctcaaaattagaaaaaatagattaggaatactataaaattctacatcatcactctaacatttagctttatatagataatagatttagatagataggtatacatagatagatttataatcgtattaatatttgtaagtttctcttttgtaatcattctgagaactttttagttaacaaactttctaaacttgcattgtctttggatatgacaagagtgtggtggccaggtttaccgggtattctttgataattagtggtgaaacccctttatgtttaaattttatacacttaacccctgatcttttttaggtgaaaaaactcccttaacttcaattattattcttttttttttttgtaaatttgagtcgctagtgaaatctcagagttaaatatcaattgaattaccaatgtgtatacgtgacatatttgtaacgcctcgacattttgccttattttacaaaaaatactattttcatgcataatttgaaaagatgaaaaaaaaat

SEQ ID NO: 332674 - DNA, 1498 bp, Cannabis indica
tctggctcttacttttctcctgagtcttaagggatctcaagagttgagttggggcactcagctacaaagtctgcaaggggttgacgctttatggctgtttttgtttggtatgtgatctcaaatgggccaagctcaatggcctattttgtagtcggcatgatgctttaggtttttgcaaaacctatcgcagcagttgatcagtatacacctttatagggtgtggttggaagtagggccttagctttcttgatgccaagagcaagatgtaggtcagcttctccatgagtgggtgcaaacttttcgatgttgattagccttttactgatgtagtacatagggtgttatacattatattcttctcttgtgagggcagcactcagaagatgttatgttattgctaggtacatgcctagctcttcattgtctaggggtttagacagcagatgtggttaggccaatcgtctctgttgggaatattttactaggatctagatttactaacaagtatgttgattaacatcctaagtatgaatatctctaaaacaatgaaataaacacataagggcttaagaaaaccttacattggttgcagcggaatataatgactccttctattcaagatctctagcccttgattcctttttgtagcagagcattatcgagatttgaacttggaactctttctcttctccgggtttggttaccaccgtcttactcactatgattgagtacttgacttgctatgtgtgggcatggcactctatcactcgaggtttcgaattggatgaacaatgagggaggtttgaaaacactattgaagttgtctctcatctactagctgtcagggaatgaaaactagatttagaaagttgaatcgtcaagttgacaagagcatgagatgagagcattatgttacttttatagtgtttctactagggtttaggactgaattatatggattaaaaaagaataaaatattgggcaaaaatccacacttagggccggccataaaaggaccaagctctagttacgattttgccactttttttcaaacacttattcttatttcagtaatactatattttccaattcaatcctataaatgacaaaattaattatataataattataatttattatcaaataaaattaccatttatattatttattaattagaccacacaaagtctcttaattagcaaattgcccgaaaacctcttttcttcacaattaagttcttgcttactgaaagttcttaatgacatagtctagttttagaattataattgattaattagaatcaattaactgagtctgcaagtagtattatctcaactagtgaggggaccatgggtcaatataatcgagctttcaataactagatctagaatacaccaagtaaattctctacttattaattccgccatgcgccactatagatttgaaattgaataacactctcaattatatagaacgctctatatgtaccacgatatag

SEQ ID NO: 332675 - DNA, 626 bp, Cannabis indica
gggtcaattgtgattcaggcaaagataaacaaaaaaaaagaagagaaaatgtgtctaattggaaacttacttgtgatagcttacttgtgataatgtttgtttatatagttaatatttgttatagcttacttgtgatattttttatgtacgtagttactctgttatagttaactttatattttgtttgttaatggtgtggatatggctaactcaggttcaggctcaaattctgacccagtagtagagtgtcctagggagatacctaaatgaggtagaattgagatgaatgaaatgatggccaaggaaaaagacttcctctcctagtaaatgataaatgagagtattatggcagaaactcaagctagtatcaactttaggagttatatgtcgtatgacgatagggttgccctatgaaaattggaagcaagtcaaccctgaacttaaagataagatttggaaagatatacaggtaagcagttatttgtgagaattttgatttgtgtttatttaattcagatgttagctctaatcatgtttgttttccttaaaactagacgagttttatagttcaagatgatttcaaacataattgcatgatcattgctgggaagttaatgaaagacttc

SEQ ID NO: 332676 - DNA, 1162 bp, Cannabis indica
gtcttcatcaataagactaatactagctatactaataaattacaccaaaaactaataaaagaaaaatatgagagagtaaaataacgttctaaaatcacttcaaagtcttttctttttctccttaattttttattttaataatttttttgtcaagaaaaaaaaaatcaaatccctttaaaaaatttaaatataacaaactacacacaccttaaccacataactatttctaaaataactattttataaataatataaataacaatatgtggatgatgatccattgaaatgttaatttccaaacgatttctaaatattttttagttacaaccaattatttaaaaggaaagtctgttatgttagttgttgtcggtttagagctgttaagtgctaggattgttagctactaacatatataaagctctacttttcaattcatttagaaagtgagaagaattagacctagacagatagagagagaggaagtgagagagtgtaagaagatcgacttgaattggctgaagttcatagtgtcatgatgggttggggagctcaagtattgagtgttgaagagccaatgtgtattagatcgttcttggtgattcagtacatgaattggtgtttgcaacaagttgattcggagtggagaaactccttggggagagctggagtaggaatcaaattgagatcggaactaagataattttcttgtgttttctcttttatttttctagtttttattgttttcattttctgttattttggctaacatgttttctatgtgtttgatcattgttttagtttgattagtgttgtttaatcacaacaattgtattagagcacaggagaggaacttgaaggtttcaagaactcaaactcagtgatcaaggatcaagaaagcttctgcaatggtttcatcatcaactaggttcaatctggagaggtttgatggtactggagacttcagtctctggaagaagaagatgttagccatactgatctatcagaaattggatttagcattggaagaatcttttgagaagacatagcatgttttagatgaacccaagaagaaggaggttgatgaatccaagaagatagatttataaaccatcacgaagcaagcaagatcagtaattgtcatgaaccttgcagacaatgtact

SEQ ID NO: 332677 - DNA, 353 bp, Cannabis indica
gttaacccaaattccagtatttttgtaagtttcccaaaataatcaaattagccctcgaaggcttgccacattaggtttaggaaaatttatatttttacattaaatatatttttaaaatactgtattttttgtaaataaaattttatcggtcatcttcatatgcctagagcgcttcgtaatttctaaattttttcttgtactgatccatctcccagggagatgaattatacatcactgttggatttgcaacttctacttgctccagaatctcaacttgagcagctttcgccatggcagaaactggaaaagaacaaaaaaaaaagccaagcagttaaatacccacactaaagaag

SEQ ID NO: 332678 - DNA, 476 bp, Cannabis indica
agggcataaaactcaacataaacaatcaccaaaatagtaaaattggatgaaattagacaaaattccttaaatctaacaatctcaatagttcaggaagaatttctaacggacagaaaagttcaggaacatgatttggtacatgttaaaatttaagaaaaaaaatcataattagcctaaagatacagacgatgtttttttcctattacaaatatgttaccaaaatcaaactcaaccataatatttaaccttttagattgagtttgaaacatattattaattagtaattagattgtattttaaaatacaagatttttattgtcatgtgttagagtttgactcaaattatttatttctttctttatttatctatatttgtaaagttgcaatttctttttgggtaattattaattatgggaaaaggaaactcttggttgccaagttttgaaaactcttcttaaggaagctttggaatgtct

SEQ ID NO: 332679 - DNA, 890 bp, Cannabis indica
ttgggtgtggttcgttgtgtgccccctgctggggtttgtacgtgccccttcccttgttgtttgagaagaacgttggcgatgccccgttggtgaccttcgtgtccctggttgagtcccaagattttcctcatttccatgagaaatttcctgtttcctggcttatggtcgccttctattctcattcctgtgagaaggctctggctgatcatttggttgttcattttcagggggactctcagtttcccaggttgttcttcttgagcgttctgagggttctcttgagctgtctcctgccacctggttcatgagccgcgaggtctgcctcgtggtcttctcactccaagatcaagttgattttgtgtattattctcctgtgccgccctggccgcggctacctcacgttccaactcaacatttcgtcagtttccctcctccaggtggcgtctgacttggcggttttccaacttgacgattggcacgtatcttgttggatcgtaggcaccatcctcgccagttttcctgggttgggctctaccaatgttcatttcaagttcttcataccttgttctggattctgggtcctccttgaatgtatggtccgtgtatttgggccaccctcaggttagttcctcctggaacgagtggaccgtgtacttgggccaccctcaagttgggtcctcctggaatgagtggcccgtgtacttgggtcaccctcaggttaagtcctcctggaacgagtggtccgtgtaaatcgtgagttgggaggcctccgggagcccattggcttttttccaggacggtgagtggtttcttcacgaggagcatcaacattttctccgttgtcagccatggagaatttttttttttttataatatcaagagattttttt

SEQ ID NO: 332680 - DNA, 1299 bp, Cannabis indica
taaaattagaaaaataaataaaaaatcaaagaaaaaacaaaaaaaatagagaacctctctctttctctctttcgactgaagcaaaccagaagggaaccatccactaaccttgtgttttttcttaaattcatctaaggaatcaagtattcttgaagctaaggtaaccctagaaccatagttttgtacttttgaagcttttaagtttggttgattatgtgatttttatcttaaggggctgttagggtttggttcttgtataattttaattttaaggttaatttgagttagaattagcttcttgcagctggttttagtatattgtattgaaattgtgcaagtttgagttttgaaactcaaacatgggtctttaatggcatattttaattcagtgtgtttttttaagatttattggttgggatatgctatgtatgctttgtttaggtactctggaaggtttggtagcattttgttgagttttgaacaagtttggagtattttggggaaaactgaaacaaatcagttaaccagtttaccagtacttgtaaaacctgttaaccagttttggcaggttccctgaataacccgttttcacaattcttgcccattttagtgccttagttgggtgtttccctatttcttaggttagtgtagttcctagtgataataacagaaccttgagttgtaggttcgggtttctcgcgttaaggttttggacatgtgatttacccagttttaatatgtgattagggcatccatccaacacaagacattccgttcaggtcagccaactcacttaaatttggaaagaaggtaagaactgtgtataatatgtcatatgaataagcaaatgtatgtatatgttaagtgtatatgcatgcttatatgtttgttacactaccaacacttgtacgggtatggtatagagtgcattggtatagtgtatattgtaaaggagtacattacagtgataccagcacaagtacgggaaagtacagggtgtgtgtggtacatcactcagtggtactcagggtacgaaacaaaccataccaacacttgtgcaatgaggtacgtagtgtatgtggtacagtggctgtaccctagtatggaatgttcttactcatctattaagccttgtaaataggtgtatgggcgcctagatacaagtcggtattatatgatatgttatatgcttttcttactgagtctctcgactcacagttctggttgcatgtgtatttaatattttgaattaaatattaatttaatatttttaaatttgattatattttttaaatttaa

SEQ ID NO: 332681 - DNA, 608 bp, Cannabis indica
atataatatatagattatatataataaaaccatataatataaactctcttaatcgggttggtcgggttagttcgggttgattgggcgggttgatattattttcaacccgcccaatataaagattgggcaggttatattttcgtcgggtttttcggtttgcattttttgtcgggttatctcgagttggtttgggcaggttgttcggattggacggtttacaaaaatttatgtacaacactaatacaaggtaagcaattctaccttatatatatttattcaccatccctcctactatctatcatttataaatttcacaccatcatactcttcttccttcctaccaaacatagcctaaaaaaatactattattatttatttatttttagaattttttgtttatagaaaaaaaaaacattttggaaagtgtgttatgatacgttctttaattattttcaaagttgtttgataattttttaaaattgctaaaaaaatattattggtgtctaataccttcctcgatgtaatattgttattggtgtaattaaatatcaggtctcatataacttaagaaaataaattttaaagaatatcgctaactaattgtagag

SEQ ID NO: 332682 - DNA, 752 bp, Cannabis indica
ttgactacttcagcgttatctgcaggattaatagtttgattggaaattgaaaatacattcattaataagaattaggaatgattgtcaatagtgaagaataacctttaactagtctctcatatcgtagtctcaattttaattttcttgttttatttttatttatgctattttaatcttaatctcaaaacccccctcttctctactaatttgtgaataattgaataaacataggcctcgtgggatcgactcttacttgcttttatactaaaacaaaagtattagaaaaaaaatagtaaattagatatggcatacgacatgcatcagtatgggatcattccctgagtggccatgaagatggtcttaggcttctatgttagaggggtgaagcaaatgtacttctcctccttgttttactgtcgcgtgggaaaagtgttaaacttcccctttttgtcaatgttcctcccagagttgttggtgctgcgcttgtttctagtgtttttgccactagagttctaggcagcattgttattgcctgcctgtgagcctggtgggtcatgaggctgctgggtgtctcatgaccacctgctattgacatgccccgcctgggcttgtcgtatgacttcttcaagtttgataaagccatttgctctatcgaaaaactccttcatgttgttggtcgatattgtaacaccctaactagcataggcgtattacgtgatttttaaacatgttgtgcagctcgttgctaatca

SEQ ID NO: 332683 - DNA, 765 bp, Cannabis indica
ggctccaatttttggtcacagggtacgatttatggtccgagtgttggtctgggtcaaagtcctggtctggctctaggtttgtgtttgggttcaaaaccgagtctcggtcccaaatccaaacgccaactacatgtcgagtctagttcgagttttggttcgggctcgagttctagtctgggtctgggtccaggtcgaggccctattcctagatttagacaccgactatgtgtcgagtccaagcctcgtgtgggtcccgggtccaaatctagatcctggtccaagtcaagttctaggtctttagtctgggtcctagttcgggtctcaggtctaggtttgggtcaaggtttgggtcttgggtcctgagtcatgggtcaatgtccccgattaaggtcagggtccttggtcccagtcttggttatcatcctagtccgagtgcaggtcccagtccttgtttggtacttgtccttgtctcgagtcttggcattgtctaggtctaagtcacaattcggttctcaagtctcaggtccgagtattgggtcccgtattccagtctcggtcctgggtcccagtcctagtcccagtcccagtctcggtcctagccccagtccatgttcagatctcagtcgttgtcctgacctgggtcccagtcctgatctcggtcctggtcagagtctcggattccagtgcgagtttgtgtacgagtccgggtttgggtttgggtctgggtctgggtctgggtcccggtttcagtccgttttagggtcc

SEQ ID NO: 332684 - DNA, 603 bp, Cannabis indica
attcggtaatatcgttcctcttttactttgctagcagtttactcaacattatacaatcaattacacattacaaaaatttagttttcagtaataccatgttatcttttgtttaagatacttttacgttatttttttatagtaacgtttttattactttaaaaaattattaataaagcataagcacatattatataacttattagtaaaattagtatatataataattttcttaatgtaattaatttttttttgaatcatatgcttgtattactttcaaaatttctaaatttattataaactacatcaccaattaaggcttggaataactaaacacaactttaaatatttcttttgattttattatatttaagatactatttagtaacattataagtttttctattaatatatcgaaattactttattaaataaatttgttattagtatatgatatgctcatttttaaatataacataacaaatgacttcaaagtaatttatgatattattttgaattttattaagttttattatttttttttaacaaaatataaaaaaagctacttttaatgtttattgtctttttttagagatagtaaaaaaa

SEQ ID NO: 332685 - DNA, 626 bp, Cannabis indica
aagctttccaacgataaaaaaatctctaaaaacggatcaatatcaagagagatatcatcactttactgaaactttgttttttctgaaaacgaaaaatataataggtctgaaccctagataacatttagcattattgagcaagaaaatatttcatacctcttcacaactttctatttgatgtctcaagcccgcaagccttgattataaatccaaaactttaagaatgaaggtagaaaaataagaagaagtgtggaaggtttgagaggagcaaccatgaagaagaatgaagctttgactaattggtttggaaaggaaaactaaaactatgatagtttagggtttgataaaaaatatgtactgaagattatgagataccgtattctaataggtttaggttaactaaaaataataatatataataaaatgctaaaatattattaaatcaacaaatatctaatttttaaatttaaaaataagccctctatctcgtaactttaggctcagttttcacctagaaaacttccaaattatgatataactttctacaaaatttatagatctttgaattatctttccaacgccactggaatcacctcaatcggagctctaaaactctagatatgatc

SEQ ID NO: 332686 - DNA, 768 bp, Cannabis indica
taaaacaactgaccatttagaatcaatgggatcagttatgtaaaatacttgtttcgcttgggtagccatgataaaaggatcgttcttgctacctcttttgcttaaatcaaccaaagtgaaaccaagttcgtctgttctaactccgcctttattctccacccaagagcatttaagaagtggaattcgaagcaatccataatcaagctcccaaatttcatcaacaaccccgtaatatgtcatagtggattgcaccgggtttctgtcctttgttgatgcaaaatgcattgcttctgcaacaatacttactccactattttgaaccgttcgagcatcatctctttcctttgtatgaaatcttttcccccccacaatgtaagcatgatgctttactacttgagtatctggtccaaacgatatgtattctaactctttcgacacaccatgatcaatagctagaatggtattctttaaccatccaataaatgttttacgatgctcctctagtacccatctctgtttattcttgaccttagttggaatcattgattgtaataattccaagtgatcactgaaacgatatagtataagtcatatcaaatttcatttgaagtagaagaatataaagtataaagttgaatagaaaatacataacttacgttatatatggttggacttcagggttattctcaagcacaagcaaatgagcttgatccaattccgatctagatacagtcaccattgatcctttccctcgtaatcctctatcaa

SEQ ID NO: 332687 - DNA, 1035 bp, Cannabis indica
tcttcaagctttggtaaggtttccaacctttcccttttgtaatttatggaaaatgtttaaaatgatgattgttgcatgttgttttgttgtgatgcttgctgctgtgatttgtggtggttttaagaggattaatcttgttattttaagtaaattgagctgctagtaatgcatgataattgctttgatttcaagattgaaagtttttagctcaaagtttagttttcaaagggaaatttcgaaatctgttgctgtgattattgcatgagttagagtttgttttctgcagagtttttatgcatgattatgtagttttaatctaattttgaggcttgtaggtgagctttagccaagtttgagtttgaactcaaagcttggagctcacatggtgatttttaatcctgtgctttgtggactgttttgatgctttagaattgttccttagtgtctaaatagcaggtctagaaattttggtatagtttggattggttttgtgcattgggatagtctctgaagcagatccactcgtaaaacacaatacagaaacttggaaattatatgtggatggagcatcaaataaaaatggctcgagtgcaggagtgataatgatctcgccaaataactttaaatttcactacgcattcagattccaatttgacacttctaacaatgaggctgaatatgaagctttgtttgctggtttaagaatggctgaaacattaaaagtcaaaaatcttatgtgctatagttacacacaattgactgtgatcaagttctaggtgactaccaggcgaagggtttaaagatcgcaaaatatttggagaaagttcagaagagcttggagaagttcgattattttaagattgaacaaatttcaagagaacacaactcaaatgttgatgcacttgccaaattggcctagcaaaatcaacttgataacttaaatctggtaccggtggaagttttgagcgacccaagtatatgtgaaaaggaagaagttgagatgattgatgcttcacctacatggatgacacccat

SEQ ID NO: 332688 - DNA, 436 bp, Cannabis indica
ttgtgtggattggattggatccaaaaaataaaattcgcacttagtgcggattggatgttgtttgaccaaaaaattgcggattggatcggatggacaaccctattatttagtatttacaacttcttcaccaaaccttcacaatggctgttaaataaatgtgtccacatagtttggttaatcctttttcagactatgtgtaaatttaaaataaaatcccacaatatctggaggtcatcatttagtaaaattgatttgacctctgtaaaaacgctgacgtactttactgaaaatttacttaattaataaattgtatttaataataccattttttagtagaaccagctcagttaataatgggcgcgtataagaaattagtacaatttgtcagaaaataattgtttttagtttttattggaatactaatttccaataatca

SEQ ID NO: 332689 - DNA, 1409 bp, Cannabis indica
gttcaggtccaagtcccaagtttggatctgggtctggatttcgaggcccaggtccaggtcccccatccaggtctgggtcataggtcccggtctgggtccatgttcgtgtttgggtcctagtcccagtttcaatttccattcagtgtttgggttcggatttgggtctgagtctgggtcgaggtctgagtcctggtctaagtttgggtctgggtcttagtttaggtacaaatcccggtgtgggtctttgttcgggtcaaggtctgggtttgggtcccaggtgcgggtctaggtctggttttgggatagggtctctgtccggatctaggtaccgagttttgatctcggtctgggtttgagtccaggtttgtattcggatacctatctaggtccaagtttgggctagagatcgtgtcccaagtctaggtccaggtccaggttcgggtctcggttccgatctgggtacacgaccatgtctgggcttgagttcttgtctcgatttgggtttggggtaggtctgagttcgtttctaggaatgggtctgggtcctcgtcacgctcctagtcttgttcaagggtcctggtctggcggttcttgttcagggttcaggttttgaacctggttcgggttcgggtcctggtctgagtcccagatctggatccctgtcacttgtccggatctggttccagttcaggtcatgggacccagttctgagtttggcttcaggatcgagactggggtgcggttctagttcccgaccccaattctatgtcccaagtcaggttccatgtttgggtcttagttcgggtccaggttcagcaccgagtcgaggtatggcttgggatcctggttcgggcctaggtctgggttggagtccgggtcctggtccagttacggttttaggtctaggtctatgtttggttacggttcgaggtccaagtccttgttctggtcccgttcccaggtctcaatctacttgtggtttcagttccaatttttggtcacagggtacaggttcgggtccatgtttgtgtctaggatagggtttgggtttgggtctgagtttggttcctgctctgggttcaggttcgaggttgggtcctatatccaaacaccgactacgggttcggtccaagccccgagtctagatctagatcccgatcttaggtctcgatctcgttccatttcaggtgtcgggtcacgagctgggtcctatgttcaagtccgggtctggagtcggctcttggatcccggtcctagttctgttgcctaggtctgtatccagattcttggtccacgtctcggttctggtctgggtttgggtcaagatctaggtttgggtctgggtcctaattgcagtttgggttttggtctcgttatgtgtatttttttgggtttgggttcgggtttgg

SEQ ID NO: 332690 - DNA, 1393 bp, Cannabis indica
agagagagagaaagaaaaagaaagaaaagaaaaataaaaaaagaagaaaaaaaaaattatttaaaattttttaattttaaattaattttattttaattttttaatttttttaatataattatttacgtggaccaataaaattgtgccacgtgtatattgtgtccacgtggacaagccaacctggcatttaacagctaaatttggacggaaagggtaaattgctaacagaatagtagttttgggggtttacccgcagaaatttgggttgtgggggtttaatgaaaccaaaacgaaagtattgggggttttgccgccatttacccaatatgaaacgtaaagattgtctatgtttcatgaacacggttacctagataagataaaaaaaaaatgttattcttaaaacccctatatatagggacaaagcccaaagagaaagggagggatcatttttaaaaggagagattttgtgagattgagtaaatatttatatttattcttctgtactcaaagtaatttctcaaaaaatatccagaaataatattgacttgtgaagtatgtagatttaactacaaaattatgtagaaaaactctgtggtctctatattttataaattataaatattaattctttattttacatgcttaaatagataccccctaataaaatttagattcataattaatttatacaattaaatgctattattttcagtttctacccaaaataccttccctttcattttccttctctctctgtctcttcctcttcctcgctctctcttcctcttcctcgcaccaccgagaccacccagacccaggcatcaagatcaccaaccaccaccaccgaacctcctttcctccatcactgaacatccttatctaccccaaaacccagacgaaacccagaggcccaggacccggacctcaatagcactcaagcgtcgaaaaaatccaaaggctctgaacctccgtctttgtctccgtttgcgagcgtcgtccatactgagaaggtgacctcatttctaagaccgactagatgctcaccagattttgccttcatcttcatcttcgtatttatttgtgtttttattggatttgtgtttgttttagaccttagatggttgtggttatagtattttttggccaaaacgtgctcgatagtttatcgatgatttacatatgtgtaacatagttttgtcaatttgatatatatcgataggttattgataatttatcgatgatttctgtttatgcacaaaaatagcagtgcacagacaaagccatcgataaagtattgataacccatcgataattacattttggcttgaaacccataccctccaccaccatctaatgtctcaaacaaatacaaattcaaaagaggaagagagag

SEQ ID NO: 332691 - DNA, 522 bp, Cannabis indica
ctcaatgtaatgtttcagtcattggccattgactcgaaaaatcctcccatcgactgggtcctcgacttcaatagaatcgttggggaatacttgcttcaccacatacggaccagtccaccttgatctcaacttaccagggtagagatgcaaacgagaattgtacaaatgtactttcttatttggctcaaaatgtttttgcaagatctgtttatcgtgagcttcttttaggacccaaccgatgggaggatttttcgagttaatggccagagactgaaacattacattgagagtgtgagccttattaaagtgagtgaattcataagtgttcggaaagactcctcacacttcagtgtccactcaaaagtaacatttttggctaggaggttgcataatggatgagaaatcattgaaaaaattctgtatgaatctcctataaaaaccagcatggcctcggatgtctttgacaatcttaggagtaggcaatttagagatgaggtctattttagattgatcaacctcaat

SEQ ID NO: 332692 - DNA, 611 bp, Cannabis indica
tttagcccatatttatgattttctatttttttaggttgtttttcaaattggttttaatgtttgttattttatcattttgttttttgcccaaatcatgtgttattttcggttttgttggtttgatttgtttcggttttttgtgaaactggtttttatgtttattatcatgattgataagttctttgtgtctaatattttttttgtactttgattctttatcaaatggaaagtaaatcagaatccaaagtttcctttgtacttctatcaaggctaaaggtcgaccaagaaaatcttcacggcaagctaaagtatgttttatgtttttaataaaattggtttttaatcttaagttttattttgatttctttttattgattctcatgaaacctggttttaattttttttattaggatgcttctgttgaagaagaaaacactgttaaagttcaaacgaggaaatctccccgtaaatctaaagtatgttctatgtttttattgaatctggtttttgttgtttattcattttttcctttatgaattttttttggatgaaactgattttttcttgttttgtttaagggtgctactgttgaagaagaaatttccattaaa

SEQ ID NO: 332693 - DNA, 528 bp, Cannabis indica
tccattcttttcctatattgacataatttattgagatctcattatttctaatattttcaggtacctgaatctcttcatgccaacatcttcctcgaaattctcagcctcttcattagggtcatcttgattatttgctccctttctttttcaaagatttttatctttggtactagctggtctaccatgttttaaacgtgctttagaatcattagttaattgtccttctgggacttcaattcgaattggagcatttttagctggaatatgtgattttgtaattttctttgggtcagtgaatcttgtaattgttttgcaatattttgcaaatgaattattctttgaacttcaatttcatattgatttgtacgaggatcaaattgagataatgattgtgcattccatataatttctttttccagctgtttcttttctccttccccctaaagttgggaaacttgtctcatcaaaatgacaatcagcaaaatgtgctgtaaatatatcttcagttgtgggttcgagatatttaat

SEQ ID NO: 332694 - DNA, 1148 bp, Cannabis indica
gtgatgccacgtcagagtgaaaaaattgggataacatcacctatgatatttttatttaggcccaattagtattgggcttattcaatatataacaattatttaatgaaagattaattcctctctttcgggccttgtgtgagagtagggggcaatagtagtgggttgacatactgaacccagccctccctcacatgaacaaccccaactgtaaagacccacttaccttatttaaataattgtataggctaattatactagtttaacctaattaaaattgaattagcaacataataaattttgaaatatggaattaatttttcattggaatattttaaaattaatttagaaaaacacacttagtttaaagaaaagattctaaatagtaatttctcgtaactaatttatattttgtaatatttaattaagtagaaaaatatatttaagtttaaaattaattttttaattaattttagaccaacttaaataaaaatactttttttagaatttaaattataattaataattaagttgattttattcaagatacttaattatttgtttctatcttaataaatttaattaaataagaaattatattgaagttagaaatttttcaatttcatatcaacttaaattagaataattttcagtatatattttattttattttaataattttggaccaacttaaattaagtaactttcataatatttattagaaaattaataccaaggattgaaaataaatttttattttcagatctatcttgtatgtatgtaattttacaaatgttagattaaaatttatatttagagttatctaaattaataattgtaattaaataaatatatcaatattaaaataaatagattaaaatatatatcaaataaaaatactactctttaaaataatgagctttagttaagtggatattcgatttccattgttggttctacatagttcttgttttagtgagattcatccctaatagatgttcgttcattagcaatttaacgtcgtagaatctcaaaagataagtattatcgtaagtcttttattcttagtaacgattaccccaatagtgactactaagagtagggcttacaaagtatgaaataatggtggaagctcataagatagaatggcc

SEQ ID NO: 332695 - DNA, 688 bp, Cannabis indica
aaaaaacaaaagaagcatgataagtacgtgccaatttacactatttacactgagcttaatgaaactcaggaaaatatattcctcgcacatgagcatagggttgcatttcgcaagcttgagtcgatgaggcatgcgaggcacaaatgagatgcaacaaaattgtgtagatttcacaaggacattgggcatacaatggatgagtgtcgtccgttgaaagacgagatacaattatctcgtgtggctactttgaacagtatgtaaagcgacaaggtaatggacaaaaccagtcacatccacccaataacctgggcaactaaagattacaacctcctcctatagaaggagaggatatctcggtcatctcgggagggccacatctcgttggagaaagtatcaatgcccaaaagagatatgtcaaggaaattaagaacaagcggtcagcttttgctccagaatcgtcaaagaaagctaagactcgggaatctccaattgtgttttcggaggaagacacaaagcacataaggtacccacacgtcgacccactcgtgattacaatccagctcactaacaagagaataaaaagagagttggtggataatggaagttcagtgaatatcctttaaaaggatacactgaagaaaatgggattgtaaaatgcaaagttaaaaccttgcatggtgaatttatg

SEQ ID NO: 332696 - DNA, 781 bp, Cannabis indica
aaggtgaaccaaaacatacacaaatgaatgaaaaatacttctgtttctttattgttattgaataatactgattacatttaaattgagttttatttggggaatagaacccaacagctgggtcccagttatggccttttaaaagaattgtttggtccttagaaatagttgaatctcaatctttttcgaaaacagagaggatgcttgaaggagttcttaaaaaacataactgaaatcgtcctaggttgacaaaatgtcaacctgggcactggcccttattttttgcacccagaaagtgttgtttcttccagtaaaggacctatttccccatttttgatgaagatgaagaaaatgtaaaagtcagatcgtcaatctgatacttagaaggtgcccgaattgacaaattgtcaacctgggcgttggggtgctcggggcctcgagtgctcaaaaatgaacttgctccgattctggttctgatgcctcaaatatgtctgtggtatgtctagttgatgtcctaataaaagtttttaatcatttgcactaagacaatcccaaaaattgaaaccctagttgggaatgtgaacttgggcactgggtgaaaccctaggtgcccaggctggcttccaggttgcaggtttgtgtaattttagctcctagggcttgaattagattgctccatgtcttcatggtacataatactgaaagataatgagttggattcaagttattgaagactgaatttctatctcgaaactcccaaagtcaacttggacgtagggctata

SEQ ID NO: 332697 - DNA, 1517 bp, Cannabis indica
tcatttggagttcgtatgtgaaagttatgcatattttactgaaagatgctgaaggtatcaaatttgcttcagtagtcgcgaccacccttttccatggtcgcgacccttttacatggtcgcgagaatatagtcgcgactatggagcaggcacagagcatgatttttgtattttgcctatggtcgtgactaggctttatgtagtcccgactatgggcaaaatacgggaattttgggcagtttttgactttcaccattcagaggtagtaatcctaatttctatttgaggggctcatgttttagaatgaagggaggcagaaattggacccaaaagtgaaaggaggcagaggaagcaattgtggcgatccggagcacaatcacccaccagttttttcttaaactcttcatttctatgttaatttctgttttagatttgattatggatgttattatggattttatgaactaaactcctatttggggagatgatgaatattgattgattttatgccatgaattaatgttaattgctattccttctttcttgattgtgtatttattcatgtttgtgcttaatttcatgtttgaaattgatcaccttaggcatgctttaagatctcaatacaaaatttgaaaagtaagtattgagaatgctaaaattgaataaactaggttttgatgtgaaacgaaagtatttgcatagtctatgtgacattgagattattacttaatgcggattgtatgttagtctatctcagagatgcaatagataacatatgatttagggcctaaaagtgaaaagagtaaggtaattttataatctgtcattcacataaagaaagaggaataataattagcattaacgattgggtaattgaaacagcaggattcgattccctaatttctcatccttaattaaacaccattattgtttttaattttcttgtttttttttcttctttattttaaactctatcaaaattatttatctaccaaatagaaacaagaattcaattgattggtacttagctacagtccttgtgagaacgatctcacttacctgagtattacttgttaaaacgatacgtatacttgcgtgttggatttatcacaacacccgaccacaaactccgactcgggcccggacttaaactcctatcccaaccccaaacccccaaacccaaactcgcaccccaaacccccaaaatcgggacctgatctcggactccgaccccaatcctaaacctcgatcgaagaccagaccttagaccctagaccctagacacaggagtccagacccaaaccccaaaccgtagactagaccggatttaaataagaataagaaacaaaaatgaaaaatgaaatttacagaatacacttttattttttcattttgaaattaaaaaataaaaataggtagttagagaatatatttttttttttcaaaaataaaattttgtgaataaaaaattaaaaacataggtattttgttggttctaccaaaaataaaataaaataaa

SEQ ID NO: 332698 - DNA, 900 bp, Cannabis indica
aaaaaaaaaaattacataaatgctatagtaaaatatttatccctgtgtattttcattattttcctaatttctaatgatgaatttgttcatattaaatcatgaagagacatgtaaatagaattacgtacgtggaaacactgttttgatttttaatgtttcataatagttacataaatattttgctaacagttatttcatctgattgaaactttcatctgatacaaccttcagccgaccacccagtaaccttcgtctgattgaaaccttcgtttgatgcaaccatcgcgcaaccacccagcaaccactctgcaaccatcgtttaattgtgtaagtgatagtgtaagagatattttggtaattaaaattacataaaaggtataaatgttgtccacgccttatggaggtatttttgtaaataaagtgtgaatttgtattttccatgtaataatttaaaaattaaacatacatgtattatacttaacattacctaatcaaaaaggaaaactaattatatgtgcattgcacgtaatatcaatcgagtatatatataaatgatactaagcggtatataaatacaatttatatataaatgatattgttatctgcgtttttacaagatatgacatgtggcatgaaatagagaaaaccacattaatcctcccataattgaaatcctctaaaactgctctatcgttgaaaggtctccccaaattaagaatcatccacgatgacggggcatgtggaagtccactcacgcctgctaagattacccttgatcttcttcgaaaagaaactaagggtaaaaagttagaatttcttgtaaaatactgtaaattcatcaataccgcccttagaggctaatagactgactcgtggactaagatttattaacacctgaac

SEQ ID NO: 332699 - DNA, 551 bp, Cannabis indica
tgatacattttggtggttcccggatgcaatgaataacgtgtggtataagcttcatccagtatctctttttaagctcaaagacattaggaacttaaactcaaactatatataacaacattccactgtttgaggctgaaaagtctctaagccgaccagccattacctcatctcgaatcctaactagttcaagatcttctagttgtgtccttctgattctctccaacaaatcagactggagtgtcaaattgtgcaatttcccaaccacgaactcaatccttgcactaaccatttcagaagctagttgaagggctatcataaccgtggtacaaacctgcccgggaccttttctgcttaaagcatcggccaaaatattggctttcccaggatgatatagaattcgcaatcatagcccttaaccaattccaaccaccttctctgcctcatattcaaatccttctgggtgaaaaagtatttgagactcttatgattagtataaatctctcacttctcaccataaagataatgtcgccatatctttagagcaaaaacca

SEQ ID NO: 332700 - DNA, 2715 bp, Cannabis indica
ttatttttgatttcccatatttgcttttaagggggaacagaggcgtctgaggttcttttgaaatgattaccccttttcgttacttgcctataaataccaacaaggatttgtacacaaaatcattttcaccatccttctttgctaagtgagttcagagcaaaaagagaggtttttggcttcaagtttgctgaagtgccttcatcgaaactgctcgttggtttgacgttaattgaatctagacatctaattcttgagtaaggtctcgatctcctttatgtttatttttgcatgattacttttggaatgcgtctttgatttttctatagaaaatatgtaggaaaccctaggtttagaaactttgggattcttctttatcatgggttcatgcgattttacagtccataatgctttctttctgaactacataattcctgtctttcatctttcttattctaagcttcatgaaattttttgccctaactcgagaaaatttcaaacttcctgagttttgacttttctttgaacattcttattctttaatctgttgagtactcttggtcagcatatttgcttgttttatggtttgatattctgaccaaacactcatcttgtgtgttgtcttttgtagatgaacccaactctgttttgggagagcgaacatcgaatcgaccaggacttgcttcaacccttgcacgaggaccatcctcgtctctgttctagcccaccttcttccattgaaagacattctcccacaaatcttttgtcctgtaatagaatgatggctcgtactaagaagacaacgcgtatggccgacgcgtctgacactcaagtggctcggcacgcaactttgcctagcgtcgaataggatccaaccgtctaggaggaggggatcatgaaggggacgctgaggttcaggagattgaagagcaggacgacgtacgtcctagcagtcccttcgaggcggaggaagaggaggaggttgaacgcccaaactacgggggatacaatgaggctgtggagcagtcgatgctgatggagatgtcctggttgagggcgtggactacgtcagtgaggagcttaccgctgcggttcctcacagaaggaaaggtgccttgggtgccaggtgggtgagtcctccatccagggttactgctacattcccgcccacaataatcgtgccacaaaccctgaaagggggatgtgcgcttggtcatgtgctcatgcccagcaaagggcattgtagcctttgcaccagtaatttcagaatgtggcagacttcttcggcctctgcctgacccagttcattcccaagggttaagtatctgtctgccctcttcgtcctttatgcctcccagaagtgggatatgccttctcccctcgaagttagctggttctttgatttgaagtccacccctaagcaaggcaggtcagggtacttctatttctctcaaccagacttcaagtggttgacgggtgctgaggataaggccataagaaaaattgggtgttttgttgatgagtacttcatggtggatggcacgggcatcacccgtactcggttccagcaaattccaacatatcaccgccctcccctcactcttactcttagggatagagcttaaaagcttgctcagctaccgggggaagaccggaatataatccagttgacctcttaggatgactttatgaagtacgggctttatccaaaggatttcattcctaagccagtgaaggggaggaagaggaaatctggtgctcgacgggttgaacgagctcatatggagaatgagccgattatactgaagcgcgaggctaagttgaaaggaggtgcaagggcgaagcaatatgctcacgagcccttgaatcttgaagatgaagctgaggaagagcacgtgactccgctcaaaaggaggaagaaactttcggcacagcccaggcctattgaacatgcaattcgcattagggagcccagtttgccagctcggccgccttctcctgtgctcggaaaatggaaagttgttatgtctaaaataagaggcttgtcaggtgatgatggactttcgagccttgctcaggcaatcatcttgcacactactccgtcttgttttaaagcttcttgactattatgctttatgtttctgatgtctgttttctctaagcatgttgtttttgttccgtgcaaacatgtctcaaaagatgcttgatgctctgaagaagaggattggagggagctccagtgcgtctcctctagccaagaaatctagaggcagtgaggggacactaaggaaaagacgcctgccggggacgtcattgatctttctgaggagctaacggttgcaaacccctctactccaaagtcgctaggtctaaggagtctcgaggaggaagttcagacaggaccgaacaaccgaaaggtgggactgagctgatcaagagtggacccgagcagatgcgggcccctactcaacctttgttagtgcttccagaggccaagaaaggcaaggaaatgcttgcccactatatgaaccgattagttcctaaggttagtgagcaactggccagcgctaacaacgactcttctctagctagagctgttgatgggtggagtcttgaaggaattcacaagggtaagtctttcttgacaatttcctttaatcctctttacttggctcaaattctaaagttttttctctgtgtaggccagtctgaagttgg

SEQ ID NO: 332701 - DNA, 653 bp, Cannabis indica
ttttttttgtccattgtttttatgaaaaaaaaaataagtaggacaagttttttctataattaaatcaaataaaatagtagtcataaacatctaaaagtgataaaagaaaaagaaaagagagaaagagatgaagatagaaagtgaaaatgagaaagagtgtcattattacaatatttaattgtatattatactattaattctatttatttaaattagagctctttaaaaaaattatagtagttaacttattgtctatctcatttatagttttctcttatattgttctagtttcctgtatatgtcactacaagaataagttctttcctagggccttataattcatgcaaccataattaattattaatgcaaacacatattagtaaattggacagcaaaagttaatatatcaatccagaaattaattttagagaaaattagactctatacattttttatattgttctcttttatttttacattttttgaaagtctatcattttttcctcttttttaaacactttaccgattttacccatgtcacctcaatataatctccatgtgactcccttatgtcaagattttggatacagtacatataaaaagaggtatgtttcaattaaacataaaattaaaggtaaatttagttaattgat

SEQ ID NO: 332702 - DNA, 597 bp, Cannabis indica
tactgaagctgctagaaaagcaaagtttatccgagggttggatgaacacatcgcgcgagaggtgattgttgcttctaaacaacctggggttgctcggacttatgcctagatagttgaactggcccttatttctgagggtgcagaagatcaaataggaaagaaaaatattgccagaagagattcgtggaagcaaaaattaggtgttggttctggtaggggtactgatcccggtgaccgcaagaaaaggcctaatgaaccatcagctgcaggcccaaacaaaaggttccagggtaaccaaggtttccgtcgtggtgggaacgaaaactagcggacttttcctgaatgtccgagatgtaaaaggcgccaccaggacgagtatcaggctaaggcctgtttccactgtggcgtagtgggtcacatgaaaaggaagtgcccacagctgctacccccagagcaaaagaagcatgatacacctactcctgcccgggtgtttgccctgactcaggccgaggctgatgccgacccttacactgtgataggtcagctttctgttgctggaactttatgttgggttttatgccctaaataaaactcttt

SEQ ID NO: 332703 - DNA, 556 bp, Cannabis indica
ttatattaagagaaaaagtagtttttaaacagtaataatcattctaattgaaatagttaaaattttacatttctaatagtggtacccctttgttaaatgtggcgcagacccatctcgaaatatttttctccactagtcacaaacaattcgtactactaacacgtgaatatgaagattggtttgaagttaaattttgttaaaatagctcctattgcaaaaattgaaatattcttttgtttaggataaatttctacaagttttttccttactcttactgtcgttagtgttctttcaaaatctcaccgtacacatcttaaaaaattgtgaaatttcatggggacgatgccaagaccgttgtctataacttttctattggggtttggggtttgggggtttacgatttggggttttgggttcgaggtttgagggttttgggtttaggatttggtgtttgtggatttcggtttttaggtttggggttttgggattaagttcttttacattaggtgtttggggtttgggtttggggttttgagtttggggtttggggttttta

SEQ ID NO: 332704 - DNA, 653 bp, Cannabis indica
ttgggtttgaggtttagggtttcggattttatgactatgaaagctaatggaatacgaacactcgtttgaaatcatccggcgtcaccacccttcgatgggatttcggcgggcgttcacgttggatgtttgaaagctatcttgaccgacttcattgtcagaaggatgggggacactcgtctaaaatcatccggcgtcacaaccatcaactgggtggttacgttggttgattgaggatgtttgaaagctaatggaatgctgacactcatttgaaatcatccggcgtcaccaccaagccatcttgaccgacttcattgtcagaaggatgggggacactcgtctaaaatcatccggcgtcacaaccatcaactgggtggttacgttggttctgagacaaggatacttctggccaaccatgaaaaaagactgtatagactatgtccaaagatgtgattcgttccaaagattcgtgaacataccaagagcccccctaacgagattaccctgatgactagcccctggcctttcgcggtttgggggatagatcttattgggcccctaccaacgggaaagggaggggtaaagtatgctatagtagcagtagactacttcacaaagtggacggaggtcgagccaatgaagactataactgctaa

SEQ ID NO: 332705 - DNA, 1406 bp, Cannabis indica
tcttcacgatcttcctcactgtgattgaggtatcacttgctgtgtgtgaggcatataccagaacttagaaggaacttgatatcacttggtactcttgaagatgaaggctacagttacaagtctagcaatggtcagatgagaattgcaaaaggatctcttaccatcatgaaaggtgaaaagaagaatggtttgtacattttgcaaggagaaacagtgatggcttgtgaagctagtgttatacaacaccaagaaactgagatggaaatgtggcataaaaggatgggtcacatgagtgaacaagggatcaaagaactgaccaagcaagggctcttaggcaatttcaaacaaccaataaccttctgtgaagcatgtgtgttgggggaagcatcatagactgaagtttacatcaggtcatcattgttctaaaaggccattagaatatgttcatgctgatttatggggatctcacaaggttggaactcactcaggtaacactattttctgtccattgtagatgatttcagtaggcatgtatgggtttatttacttaaaaccaaaaatgaatgtctagagaaattcagagaatggaaaattgaagtggaaaatcagtatgaaaggaaattgaaagtgcttaggacagataatggtttagagttcattaatactgaatttggcttgttgtgttctgaatttggaattgttagacataggactgttaagcacacacctcagcaaaatggtgttgctgagaggatgaatagaaccttgttgaacaaggttaggtgcttgttgattagttctggtttaggtaaaatctattggggagaggctttgatcactgcatgttatttgattaataggagtcccagtagagtgattgatttaaaaactccctatgaaaaattgcatggcactacacctaaactgaatcacttgaaaatatttggctgcactgcatatgcacaccagaaacttgacaaattggaacctagggctattaaatgtttctttcttggatatcctaagggtgttaaaggatatagactatgtcatgttgaaaatggaaaacctaagattattatatctagggatgtagtctttaatgagcatgatttcatgcacttgacagccaaggaaggcagaggttctgatgttgcagatactaacagggatgatcttgctgagttggagatcaacactgacaagattgaagtctccattgaattaccccacacacaagaagccaagacatctactgaggtggaaacacagggtgcagatgcaactgaggttggtacagatacaactgaggtggaatccctggaaaccagtcaagatgatcaaacagatttgaccaactatcaattggctagagacaggacaaggagagaaattagacctcccag

SEQ ID NO: 332706 - DNA, 539 bp, Cannabis indica
caagtcgcatttctgagtttgggatagggatcgagacgtggggtgcggttctaggtcctgaccctagttctgtgtccctagtctggttccttctttggttccatttgcgattcctagttcgagtttaagtttgagttcggatcggagtttgagttctggtcagactttggattctgtatgaatttcactctaggtccagatcaggctccaggtgtgggttcgcgttctaggtcttcgtctaggttgggccaaagtcccaattttcaatcccgatctgagtctggattcatttctgggtctgagtcctttgttctgatcctgttcttgtttgggtctgattcttggtgtgggtttgagttcgggtccgagtctgtgtccgggtttgtgtccaggtgtggaccccgatttggttctaggttcgggtccaggtccaagttggggtcctgagtgcgggtccaagtttgggtcggggccaggatatcagtccaaatctaggtccagcatttcgatcccagtctgggtcttcgttcgagtccagg

SEQ ID NO: 332707 - DNA, 1941 bp, Cannabis indica
tttcatcccaatgaatgggagatctacacttttttccatataacagttcatagggagccatccctattgtactttgataactgttattgtacgagaactctatcaacggtaggtacttactccaggagcccttgaaatccataacacaggctcgtaacatatcttctagtatctgaatcttccttttggactgtccatcaaggatggaaagttgtactgaagttcagtttggtacccatagcccgttgcaaactctgccagaatttagaggtaaactttggatctctatccgaaattatggactttggtatacgatgcgatcttactatctctttaacatacaaatctgcatactgatccactaaaaaggttttcttaactggtagaaaatgtgcagacttcgtgaatcggtctaccacaacccaaattgaatcaaataaacccgtggttctaggtaacccaaccacgaagtccattgtgatatcttcgcactttcactcaggtagggttaaaggctgtaacaaacctgccagtctctggtgttcagcattaatctgttgacaggttaggcatcacgatacgaattctaccacattcttcttcattccgttccaccagaagtagggtttaagatcttgatacatcttggtagtgccgggatgcaaggaatatggaatggtatgagcctcttcaagaatttcatttctaatttccacactactaggaacacaaaccctggtcttgaacaacagaatcccactatcttacactgtaaagtctctggcttgaccagctgaaacctcttctctgatttactaaatctggatcagttaattgagcaactttaattcactccaacagatcaagatggagcgtcaagttatgaagtatgcctacaacaaactcgatgcttgatctgaccatgtcttcagctaattgaggtgaaatctgaactatactagttacctgcctgggtcccttcccacttagggcatcgaccactacattggctttcccaggatggtaaaggatcttacaatcataatccttaaccaactctaaacaatgcctctgtctcatattcaaatctttcttagtaaagaaatatttaaggcttttatggtcaatgtaaatttcgcatctctccccgtaaagataatgccaccaaatcttcaaggcaaatactaccgcgacaagttctaggtcatgagtcaggtatcgctgttcataatctttccactgacgggaggcataggcaataacccgatcgtcctgcatcagtacacaccccagaccctgtctagatgcatcacaatacaccacgaacttccctttgtcagaaggtagggctaacactggagctgtgattaatctctgtttcagctcctaaaaacttgcttcacatttctctatccatataaaacgctgattctttttagtgagctcgattaagggtgttgaaattttggaaaacccttatacgaatcgacgatagtaaccagccagacccaagaagcttctaacttctgtaattgttttccgtctcggccaatccctgatgggttctctctttcctggacccaccttgatcctgtctttgctaacaatgtgccgaaggaaggacacctgagatagtcaaaattcgcacttcttgaatttggcatataacttatgttctcgaagttgttgcagaaccatccagagaagtttctcatgctcctcttccgattaagagtacacaaggatgttgtcgataaatacaataacacaaatatcgaggaaatccttgaataccctattcatcagatccatgaaagctgcgggagcattgattagtccaaataacataaccagaaattcataatgtccataactagtgcggaaagcagactttggaatgtcctcctctcggattctcaactgatgataacccgatcggag

SEQ ID NO: 332708 - DNA, 448 bp, Cannabis indica
actaacagtgttcctccatacttcgtcttcaagaatgttccgtcaatactaatcacaagacgacaaaacttaaatcccctctacaagcatcgagtgaccagaaacaatacttaaattccctcctaatagtacatggattcttttgttccagcatgtagaagtaaccatataactttgtataagattctgctgaagtacccctcttgtacataactaccttctctctacacctccaagctttctcataactcatcttgatgccatattcatcaaacatatctctctgtatgtcttttgccttgtagttagatccatctaatgtgtacttgttcttaataatgtgaccaataacccacagtgttgcttgacggtgatcagaatgtctagaatccaagttacatgtgtgttcgttgtgaaacacagtaacctcatgttgggttttgtgccc

SEQ ID NO: 332709 - DNA, 506 bp, Cannabis indica
aattttttttctttgcacattttttgtaattattttgtttttgttgtacatttatgaaaaaagccctattagtaatataacccataaaagattttgctattaacgtctttgtgaattgatctgccaggttatgttccaaagtgatcttcaagatcgtaacatcacctctctctactatattccttagtagatggtacttcctctcaatatgcttgcctttcttgttgcttcttggttctttggagttggccatcgcttcattgttgtcacagtagagcaccagtgatttttcttagggatgtacatcggtcgatttgggcggtttatcctatatattttctaacccaatctaaagttcgggttgctaaaatttaagtgcaacccgcccaattttaaaaaaaatctgtaaatcgaccaacggtttgggtagtttggtcgagttaacccgtccaaaccggccaaacttttttttttttaatttcaaagtcaaaatcaataaaaattaa

SEQ ID NO: 332710 - DNA, 691 bp, Cannabis indica
tcttgggggacttcaatatctgacacttagtcgccctgacattgcattcactgtcaataagttgagtcaatttatgcacaaccccactcaacatcactggaatgtttgcaagcggctgttaagatacttaaaagggacggttggacagggtattatgttcaaacaatccaaagaacttaatgttgagtgcttcagcgatgccgattgggctggctctatcgatgacagaaaatccacaaccggctattgtgtttacttgggaggcaacctcattacttggagctcaaagaaacaaaaggcagtcgcaaagtcttctacggaagccgaatacagagctttgtcacaaacagccaccgaagtagcttggcttcactctctattcaaagaacttggtatcccacacaagctacctgccataatttggtgcgataatgcaggagcaaaacagctctcctccaatcctatttttcatagcagaacaaagcacatcgaagttgatgtacactacattcgtgatcaagttaagcaagggaaaatcgaagttagacacctccctacttctgagcaaacggctgacatattcacaaaggctatatccattcaacaattcacctatctgaaaaacaaacttgccgtcgtcactcagccacgccaagtttgagggagcatgttaaaattgtgaatggaccct

SEQ ID NO: 332711 - DNA, 1075 bp, Cannabis indica
cccgataagggtctgatgattgttcgatgattggttcaaatttgaggttagggacgatgtctatatccgcccgatagggtgtctgatgttggtctgatggtgtgttctaatagttttatgatgaagttgagtatagagggtctgatatatgtcggatgggtgtccgatggccatttgtttgtgacttttaggggtcaggtccaatgttgtgtctgatgttggttcgatagtgtggtccaataattttacttttaatttgagtttagatggtctgatataggtcagatgtttggccaatatatggctttttaagaactttttatcacttttctgttaaatttttgttttaaatttttaattatgttttgttttttatgtccgtggatgacgggttcaattattattttacatttgttatgtataatggtgtttgcgagcttgagggtagagatagggtttataaccaagcgaaaaatttgatattcgagattgatacgaacgtaacctactcacattcggttgatcttttgtacgaagaacacgttgttgacaattgttatcctaaattttgtccacctgatgtggctcctccatgtggaaacaagcatcaagtatgtagaagacaactcggcactaacctacaaggattagtgtcgagcaatttcctagacctggaaactttatgttgcatgacatatataggccaacaagaatccatgtacctaccatcaaggtcctagctagacttatagctagtcggccagtagtgctagcttccatgcactgggcaaccttcagaaggttggccggccaaaggtgtaagtgttggaatatattttaccaagaactagatttactaacaagtatgtttttaacatcctgaatttgaatttctaaaacaatgaaacttaaacacatataaagtatgagaaaccttacattagttgcaatgaaattaaatgactccttccgcttagatctctaacccttgttcatttttgtcgcagagtataatcaagatttgagcccgacactccttcagttgtttgtattcttcacagtcttacacactatg

SEQ ID NO: 332712 - DNA, 1340 bp, Cannabis indica
gacttcttgcaggttatggaaacgaggggctcagcctccgtccatttagtgaagaagttgactactactaccgcatacttagctcctcctcgcccagtgggtaatgccccaaataagtcaataccccatatagtaaatgggtagggtaaggtcatcattctaagttatgttggcggtacgcgaggcatatttgaaaacctctgacacttatcacattttttgaaaaactcatgtgtgtccttattgatcgttggccagtaatatccttgtctaatgatctttttagacgggcttttccagcccgcataatccccacagaaaccttcatgaatttctctgatgatttcattcgcttttgcagggagaacacaccaaagtaggggcattgaatgtccccttatatatagtttgccttcgataattatgtagcgaggcactgaatacaataataatcttaccttgtttttgtcattcgaaagttgtccatcgagaaaataattagtaataggagtcatccacataggagaactatatatcatctcgacgtcttcaattttacatatacttggctcgctcagcatctctaccggaactatgtttaattcatccaagtcattttgtcaggccagttttactaaggtgtcggcgttggagttttgttctctcagaatttgttcgattttaaagtaattgaatctttccaagttaatgaactttctctaaatacctcgccatttttaagccttttgcctggtattccccgaggacctagttcacaatcagctgcgaatcactatgacagatgagatttttgactttcaatgcctctggtgatcaaggcttcatactcaaccagcgatcaaggcttcatactcaacctcgttattggatgcgtcaaatcagaacctcagagcatagtgaaacttaaagccttctgatgatattaatattacccctgcacccgaagcctgttcgttggatgcaccatccatgtataacttccaagtttctgcgtctcgctaaacaagtggaatttcttctgaagttataccttctatcaagaagtcagccaaacattggcccttgatggaagttcgaggatgatatgttatgtcgaactgccccagttcaatcgaccattttatcaatcttctagaagcatctagttttgataaaacttgtcttaagggctgatcggttaacacttttatggggtgcgcctggaagtatgaccgtagcttacgagacgcatggactaagcaaaatgcgagtttttctagaggggaatatatggattctgccccaagtaaccttttacttacatagtaaataggttgttg

SEQ ID NO: 332713 - DNA, 633 bp, Cannabis indica
atagaaaatgaaaaaagagaaggaagagagtaggatttgatagatgatggatggaatgatgactaagtggtatttgtgtaataaaaccaactttgtaagtaaaaatgtaaacatgggggtgtagaggtatttaggtaataaattgtgcaaaatggatttttcatgtaaaaatttcctatataaagtacatattatatttaaataataataataatttataaaccatcttatacattaactaattattatttatttattttatctcgcctcctaatatgattgtaattcggttatttgatgtcaacaagcctggatttaatacacttagatctagggctgtacagaaattttcgtaaaccgcccaacccgaataacccgactaaaccaaaccgacaaaaccgaaaaaaaatacaaaccgacataacttgacaaaattctaaaccgcccaatctgtaaattgggcgggttgaattttgacccaaaccgcccaatgaacccgcccaaaccgatttaacccgattaagagttttttttttttttattatatatattatataatatataataatatataatatatatttaaaaaaacccaatccctaaattgaatttagatttggaatattatgtatt

SEQ ID NO: 332714 - DNA, 968 bp, Cannabis indica
gatagaaattgaattttattaacaaaagaataaaattaagaaatacaattaggaacgacaaagaagcatctacttctgataacccaccgtgagcttactttggagttaagtatacttaaattggggtaatctcaagatgggaaatcttctggggagtcatctcggaaagtgtatgagtgaggacaaagtacgctagaaagattcatattaggatgcaaagttggtagtcattccagagattatcaagaggaagggatgtgttaataagtagaaatttacaagttattgagataagtatatattagtgggtggaaataagaaatgctctaattgaatatctatcataaatgaatacttaactgtttactaagttaagtcagtagattagcttaggagatcccatagaaggaatataaagacataattacaaattatgtactgtgggatcttatgattttgactgagtagtaacggttggacatgccgagttaatatgttgtttattagtgtagacaatttatacaataaatgaggatgtagaattcatacaaaagaataatctaatcttgtaaaattccaaggttgatatatttggttataatgttaagaattaaagaaggtcattcagaaccatggagattaaagcaaaaatagtataatgttttattcttgaaaggtgggtaacctgagaagatcaattgattaatattataaacatgttgtgagcatatttgataaaggttagattatcttagaataatctcttccctgacgaggtgtttatttaaaaatgataattaaatgcaccactagttaggtaccttaataagtgtcgtacgagagaaatatagatacatgttcactagagtaagtagcctattagctagccttaactcctgcattgtctggagtatataatgtgtttcatgtctccatgctgagaaaaatatgtatcagactcgacccat

SEQ ID NO: 332715 - DNA, 736 bp, Cannabis indica
ggttcatttacaaaagacaatacgcaagatgagtgttggacggagtatcaagcgaaaaaacaagcaaatatgccgaccaggagtacccaacagattaaagaacgatcatgttcgaagaaaagtctaaactcaagaagtcaaaaagtttttcttgagttagggcaaaaaagttcatgacgcttgaagaaagcagaatggaaaacaaacgcaatgcagttctaaaataagccttacggctgaaagctcatgcaaggacatggaaaagaagagtcgcagaagtttcaaaccctagggtttcctacagtgttctttctacagcaaagttacattcaaagcacaagcatgcaaaggaaaaacataaagggaatcagaaacttactcagatattcaagtgtcgggattcaagcaagcctgaaatcgtctgtaaactcttcagtaacttggaagcctgaaaactctatctttttgctctgaaatttgcttaacagcgaagggtgatgaaatgaggtaatgtgccagtactccaagtatttataggcaaaagggtaactgtatgtaaaggaacttagacacctcgacttcccgccttgaaagcaaatatgggaaatcaaaataatccagttcaaccgtcagccgtggagtgagaaatttggatttttaaaatattaattgtcagagaattaaatagctgaaaaccgtaagggtacgcccaatcagcttcacatcgagtctcgaa

SEQ ID NO: 332716 - DNA, 729 bp, Cannabis indica
cttacctcgagttttgattcagatgtattggttgacctgaatggagaaagatcaacaatcttgcaccttatgtcacaacaacataaagaacgattaatcacttgccctaactctatctaggtccttaattcatcaccgtaagttcccttatcgatcactagagtatcaataccctaaatatcgagaaaacattaaaaaatgggggttctaaataatactaaaaatggtaagctgtttagaaaatggcaagccatttttggggtttcttagcagggaaaatagtagaccgtaattccaaacaatctgccattttctataggaaacggaaaacctagagtttcaacttctaactagttataaaagctatagattctatatctataattaacactcccactcaactgcactaccatgttcctaagatgtaagtattgggctgatacaaatgttcaactctaacgaacaagtcaaagaacacatgtaatacatttaagtcaaaacctaatcattttaggattaagatctataattaacgctcccactcaactgcattaccgtgtttctaagatgtaagtattgggctgatccaaatggtcaactctaacgaacaagtcaaagaacacgtgtaatacatttaagccaaaacctaattatttcaggattaagatcttttgatctaagatcaactaagtgacattgacttaaaaaaaatactgttgggttttatgc

SEQ ID NO: 332717 - DNA, 934 bp, Cannabis indica
cccgggacttgtaaccggagagcctgctttcagtgtggttcagtgggacatctcaggaaggactgtcctcagttgaagaaagaggaaccaaagcccgaggtcaaacctgtgcctgcacctgctcgtgtctttgctataactcaggctgatgctgctgccagtccttcagtagtacaggtcagcttctaatcaacggttttgcttatactgttttatttgattcgggtgctactcgatcttatgtgtcatcaagggttcttgatcagcttgatagacccagtgatatttttgagacggggtttggaaccctgttgcccaatggtgagttaattgtatcaagaaagtgggttaggtcagtattaattagaattgaagatagagaattgagtgctgatctcgtggagttaccattggccgaattcgatattatacttggtatggactttttgtccaaatactctgctagtattgattgtaaacggaaaatggtgacttttgaaccggagaatgaggaaccttttgtttttgttggttcggtccaaggttctcgtgttccaagaatctcagcattgaaagctagggatttgttacgtagtggatgtgttggattcctagcagtggtggtggattccagtaaacctgtgttacttggacctgaagaagttaaagtggttaaggaattcctggatgtgtttccagaggaattgcctggattaccacctcagcgggagatagatttcatcattgatttaattcctggagcagaacctgtttcaaaggcaccctaccgaatggcacctgctaaattaaaagaactgaagatacaactccaagggatgttggatctaggtttcactcggcctagtgtgtcaacttggggagccccagttttatttgtgaagaagaaagatggaactcttcggatgtgtattga

SEQ ID NO: 332718 - DNA, 500 bp, Cannabis indica
cgtgtttaatacacgattgttttaacctagtaaaagcgtgaaaatcacagctatatgattttcaaatcataaaccgcatttacactatgtgatatgtaatcaaatcccacaattttagggatgattattgtaaacatatcccgatcaactttgtaattaactgtccactatgtaattataaatagtgaaaaagaagatcaaaaaagggacgaaacaactcatacaagagaggccctaataaacaatcagacatctgaataagattgactcgtggactatgcagaattttaactacaaaactgcgtaacaaaaccttgtgttcatatctttatttctatagtttttattttttctgtgtgaaattactactgtgaagctcaaatttagttaacgaaaatctgcgttaacagtttggtgctttcattgagagcctctgtgaaacagttcagaaaaaaccctcccttcttttgaagaaaaaccacctccttcatggctgaaaa

SEQ ID NO: 332719 - DNA, 1061 bp, Cannabis indica
aaatagtatttacccataattttaactatgaaaaatatatattgtataagaatggtgtttcctcaatttttttaaggaaaaaaaattatctatgttggttgaaagaaaatttaattaaaattataaatcaatcaacaaattgatgatcacaaagagatcaccttctgaaagtttaaaatactaaagataatatcctttgatggccaagcaataagagaatgattactaaataactgtcgaatagcttgtaaacagtcacagattcatgagttagctaacatcttcgtttcaaacattaaattagcaacgataggagtagtcgccaccattttcgaccaccttccaaccaattattccttttccatttttgaaaggtacatcaacaaagtagaataatattgagaaccaaataaaaaagtagagtgaaaaatttgggtaccccaaccaatatcaaaacaaatcaccaatcttcaccatacactaatgagtaatgtccaataattgcttatccaaaacaagagcactaattccacatgctccaaagaatgttgtgctcccaaaacacttgatctcatttatctctagttcaaattataaaaataggtttaatattattttgaactttgtattttataaaaattattgattagattttttattttgttaaataaaaaataaattatgtattttttaaaatggtataaatagagccttgagctcaattttcgacaattttttttatataaaaaacaacttaaaaacaattcctaacacgaacagatgctaaaaatgtaaccagttttattataacacatctacatcagattattattgagttttattttgacaaaaaaataattcatgatactattttaaaaaatatagagtccaacttgtcatttgacaaaataaacagtccaaataataacttttacacaatacaaaatttaaaatagtatttaccctgtaaaaataacttatttataatgcccactatgtaataagtttttcctatttttttttttttggtctaattagaatttttaccccccgaactttga

SEQ ID NO: 332720 - DNA, 727 bp, Cannabis indica
ggtccagcatttcgatcccagtcttggtcttagttccggtctaggtacacgtccgtgtctgggcccgagttctagtctcactttgggtctaaggctaggtctatgttcggttctatggctgggtccggggcttggtcacggtcctaatcttgttttagggtcctggttcaacgattattgttcaggttctagttttggttctcaaatctaggtctgggttcggtttttgttcttcgtctgggttttggtcctagtctgagtgcaggtcccgttacctgaatacttagtcaagatctggatcactgtcacgggtctcggtctggtctggttcaggtcccaagtcccatttctgatttgggttcgagatcgcgattggggtgcggttctttgtcctgaccctagtatcgtgtccctattctggttccatgttttggtctgagttcaggtttgggttcgggtcccgagtccaggtttgggtgggtatccgggtccggctcccaattcaggtgtaggtttgatttggagtccgagtcctagtccggttacggctctatatctaagtccgatttcagttatgattccaagtccaagtcctagttccatgttgggttttatgccctaaataaaactccatttcaatgtaatccaatttattcaacatcaataaagaaacaaaagtgttttacactcatttgagtatgttttggttcatcttatcaattgcttg

SEQ ID NO: 332721 - DNA, 1185 bp, Cannabis indica
tcataagtctgctcggtcacttagggggcaccgatacctgtacaaagcattttgtaaagataaaacagtcacaattgcacgatgattataaacagagaaggaaattcattaaagataacaaaggcacgtaatacccagattaaaagctgcgagatcagcccgttgtctgtaaaatgaaaaataattctaagcttaaagaccgcttgggcggtcatgatgtcttagaaaaggcctcatggccgaataagatatataaaaataaaaggataaaagaagaagtgtttaaacaactggagtcccaggatcttggttgaactggaggtatatcagcattttggccggaggtagaagcatctgcctcggtttcaccataagctacttgggagcaaaaaactcaaggtacatgtccttagcttctcccaagtagtcgaagtttgcctaaggattagccttccaaaagtcctagaagagctcaagatcggctgtctccaaggtatgaactttctctttcagcttcgtcacctcgtccgtaagatgatcctccttagctttcttctcctcctccacccaatgaaggacggctcgaagagatatcctctcatcctgaagactattcacttcagcagataaagtctcgatggtctcctcaagtcggtcagaagcctcaagatccttagtcagctcagctattttcttctgggaggtaaaaatcttcttgttggcttcacccaactccatctgaacagccctgagttccgccctggcgtcttcaggatccttcctggccaagtccacctccgccctctggtgttggacaaagtcgtcttcttcgaagaagcagacttagcccaggagtaggtgtaagccaacttcagaccggcgtgtccagagaaaaaacttgagtatgcgagccaagtaaagaggattaaagaaaatcgtcaagaaagacttacccttgtgaactctttcaagactcttcccaccagcagctctagagaagagtcattgtcagcaccggccagctgctcattgacctcaggaacaaaccagttcatatagtgagcaagcatctccttgcctttcttggcctccaaaagcaccgacaaaggtggagtagaggtccgcaccagctcagacccacctctcggtttgtcagacctgtccgaactccctcctcgagactcc

SEQ ID NO: 332722 - DNA, 810 bp, Cannabis indica
tttttctttcatttatcgtggtaaacaaaaggcaccaatttctgtaccggtttgagaagagcaaagagaaaggggtacccaaagattcatagtgaactttgatgggtgttatcaaatcacccctacacaattatgaaatggggaaaggttattcaaacaggaaaatgtgtcattagttaaaacttttaaactacattagtaaccaaataaatacaaagaacataaaaagagtatgtttttcttcatttgattctttttttttttcacactcattttgatttttttttaagtctcttaaaagtatatatttttcatagttacgactaataccttgtgtactttaggttgttgtttttaatttggcagcaaatatgtactttattattcttttgaaatggcagcaaatgtatactatagattgtaaagacttgttctttccaattttttttttttggtttaaatcttctataaaagtttttgctttaaacacgtttggtatgaggtttagacttgattggaatgggaatgtaaaatttaaattaattttgaatgacaagggtgttgtgtttccaagttggtcttacttttttaattaaaataatggtaatgttaattctctcaaacatatgagtttcatatttcctctaagtctactccctccaagtctactctctctaactcaaaactcacataacaaacaccccattaggtggtgtttggttagaagaaatgaaaaacatagctagagtaagaatgacattccaatactttaaaataaaactaaacaaagaaatagaataaaaattgttt

SEQ ID NO: 332723 - DNA, 522 bp, Cannabis indica
tgagtaggtatcagattaatccaagaaaggaacactgaaaaaaaatcaagtaaatcttaagataaaaaagaggacctatgtgttagttgatgatggtagtattttaatgctcttagactacaccaaatcaggtttctagacttgtgttaaggctagaaagtctactgatgagatggtgattactcttcgggtggagcagtggtttttgaaaagtgtaaaatcctatccagagtctctaactctaccactgagattgaatgttaaagttgcaggaaggatgttcgcagtgcgggtggtgcgatttttaaccattttttcaaaccaacccgcacatgcggtttttccaattttctaaaccgcacccgcaccgtgatactaaaaaaccgcaaaaactgcactgccaaaaatgatgcagtacggtgcggtttctacggtttaagcggtttgaactatcgcaatttttttttgaaatcatcataaaataattaaactatcattaatataattattccaaaacactta

SEQ ID NO: 332724 - DNA, 1478 bp, Cannabis indica
ttttaattttaaaattttttaaatgccaaatctatatatttaataattaaattaattataaaataaaattttcgtttaacttatgtattaattagaccttacaaagtctcgtaattaacaaataaaccctaaaacttttttttttcacaattaagcccttagtgaaaattaataaataagacataatctaattttagaattataattgattaataaaaaccaattaactaagtctacaagcagtattacctcaactagtgtggggaccataggtctatataatcaagctttcaataagctagttctagaatttgctaagtaaattatctaacttattaattcctcatgactccactatagatttagaattacactcttaattatatagaacctctatatgttccaagatatagatacactattaattatctattattataatccaaataattaaagatcctctatagatgatttacatcgagtaggaaaaaatttaccgttctacccctcaatgtattttatccttaaaatacttagcttccaataaatgatatttcagtaaactaatataattagatctttcatttatatctattaagccaagctcgaagaaaattaacatttcacttttatttctagatagaagctatagattttgtatctatgattagcgcttccactcaattgtactaccatgttcccaagatgtaattattggaccagtccaatttgtcaactttaacgaacaactctaagaacataaataacatagttgagatcgaacctaaccacattaggattaagatctattgatctaagatcaactaagtgatttgacttagaaagatacaactgtaagtttatgatatatctttaccaagttcaatatcggtccaatccaatgtataatccatacatctgatactagcatactttaccaataccctgaaaatggcattacacttatccaaggtgtaagtaaactttattgttgattattacatcagtgtaaattcagtgcattgaatcatgggacataagctttgaaacatataattagaattaccttccactgttatgtcattactgtaattgtgaataacaatatgttttagagttaatagaaataatatattaaatatataatcgtgaaagcaaacatgtgaacaatgcgacataaaataatttctgatcttttattaattagtatattcgattatataaaaatgagttttatttaaggcataaaatcccaataaactccctcttgcactaatattaaactaaaagtacatctcaattaatctgaacaccttgatgtgcagatcaagcgtaatatgtagtattatctttgtaatagggtctgacaagttgtattcaattaccgtccttcttataccattgcatctccttaatcataaaatcttttatattgtgaaatttctttctatatgtttactcctcttaatgtgctggat

SEQ ID NO: 332725 - DNA, 696 bp, Cannabis indica
ctcatatggtattcaaatttcctctctgtgtatgctcttactgttgcgaagaatggtttatcgagcttgcttgcattcttcttgaaggttgctttcaggttgcttaacaggtgtcatacacaatagccatgcgttatttctggaaatacttaagcgactgccttaattatgctctcatgtctgtctgagatcaagcattgtttgtaataccctggaattaaaaaaatggattagcaaaaccctaattagataattatgaataaagtgaggaactatattattatatagttcagtatatgtgaattaatatgaattttaacgtgttaagaccccgttggtgagccagggtcattttagtaattgtgacctgagaagggtaaaatgatgaaattaatttaattacgtgtttaatggaactatattattatatagtgtacctgtgttgtcttttcaggtgtgtttaatggaactatataagtttgtgtatgacattattatggtaaggtatgatacaacgacaatgctgttgaatggagtggctatgatacgccacattatggtaaagacatgatgtgattgaaataattattgtatgttattgctatgattgtgctatgagtatgatgtcagggttgtgatccctacatatatgtaatggtttcgtttagtacaaatatatggtatatgatatagctt

SEQ ID NO: 332726 - DNA, 790 bp, Cannabis indica
atcatatttataagacaaatatggattcatcatgaggcttcatatcttatgtacttggaatacagatcctctgggataaaactaaaggtattctccggttatctcagaaaacttacattgatcgaatcttgaaaagattcaatatgcatgcttcttcacctgaaaaggcaccgataatttaaggtgataaattctcaaagggccaatatccacaaaatgataaagagagagataaaatgaacatggttccttatgcatcacttgggggtagcctgatgtatgctcaagtatgcacacaccctgatattgcttttgttgttggcgtgttgggtagatacttgagtgatcctggacttagccattggaaagtgactaagaaagtcatgcggtatctttagggtaccaaggatcatatgttgacttatcgccgagctgacactcttgatatagttgggtttagtgacgccgattatgcaggatgtgtggatgataagaaatccacatcaggctacatttttatgatggcggaaggagctgttttgtgaaaaagtatcaaacagacactcacagcatcctcaacaatggaggcagagtacgtggcgtgttatgaggctacatgtcaagcaatatggttgtggaacttcatttcagcattgggtattatggactctatctcgaggtcgctgaaattgtattgtgatgattccgcagcagtagctgtgagtgtcagcagcagtagctgacactcacagcttcccgttctaaatacattgacataaagtactatttt

SEQ ID NO: 332727 - DNA, 864 bp, Cannabis indica
gacatttctgcacggaataaaaataatacagtcaaaagagggtataaaatatacaaaggcatggaaatcaagaaaaataaatgcaagatgaagtactctgcacgctggcaggagcatctgcccaaataagcacagaggggcgtcatcatctgaagagtcttcttgctgaagagtcttcttgctcttccaggacagctttcccttttccctttacaggaatagatgggcgagcaggtacatcaagtttcctaatctggatagtatgttctatggcccactactcggtcagaagggttttctttttcttgagtggcctctcttgcttagaatattcttgagcctccttctccttctcaaaatattcctgagcattctgcttggttccagcatcaccattcaacttagcctcacacttaagttgaatgagctccttctcttgctcagctacctcagctcggccagccgtggacttcttcttcttccccttcacaggctggggtatgaagtctgtcgaataaagcttgtacttcacaaagttgtcctcagaggtcaacaaagtgatgtttcgagtagcatcccgcaattggagaatcttttgagccctgtccctaagtgccagtgtaaggggcgaacgacaatatattgggatcttttgaaaccgagtataggtggtgtccatgccttccacaaagtagtactcgtcaacaaaacccccgatcttgctaccatccttgtccacagtgcccgtcagccacttgaagtctggctgggagaagtagaagtaccccgacctgctctgcttaggggtagacttcaagtcaaaaaaccaattgaccttatctggagatggcacaccccatcctt

SEQ ID NO: 332728 - DNA, 571 bp, Cannabis indica
cgtaagaatagacatcaattccaagggaacactattaatagaaaacatacgttcagctaaagaaatagagtgtcgggcaacaaagtgcgcaacacaattcacaaaacgattaacaaacaaaagcgaaacattaaacaaactatcaaggatcttcttgcaatcttccaccactgaaccgaaagaagaaacaaacacctctgcactacgaatggcttctgcacaaacgaggctatctgtctcaacaatggcctgggtgtaggtgttgtttttcagccaactcaaagcttcccttatgcccattatttcggccaattcgggagaaactttgccaggtttaacaccagcaaaggcaacaatcaaagtaccatctgcatttcggacaacacacccgaaaccatgcttggaaaagcgttcgaaaatggttgcatcgacattgagtttgatacctgcactcagctttaaccaaagctccgaaccatctctatctttgagaggagacaacgaggggatattaccctttccttgagctttcaaccattgatcaagaatcaaattagcaaatgtaaccacg

SEQ ID NO: 332729 - DNA, 899 bp, Cannabis indica
aaatgcaaaaaaaaattattttgaagtgtaaaaataaaaaagtccctaaaaaaatattttttagtggaattattttagttacaacataaattttttgtaagtaaaagtttatttggtacgtcatacgtataagggttttattgtattaaataataaataataatatgtatggataaaataatgtattgtattaattattacgacagaatttttaatacaatgtaagttgtattatttaatacataataaatagtctgtattagcttatattataatatttacaaaagatcgatctctgcgtcaacaccaatctccgccccgtcctcgaccggacagaagacctaaacttaggacgcaggacccaaacttgggcccggacccggacccgaacctagactaggggcccaaacccaaacctggacttgggacccaaacctacccgggacccgaaccctgacccggacccgaatcgatcgggacctagactcgggacccgggactcgaacccctggacccagacccagaccaggatcccagatccggatccgaactcgaacctgagactcgagacacgaaccaaggacctagacccgaacttgaacccaagatcggacccaggacccgagacccaagacctgtaacgtccccgcttcaagcctccattgggcccttacacccatggaataatggctcttatacacgagcacaccactatagatgcttcatgaattgatgattgaccctacagaccaacacaagtgtttccagcgtgctttgtcctcactcgcacgcttcttgggaaaacttctcaggaggtcacccatcctgaaattaccccaggtcaagcacgcttaactgtggagttctttggtgatgggctaccgaaaaacaagatgcac

SEQ ID NO: 332730 - DNA, 589 bp, Cannabis indica
ccattaaacatcaggctgaatctcagtgttctcgtaacacaatcaattgaatgaattttcctagaaatctgaatgtatgcaataccttctttgtacatgccattaataagtttcaagctttttaagcttttagacactttttgattctcatgttagtttgtaatatttttggtattttgatcctcatgacagttttgaaatgcatgatgtgtgactttttgatgaaaaagatttaattttggcattcgttgtaattcctaactcattgtcataaagaacatgagacacatatttgagttttgaaaactaacacacatttggattcaaaactaaccttggttagcctctaaggtcttacttgagacttggtcgaccctaggacttaatcatagtagtttgtgtaacgccccaatattttgccttattttacaaaatactaattttgatgcattaattaaaaagattcaaagctgtttggaaatacacagtgggttttacaataaatatgcaaaaaaaagtgaatgatcattcatattaaaaacaaaataagtagttgagtgtatttttttttaaaaaaaacaatttgtaa

SEQ ID NO: 332731 - DNA, 556 bp, Cannabis indica
aaaaaaaaaaacactgtttttgaagacgtaaaaataaaaaaaaatctctttttttaaattattattttttactttaaaatattaattataaatatattttcatatatatatataaatatgtgtaactggattggattgattacttttacatgttgatcaacattcaatttacataagtgttgacacgattttataattttttaactttattattttgttgtggagtcttgtgaagtttggtcacatcatatccctcttcttgggctttctcaacaattattcctttgggaaggggttgtgctgtggcttcgctttgcttgtgtcgtcgactttcccacctggtatggatcctaacgtgatggcttgcttactgtaaagtccttttttggcaagttagttgacaaaatattttttcttttatggtaagattcttttgtatacatacccgaattcttaccttgtgttttcggttttagttgctcttttctttcttaggaaagttgcacttttcagctggactttcctttgtttggaaacttcttgtaagagaagcaat

SEQ ID NO: 332732 - DNA, 799 bp, Cannabis indica
taaatattaaatatatagaaaatattattgatgatgggataaaatgattaaataaataatgtatattaaattatataatatttaaatgagatataaaaaaaaacatagtgtaatgtagaataataattttaaaaataaaactttagtgagatattttaataaataaattagaaactaatgtgagtgctttcatgatatataatgcttcaaggaagaattctttttagtgtagaaaaaattacatttttagttttggtatctccgatcataaaagaattttgattaaatttttttaatacggaaacaaataaaatcttctaaaataactctttaaagagtttaatacaaatttttttagtattaatttgatgatttttcgtcttcagtgttaatcatgaaattttaaggatgcgtgtatttggtaagccgtataaaggtcgtattgtattaaataataaataacattatatttagataaagcaatacattgtattaattattacggccaaaacttttaatacaatataaactgtattatttaatacttaataaatagtttgtatcaacttgtattataatatttataaaggattcgggatcaatccaattttctgacctagacccggaacccagactcggacccggacctaaacctggactcgggacttggacccggaaccgaacccggactcagacccagacctggaccctagactcggacccaaacttggacctaggacctgaacctaaaccttgactcagacctaaacccgggacccggacccggacccggacacgg

SEQ ID NO: 332733 - DNA, 584 bp, Cannabis indica
cagtcaaagacttcttgcattcattgtttggagacgatagtgaaaagtaagttttctggaagatgggagcatttggcttgaaaattcaaaaatggggagtctgaaagtctgaagtgatgaaaaagaagaaatgaattgggcgagcctatttatacctcggtcaggatccttgcgatttgaaatggacgacccatatttcttcatccaaaaagcacattttgatccgatggatgggaagttgaaaaaatggcatttaaaactcgttcccagtgtttattattcaccagtgcacgcctcgagtaccgtacacattaaaagaagggtcattttaatcgtcctaccatcatttccactcctcctaagaaaggcacccttgacatgcatgtgttgtcaacaattacattaaaggcgttgtatgtgtgtcacgctcgtggtaccttcactgtatggcctttttacttggtgacaactcacgaggtgcatccacgatcccaacagttaccacgtgtaaagaacttatctccaagaaactaaaaaaaattgcaagctcccggacctcatagagtcccgaaagcttgggggta

SEQ ID NO: 332734 - DNA, 639 bp, Cannabis indica
cagagagaaaggctcaatagacatactaaattaattgaatttttttactgctgaaacattttctaagcatgttagaacgactatttgaatgtaaaaataaaaattgaacaaatcagcatattttatcacttgttaaataaaattgaatatatatgactaagaatacgtgcaatgcgcacgtaactttcgcctagtatgatataagtgtatgaataagaaaatataagatatttatgtcacacatatttttataatatatggggtaaatatgcataagtactaaaagttttaagtttgtaagcggcataaacttaatatttatttttagcggtataagtacctaaagtttgtaaaactataatttttctctaattttgtcagtactgactctgttattattttaaatagggcacacataagacccgaattcgaaatcattgggtctaaatagaaacatatagtatcagttacttcgaaatattttttttaataaattcaaaacgaaatctgtacttacgaaactagaagaaaattacagttttagaaaaattgggtatctatgtcgctaaaaataaacattgagtttatgctgcttgcaaacttaaacttttgggtacttatgccgctattaaccctata

SEQ ID NO: 332735 - DNA, 974 bp, Cannabis indica
ttaaataaaataaaaatcaaatatatattacctttcaatagggtacatgcaacgataaactgatggtccagcaattctcgcctcatatgctaagtgtatcaccaaatgaaccattatatcaaaaaatgataggggaaacaatttttcaagattgcaaagagtaattgatatttgttgttcaagttgcataaaatcttgtgatcgagcaacttttgaatacatcattcgaaaatagttgcttaaagtagttaaatgttgacgaacatgcagacttgacattcccctcaatgctagtggtaataattgagtcataataatatgaaaatcatgacttttgagtccatgaatttttcgttgcatcacatcaacatattttgaaatattggcagcatatccatttggaaccttaattgtgtttagaaatcgagaaaagataatttttcttttttgcttaatgtaaaacaagcaggtggtatgacaatttacttagattcgctctccttcggatgaagtacagatctaatacccataaactttaaatcaagacgtgaattcaaactgtctctttatttttttgtctaaactcaataatgtcccaaatatgcatcacatcgagattgtgtcgtaataaattatccttccagtaaggtaattcaaaaaatatactccttttcttccaactatatgtcaactgaggattaacaactgtctttccaaatttaatttggtagccttctaacttatccagtatcattgaaccacttaatggtagggctgcacgtgggttgggttggacagtttttgggtggtttggagatttttttatttggcagtttttaaaaatcacaacccatacctacctaataaaagtttgagttggatggtttgttaggaggtagttttatgcggtttttttgagcggtttgggttgcttaaaatcaaaacttctaaagtatattgtcacaagaaaaaaa

SEQ ID NO: 332736 - DNA, 510 bp, Cannabis indica
tacaaactggtaagatgatgaaaaaatgcaactcattctagtaccaagatattggaatggggaatacttaagacaatactaccattaaaagtaccaggtcagatgaccatgttaagtataaaacaaaagaacatttactcttaagtgaatggccttctgggcggaccacgcccaaaggttcagataaaattataaagtattcaggttggatgaccacctttgaaagtacagtcttcattttttgcaatttgttttgtttatgctaagttaaagattaggttagatcaacataatagcttcaatgtaagttactacagtaacagacatatttccgaccaataaatgaataaagatgcttatttcaattctaattgagtcaagttcattagcatgtcataacattattgttaaatgtgtacaaaaggtttggtcgtacccaaagccccagacagacaaaagcataattgtgaaaacaagtgaccaagagtcaaaagtctgctcggtcacttg

SEQ ID NO: 332737 - DNA, 902 bp, Cannabis indica
ttagttcgatcatttattctcatcttttttattacattgttaacatcttgctgacttgaccgttggagtcccttcggccagcaccatcccgatgtcccaaggtttcccggttactatcttctttgttctacagattgccggtgcccgcgtacgatcatcttcaatcgattgtggattttaccatctatagtgagtaagacggcgataaccaaacccgaaggagagaaagagatccagtttcagatcttgataatgctctgctacatagaggaatcaagggctagagttcttgaacggaaggagtcattatatttccctgcaatcaatgtaagattttcttaaacccttatgtgtttatttcattgttttagagaattcatatttaggatgttaatcaacatacttgttagtaaatctagatcctgggaaaattttcccaattgtacgtggatggagcatctaatgaaaacggctcgggtgcaggagtgatacttatcttgccagaaaactttaattttcactatgccctaagattccaatttaactttcaaacaatgaggttgagtatgaagccttgatagctgattagaaaatagttgaagagttaaaagtcaagaatctggtgtgttacagtgactcatagttaattgtaaatcaagttctaggcgaatacctgacaaagggtttaaaaatggcaaaatacttggagaagcttcagaagaacttggagaagtttgattatttaaaatcgaacaaattccaagagaactctaatgtcagcgccttgccaaaactggcctagcagaatgaacttgatgaattgattttggtaccggtggaagtgttagacaaatcaagtatatgtgaaaaggaagaagttgagatgattgacagcttgccta

SEQ ID NO: 332738 - DNA, 593 bp, Cannabis indica
acataagtatgaaaaccatttcatactctgagcagtccctaagcaaaaaaagtttgcaaaaacgaaaaaaagaaagaaagcaatagaacacaaatgaaaaacagtgccaggcgacggtcttcgccaaaatcattccataaaaatcaaatactttaccgaaaaatctacactaacatgcaagtgaacagcgaaagtaaaatgtacccagaaaacttatgtaaggctcgtgaacgggaagttgatgatgatcggcggtagaatgcagattggcaacgacggagaaacaacaacaagaaatctatggtttctgaaattttctcaacggagtttcttgggacgaaatggcgaaatagtggaagtaacccaatgaaggaaaaatgctggcttttatagaacagaaggggtgaaaggtagttgtgatcagacaccatcgtacggtgagaatcgtaatcgattcgtattctacaaattcaacggctgagataaatgggtgacagggcggatgaaaatgtttgagtacttttttgacactcggattaaatgcgccagttttttaatagacgggaagcgaatcgttgcctgcaaaaagaaat

SEQ ID NO: 332739 - DNA, 647 bp, Cannabis indica
tgtcgctaaaaataaacattgagtttatgctgcttgcaaacttaaacttttgggtacttatgccgctattaaccctatattatacttatattatattattaatcaaaaataatattttatttaattacatggttataataagaatttaaaaattgacctaaattagattttgagtaagattgataaatcttagctatattcaaaattaattagtctattattttaattaaataaataattaacttaaaactgagagcttatataaaaaaaaataaatgaacaaatatagaatgtagttacatgtctatttaaagaaaataagatttgggtcgggttgagtacttagtgatatgtaaatcaaaaattcaaaagttaaagccatttattcagttgtgtttccaatgtaagaaaaattctaaatttttatatacttatgtaatcattttagaaatatattttaagtcgctaattaatataatgtaaaataagttccaatagtaatttgtactacactagaaatcatagtcgaggttacatattcataataccacataaagcgtagataattcttgatcgaaataatcctcatcctcatcatcatgctcatcctccttctggtcaacatgattcaacacttgatcatcatt

SEQ ID NO: 332740 - DNA, 513 bp, Cannabis indica
tgaagactgctgtggaggcagaatttgcgaatgtgaatattattgaggacgaagtgtgcgaggaatcggagtctctgaaatcagcgagatgtaaaagttgggctgaggaagctgaagtggaagaaagcttcttctcaacatctcataatcagtggaagaaattcaatgagggtaagaaattttgtgctgatcctaaacttactttcactgaacctattgttagagatgggaaaaagattgatcaggttgatttggaggaggtcaagtccgaagaggcaaattggaatacgacagtcatttgtatggtgctgggggaaaacataccagcagcagtctttgagggttttgtaagaagaatttgggggcatttgggaatcaatcagatttctaggatgacaatggggcttacgatggtcaagttcaatgatgaagctactcgagatgaggtgctagagaatggtgttattcagtttgataggaagccggttatagtccttgttggaaattatttta

SEQ ID NO: 332741 - DNA, 780 bp, Cannabis indica
aaaacataatcaaaaagtctgaaaaaaattaaagagaacacttgggttgcctcccaagagcgctgtctttatcgtcatatagccggacgctgagctgtctctagagaggcgccagaataatggcggacttggcttggtcaaattgacctcccaagtagagctttacgatgtccattaactttggaagttgctggaccttcaccttttaactccacaggtccatagggaaataccttgactattgtaaatggtcctgaccaccttgacttcaactttccaggaaacaacttcaacctttaattgaatagtaacacttactgcacaggttgaaactccttccttactaaaccttggtcatgccacttcttagttctatccttgtagatttttgcattctcataggcctcattacgaaactcctctagttcattcaattatagtagctttttctctcctgcagcttttaattccatgttgagagtcttcatggcccagaaagctttatgttctaactctaccggcagatgacaagcctttccaaacaccaaccgatatggagacactgtatgcccacaatgcatcatctaattttcttgaccaatctttccttgatgtgtgcactattttctctagaatcatctttatctcccgattagaaatttcagcttggccattactctggggatgatatggtaaagcagtttgatgtcggacaccatatcttgaaaggagtgcttcaaactatttattgcagaagtgactctcttcatcgcttatgat

SEQ ID NO: 332742 - DNA, 1112 bp, Cannabis indica
aagttagaaccacctacttttgatcctttcaggcagcctattgaagaggatgtgcaagcattcttcaggtggtacaatggcgatacaaacggtagaagaaccattcgttgtggccagacatcacatgatagaagtttttttgagatattgttggcaaagcaacgatatattgatagtgaggtaagctttatcattcaaatagatcataataattatatcatattatcatcataactaacaatgagaaaataattttttggcagcatgtagatgaaattacctatttatttaggaaaagaatggataagtttcataatatctttccaaaagatatatgcatattgacagatgagtttggacagcgtgtgcgtgctctgtacaaagaatctcgagaggaaaacaataatgtatgtaagaccaatgaagagctaatgatgtttgtcaaaggtaccagaccaattagaggaagaatttggtcggatgtcaattacttctatgtgccttggaatgatgatacacactggatgttagtggtagttgacagacatagttggacaatattgatttatgactcgattccagatcactggatctccatagaggcaatgaaaaaatctgtggagccacttgcagcatattttccttttttacttaaaaacagttgccatattgggagcctccatcatcagtgtagtgatctcatgagtataaaagtagctcctgcaaatactgttcctctgaacaagagaacgtaagttttatttaatatgtctgcctttaaatccaaactgttaatattaatgctaacgtagttaaatttgtctttatagcggagattgtggtatattcatgcttaagacaatggaaatgcacattgctggtaagtgcaacgagtcagctacaatgttgctcaacgacgacaacatagatacattcaggaaggcatatgcagttcaattatatgtgggtagtgcagatccttaattaaccatgtccttgttcataattctgaattttgtaattttgtggataaacttgaatttactctgaacgaccgcaaacgaccttgaatttatactatgcgaccatcatggtcttttatgttcttcaac

SEQ ID NO: 332743 - DNA, 926 bp, Cannabis indica
atcaatcagccatagcaatagcaaagaataccagttcatcatgataggaccaaaaatgttgaaattgatcgtcacttcatcagtgaaaagattgaaaacaagatcatcaccttgaagcatattccctcgagacaacaagctgctgatatcttaaccaaagctctccatcgtcctaattttagagaactaagttcaaaattaggaatgtttagtatatatctagcttgagggggagtgtaggaaatcaagctagcaattagttgtaaatttacatttaatgtattttccatttactctagtattactaggtgttcacattgtattatatataccctttgtatacactaaaagagaccatcagaaataaaaatcattttccctcatttttctcttttttctacaattgctgccagccatttgggattgtttaaagcttctttaagtgttcttggctctttgggaaagagagcttcaggtaaagggtgtttagaagctaaaaacgacttgggtttcttgattccattaagagcacgagttgtcattggatgagttctttggacacctgcagcagccaaattattcaaagcagttgggttgattggaacaggtaagtcctgtggtaaatgaggttgtgtttgagatggtaacaggggctgtgtctgaggtggtaaagaggattgtatctgagatggtatagcaacaggtgtagaggtattttctgaggaaggttggctagtagttggaggttgtgtggatataataggattaggttaagggtgtgtttgggaaacatgttgatgatcgggtgagggtgatatagtagcaggtacatgatggtgtggaggatgaaaaagtagtagcattagaacaggtcacaccagtaggaaaatagaaaatgcagtaggtaaagcattggaagaaaacaa

SEQ ID NO: 332744 - DNA, 851 bp, Cannabis indica
aatcgctgacattctaacaaaggtcctacccagaacaagttttgaagaattcaaatccaagctgggtttgtataacgtatacaagtcagcttgagggggagtgtagaaatatctttgtaaatagctttgtacaattatatttagggtgtttttgatagcttagtttaggttgtatgtttgtggaattttggcctagaaacaagggattttttgtagatatttattttttgtaattttttattcattattaaagatgatatacgagatttattagtgagacaccgtgggggatcactaataaaccctacaacctatataatgagagtaaagaggctaaagtagggatcttctgcttggaccttcttttagattgacttggcggcagccaagaacatcgtatctcttgcttcatctttttccttgggtccaccatacttagttgccaccaagacgtcaaacaccatttatatatttctcttttttctactttaatggtttattgttcttaagaactttacaactaccaactttgattaaatttatgaatattgagtttcccatgagtcctgtgtttataggtctcgattaagatttcaccttgaaattctttgctgtatttttatccacactcttgaaacataactctggtgtgttggatttaatcaataaaaataaaagtagacgtaactctattaccatcgcgacatggagggtgcactactttaaatctctggtgtccattttatttattgtggttttatttagtcgattaatttatcgtagtcctctttatttttacgatcttcttagatcagttgatgaaaaactgcgtcaacacttacaaaacatct

SEQ ID NO: 332745 - DNA, 522 bp, Cannabis indica
ttcttgaatctatacattaaagtcgaccaatggatcttctcgtgacatatagattaaggacatggttgttcaattgagttggacgtagaagtgcaacgataatttccttcgagcttggctaaatagagataaatgatagagcgctcattttagtgattacattagttcactgaaatatcatttatagtttgctacgtgttttaaggataaaatacattgaaaggtgtaacagtaattttgtccctactcaatgcaaatcatcaatagaggatcattgattattaggattataacaattgataactcatagtgtatctatatcatggaaattatagagcgttctatataattgagagtgcaattccaaattctatagtggtgcaagaaggaattaataagttagggaattacttggtaaattctagatctgcttattggaagctcggttatataggcccatggtccccatactagttgacacaaattgcttgtaagaccaagtggtggatcacaccaaataag

SEQ ID NO: 332746 - DNA, 747 bp, Cannabis indica
ttttttttttttaaaaaaatatttgtaggtttgttttgttaatgataatgggccaatattcttcttttcaattttggtaaatttatttagagttttttttttttttttttgggtatgaatgagtgggtattaatcaaaaatattataaagaaaatgaaaatatggaaatggacagtattatagagcttagctacttgagaaagcacgagttaaatgtgggttttgagtcaattactacttaaggaaataaagaaagacatcattcaacccatcaccctaaaatagaccacttccttaagcatttttatttgaaatacatactttctatagagtatgatttgacattcaatgattgctatatctttgtgttgttgcctatggccaacactaatagaaaattgtttatatagagaaaattaaattattcactagattatgttctcgttatattttttaggttaatataaattatgtactacacttgagtagagattgagggtatattggacaacccacatttataaaagtgagtattttttaataaaatataatgtgaagatatttttaattaataaatacaataaaaaagtattcttcaacttatcttatgtttatattggtgttcgtcagttagttgggccaattgggccgacaataatctataactactataaaaaagagaatgatttaggctttttaaagttaaattacaatattaaccttttctttagagaataatttaggctt

SEQ ID NO: 332747 - DNA, 606 bp, Cannabis indica
aactcagaaggttgaaattttcgagatttagagcaaaaacttcatgaagctttgaataagaaaggtgaaagatagacattgtgcagtcaaaaagcaagcatcatgaacagtgaagtcgtgcagatcaatataaaaaatatcgcagagtttctgaacctagggttttctacctatcttctacagcaaggttaagatcgtattcagaaactaaatatgcaaagtaaaaggaggaggaatcgagaacttactcactgatcgacgtttgaattcactcaaagcgaagctgtttggattgttcttgtgaaaacctcatggcagacttgagacgaaaatttctcttttttgctctgaactttcttaacagagaagttggtgaaaatgaagttgtgaacaatgctcagtcatatttataggcataacaacaaaaagggctaatcatttcaaaaacctcagatgcctcggttccccccaaaagcaaatattggaaatcaaacataatcaagtgtaaccatcaaacgtagtgagagaaaattagatttcgaaacattaattgtgtcagagcatttattagccgaaaaacaaaagacgcctagtcaacctcacatc

SEQ ID NO: 332748 - DNA, 670 bp, Cannabis indica
tttacttattaacacattcctttctcttgataatctctagaatgactattgattctgcatcctaatatggatctttacatactttgtcctcactcatatgctttccgagatgactccccagaagattttccatcttgagattaccctaacttaattatgcttaactccaaggtaagctaatgatgggttatcagaaaggagatgcttctttgtcgttcctaattgtatttcttgctttcattccttcgttaattaaatctaatttctatcactcccttcataaacctcttacaattcctcattggttttgttcatttatgcttcaggaattttcatcttattgtcaacttgaatcttatctatctccactcattttaacttgcatccatttcctgagttcttagctaataacaattgatcaaagatcattccttgatatcaaaggtccgtatttgtgttaggtagaaatcctaaatttccctttttaacacatctagaaatatacatatttcaagtatattctccgttttattgaccatcccttggtatgagctaccactccaatttgtagtgagtctcccattgatggtattgattcatcaacatttaagagtcttatattcgtttcccgttaataccactaaggttttactccatgattcgtacgcta

SEQ ID NO: 332749 - DNA, 542 bp, Cannabis indica
caacatactcagcaatgtcgttccaccagaacatggttttcaggtcttgatacatttttattgaccctggatgaactaaataaggagtcgtatgagactcattcattatctctctttggatatcctcatccatgggtacacaaactcgattcttgaatctcaacattcccgttacatccactgagaaatcactagccttcccagccaaaaccctagctcgggtttttacctattctgaatcttgcatttgtgcttctttaattcgctctaaaagagtggattgcagagtaatattagccaatttcctgacaaccaactcaatcttagcacgagtcatctcatttggtagcttttgggagatttgcttcatagtgctcaactgactctgaccttttctactcaaagcatcagcaaccacgttggccttactgttggattttgtgccctaaataaaactcatttcaatataatcagatttacttaataataaagatcagaaataacaattttatgttgcatggttcacatgatttgtttcatga

SEQ ID NO: 332750 - DNA, 830 bp, Cannabis indica
cctatttcaaattgcagaaaaaataggtttttttaatattttttagctatataaaggcccttttcaacactttaagggagacgattttggaagtacgaaaattagaagcgtgaagcggctttgaagactttcaacatatatatttcaaagaattctttcttttcttttattttttatgttcttacttaattgttatgagatattttcaatgattatgagtagctagactttttattaaggtattaatagagattgtttgacactttattttggtttaatgtgattcaattcttccctaattttctatgtgcatctatttaattcatacttaattttttttaattgcctggccatcaattaatcgtttaataatttcaatgcaacatctgagcagtgagtattgattatgctatagtgaaatacacataaatttcaatataggacaagagtacttatatagtctgtgtaacatttaagatttttatgcttaatgccttctaattattaaatttatcatgagagtagaaagtttacatataggttgagatttatatgtcctagcccgaatataagtttctttagtaaatttacaataacaagaaaattacaaattaagagttaaattatgttgaatcatataaagaagatgtgatcgaaattaatcaccctaagcgttaatcattgctaatttcactttaattaatgaaattattacataaagcactattttttgtaaaaaaaaatatatatatttttatgtttaatttttttttatatatttttacggtttttttatagaaataatatgaaaataacaagaaaactacata

SEQ ID NO: 332751 - DNA, 523 bp, Cannabis indica
cgcggcccgcccttgtgatttttgggcagttttgtgtcgaattttgaaaatgcataacttttgattctaaactctgatttgggagttctttatatcgttggaaagctcattccgagctctatattattatctgaattttaaatgccatcattaaattttatgaataaaaatatggggttaaccctaagtatgaaaaatcccaaatttgtgtgactaggattaccggcacctaatcagaagcacccggggatttggaatctctgtcgttgcgggacatcaggtaagacagtagttagcacatagagtatgcgcggtggtgcttatattgaaagtgatatatgtgagtaatagtaaccgggaatagggttattaccctaacatgagcagtttaatagcctagggttattaccctagtgatatatgttatgtatatactatgccatgtcggagatacgtgtatattgagattatgaattatgcgcttaaggaataattaaactagactcggtaagctagtaccttg

SEQ ID NO: 332752 - DNA, 2129 bp, Cannabis indica
tttatatagtccttgaagtactcctaaagagggaggatggcccctgcactaatatgctcaaggctccaggcacccatgctagttgaaccactagtactagtctcaccactggttcctgggttactgctcgcaaagcgtgcaaggggtaacagatgaattcaccctctcgtactgacctaacttggcatgattgcccaagttcaattccataagtttttagcatctcgcatgtatagcctgatatagatcgcaccttcaattctatcaactcagcctcgaaggtgacgctgggatcctagggagtcttagacgtacgtggcttgggaggcataattttgaaatccaagtcacctggttcaaaagcaattgtgacattgggtaaaaacaaaggctttgccacgggaataaaggatacgctgggtggttctggccaagctgcctctcgcaagaaacgacatctgccttcagatatttctttcaagaagcgcttgtagtgactagaaatatcttcctattgggttctcactatgtgttccctaaccctagcatcatttagttctaattttgagtgggttttgaggggttgggtttatatgggatatgtaggaaactcaaactctaaaatttctggaggataaattcctgaaccagagtggtacattgctgccatcaaaaagcagtcccaatccctggaagagaattttatcaaaccagatggtaatgagttagagatcttaaaacaacctacatatttcttgaatcctagtatgagcagttttaaccctataaaaagaacttttgaagttagattggggcaatgcctggtaattctgtctgcaaaccttcgaacgaaatgaggatcgctttgagaagatgaaatcggaggaaactcacaggaaaaaggtcaaggacaaggatggcatgcaagtctttggacgaatttaatggtgatccttgacgaagaagtttcagggtttttctcaaaacttttctgaaatggtgtaaaggtggttccttttttcttattttatacccatgatagtgctttcgttagatcagagaaagatttgatcctatggacatgattcaaagcggaagtggaaaagatggtcatttaattctgatgtacctcgaaaccgcacaaccgccaaaatcagaggatatgggtctttacaaaaaagaggaacatgacagaaataccctttgtaatcattaaaaagaactttttaaggggcaattgttatactcgaaattcggtaagcacattagaagaagacatgtgtcgagttgggaagaatgaagtactcaaacacgcaaacaaaaagtacacttagcatggaacgactcattagaaatataatttgcaggctatgtttataactcggtcggctgaatagccttctacgagacggatacgtatgaactgctaatttatgtgttaatgagaaaccatgtgggtgcacatgtgcatgacgaggccttaacctcgctgcgtggaagagaaacgataatactaaaagcacttatcgtatactatacgatatacaaactgagtgtagatagtgtggcaagtcaagataaaagacagcaaggcgtttatctcgctagaagaaggtatgcatgcgaggaagatcatcgcgacaccagaaaatatttttatcaaagttaaaacaatattggtctcgagaagccaaatgacaagcaactgctcgctatcaaagttaacttggctccattctcagcgaggcatccctatgagataaggcttaccatatatctttaattacgtattcatcttaagcccaacaaaagcgggatcttcacagctgtgtaaaaacttcatttattcagcttgatttgtaatcaaatcccctgatttgagggaataatcattgtaacgattattgccaacttttgtaaattactgtccactatgtaattataatggtggctgacaagatcaagagaaaggggggggggggacaaaaaaactcatatgaaagaggccctaaaaagaaatactcagaaatctgaataagattgactcgtggactatgtagaattttaactacaaaaccacgtaaaaaaaccctgtgttcatttttgatttttctatagcttttattttt

SEQ ID NO: 332753 - DNA, 789 bp, Cannabis indica
tgatgcatcatcatcggttttatgacatgcaatgaagtgtgccatcttggaaaatctatctaccaccacaaaaatagaatctctacccctcttagtcctaggcaaacctaaaacaaaatccatagaaatatcagtccaaggttcactaggtattggcaaaggggtgtacaaaccgtggggtttcaacttagacttagcccatttacacgtgatacacttctcacagattctttccacatcacgtttcatatggggccagaagaaatgatcatgcaaaattcctaaagtcttagctacaccaaaatgaccatcaaaccaccaccatgagcttctctcacaaacaattcacgcaaagaacacataggcacacacaatttattttcccgaaacaaaaatccgtcatgcctataaaacttaccaaatgccactttttcacatgaattgaacacatcaccaaaatcagaatcttgtgcatacaaatccttaatgtattcaaaaccgagcaattttgtatctaaaatggaaagtaaagcataccttcgggacaatgcatcagccaccacattttccttaccttgcttgtacctgatcacatatggaaatgtttcaatgaattccacccacttggcatggcatttgttcaacctttgatgtcccttcaaatgcttcaaagattcatgatctgtgtgaatcacgaattcctttggccatagatagtgctgccaattatccaaagcccttaccaaggcatacatctctttatcataagtggggtaatttagggctgcc

SEQ ID NO: 332754 - DNA, 778 bp, Cannabis indica
aatccaaacttgaatgcagcgtgcaggtgttgcccccaggtctgacaagggcgattcctgcatcggatagttgatctgtagctgacccgtccacatgtagtttccaagtcggcttgtcttcactgttacttggctgaggtatttgcttttagaccggttattgctgaggttgtttttcttttagctgctgttagtggtggttcatgtcatgttattttgcagaatgtgaatcggatggcacatgtactaacaaagtctattactaattcaataggagttaatgtttggacggatgattgttctcattttattagtgctcctgtaacaatttatatggtttgataataagaacacgttttctttcaaaaaaggaaaaataaaaacaaaaacaaaaaaagagagtatcaaaacaactttctaaaatgtataataataataataataaatcataataagatatgattgaatgagcattggcgtaaaaaaaaccaattttgacacagtaataatttttagtttttgctatcatatgctttgtatagtaattttacactaagagcatccccatcaactactttaaatgaacatattctttaaattttttaaaaatcatgtctaatatgtcttccatcagctcatttgaattctttcttattttaaagaaccatcaaagctttttcattcgttttttatttcatttctccctttttttccttatttaattagttttctttttacaatttctttactttctttctttttttttttcttaaaaaaa

SEQ ID NO: 332755 - DNA, 687 bp, Cannabis indica
ggatatcaattttgaaataaaatactttttagggctcgacaattgtggaaatttagcgatgtggttagtaatgtcacggcgttaatggaagaattattttgagaatatttcggactagggtagaaatttaagaatgttcgtttaatggaattagcaaaattacaaaaattccctaggttattttaaagtttatttttttcattgggggtgaattagtcttttttcttttaggttttagtgtccgttttatttttgggctaataagaaaaaaatgaaatgaaatgaaaatgaaatgcaagaaaaccttatttaaagggaataacttccaaggcaagaaactaagtttcttcttctcctcttcgtgtgaaccaagaccagccaggaagaggattaaaatttcaccattttgcttgaattgaagcagcttgtagaacctaagtcaaccctagaagcaatcaaggtaagttctcaacaatttttggattgaaaatcctagttttgagttaggtttttacttctttgttgctgtaggacttaaactaggtttggaatgtgtttatggtaggtttttgagcatcttgggaatggttttaagtggtctccagggctgcttgaattggttttggtttgttgaaaccaaagttgagtttttcttcactttgaagtgtgattttgagcaaattgata

SEQ ID NO: 332756 - DNA, 693 bp, Cannabis indica
ctctctttttcttccctttctctttttctctcttcaaagcttcaaagaagccataaccaccaccaccaccacttttcggcgacccattctccagtcaccgtccgatccccacatgctagaccattcgaacccccaggtgccgacgacctcaacccccaagcggcgctgcgcctttgtcgccgttagcccggaatttagagattcaaactttgaatgaattttttggccacctctggtgtttgtttgacgagtcgtattcaccataagactcagctcatcaagaagaacaacctatactaagccattttgcccaacctgctacttttctagtgatatttttgaagctctgccccttcccgatgactttttggcaatatcatgtactattttgataaatggttagcatgagtgtgatctactcattgagatggtcattttgatatatactacccctattttcggtgatgtttcctgtataccaatttttactaccaccgatagttaatgtgaaatgctcaggtgaggtttcgaaactctaaactttaaacataatcatattatatgtcattggactcgcttttgaatgtagaatgcagagatgataattatttagccatttgatagtataagtgagagtaatacttaagattggactaaacaattagagctcgggacttgagagcttaagatcgt

SEQ ID NO: 332757 - DNA, 543 bp, Cannabis indica
ttttgtaattttctttgggtcagtgaatgcatttggtaattgatttgcaatattttgcaaatgaattattctttgaacttcaagttcacattgatttgtacgaggatcaaattgagataatgattgtgcattccatataatttctttttccagctgtttcttttcccctccccctaaagctgggaaacttgtctcatcaaaatgacaatcagcaaaacgtgctgtaaatacatctccagttgtgggttcgagatatttaatgatagatggagattcatacccaacatatattcccagcctcctttgaggacccatctttgttcgttgtggtggagcaatcggaacatatactgtacaaccaaagattcttagatgggaaatatttggctcctgaccaaaagccaattgtagtggggagaatttgtgaaatgatgttggcctaatgcgtacaagtgccgcagcatgtaaaatagcatgtccccaagctaaaattaggagatttgttctcataagtaatggtcttgcgattaactggaggcgctt

SEQ ID NO: 332758 - DNA, 806 bp, Cannabis indica
atgaaagcaatctttattagacacatccgctaatacaacggattgaagagcaaggggaacatcgctcttagtaaaagacgatgtgaccaataacaagcaccacgtgtcatacagtgtgcggctttgttagcagaccgtttaacatgaccaatagaaacattacttaaagaagataaaataaattgacaatcatgaataaataaaccaaaaatagaaggcatagagaccgaactaagaatagcttgaaatgcaatccgtctttaaaatgacatttgacttgttattcctctttatccaactaagtgcctccttgacgcttagaatttctgcaatttcgggtcggcaactaacaaaagaaatagttaaaaatgcctcaattattcgaccatcacagccgcgtgctacaaaatcagtaccgatctcatttgtgtcttaaaaaactgccccatccacattaatttttatctgttcagcagccggtttggacacgtattctctcgtgtcagtacgattagacggcagggaacccgagtccaaccgcttagcctgagcacacaaccattgtcgaagagtggtacgagccagccaaacaacatcagcagcactacagcttttaccattccaaagcatatcattccgagccttccaaattgcccaaccaaccatgacaacttcttcaaccaatcccatatttcctactgtcaacatttccataaaccagtcaaagaaattggttgatgcagagtggccaacacctaacgcagagcggagccaacaagaatgagcaaatgagcattgaaccaaaa

SEQ ID NO: 332759 - DNA, 941 bp, Cannabis indica
agttatttaaagtattcccgtcagtttctataaccgtcgtttatacgaccgtcgcaaaacggatagaataggggacgattcaaaatcgtcgctaatgtggatttcctgacggtttaaaactgttgcctataactaggtataggcgatggtttattataaccgtgccctatactatcgtcgcctatagtatagggcacagttttaaactgtcacctatacccaattataggtgacggttttaaaccgtgccttataggctagttacgttttttaattttttttagtgacgatttttttttcagtcgttatattagaaaaatagggaaaaaaaacaaattttgtataattttttctccattaatttttaaattttttacaaatctgtatagtcacaataattaaactaaagctattatcgtctaaatatattaaaattatgtatagtcacaataattaaactaacgctaatatcatctaaatatattttaaaatttataattaagttaacgctaattataataatctaaatatatttacaaatctatatagtaacgataaatcgagatatatacacactgattaacatgacaattattgtcgctctgcttctactttcacgtaatgaatccaccgatcacgcataatatttatctgatcatcattagtgtacggagtggagaacctatcatgtcgggtcaacagttgtattagatcttctacggtcatgaaaatttcaatgaatttcatgacgtagtatccacactgtttgtcgttgagttgttcaggacaaataagagtaatcctcttgataggtcgataggtcatcctatcatttggttatacatggtgaacgatttacacaaaaagtaaagttaatcagcatatataaatttataaataaagaacaggcttacatattgggatgtttgatatagaactta

SEQ ID NO: 332760 - DNA, 616 bp, Cannabis indica
ttagaagtacttaattatatataaaaaaattgatttatttccaaatgcttatatttcttatagaatattgttaataattccagtttcagttgcatctgcagaaagaagtttttcaaaattaaaattaataaaaacttatttaagatcttcgatgtcccaagaaagattaaatggattagcaatgttgtctattgaaaaaaaaaattattagataaacttgactataacgatttaataaataatttcgcatctcaaaaagctagaaaaataaattttttataagtttattatttttttgatttgtaaaatttgttattttactatttaatttgagattttttttagtaaataattattgtaaaaaaaggcctttattttgaagctcgcccaaggcctctaaacggctagagacggccctgcatagaacaatgtattattcataattttagatgtgtagtgtttgtatgctttaattcgaatttgtaacacagtagaatttttgtgttttgaacttatccatgacttgtatagtatgaccatagaatcagtatatcaatataaaggaaagtaccaaatagtttaggtggcatcatttacattttttattctatttttt

SEQ ID NO: 332761 - DNA, 591 bp, Cannabis indica
ttagggttaaaaagtagaaacgcaccctgacactcatttaatgtaccctgagacccacataatgtaccacggaatacattccgtaaaagtacatcacgggacaaaatgatatccctatatatatctaattttttgtttttaaagaaaagaaatgtacgtttaatcacattagtaaaaatatggtgtatatcatctatttttaatgagacaaatataaaacagtagataaaagtaggaagaaaaagaaagaaaaaattcgcgaactgttgcgatattttccacacgcaagtgtacgtatcgtttcaagtagtaaactcatcaggagtgaggtcgatcccacagggagtgcagttaagtacgttaaaattaaacatttacttctattttgttgaatgaaaattaagaaagaattaaaaataagaaactagtaagaagcaattattcaagaaaattgatagtgaataaaaactagggctttgatttcaattgtttctattgattatgcccaatatgattattttcctaatgttaatttctatgctatagcaggtttactaaggtaatttatagtcttctcagatatataaatct

SEQ ID NO: 332762 - DNA, 1792 bp, Cannabis indica
cataaaacttgcgaaagctcgtcaggacatacccccttacgttcttcgagtttccctttgatggtgtgctttattatcttgttgactgcttcagttttcccgttactttgcgaatgggcgactgctgagaacgcttctttaatccccaagtcatcgcataactatcgcatctccttacagtcaaattattttccattatcttaaatgagcttataagggacgccgaatcgacagattatggagttgcagacaaactcgcgcaacttagtcgctatgatggtggctagtgctttggcctcagcccattttgtaaagtagtcgactgcgactaaaacatacttaactccgccttttcctttaggtagctcacctatcaagtcgatgccccacactgcaaagggccaagggcttgtgatggaaggcaagtggctcggaggttgatgggtatatgtggctatccgctgacatttgtcgcatttctttgcgaaagtgaaagcgtcttgtcgcaaggtaggacagtaatacccctgttgcatgatttttagggcaagggaattaccaccagtatgattcccacaaataccaccgtgcacctcgcggagtatgtagtcgcggtcttccccgtcgatacatttgagtagcggctgactgaagtttctgcgatataatcttccatcatagatgacataccgggcagtccgctgccgcaacttcctcgcttccattttgtcatcgggcaagatacccttctccagatatgtaattattggagtcatccagatgacttcttgggcgatatctatttccattatttcttcttggtttatcgttgggtaagtcaatatgtcaacaggaattacatcgagtaattccgcttctctagttgaggccagatgggccaatgcgtctgcgtgtgagttatgagcacgcggtactcgggacacgactactttcttgaatttctgcaacagctcgcatactatagcgagatacttaaccaagcgcccgcctctggccaagtattcgccattcacctggcatacgacgatttgggaatcgctaaaagcctgtaagtattcgattctcatctcgagagctagcttcaatcctgcgattaaagcctcatactcggcttcattgttagatgcataaaattcaaaatgtaaagcaacatgtaccttaaaattgttgggactaattagtatgattccaccgccagaaccttcattattaaaagccccatcgacgtacaacgtccatccttctccatttggtatagcggtgttgatcttgtcgtttatgagtgccacttcagtacttgggaacttgagaataaaatcagccaaggcttgccccttgatcgcagttctcgatttgtatctgatgtcgaactagcttaactctaccgaccatttcaacaacctccccgatgtctctggttttgctaagacttgcctcaaagggtagtttgttaaaacttcaatactgtggtcctggagttgcatcaacaagttggtcaatgctaggaagtggaaagctgtctttgggacaagctttatttaagtctgtaaagtcaacgcatgtgcgccatgagccgttaggcttgggcacaagtacaggatttgctaaccaatcggggtataacgattcctgtatgaaactacatgctaggaggcggtcgacttcttcttttagcacttggtaccttgcggggtccattttgcggcgcttctgtcggacacctcgcacttcggggtcaatgtttaagcgatgacacatgacctgtggagat

SEQ ID NO: 332763 - DNA, 611 bp, Cannabis indica
acaaacagggcattttcaccaatgagagaaatattaatgttctctctccattagatagagttagctccaaagagcttattttaagtcaacagtgacaccatagggttgttcatagtcatattggggactaccaattaaaaaatagaagtcaagtaagtttaatacaaactcatacacattcaaaaattattagcacttagcaagtacgaatgacaagtgaaaatactaaaacatacaagcctaaataatttccaaggtttttaacaaactgataccagtgtcccgtttaggcaagagtcaaagatactgttaccctaatttctgcactctaacgtggcatcactagatggtgacacatggaatcgactccaggtatctgctcgcaagacacatccaaaataggacactttgtgtattcgctcggacgaagttctctagaccgagcggtgggaaatttgcacagaatgccaacacttagcgaattcagctttcgcatcgtgagtcatcaaggaaatccctataactttaggatcagattatggagatatggcaaactgtccaaatcccatgatcagtgtattctgtatttactatgcaatctttctgcttat

SEQ ID NO: 332764 - DNA, 549 bp, Cannabis indica
cacctgtgtgagtttactacttgattacttgcacttgcgtactgttcatattttttgtaacaggtttttggcactgttgtcggggaattgttcaaagattgatattacaaaaatgagattaaattctactttggttaattctttctgcttattgctaatctgtttgttttagattgtcttattttatttcaagcattaggggtgcatacgacgttaaggacaaagtgtaaaactgccggttgatcctgaaattgaaaagacctatagaagaaatagaagaaacaaaaggcaagaaagaatcccagcaagcactgaaatagaagaagtaatggctgataatgctaatgggggtaataatggcgttaacaatggtaataatggaggtgccattgaagatcaggcaaacggtcgtagtttgagagactacattcttccaacattcacgggggttcagtcttgtataagaccacctactgtggaggctaataacttcgagataaagccagccatactccaaatggtgcaatcgtcagtccagtttggtggact

SEQ ID NO: 332765 - DNA, 671 bp, Cannabis indica
taagagcttgcagctcattaacctacacattgagaataagagcttgtaactaattgactcacataacaaattcccataactaaaacatcctgtctaacataacaacattacgagtccagttacatttcataaaagatgtaactattgactttacaaagaaagttatttgacatgaaatttcattaatttttatcatataaacaccaattacatcttaaaatattgtaagttgatgctttggtatgaccttcatactactcaaaatactacttaaaatacttctcaaaatacaactcaaaatacttcaccactagtctttgatgttgtttgcatagtccataatccctcagtgagttggtgcaatttgttgggatatcctttactacaatgaatgacaaaatgtgattatgaatgcacaaacagtcgaaaagtataaaataaattattatttgagaggactttgatattgtaccattgttgctgagttgcttggttgtgaagaaggtgtggcagttgctgattagtgattgatgaggtgtaggatctgtatttctagcgtagtgtccagggtcttcaagtggtgtgtcattaacctatgagtatcaataaacatcaaaagcaaatcaatataaacacacacacacacacacacaccattcatatatgccaac

SEQ ID NO: 332766 - DNA, 551 bp, Cannabis indica
tcatttattaatatactaattatgagtttaaactttttatttttgcaattaataaattgataaaaaccttaaagttcttacttttactttttcttatgtaatttctccacttgaaattaatttatttttgtttcttcagtatctaaatatatacaaaatatatgagataaaaaaaaatagtaaaaacaaattaactaaaatagctaaataatcattttcaaaagaaaaaaaaaaaaaaatcaacaagtcacttacagtggaattatagtattgatgatcaatagcaaaacttgtagaagaaaaatactaaagagagggaaaaagacgaagcgatgaaataggtaaatatatccaaaagcgcgtgtggttatattgaatagaaagagtaaaattgattgtggggccatataatttaataaacagaaataaaaaataaaaataaaattaaattttttagttccacaacataagtggactgccacctaatgtgtgtgtcggtgccgtataaaattctcaagaaaatacatcatatcaatattaatcttattatt

SEQ ID NO: 332767 - DNA, 3847 bp, Cannabis indica
ttgaagaagaaaattgcttggtttagctgggttctagggctgtcgaagggaagaagaagaagaaaggagaaggtgatattccttagttaagtttatcttcaattttctaactaaatatcaaaattaataataataaatctaacatcaaaaccctatttcagtctagataattcaatataagacaactaatatacaacctaatgaaatgactattttacccatcttttaaaaaactaaagcctaaaattaaacctagggtattttggtcaattctaatttttcccgaatgaattaacaactcaactttctaaactagtccaatataattccaatatatctcaacttgtattgctgtgacatttatgaccaatctgtcaagtttccatggctgctgaacttgaaaatattttatttcaaaaatagcatttacaatacccacataattcgataaaatttccacaattaataaattatgcttaattattcttttatcacatatttaataaaatatgtctaaattaatataatcataatttctgggatattgcatgttatttgagaagaaagagaggatttagggtttgtttattaattaagagactttgtaaggtctaattaataattaagttaaatgacaattttatttgataattaattataattattaaatagatagatttaatatttatagttttataattaaatatgatatttgtgaaagaaaagataagttcttaaataaaatagtaaaattaaaaccctatagggcccacaataggtttagccataaggttcaatttaagctattattctatctttttaaattccatataattctaaacctaatcatagaagcaatccaataaatagaataagatgctctaatttttaaaacaattttatcacactactttgtcagacaacttagaaaataaagagagagcctctattctattttcaaatccttccccttcttcttcctttgatatttttgaaaccctatagtgaattgagaaattgtccacataattcaagtcaatactcatgccattggaagattgtgtagaattccaataactgaagaagatctaggtttcagatcttaattatactcttcaatagaaaggattaattgttagagatttgaatggaaggagatactatattgtgctgccatcagtgtaaaattgtttataactttatatgtttttagttcattattttagaaattcatatttaggatgttagattatagtcttttaatcaacatacatgttagtaaatctatatcatggtaaaataagttccaataactggtattagagccatgatatgatttattttcatgaaatatagatttaaaacaatgtttggttaatttggatgtgttcatgttggtttatgagattattgaatgatttaatgtgaattacaaaattttctatccaaaataattttatttttgttctagaaatattatatttggaaatttggtgaaaaattaagcaagttaccttttacagtacttaatttcaattaaaattgaaaaagttatgacattttgaaaattagaaaaattggctagggttttccccatacctgttcgcgcaaatggtgtgaatcactcggtcaagacacgagtttcaaacaagcttttttgagatttcttagacgtgggcttgtctgaacaagcttctgcgtgcaaatgaggctgcattgcaacctgtccctcagccagccccccttgtgtctctgcgcagacagtatgcattgcatactgtccgtgttgctccaatttttcaattttttcaaattttgtcttttttttcgtagattttaattttgattatttggttgatttttgtgtagtttttaattttcaaattttaaatctaattattagtaaaattaatttttattaatttaaattgatttttgatattagtaggctttaaatttgaaaatttgatttttctacaaatttgctattatggttattttgaaatttaattattttttatgttatttattaattttaattattgtagagggtgaaatctacaattacaaaatttgggcaccaacaacctatcaagaacaaagagagagacaaaagttcaattgggagcaccagtgggtcgtcagccagagggacttcgacgcccaaattagtacgattgtagtaaaaaataacaataacgaaaaataaatgaaatgtaaatggtacccagatggatgaatagacaagcggacagacggactaaaggaacaactatggtggtgaggcttaagagaaaagtttagaaaggacgtttgtctgcttgaccaagtgagtagtgtgagtattgaatgttcgatgccatgcgtctatcgtatggtttcttttatcgtgtgtccttagtaccgttgccctccatccatgtcacccattagactcgttcaagttggttgcttccctctttttacgggaacggtaatcgtctttttgactggttcaatatctacttggttccacgcgtttggctgattggccgaactttgacccgattgcggggtgatctagcttatggcccataggctcactcgtttgtctatttcaagacctagtgagtccgtctgactgccttattaggcccaacattattggattcattattgatgggcttgtctgacttgcatattggacttctcaaaaatatcgcaaatattaagcaaatttttacctctacagtttttccctcactctctagctagaatttatattagctggagagttattaataccaaattaggtgctagccaagaggtctgtctaagtaagcagtgtatgcgtgtattgttgtttgagacaagaaaatagcctgaatggttcgagcatggtggttgagtagtccttggcgaatgcgtgtatgtggctatcttggctgagtaatatttttgtgatcaattagttcttcaaagggactcttatctagactgagtcgtcttgttggtctaatcagttagacatacacctggatataaattacttataaaagccatacattgggccttatttggctgtctatctcaaaatacgatatgagaggagtggatagacgtacatatatatgaggtgtaagaaaatagatattttttgcataaagtgatagatatatatacatatgttgtaaggagatagacatatgtatatgttgtaagaaggtagacgtatatatatggtgtaggaagatagacatatatatatacatatatatatattgtagggagatagacatatatatggtgtagggagatagacatgtatatacatgtatattgtaaggagataaacatatatatatatggtgtagggagatagacatttaaataaaaatgagaggaggtagacatacacacgttaaatgatgtgaggagatggacattaggtaaggagatagacagacataatatgtttgagatagacatgtatgtaaataatgagaggggatagacaaacataatatagcggagatagacatgtatataaataatgggaggagatagatagacataatatatttatgaatgtaataagtaggtagacatacacacacaaatggcatgaatagatcataccatatatatgttataaataaggcttgtgtccgtctgtctagctcaagttcttgttttttgtacctggcatcatctagcttgtaggttgctctaaaattgaaatgatgtgtgcttcttgttctttttgtctaatggacgtttgaagaaaccatatatatataaatggtcactttgtctttatttattaagatgagtaggtgaacacacttattgtgtgataggtggcgtg

SEQ ID NO: 332768 - DNA, 698 bp, Cannabis indica
tattttaatttttcaaaataatatatataagattcctgtactcaaccaaacagtgtaatttaattaacagtaatatgattatatattacccgacacagccaaacacagtttacacatttctctataatcatattctccttcataatattccctataatcaaattattttgaacacctagtaccaaacgcccccttagtgtttggaagccccgtagctgcatagaacctctaattagtaacttccctttaaaattatcgaaccacttgatgacttgtgtggagtggttgaggttgacccaataggaaaaagaaaagtgctaagcggaagtggacaaagtttaacacgtacttatatttataatacctttatatacgcttacaggattcgtcctttcttctttgaatccccccataactctactctcaattttcttcaagattccttcaccatctcctctctctctctctctcttgctttcggctggggtaaatcaaaggcaaaaccagatttttgctttcatttctttggattttcagcaaggtttcaagggggaaactcaacctaaggtaagccctaatggttccttctcttttttttcaagttttgaagtagttaaaatagtgaaatggtgttataggagctgttagagtttgatgttggtttggttcgaattctagggttaggttgagttgaattt

SEQ ID NO: 332769 - DNA, 629 bp, Cannabis indica
aggtggagttcgaaatcgaattctcatctaacaaattaataggctatgtttgataggaagaagataaaatagttgctgctacatgccctatattaacccgaatcattgatttagagtctcaagaggatggggatgtaaaaacgtatgtgtgaggactgaggagtgtaattattgtaaaaaagtattgagtgtgaggggagtaattattttctaggtttggtattactgctgtaggaaatttagcactgatataaaggaattaacctctgtaattacaacttcaagatcacaattaaacaaataaagataaaatcaaaacaaacaaatcaagaacaaaactagcaaacacatatcaaaccaaaaacataaacacaaagatgaatctagatagcttctagacacaacaatgcatgagaattatactggttcagaatctaaattcaatgtgaacttgtcctgctctagtttgaaagcactgccaccaatctttatctgatgagaataagatatatcaatctcaggagctacataggaataataacagtgaatcttccatggtgtaatcccttaacacccattaactcactaactggagccaacataatcatcaatgttgctaaattcaattt

SEQ ID NO: 332770 - DNA, 617 bp, Cannabis indica
aggtgggttgaggggggtgtgcctgctggtgtggttatggagtcggactcactgctattggtgcaagtcgtgcaacagaagaagtgtttgttgtctccagtggagcttttaatttcggattgtgttgctcttatgcaatcctctcttttatttcctatttcaattaattttgttaaacggtccgggaaccagacggctaactttttagctcattcttttagttctattcctggctgtgtttcccgtgggggttttgtccctactggtttggaaactatcttgatagttgatttgatttaataaaagttaattttttagttcaaaaataaataagatcgaatcttgttccttagaaaaaatgagagatattaaaaggtactagtgtagtggtgtctagtacctttcattccaacatgatttatagttattgatacaattaagtattgaatctcatataatttaataaaataacttctatcaaatatcgttaactaattctaaagcgttacctataaataatactaggcaccactaatattttataactactagtgtcttataataatactctaacaaaaaatcttaaatcttactactagggatgcacacgggacgga

SEQ ID NO: 332771 - DNA, 911 bp, Cannabis indica
atatataagtgaagtaaataaaatttctaaatgctctaattgatttctctactattactattagaggaggatcatttcttaaatatgtgcatgaacttaatatgaaatctatttatatatgtagtaaaatattattttgtaaccaaaataatatatatttttttataaacgatctaagtaaattatattataaaatttatttttaacttactcagtcgaactcataaaattttattagcgttgacgcaaaattgaaataattaataaatatacatacaattaaaaaatattaaaattataatactacatattcataaatcattaattaaatatattataatttttaaaaaaatacacgagggagctagaatttcttctaagcattatttgggttcgtcagtgtttatgctcttttttcttattaataataaatatcaatacatcatatttgaaataatttgataaaaaattaaatattatatgaataattaaaaaataaataaataaataaataaaacatattaatataataattttatcaaagtattgaaactaaaaaaataaaattatttgaatttaatacaaaaaataaattaaagtatgtaaaataaataaaaaataataaaaatatcaatatcttagaatggtgactagtgttgctaataaaataaaagtttagcaatcaatttactaaaaaaataaaattttgggaataaacttgccaaaatatttatagtttggggattaattttctaaaaaataaaatttgagaactaacttactaaaaatataatttagagatttgctgaacaaataattcttatgagtacactctaatattaaaaataaataaatttaaattaattttaaaagttattcttaatattgttttatctcgtattttaaaaata

SEQ ID NO: 332772 - DNA, 905 bp, Cannabis indica
ccaaaaaatagaaggagtgttgggatcatatcttggtaatactctgctacagaaggatacagggttagagatttgagcggaaggagtcacttaattccgctgcaaccaatgtaaggtttctcatactattttattgtgttttattttatatcgtttttagaagttcatatttaggatgttaaaaacatacttgttagtaaatctaggtcctagtaaaatatattccaacacaaatatgggtatacgacctaaaaggcatgaattgagtgtggcccatgtgagccattgggcatacatgttcttgtttctgacttatgagtaggctttgaaagtacttcaatcgttgggcctttttgttgggcttagagtaattttgggccactacatgagtcaatgtgaaagcaggtagatagcatggtttaaaaattttatttattttttgaaaaatccatgtgcttggtaagattacattcttgattaatttcaattttgtactttaaaagaacatataatcataaaatgtaaatttttagcaattgaattggtatatgtatgttaaatttgaaatgtggaaagttgttaagaaaattttagaacttgcttgcttgttatttgaggtgaaataataaatgatgcatgattaggaaagtaatttatgcattctttagatctattgtgccttttaagccatccttgtgatttttatcttcgttacccttttcgagctttatcttgattctttgtttctacacattttgagcctaaacaagataaacccattattatttaaatttgaccataattataccataagtggatctttagtttgtgaaaattttaatggaaagttttatatatgtgtgtgtggaaataagagtgaaattgagagaatgtgaaaaaaattg

SEQ ID NO: 332773 - DNA, 514 bp, Cannabis indica
ggaactccacactttaattcttgaagcatctctcaactaacacagaacattcagctgaggatattcttttagcacatattggaactccaaggtatttaaaaggcacaatgctcctttgaaaccctgaagcatctaggatcctctgtatttcacttgctgccatcccactacaatacatggttgtcttctgttgatttgggtgaaggcctgaacataaggagaataacttgagacctttaagcatcagataaatactcttataatcacccctgcaaaaaagaagaacatcatccgcaaaactcaagtggttgagtttcaacttcccacatctttcatggaaatgaaaatcttctttatctccaattgccttcaaaattttgcttagatactccattccaagtacaaagaggaggggtgacattggatctccctgtctaagtcctctcttagctgcaaagaaaccatgtaaggatccattgaaaagcagagagaaccttggagttgagacacaagt

SEQ ID NO: 332774 - DNA, 656 bp, Cannabis indica
gcaataaaaagttccaatggaccaaaaaatgcgacgaggcttttcaagccttaaaaaggcatttggggcaacctccgatctatcaaaacccaagaccggcgaagtcctgtccatctacttagcagtgtcagaatacgcgattagttcggtactaatacgcgaagatcaagggcgacaatacccggtgtattatgtcagtaaacgattactggatgctgagacacgctatccccaaatggaaaagttggcgttcgccttggtaatatcgtcgagaaaattgcgaccttatttccaggctcacagtgtcgaagtcttgacaaactaccctttaaggcaagtcttagcaaaaccagagacatcagggaggttgttgaaatgggcaatggagttaagccaattcgatatcaagtataaaccaagaactgcgatcaaggggcaagccttggcagattttatccttgaattccccagcaccgaagtggcactcatagaagaccaaatcgacgttgctataaccaataaagagatgtggacattgtatgtcgacggagcctcaaacagcgaaggttctggtggcgggatcttattaatcagtcctagcaaggttctggtcgcggccgtggccgtggtagagctcagggtggtcgccctgtaaa

SEQ ID NO: 332775 - DNA, 3184 bp, Cannabis indica
agatatgtaaaggaagttaagaaggagcagtttgtttttgctccagaatcttttaagaaagctaagactgaggaacctccaattgtattcttggaggaggatgcaaagcatgtgagataccctcatgtcgacccactagtgattaccatccagctcgccaacagaaggataaaatgggtgctggtggataacgaaagttcagtgaatatcctttataaggatacactgaagcaaattgggataaaaaagcaaaattaataccttgcaaggtaaatttttacggatttacaggcgacagtgttgccagtcaaggaataattgagctcccattaactttgggcgaagtgccttgaagcaccactataatgcaagactttttagtgttgacctgccatcagcttacaacatattgctgggtcgaccaacgttaattggactagttgcaattagtttaattaaacacatatccctgaagtttcagacatcgataggtgtaggagtggtgcgaggtgaccaacttctggctcgtgaatgctaccgcatagagctgtagaatagaaaggccggtcaccagctaatggcagtcacgactgaagaaggcgagaagcaagatgaagatcttgatcctcggattcaatatgaacaaaatttattaaaaccaattgaggaattaaaagaagttattttagatccagcaaatcccacaaagtgtgtattctttgggaaaaacctggatgaaaaactaaaatagcaactaataagttttttgagggaaaaccaggatcagttttcctggagccattcttatatgatagggattgaccctaagattatctgtcaccacttgaatgtgaacccaaactacccagctaagagacagaagagacgatccttggattctgagagacaagctcaagcaggaagtggataagttattagtcaatgaattcatacgcaagccgttttatcccttatggatatccaaccctattctcatcccaaaacaaaatggaacttggaaaacttgtatcgacttctcagacttaaataaggcgtgtccaaaggattgctttccactaccaaggatcgaccagttaatggatgcaactactaggcacgagcttatgtcgttcatggatgcatattttggatataaccagataaaaatgcatatccctaataaggaacatacaagcttcgtaaccaacatggggctttattgttataaagtcatgccttttggtttgaagaacgttggggcaacatatcaatgactagtgaatgaaatgtttgcgagactgatatgaagaaacatgaaagtctacgtcgattatatgttggtgaagtcgataaaaagtggaaatcacacaacagaccttgtgaagtgctttgagatattgaaaaagtacaatatgaaacttaacccgaaaaagtgttcctttggagtttcctctagaaaatttctaggattcatagtcaacgcgaggggcattgaagcaaatcctgagaagatcaaggctttgatagagatgccatcaccaactaaactgaaggaagttctggccttaacgggaagaatggcagcacttaacagattcatctcgaaatcaattgataagtgtctaccattcttcaacgtattgcgaggcaacaaaatgtttgaatggacagaagagtgcgaggaggcctttaagagcattaataggcatttattacacctctagttttggcaagaccaataactggagaaactttactcctctacttggctgtctcggacaatgcaattagtgcagcaagagtgcaagaagagggaaagcaccagcaatctgtttactatgttagtaagaggttactggggttagaatcgaggtatcaccctcttgaaaaaattgccttatgcctatccatgcatctcgcaaattaaggccatacttccaggaacattcgattaaggtgtcaactgatcaacccttgagacaggtttttatcaaaaccagatgcttctggaagattgataaaatggtcaattgaactgggacagtttgacataacttattaccctagaacatccatcaagggccaagccttggcagctttcctgataaaaggaataactctagaggaaaatccgcttgtttaccgagatgcggacacttggaaattgtacttggatggagcgtccaatgagcatggcttgggtgcaggggtgatattaatttttctagaaagcttcaagtttcactatgcattaagatttcaattcgtcagttcaaataacgaggctaaatatgaagccttgatcgcttgtttgaagatagctgaagtgttgaaggttaaaaatcttgtatgctatagtgattcacaattaattgtaaatcaagttctaggggaatgccaggctaagggcataaaaatggcaaagtacctagagaaggatcggaagaacttggaaaagtttgattatttcaaaatcgaacaaatcccaagagaacaaaactctaatgtcgatgccttagcaaaactaacctcgcagaatgaactggattaattgaacttggtaccggtggaggtgttaaacgagccaagtatatgtgaaaaggaagaagttgagattatagatagctcgcctacctggatgacacctatagtcaactatcttctcaacgggaaacttccaactgacgaaaacgtgacacacaaaactcttgtatatagtgcctcgctatacaatagtagaaggcaaattatatcgaaggggctattcagtgcctctcctacgatgtgttcttcctgcaaaagcaaacgagatcattagagaaatctatgaaggcttttgtggggaccatgtaggttggccaagcttgtcaaagaagataactcgacaaggatatgattggccaacaataaataaggacacacacgaatttgtcaaaaaatgtgataaatgtcagagattttcacatatacctcacatactaccaacggaaccgaggatgatgacctagccttacccatttacaatatgggggattgatttgattggggcactccccacaaggcgaggaggagaaaagtacgcagtggtggctctcaacttctttacaaagtggacagaggctgaacctctagtttccataacttacaaaaaagttctcgactttgttgtcaagaacataatttg

SEQ ID NO: 332776 - DNA, 1460 bp, Cannabis indica
tctgtatctgagaaaaaatactttcttttatactgatgtgtgattctgatctagggcagagccctagtgtaatatttgtaactgattttgtaactatttcagttgtaactgattttatgttctttaatcttgatctttgttgtatttgatgtaagtgtatatttgtcgaaccgtgtgagtagtgttatacaactttaggataaataagtgaatatgtaacaacaaattccaccaagattctcttatttacccaaggatagttgatgatgctatgagggcttgaatgaccctactagggtcagctccatatgtttatccctaccaagttcagtttgaacttagctagggttaacagcttggtcttcatgtatgtgacacctcgttgtgtcaccttatttttctgccttgcatagatagcgtcacaaaacccttccatttggttttgtgactttctaaacgcaagtataacacatgttgtcttctttaagtaccttaaaatccattttataatcaaccaatgtatcttcccagtcaataccatatacttgctaacagcaactatagtatatgttgtatctggtatggtacttaacatgaaatacatttttgaaccaatcccattagagttgaggatctgactcatatcctctaactctttatttatcttagtgcatttttctttctgtctaaagggccacatatgtttcacaacactcttttccttgggttttggaacacaaacccaagtcttctctttactcaaagagtctgtctcttcatcaatagcacagttccacttcttagcattcttgcacttcatagcttctccacaactttctggtttgttcttctgtccttgcaaagcacttaacagtgcataggcaatgtcttcattccaaatgttgaagctatacttaggattctgtctaggtgctcttttaactttgtctctagtaaactggtagtcttccaactcctttgcctgaccttcttttagatttccttgttccaactgaacaatgatttctccctgttccacttgaacaatattctctccttcttccacctgaacagtgttctctccctattccacctgaatagtgttctttccctgttccacctgagcagtggtctctccttgttcatcacttggagaaggtcttagatcaaagttgattgagttacctgcatggttagtactagggcaagaacctaaaacatttgggttagtagcaatgcatggaaaaatattttcatcaaatattacatatctactattgataggtttaaaacctttttctcttacccaaagtctgtacccttttgttccttctgaatatcccaaaagtacacaatttataactctaggctctaactttccatctccttggtgtgcatatgctgcacacccaaaaacatttaagtgggataaatcaggtggtttgctggaccacctctct

SEQ ID NO: 332777 - DNA, 672 bp, Cannabis indica
tgcacagtacgttaaaaatcatgctgacacgcctatgctagttagggtgttacaaaagaattcttcgaggctcacttaaatgctatcttctggctcactaggattgtaagccttgctgacgctaacgggatgaagttatatgcagtcttcccataacgagacggtcacctcgcttacttgttcttgagctgattcgacttttacacttagtttgttcattgtattctaaggactttcaagattgatatgtgccgcttgttggaattattttaccagggaataatatgtctccttccaatcatatctctaacccttgtatcctttttgtcgcagagtattatcaagatctgagcccaaatgtctttcttattgaatctggattcttcacgatcttccacactatgattgaggtaccacttgctgtgtgtgggcactactctatcactaagaggtttcgaaacaatcaaagaagaagaaggaaagagagtggcggctaggtttagtgagatggctcaggtttttctctaaaaggaataagatgcattgttacaatttcctaaagccatcactacctatttatagtataccacctagggttaggcttgaattatttggcattaaaataatgaaaatattaaatgataatccttacataagtggtcggccatggct

SEQ ID NO: 332778 - DNA, 592 bp, Cannabis indica
aaatatacagagaatataaaaccttaagttctaaactgcgggttggaatgaccaaacctccagaattcctaagggagtatgtacgcgagtattcaagatgttcatccgaatactcgcaagtgttgataaaaacaagtaagaatggtgtgaatattcaaagcgttctttctaaaagttcatagttatacaaacttcaggtctattttcttctaggattatccaattgtaacagagaaaatataaccctatgcatattcctacaaacatgcattttcaaacttctcaaaagtgttagaaacccagaaatgcagttttttcaaaatcagaaaccaaatacgcaagtagtttcaaaaactaacctttaactttgacgattctccctgtgattggtttcgatcacttctgaaacttaagatattcaagaagaaaaggcagaaattaggatgaagaatgtgagtcttcaaaaatcagagaaaaggggaaaagaggaagttggaaatgagagggaaaatgagaaaatcatttcgtatcagagggcttatataccaatacccctcataaattgggattgtgacacgtggcagcaggaatg

SEQ ID NO: 332779 - DNA, 644 bp, Cannabis indica
attcattagtaaattttattaaaaacaaatcccactttggtttaaaaaccattgtaagtgttgtgttataagatatatatagtaaattatttgctctactttcgtttgtccagaaattagtgttgcattatttctatgggtataactaaagaatttagtcttgcttgattagttataatatatttttttaatgaatgacaattatatttttttacacatgactattttttttaatcattttcaatttttcttaacgtttttttttattttctttttaattctgtatatcatataataatttgattcattagtaagttttattgaaaaaaaaaatcccaaaattaatgttacattattttccatgggtgattaaagaatttagcttgcttatagtacattttttttatgaatgcaatatatatttttgcatttctaaataatggcaaaaatgttaaattttttgtaccaatctatatctatatctacctatatatctatataaagcttaatcttagagtaatgatgtggaattctataatattcttaatctattttgctaattttaagagaattttatcttttataaaatatatatatatatatattaaatgtacatcacttattttcttcacatgtaatagtaa

SEQ ID NO: 332780 - DNA, 787 bp, Cannabis indica
cccaagacttgtttaattgtaaaatgaacaaggcttgttcagatgcctccggttggctactcggtttcttggcacgtgcttcgagcgcgtgaaggtgtatttaatgatcatcattactgcagcgattcactttttgcaggcgtcgattcgtttcatcctcattaattgatacggcgcattaatgggtgtcagacgggcactcaagcgtttccaccgccttgatgacacaccaatttagccgttggatcttgggaattcgaatcgtgtgccttcccaaccgtacgattggtaggtgatcacgcctgttccacatgcacttcggcctataaaagccaccattctcccttcatttggttactttcagacttccaccaaattttctacgaattttccagagagaaagaaaccctcaaaccaaaaaaaccttcaaacaccataggtttcttactaaccttccttcgctattgttagtcaatgtttcaccgtcgatcaacaacaacacctagttctaaagctttgtgtaagtttttcgcatctcgtactttattattcgtgttcattgcatgcttcactgttcatctactttttctgggtttaatgtttgaagtttctgggtattttcgctttgagtttctgtgtgatacgttagactcctcttttctggtgtttgagtcatttttattttgcgtactatattttttccaaaggcccatcttttctttacgtgatgaccttcaagggttcagagaggactctgtctttctcgatttttacccttttttccttt

SEQ ID NO: 332781 - DNA, 1145 bp, Cannabis indica
aaaccgcaaccgcaccgcgaagaatttcaaactgcatttttttttgcggtgtggtgcggtgcgggcggtttgagcggtttgatgtacacccctaacgagctgcacaatacgattcaaatcacgctaacatgcctaatttagttagagtgttacagtaaactagttgttggtgccttccctcttctcgcactaacattgcactgatcacattctccgagacagctaagtagaggaataaagtctctccagttaccgggccaaactggaggcgttgatagatatttctttatgtttttgaaggcttcctcgcactcgtctgtccattcaaactttttgttgcctcgcaacacattgaagaatggtaagcacttgttggtttatttcgagataaatctgtttagagctgccattcttcttgttaaagcctggacttccttcggctttgtgggcgatggcatttctatcaaagccttaattttttcaatattcgcttcaatgcccctcacattaactatgaatcgcaaaaactttctcgaggagactccaaaggaacacttctttgggttgagtttcatgttgtactttttaagtatttcaaggcactccgagtggtcttttgtatgatcttcactttttaccgactttaccaacatatcatcgacatagacttcaatgttcctccctattttcttttcaaacatttcatttactagtcgttgataccccgccccaacattcttcaaaccaaaaggcatgactttataataataaagtcccatgttggttacgaaacttgtatgctcttgatcagggacatgcatcttgatctggttatattcagaatatgcatccatgaatgtcattagctcgtgtccagtagttgcatccaccaactggtcgatccttggtagtggaaagcaatcctttggacacgctttgttaaaatctaaaaagtcgatacaagttttccaagtaccatttggttttgggttaagaataggattagatatccatgaggggtagaacgcctcgcctataaagtcgttagtcagtaacttgttcacttcttctttgagtgccccttgtcttttagaatccaagggtcgccttttttgtcgcttagctgggtaattagcatcgatatt

SEQ ID NO: 332782 - DNA, 528 bp, Cannabis indica
ccaggcaaattgatcctggtttggcttcagaaaatttattagctgctattttagtttttcatccagatttttcccaataagcacacacttagtggggttttctggatctaaaacaacttctttcaattcctcaattggttttaactggttcttttagtcttgaatttgaggatctaaatcctcatcctgtttcttgccttcttttgttatgactatcattaactgatgaccagcttttctatttttttagttctatacgatagtattcacgagtcagtagttggtcacctcgcactacacctacacatgctggtgtctaaattttaaagataggtgtttaatttaggggtgggcatccgatccaataaaacctttttttcctcatccgatccaatccaattagtaattggatttggaaaatcatcatccgatccaatccaattagacctccgaatccaatccaattactaattggattggatcggttttttaattggatatccaattacacacctaaatttcaatatt

SEQ ID NO: 332783 - DNA, 649 bp, Cannabis indica
ttattaactagaaaattagatgttttgaaagctaagtatgaggatacatatgaagtttatgatgaaccttattttgactatgaagtagttgataataagaatggtaatcataactggaaaaatcttattgactgtagttggaagtctgagtacaactacaatgcaccaattgatttggattttgctgagaaagcttatacgttttgtcattcatctcaatttagcaatagcgaatctctagagaaaaatagttcaatattttttgctagtctagagaatgaaagaaagatgaatgaaaaccaaaatgcttcgctcactcaattagtagaggaaaatatggaattcaatgaacaaatttcaaacaatgttcttcctccacaaattgagataataccatcaccctctaccccaatctcttgcaaactcgatggggatgatgctattactatttggagtgacaatatttctcatcctgaaattcttccaacccttccaaatgtcattccaaatgaaaacaagtgttatcatactgatgtgatagacacagttgtggaggaaatttgtaaaattttctcaagcaaccaagcataccatttcctccatgattttgagaacaaatactttctttatcctgaaaatgtcaccaatg

SEQ ID NO: 332784 - DNA, 1787 bp, Cannabis indica
gatagattttatttaggcccatttagtttttgggcctattcaattaataacagttgttcattttaaggttaaattcctctcttttgggccttgtgtgagagttagggggccaatagaagtgggtacgacatactgaacccagctctccctcacatgaacaaccccaactgtgaaggcccatttgcctgatttggataactgtactaggttaattaaattagtttaacctaataaaattgattagcaacataattaatttcaaaataaatggaattatttttcattcgtatattttgaaattaatttaagaaaaacacacttagtttaatgaaattatttctagataaactatatgtatttttcttgtattttttttttttgataaatcagcgagtttattattgatccacaacacttttgtacaatcatttataaagaaagagcgtctttatgttaaagacctcatgatcaatctctatctttttacaatgaataaaaccaatctctatcttttggaccaattctttttggccaaaacaattctaatctatgtttaacactttgtttgactttttgtacaattacatctttaccttctatatgattattccatatttggtcatttcgggaaggccaaatggaataaactaaatgggcagcagctgctgcaagaacattcttcctaaacttgctgatttttgccttgtgtatccatttgagcagctgtggtaagtgattggtttgggctccccaagacagccactttttaacgtgttgtagacaacatgctaagaatgaacacctgaaaaataaaatgaccatgtgtctcgggtagtagcagtaagcacaggctgcacttcgggtcatctagcagctgaaaatgatgcaatctatccttggttctgaggcgattctgcacagccaaccacagaataaagttgtgctttggtgtgttgaaacgcccccaactcattgctccatgtgaatctactccgtggtggacaaatcaactcatagccatctgagatcttgtatttgtgttggacaaatttatgtacatctgtgattgctttgatttggttcttggctgccactatttgcttccaataccaaatcccttgatttgttgcttggtaatcccaccaatttccatctttcgtataaactggatgtacccatttgacccagaggttatcttccttgtttgcaacagcctaaacatacttaaagagagctgttgtgttccattcaaccattcttttaatgcccgtgcctcctgcaatctttggttgacaaacatttttccaagctactaacccagctccctgcatcatatattgacccttccaaagaaaagctatacatatagattctatctcatttattaccttctttggaagcttgagaatctgacaccaataggagtgtatagctgaaaatactgaattgatgaggacaacccttccagcaaaagagaggtgtctagtgctccatgatctgatttttctgtcattttctctgatagaattgagcattcttgtttcgaaatctgtttatgacaaataggaataccgagatatctgaacggagtttgatgttttgagaaacctgatgcctccagtactctagtgagatctgattctatcatgttgcagcaatagatggaagattttgctttgttaggttgcagccccgaggtagctgagaagagcttcaatccttgtagcaaaaggatgatgctcttatagtcacctttacaaaaaagtagtacatcatctgcaaaactt

SEQ ID NO: 332785 - DNA, 514 bp, Cannabis indica
atttttttatgaaattacccccttttttttacctaaaaaacgtagcctcatacataccccctacaaacattcattcttaaaccccctcatgcgtatcggaaacccagaagacaatgttcccactcaaaccgaaaacgaaacacagaggagattcgaaaactgaccttttgtttatgatgaaattgttcccacgattcgcccttgacagcactgtagaatcaacgaaaagtccacggagagaggagaaaaaaaaactgggcaatttatggaagtatttttggtggtttctctgaaagagaagaaacaaggaagtttaagaaagttgaaagaaaataagggaaaatggggattttcggttcgaatcaggaagtttaaatacccaaatccctcattaattgggatcacgacacgtggcagttggaatacctagagtcgcccaatccaacggccagagatggccaagcctacacagaaaccgaagagttttgtgacgtggcaccataaatgcaataaa

SEQ ID NO: 332786 - DNA, 512 bp, Cannabis indica
ggcacaagaatccaagttttctttttctttaaagctgacatctcattcttcatggcagcattccattttggatttgcaaaggcttctttaaaagatgttggctcattttcatcattggaatatgcaagatatgtcttaggtttatagatgcctaacttggacctagtaaccatgggatgttggttgttactaggacatattggtggactggtgtggacagtaggtgttgaaccagtggaggagctggtgttgagagggagggatctggtttgggcaggtagcaatatttcttgagtaattggtggggtttgatgtttagatggcatggtagggggttgattgacattagtggatcttggtataaaaaatggttgctgattgtaaatgggggagttggcagtaggtgttgtaggaggaaatagagtattataagggaattcttgctcattaaaagtgacacttcgtgccacatatatcctacccgagggatgaaggcacctatatcctttaaa

SEQ ID NO: 332787 - DNA, 607 bp, Cannabis indica
aacaagcttaccattaagaacaagtaccctttgccacggattgatgatctgtttgatcaattgaaggggaaacggtcttttacaagatcgatcttcgctcaggctatcatcagctgagaattcaaaaggaagatatcccgaaaactgcgttccgtactccgtatggattcactaattccccggcgacattcatggatttaatgaaacgagtgtttaaagattatttggataggttcgtgattgtatttattgatgacatcttggtgtactcctagtcagaagaagagcatgagttgcatctcagagcagttttgcaacggttatgggatcataagctctatgctaaattcaacaagtgtgagtttttgttatcccgtgtctcatttctggggcacatagtggataaagatgggatcatggtggatccagcaaaaattgaagctgttcgggattggccagcactgaaatcggctactgaggttagaagttttctgggtttagctgggtattaccgtcggttcgttgagggtttttcaaagattgatgtacccttaacgaagctaactcgaaagaatcagaagtttttttggactgatcggtgtgagaa

SEQ ID NO: 332788 - DNA, 1038 bp, Cannabis indica
tatagtaggacttagcaaaagttccctacgagtagggaactttttttttaaccattgattttagatcttgtggttattatgatataagtttataatcttactatagggctgcttgtatacaattaaaactttatacatattataatattgtttaataataaatttattttaaaaagtaaaattaataattaaaaattttattaattttattaatttttaatattaattattattatttttttctaaagctaatttgaattgtttttatgtaggtatttattttcaaaaaataattttacttacaaattttgttatcaattttttttcttcacgttaatagttaattataacaaaattgattacttctttcactatcaatttgtttacatacatagttctaccataattatcttttaaattaatttttttaatatttttataaaattatgtattaatatttttatttgaatattttattattttcttatcaagaaagataatttctattaatcaaatcgagtcaattacattcacaaagggattccccttcaaaagagaaacttacaactcttttacataattaagaataattttatctgtgctagaccacttcattttctgtacaagattaagtctacttttgagcctctctttagttctactatctatacaactcggattcatacacttttttcatttatacacaaatttcaatttagtcaaatgccataaattgcacatgttaacctcttcttatgaacataatataatttttatgactcattaatatatatcttttttattttcaaaattatatatgtatttttttctaaacgtatttgtttttatagtgattaaaaaaatattattttaatgtgaaaatacaaaataaaataagaagagatataataacatgtaaattataaatttaaatatggagctagtgttgggattttatgccctaaataaaactcattacaatctaatttgatttgttatcaataagagattagaagtgatttatgttaacatgtactt

SEQ ID NO: 332789 - DNA, 772 bp, Cannabis indica
cgacgtctcttatctcaatgacaccaaagggatcttaaatgaatggaattgggatgtggatggaatataatgaaatagagccacattgaggttccttatgaaatgaggcatggaacggagccacgaagaagaagttccgagagtttcaaaggaaacttcgagctcatatgggtcatgtgttgagaacgggaattgaactttatgagatctaacctcctatagttcctcagtagctcagtggtagagcggtcggatgttaaccgatcggtcgtaggttcgaatcctacttggggagatttaattcattctgaattctttaattcagaatgaaaggattcactttgaccgttaagaaagtaagtaacccgttccctgtgtctttgtttctattgcattctatctcatcgtatcacattctattctgagatatttgagaatcgtcgtcaatccctcggcgtaggtccaggataattctttgttccacggtctggggctatttacaactatccaattaagaattctcagatgtactagtactagcaagtgcatcaaagatacagtcattgattcccccgagaggccacaattacgccgagcaaacatattaataacgaggaacgcatttttgctatgctgctaatacttgtacttgctctgctattctgcccccgcctggttgaggaagaattacgaggcgtaaaacaaaaaaataagctgatgcgggtcgggcatactctattttcattttcaacctttaaagattaaagaaaga

SEQ ID NO: 332790 - DNA, 2077 bp, Cannabis indica
tataagttcagggggcatgatttagtacatgttaaagttcagggggcaaaaatcttaattagcctatataaatatatataaattaaacattaataatatatatatatatatatatatatttatgtagcaagtgatatcaaaagaagaaagtttcactcgattgatttgcacatgtaaattactgggtactattagctacaatgatcctatatagttcaatacaaatataggatctcaaagaataataaagccaataagaactaaaagacatattcatttatgtaagggtctactcgtagttaaaaccaaaactgaaccacgtcaatgtgaacaatatcaaataccattcaatcacactgaagcttaatacccagaaacgaattaaatcaatatatattgaatacaatcgattaaaacaggtttatataatatatttttgtcaacacagatttttgttaaccaaatttgagcctcacaatattgatttcacacagaaaatataaaagctatgaaaataaaaaatatgaacacaaggttgttatgtggttttgcagttaaaattatgcatagtccacgagtcaatcttattcagatttctcagtatttttcaaggcctctttcatatgagttttttcgtccattttttgatcttctttgtcactatttatagttacacagtggacattgaattacaaagttgaccgaaatatttttacagcaatcatccttaaaattgtgggatttgattacatatcacgtagtgtaaatgcagtttataatttgaaaattgtataactttgattttcccgcttttactgggtaaaaactatcgtgtattaaacaagtctttaactgttgaatattgtgatgtctcgacagaaactttattatagtgatcccaacagcgagctggggccattcttccttccgaggttgacaatgtatgtcttgtgtcgatcacagttatttacaaagaagtcttctgactcgccaggattgtaagccttgctcctgttagctggatgaagctataggttgtcttctcatagcgagatggtcacctcgcttatttgttctttgaaccgatccatgtttttcacttagtttgttcattgcatgctaaggacttttacggttgatatgtgtcggtttctccggtgccttgctattcggatttagcgatatatggtttctcgctaatatgctaagtgccaacttgtacatttattcctcgcttaaggccttacaatcaacgggttacaaatatactatgattcttatgtaattaatgagttattccataagaggaattgcattgatttatattcccttcatcctgacacgtgtccttcattggggtggccgccaaattttgggtataataattgccccttaatagtaaaaagagctttttaataattacagagggtattttcaccaaaatattttcttggaaaaaaattcatcctttgattctcgcggttttacggttttgaggacattatgaattgtctcttcatattctacccatcttccaactgtcagatttcccaatctttagctttcttgtcactgaactttgtgtataaaagggcagctcaagcttgtcatttttcacaaacctctggctttttgatgagatccattttcagaatggatcatctctttcctgctagaatgtcccttctgagttcagaagttcatctttccaaactcatcttacccagacgcaccaaccaatttccatttgttcctaaagactttaagcctcaactggagccataaacaatggattccaaggctggggagcttctgaccaatctaaaccaggggaaccccgtatcctgccatggccgatcctcacaagtgatccctgagggtacaaatcttgtgagtgatcttaaaggtcctcctcatgcggatgaagaattccaaaggaaggttggcatggtttcaggtggatcttggaaggaagttggcgtagtttctatcagagaatcaagccaacccaaggccccaacctgcgccagaagacttttgcgcaaacctctttttggtatcgaggaatttcctgagg

SEQ ID NO: 332791 - DNA, 723 bp, Cannabis indica
aagaaagatcactgggggtatggtacgtattcaatcctccttcctggaatggaaagactgcttgaagtctatcctaccccttgtgatgctttcccattgatcttttcaagtgaagtttaagcttaaatttttatacaactacaaccttccttctcggaagcccaagcttgttacataaaaactgaatggtgataatttttataaatgaaaattgaatttgcatataatgttggtttgtaagaatcataaatttatcctaactgataagcttccctaaggagcccgctgccaatgctccaaaaaaaattcgggacagatgtgatacttggattcaatccaacaataaggcaaaatgtttcatgtttgtatgcatgcataagacgcatgagaacatggagaatgcatctcaaatagtgaattctctataggccatgtttggcagcagtctaatcaaagaagacatgatgctacttgtagctacatgaattgtaagatgaagaaaggtgtccctgtacgatctcatgtattacacatgattgagctaatgcatgaggcagagacacaaggggatatcattgacgaaatgactcaagtgactatcatgcttgagtcgctatctccttgattcaaggctttcatcacaaactatgtgatgaacaaactagatttcaacatgactcaattattgaacgagttaaccgtgtttgagaaccttaacaagga

SEQ ID NO: 332792 - DNA, 1205 bp, Cannabis indica
aaatttctgtctaaattcttcctgccagcaaagtttgctcagctgtgaggagaaatcaacaacttttgtcagttagataatgaatctctccatgagtcatgggagaggttcaaggacctcatcagaaaatgtcctcatcacggcattgagaagtggatgatggctcacaatttttattatgggttggttggtaataccagaacactcatagatgttgcagctggtggagcattcatgaggaagattgcaaatgaagcctatgatttgttagaggaaatggccctgaataatcaatattggcaaactgaaagaagccaaacaaagaaggtggctggtatgcatgaggtagatgccattactaagttgacatctcaggtagatgccttaactaaactgatggctgtgcaagcaaaacaagcttaggtggtttgtgagctatgtggaggtcctcatccctatgcgtaatgctcagtagatgtgaatagtttgccaatggatgaagctaaagccattgggaattactctcagaacaacaactatgggttcaatcaagggggaatcgaaggaattctgggttctatcagcagaggaatcaaaattagacgcagaaccaacagctaccatagtagcaaggttttagtcggagttctggtcttcagacagactaattgctacaatttatgactgagacaagatcatccattaaggaaattggaaactcagataacaacccgtcctcagggaaattttccttgtacaaccgacgttagtcctaaagaaaattgcaaggaaattaccctgagaagtgggaagaagtatgaagggcctgatgggggacaaccagtggaagaagagattaaggatcaaccgtcactaacattaacagaaaaggagactactgagtgtcctgcaccaaaccaagagtctccaccaatcagtatagatcatcatgtgaaaatactgtacccacagagactctgaaagaccaatctagacaagcagttttcaaaatttctagaggtctttaaaaggttgcacatcaacatcccttttgctgaagccttggaacaaatgcccagttatgtgaagttcatgaaggagatcttgtcgaagaagaggaaaatggaagactatggaacaatggcattgaccgagggctgtagcgccatactgcagaagaaacttctgttggattttgtgcccta

SEQ ID NO: 332793 - DNA, 1045 bp, Cannabis indica
actctgtatcgaatgttgaagttcataggatatcaagaaaatagatactatatctctttaattactaggaattatgtgtacctgatgagaacctccctgggattccaatacaacagtagcaaaccagtaaaataactaagttagccaaccacagagttaacaattcttaacttcttccagatcaaattctatttgtcttatgtcccttttgttatttatttggttgtcttgtcttgtgtccctctctcattgtaacattatttaaattagcataaaattcatgttgaatttgttttgttgacaggataggaagaaattctaatttctaaaacaagttgatgagttcttgaacaccaaggttgcacctcaagagtttgtggatgagattaaggtacttttactatgatataacattcttttgtttaagagcttatagatattaaatccataaatatatatatataaattgatgttcaaaatgttgtatttctcataatttaatagaagagtttgaatatcttatacattcatccatagaaaagtaggttctgagactttgtgtattgcggtgataattgaaggttgataacttgcctgttttagtgtagtaggatctgtgaaatttatgtgctgcggtgatataaggatgagaacttgtgtattatctgattgtttgcgattgaaattgacagatggttaggttaataaaatagggaaaatgctgtccgaaacgtgtttaagaatatgtgattggttcgtaaaccaatgtttaataaggcgtttttgaggcgcgcctcaagctgaggcgtttgaacagtgcctcaaggcgtgcgccttgctgagaagaagtgaggcgtacgcctcatgtggtgaggcgttgagttgaggcgtgaggcgttgaggcgtaagaggtgcgcctcaaattttgtgtgtgaaatgggctatttcagccccaaaaaaaggcccaaattggtattttaaatttagttttctgctgcctaatttaaagggaaatttacatggtatactaacttttgctaatttt

SEQ ID NO: 332794 - DNA, 1422 bp, Cannabis indica
tgaacacataatcctaaatcttacatattcatatactgatatatatatatatatatatcatggcatagctttcatacaacatatatcactagggtaataaccctaggcaattaaaccgctcatattagggtaataaccctaatcccggttactgattactcacatatatcatttccaatataagcgccaccgtgcataactctacgtgctaactactatctaacctgatgtcccacaatagtagagaatcaaaatcctcgggtgctcctgactaggtgccggtaatcctagtcacattattgggattttacacaacaagggttaacccctaatttcacagtcataaaatattcacatggcatttaaaattcaaataatcacatagatctcggaacaagctttccaacagtataaagaacgtcccaaacggagtaccgagtcaaaagttatggcagaaataaaaactcaaaaaaattaataaactgccattacgatggtcgcgactagacttatgatagtcgcgactaatgggattaaaaacccaaaaaaactcaattttcagctacgaaaattatgcccaaaacacatccaaacccaaaccgaaacttagaaccatcacataggctttcaatcattaaacagagagtctaaaacaccatttcatgcattaaacatcaacaaaaactctcaaaattcagattgtacaaaatcaaaatcatgctcaaacacataactcttcaagctcaaagacttgagctttaaatcctttaatccctaacatttttctagcagcataattaaaaaatagagaccaaattcaagcattaaaaacatcctaggattataccatagtccaaccaaatccaaaacatcatacagtcaaagattcatgctaaaatcaacaaaatgtcactaacatgcaatacaacttcatcatctttaacaaactcaaccttttcagctacaaattcagcaacaaaaatcaaaataaaaaactataaaaactacctcaacttccaattccaagctatgcacaatgaacccccaagattcaagctccaaccaagcaatttcttcgaaaaatcaaagagaaaataagagaggggttgagagagagagggggtcggctaagaggggatccaaaaccagaatttcctttttcatttccttaaaatttaacttttatcaaagtaaatcaataaaggtcaaaagaccattttacccctaaggctaaaaatcaagctcacatacacgcaagggcaatttagttccatgcataattaaatccaattgaattttagattatcaccattaaataaaaatgccaattatttcaatccaaataacatttcaggcccgatcccagttcggcccgaaatacccagatgtgactatactgcgccaacctgtcagaacacacct

SEQ ID NO: 332795 - DNA, 1148 bp, Cannabis indica
tgactcggtcggtccctgaggtgaacgagcagctggctggggcagacaatgacctttctttgtagctggtgatgggaggagttctgaaggagtataagcgggtaagacttttctgacagtttccttttgtccttcttcactcagttcatcttttaatattctttctctgtgcaggccggtctgaagatggcttattcttattcctgagctaagtcggctgcctctaagaatgctgccattttcaacactatgcgggtagaagtggacttggccaggaaggatgacgatgaagccacggttcagcttggggctgtccggatggaactcggagaggtcaataagaagcttcttactactgagaagaaggtggccgagctgaccaaagatctacaagcctctgatcaacttgaagcggccattgcctccttgtccaaggaagtgaccagcctccaagaggaaagggaggtcctccgggctgtcttcctcaggttggaagaagagaagaagacaaaggaggaggagcttagtgctgaggttgagaagtataaatcagaggctaggcaccagagatccgaagtggagaggctttgctggaaagtgaatgctctagagacaactggtctcgagattttctatgacttttggaaggctaatccccaggcgaacttcgattacttggacgattccaaagacatgtttctcgagtactgcgctgctcaggcagtcgacggggaattcaaggcgaccagttccacctctggccaaaatgttgaagcgccccctgctcaggcaaatgatcctccaactgacccggttgacccgtaccaagagttggggactccagtcgtttgactgctctctttttctatcaaaaggccttttttttaagacaaagtgaccgaccaagcggtctttaaacttggattttttttttatttttcagacaactagctgactgggcagcctttaatcctgggtttgcatgcttttgttatctttaatgaatttcattctctatttataatcatcgtggaactgtgtttgttttatttttacaaatactttgtataggtataggttcctcccaagtgaccgagcagacttatgcctcttggtcactattatattttttgcaagtgtgctttttt

SEQ ID NO: 332796 - DNA, 540 bp, Cannabis indica
tgcctctaagaatgccgccattttcaacaatatgctggcggaagtggacttggccaggaaggatgtcgatgaagccagggttcagcttggggctatccgaataaaactggaagaggtcaataagaagcttcttgcttttgagaagaaggtggccgagatgaccaaagatctacatgcctccgatcaacttgaagccgacattgcctccttgttcaaggaagtggccagccttcaagaggaaaaggaggtcatatgggttgtctcccttaggttggaagaagagaagaagaccaaggacgaggagcttagtgctgaggttgagaagtataagtcagaggtcgggcatcagagattcgaagtggagaggctttgttggaaagtgaatgctctagagacagctggtctcgagattttctatgacatctggaaggctaatccccaggcaaactttgattacttgggtgattccaaagacatgtttctggagtactaagctgctcaggcagcctacggggaatccgaggcgaccacttccacctc

SEQ ID NO: 332797 - DNA, 671 bp, Cannabis indica
acaagaaaaactaagaggcagctaagcactaaatctccgtctctctcattcaagatatcatttaaaatctcctcatcccagctacactcaccaacactcataagagaattcacattatgttccactaaaccagaatgactcgaatgaacaaaaagttcatcatctgataattaaggagaatgaagaatactaatatccttccccgatcctatcgccaagtgtaacgtgcatgccaagatggcacgttacaagctaagtgataaccacaagttggccaagttgtggcacatgttgtggtgcatgctggtggcatgctgatgctaagtttgtatgcagtgacattttcataaatatcttcaatattatccggattgggatgggacttggtattcgccatttatttgggtctacaaatacaatggtgcaatcggtttggtgaaactatgtgatttggtatgcggcttggccgtatgtctacaaagccaatatcatgtatgtttcctgttagaaggctaaaagctcaaatgctctttaagggggcaccctggtgtcaactctccaccacctcgtggcaccttggtgctaagtgagctactactggtcagtgggactagtaggacgggcatatgcgaaccacgaggggactcatatgtctccatgagttggagtac

SEQ ID NO: 332798 - DNA, 902 bp, Cannabis indica
ctaggggtacaccccttaaaccctctagggctacaccccttaactcctaaagggttagtctaggggtacacctcttaccccctaaagggttagtctaggggtacaccccttacccctaaagggttagtctaagggtatacccctaccccctacaccctcatggtacaagttatacattccagctatgtaagacatggttgatatgagtacatcctcatgataccatgactacccacaacgtcaaatgggtctcagagggtcaccccaagatggcaattgacaccctccttatgttgggtctcgggggtctcatccccaagtattagcttctatctccgaaggtagttaacgaccatgtcacacccttaggagaccctcatcgttagtggctaattaaaatatctaaaccctgtaataagctcaaagatagttacaaacctacaaaaataacgagatattatcacaaaaatcaaacctcaaccacctctaaaaaccaaggagatggttgagatagcttcgcattggtcacgtctcctgaaggaagaagcattgatgcaaatacagacattttttgcgtctacagtatacacgtcggttgggggaacagacgaaaaaacttttaatgtcaattaaaaattgacaagaaatgtactttttgtagtagtgtatttagggcataaaatttcaacaagaacatgctctaaactcatcataacctacaaaatcctcaaaaaaaaaaaaaaaaatctaaaaccctaaaaatcaacgagaacaaataaagaacttacctcaaggcttgaacaactccaagagttggttattttagctagaagatggatgaattgagatggaattactcaaatttttgtgggttcctagggcttcgaagagagagagagaga

SEQ ID NO: 332799 - DNA, 2191 bp, Cannabis indica
tccaggtccgagtcctaggtctcaatccgagtctaggacccggttggggttcaagtcctagtctgagttcgggttcgggtttccgatcctggtccaggtctaaatctgggttctagtcacgggttcaagtccagatccaggtccgggtctgagtctcgggttccgatctgggtctgggctccaagacccaagtcttaggttccagtccgggtccatgtttgggtttgggtcctactactagttccgatttcgatttcgattctgggttcgggtttgggtcgggtctgggtcgaggtctgagtgctggtccgagtccagggttgggtctgggtccaagtcctgatccctattagggtcttggtttgggtttggccctagtttttgggtctggttttggcttcaggtccaggtctcagtctgggtccaggtcccggtcttggtttaggtcccaagacacaggtccaggtttgggtcctatcacagtcccatgtccgagttctagtcccagtcctggtccgatcacggtctgggtatggtccgggtatgggttcgagtccaggttcgtatctagatccatgtcaaggtccgagtctgggtctaagatcaggtcctaggttcaggtctgacccgatcccggacccggaaccggaaccggaatcggaccaagactggaactagaacctggacatgggactgtagcaggacccaaacctaaacccaaactcaaactagaacccataccgagacttggacccagaccgggacctgtgtcctgggacctaaaccaagaccgggacctagacctagactcgaagccaaaaccagacccaaaaatcggagtcgaacccaggaccgaagaaccagactcggacttgggacccaaaacccggacctagacggggacagggacccaaatttggacccgaacccaaatcgagaccaggactcagaccggacccgaacctgaaccagaacacgaacttttacccacactaggaccaaggatccaaatatagatgggggtcccagagcttggaattgggaccacgaactaggaccagaacagcctcagatcttggatcgggatccgagactcgaccccagacccaaaccaggacttaggacccacctcgggacctgggattcgggactcgatggttggacccgacccgtagtcagtgtttggatctagaacttagaccagaacccaaacccaaactcgaactcaaactaggactcggacacatacaaagacccaggcccacacacgggaaccaaaaccaaaacttgaactggaaccagaccgagatcttggaatggtaccgggacctaaacccgaacccgaactcgaaaccagacccagcctcggaccctaaccgagaccaaaactcagacctaaatctcgccccggacccaaatcaggactcgaaccaaaactcgacccgaagccataccccgttaccttaaactggaatcgaaactagaagcggatcaggacccaggaataggaccaggaccaggacttggacccagaccaaaaactataaccggacctggacccagactcggacatagacccaccccgggattgcgtccaaaacctgaacctgaacctaaaccgggactcgggacccgaacccagacctgaacttagactcgaacattgaacaggactcgggacccagacctgggattgagacccaaaactgtacccagtctctcggtcccacacctagacccatacccagagcgggacttggtgcatgaattgaaactcgactggaacccgtgattaggatctagatcttgtcccaggatccgagaaccagggcttggacaagacccatagtcaatgtcttgatctgggactcggaaaaagactcgaagctggaccaatatctggaaagaccttggacccgaaacaaaaacttgaatcagaatgtgaccaggaccctggaataggaccgggactgtgaccagtacctagacttgggcggggacccgaattacaccagtacccaaccccagaactcggcctcggacccagtcctcgacccagtcccggaccaagactaggactgagacttgagcccgaaatcgagactcgatcccggaatcaaacaaagcccctgacctaaattgggattcggacctagacatggacacgaacccagacccagacccgaatacc

SEQ ID NO: 332800 - DNA, 901 bp, Cannabis indica
gggactccattttggaacgaactacaacaggaaggagctgcaaacctttaggatttccacaagagagtccaaaaatacatcaatcttgaagaggcccaaatagtggcctatggaggatattatcccaccgggatagcaggatatgtgcccggagcccagccgtcgggtactatcccgacagtaactccaccaatgagcggcatacaattttccactactcccggatatagccagggccaggtcttggcccccgcgtcgtcccattttggaaatccctcgggataaatggacaagccccctcgcactccgctccgactgccagcttggccggtccttcccaaggttcaaggagtaaaaggtgctctaagagtagcacccggacggaggaaaaacgacaaaaaagggggtacactccccaatatacccagtacacggagttgacggactcccaagaacgtgtgtactttgctactaggaaaaatacacactatcggagaccacctcctctgtgcaaggatagttcctggagggaccccaataagagatgcgagtaccataacgacattgggcacagcaccaatgaatgcaaaaatctcaaagacgatatcgaaaacttaatccgactaggacacctctacgagttgatcaagaatcggttgcctcatctcaacctgggtcaggtgactggggctttgccacagggaacacaagggggtgcggcaggagtattggctccagttgttccccccggagatgcccagcatatccccggtctgccgcccagacctaacgggagagtggtcatgatctcgggaggaccccatatcggaggaactacccgcaaagaactgaagcggtatacaggggccatgaaacacaatgaggtttgggaagttactaa

SEQ ID NO: 332801 - DNA, 1025 bp, Cannabis indica
aaatacacccattaattaaaaaaatataaacttaaataatttttaaaaaaaactctttaactattttttttaaaattttttcctcatattatttttatgttaattttaatacttattttgattttcattttttataattttttcgacctcatatatatatttttattttaaaaaaaaaattcatattttttattttaattttttgtcataatttttaaaatataatttaattttgtttgataggtatattttttaagaatataaaattgaaagaaaagagttaaaaatacttaatacaattaaagatataaatttatatgaaataaaaattattaaaacggagtgtacttaaaaaatttttgggtgtaaataaaatttccctatttttaacacaataaattattttaaatttcttaaaatttacaaaataacctaaataattaagtaatacatcatcatataaaaaaaatataataaattttgaaaacacgttagagtttcaatggtaatctaatttttagaggtgcaccatataatttttttgggcacgccaatataagataactgggatgagtaactatatttattttttttaggggatagtagtaactgattatattttgtttgatataaagtttaaaaaacatgattatcctaagaaagaaggaatgctttatggactgcatggcaggttttacactctcatctactcgttagaaaacaaatacctattgagtttcctatctgccaagtctgcaagttagaacttatatggcatttagttgaaggtaatgaaatggaataaaaataaaacaatttatatttcatttttttatttagttagatattaaaatattgaaatgtcattcccaatagaatggcatttctatcattttagtaaaatgactattttattttaaaatagaaggaaagaccattccattacatgattagaaaaatttaataattttttatcatttttttgatgcattttaaaatttttccattcctattctcattcccat

SEQ ID NO: 332802 - DNA, 993 bp, Cannabis indica
ctagacctggaccggcacccaaacgtagtccataacacagtcccggacccagactaggactgaaactcgaacccaaacccaaacccgaacttgggactcgatcctggacccacaccaagcccctgaccgagactaggattcggacctggacatggacatgaacccaaacccggaaccgaataccgaaccaaacccagaccgagttcaaaacacaggacctggacacggacccagacgcagacacaaacctagaattagaccaaaacctagacccaaacacaaacccagattgggatcaaaacccaagacttagacagagaactaaacctggactcaaatcgggatcgaaacttgggactcaaaccttgacctagaccaagacccaggagcctgatccaaacctagactgaaatccagacccgaaccaaaactcaaacaaggactcgaaccccgacccgaactcaaacgctaactcaaattcagaatcgcaattggaactcgaaccggactaggactaggacaagaataaggaactaaactcgaacccagataaaaatccagaccgagacctaaaccttaaccgagactaggactcaaccccgaacctagaccgggaccctaacccagataagaactagaactcggaccaagaatcaggatagggaccctagcaacaaaactaggatcgggacctagtacccaaactaagacccagacttgaacctaagacctagctcgtgacccagcacccgaaatggaactagaccaggacccgagattgggatccggatctggacccggggcttagaccgaacccgtagttagtgttcggatttgggacccagccccggccccaaacccacactagggacccgaacccgagacccatatcgtcaacttagtgcatgacctaaacttagacccgaaccctataccctatgacccgaaaattcggaaccaagacaggaagtagaccgggacccaggaacggga

SEQ ID NO: 332803 - DNA, 875 bp, Cannabis indica
ttcagcttttttatgttctcctgaaactgagcattttgcctcttcagcgagtcggcttccttcgaaggagtagcagcagcttttatgaacagagtcatcgactgcgcggccagctcggcagagcgcgtaacaagatcctcataaggaatctcagccaggaacttctcttgcatggctaggaagtcgcgagctcgaacaggtggatcgattacgactttcttccccttgtcctgtgcggtcttggccagcttcttggaagagtctgcggcaagtgtagccatcgcatcgctcttcctcttttgggcgacaaccggcgaagtcgtcgttgttccacccttcggtttgatcttcaggacaggtgcggacttcagaaaagtcatatctgcgaagataaatgaaagataagtataagtcaaactctacctattagtttataacaagagatgaattacctgaaattggtcgaggagtttgcttagaaaggcgtttgtctattcgctcttgctgcctctcggatggctctttgtatactggctccctttgaagacttgcgttctcaggaatcagctgatgttctcgcaacttcgcagttgtacacagtaatcgccagtcgcgatcttgtactggaaggctcccgaggatttcagctgtctctctgctagtcgcgtcaagggtcggtcgaactggtctatctgcgataacaacaaagagcgagtaagcaaaagatctcaaaagtaatgcagaaaatgtctaagttaaaaaatacgcgacatactaggtctgcgattaaagtcagttctaatcccagggactttaaagacataaaaccacttcgatttccaatcccccatattcgacaccattccttcgactcc

SEQ ID NO: 332804 - DNA, 985 bp, Cannabis indica
catgaggactgacggcataaagtccccacgtcatcacccatctcctcaatgtcaacccggacatgccgccggtccagcagaagcgacgtcccctcgactcagtgaaggccgaagccttagagaaagaggtggacaacctattaaagaatggtcaaccagatgttcaaaggcctcctggggcgaaacatggaggtgtacatagatgacatgttactcaagtctaaagcgtgcaatagccacgcggacgacttagaagaatgtttcgaggtagtctggagatactgaatgaagctcaacccaatgaaatgcacctttggggtcaaatcaggaaagttcttgggcttcattgtcagtcagagagggattgaggcaatctcagaaaaaattcaagctcttttgagcatgccatcccccaagaaacacaaagacgtgaagagcctaaccggaaaggatactgccctgagccgttttatctccagatctacagacaagtgcattcccttctttaacattttgaagaagtgccagagtttgaatggtctgacgagtgcgaggaggcattcaaaaaactgaaagagcacatggccaagcctcaaatcctgtcaaaactcgttctcagagaggacttgtttctgtacttggccgtctccgagaacgcggtaagcgcggccttagtccgggaagaagagaaaactcagcatcccgtgtactacgtcagtaagcgcatgataggggcagagaggcggtaccccatcatcaaaaaattggtcttttgcctcctaatggcctcaagaaagttgaggccttacttccaagctcacccaatcaagctgttgaccaatcacccactctggcaagtcctgcgaaagccagaggcgtcaggaaggctcctcaaatgggcaatggagttaagtcaattcgacttacactacgtgccccgcatttccataaaggggcaagctttggcagaattcatcaccgaatg

SEQ ID NO: 332805 - DNA, 803 bp, Cannabis indica
ggagtacttgagatgggaaaggggatcttctcttgttgtgtacattttccatgttggcattttaaacttgtggggcagcaccaggagattgatctcaggtgagaaaggagttccgcttgctcggtccagctcaagatcattgtttctttgtcaagccatgccatgaaacatatttttccattcgtctagctgtgcctgcacggctgggataacctgctcggcattctagtcaatatgaattacgtcagcatctttgtgagcggggatttgagcacgggctccaggctgcacgatcgttgtaacattctgatagtctactcccctctttctattcagatcattccttaggtcatgggtcgctcccaaactttcgaatatagaagcgcctggctgccttagcgattgatttgcttggtcgacaggtggaatggcaccactgatctggttggaaccatctggtatgacttctgctgatgaattactagacaaggtctgcccgcctaccgctaggcccatgagtggaactcgtgaccggggattgggcggctgaccatttgtagtttgggaagtattcatagctggatcttcgtccgtctcacccaggggaatggaattttgtggttgctgacctacagtttggtaggcttttcgtatcagcacggtagcttcccgactacgattttcaatctctgcatggtgagcccttaacaactccatctctctatctctccactcggtaaacatacgcctttgttcttcgaacgcgagatttaccgcagtgcggagttcatcctgatcatgat

SEQ ID NO: 332806 - DNA, 562 bp, Cannabis indica
tgaccttccctaggcgatgtgggattgtacaacttctagtctttcctctttggatcacagggctctgactgtaaagactgcttaactttaatttagaaattagcaaataattagggtttaattatgaaacttgcatgttagttatgaattatcatttgacgaagatttatttgaattcagaatgccttttacatgtcatatatagaatttcatatttttgcatgttttatgtccggcaacattagaacgcggtgtttagctattagaatcacatcttagtatatttagtatagcggggcaatatagttagacattgggaatgtcataaatagtcgagattttagaattgtcaaaaatacccctaagtgatttttatgactagttagttaagggaagggaaaaatggtcattttgcttaaatgacttttttgtcttttagtggtttataattgagtttagttttctgaatattgagttgatttttactaaataaaactcattttatttatcctattttacaaagaaataaaattagaaaaaaagaagaaaacctctctctctc

SEQ ID NO: 332807 - DNA, 619 bp, Cannabis indica
aatccgtgaaagtacaataacgggacaaaatcatatccctataaatataattagattgtaccattttttaattaaattttgagattgacatctaataaccgatcaaattcaattagaatctaacttttaatatctaatccaattcaattataattggatatctaattttttgtaatttaattagattgaatcgattcggtttaattaaagtgaattttagccacctatgcatgtataatatacaaaataataatatttatatgaggtataaattaaaagacaactatttatgtaaattatgaatatgaaatttaaaagagaattgtttatatgaagtatgaatatataatttaatatatataaaaataaatatttttatgcataaatatatatttaataaatactaatatgattatatactaaaaattaatgaaatttttacatgaaaaatcacttttgcacaatttattaccaaaatactcacacacgcctatatcaacttatttacttacaatgttggttttattacacaaataccacttagtcatcattccatccaccatcaatcaaatcctactctcttccctctctttttttattttctatcaatcaatccatc

SEQ ID NO: 332808 - DNA, 581 bp, Cannabis indica
atatatattaatctcatattaatctgtaatatatcacatcttgatattttaatctatattatattataacaaataatataatagtaaactcgaacacgacccgaacccatttaaggtaaatctaaacccgctaactctcgtgcagatttcgagttgtgttattgaactctgtgttaactcaaacttttaggttttcttgttttgatgattaacaaatattttattgttatttgttacactaatgatttgttgattttgtagcaaaattaaaagataaaataaatttttccaagacaaattggtattttaccaaacatcttaaagtgacccaaaatggattcaacaagcatatcaagtgaaaaaaattcatcaaggatcaacaactcaagaccctattcaaaagaggtcttcaaaagcccaaagtcaacagtcaacccgaaagtcaaaagtcaaagtcaatgtcaactctcgagaaaagtcaactttggatcaaaatatgcaaatcaagctaggaagttcatctacatcaagactacacacaatcaaatattataaatttattttagtcttgttaaagtgat

SEQ ID NO: 332809 - DNA, 895 bp, Cannabis indica
gagtagtgtgcctaattatttagggcgttacactcacggtccctatcccagcctcctgagtagggaactttagacacaagtgcctgatcgatgtaactgcgccaaaatccaccagggccggtcagccgaggattgcgttgtaagttgttgggcagtccaccactacaaacgtgtagtatttaaaagtgctttggggtgtgtctgggcacaaggtgactggcaacctcacctttcccattgggataagtgttgtcccattgaatcccgtgagctgggaaccactcggcgagagatctcggtctatgaggcttattaccgtgaaggcttccttaaataaaaaatttacagaactcctattgtcgattaggattctggccacaatcttgttggcgatgggagtctctatgaccagacggtcatggtgaggaaaacacaccgtcttagcgtcctcttctgtgaacgtaatgggttgatccatgagtcaaggcctttgagctgggagctgaatagcttcccaaacctcactgtgccttacggccccagcgtaacgtttcaattcctttcgagtagtccctccgatatggggtcctccagagatcataactactcttccattgggtctcggtggtaggccaagaatctgctgaggttcccccgagggagcgactgatgccaatgctctagacgcactgttgggttatatgccctaaataaaactcatttcaatataatcagatttacttattaataaagttcagaaataacattttacgttgcatggttcacataatttatttcatgattatatgtacataatgcatgaattctatttaagtccagaacatatcaatttgttaatgattatagcattgtcaacacagtggaatataatcat

SEQ ID NO: 332810 - DNA, 605 bp, Cannabis indica
cttcaactccaggcagccctactgttcgacttctcagcttcaaacaacgaagctgaatatgaagccttgatagcaggactgagattagcaaaggccgtgggggccaaaagagtagaagtctacagcgactctcaactggtcgtaaaccagatatcgggagaatatcaaacgcgcggcgagcgaatggccgcatatgtaacaatagtccgggaactgctccacgagttcacggactacaaagtagaaagaatcccccgggaaaagaacgctcacgcggactgtctggctaagttagcttcagacagtgaaattgaaggactgggggtagtacccgtggaacgcttggcagagccaagcatcaaaataaaagaggccatagtaacggttgggcaagaacccaactggatggtccccatcatagaatacataacaaaaggtgagttgccccaagaaagggcactgtctagaaagatccagtatcaggctcatcgttatgtaatgatggataaaattctctaccgaagaggactcagcatgccttatttaaggtgtgtatcggaccctgaagctaggcaaattatgctagaggtccacgaagggttctg

SEQ ID NO: 332811 - DNA, 1245 bp, Cannabis indica
gcccaaccccacttggccagcaaagcctggttcatctccacagtctttctaaagccaagccccccacgggacttgggaaggcacaactggtcccaggctttaagatagatgcctctattaccttgttcacagccccaccagaagtccctcaccataccatcaatcctagatgcaagctttttagaaagctttgtcgtctgcatcgtgtaaacaggcaaagcaagccccaccgatttgatcaacgtagcacgaccagcctttgataacgattttaatttccacccatggagttttgacaccaggttatcaaggatgaagttaaaatccgcatccttttggcgggatctaaaaagcgggaggcccaaatagtttatgttacccatttcacagttcaatcccagagcctgcctgatgcctcgtttcataccatcacttgtgttaccgctaaagaaaatggaggttttgagcttattaattctctgaccagaccaatcacaaaacttttccaggcaatgccacataccccttgcttcttcaaggtttgccctgccaacaaggatcagatcatcggcaaagaaaagatgggagagtttggggccctctctacttagctttataccacttatggtaccgttatcaagggcgtgctcaaggatgcgcgagaggatttcagcagcccagataaagatgtacggagatagggggtctccttgtctaatgccacactccggggtcaaactgttaaatttccttccattgagaaaaaggttgaaggaagttgttgtgatacactggcgtacccagtggcagaacttgtcaggggccttgaaactacgcaaaacgtggtcaataaattgccaacttagtttgtcgtacgccttaaccaggtcaattttgattgcaaaaaacccctctttcccttttttcctcttgaaggagtgtatgatctcctggattaaaacattattatcttggatgttccggcccgggacaaaagctgcttgagtaggacaaatcaatctgggcaggaacactctgattctatttgcaatgattttcgagatcaccttataaatcacattgcacaaagagataggtctgaattgggatacttttttagggttggggaccttaggaatgagagtaatatttgtagcattaaagcctctatgcatattccctgactggaaaaagtccacaactgcatcacaaaagtcttgtcccacagagttccaatagtgtttg

SEQ ID NO: 332812 - DNA, 552 bp, Cannabis indica
tctcactccctccacagactttttcctctattttttcttattgttctctactacaacagaaaaaccaaaagtgaaaggatccaaatgaattgaatcgaattgaactgtggttgaggagttagcttaaaataaaatcttaccgaacgaatttgttgtagttcgacccgctcgcctcgtccaatcgactacaaatcgtgctgaccttgaacgaatcggaccagtcggatcaatcgttctccatcgtattgaagagcctcgactaattgattgttcatcgtgctaggcttgaacgaatcgaccaatgggaccaataaatcttaccaaacgactttgttgtaatttgactcactgacctcgtccaatcgactgcccatcgtgatggtctagaagattctcaaatgggtttagaattaaaaatcggacgaaccgaccaacaattcaatttgaaactcaatcggaccaatctacaacctagtcatcaagaactccccatacactgtacggtgaagttcaaatcgcatgcaatgacgattgaaacttactcttaaaaaa

SEQ ID NO: 332813 - DNA, 702 bp, Cannabis indica
taaatatactctcaattttgcttttaacgagttatccctcctcaagtgtaattataattacgtgtcttggttcatattcttcccagcttgacatgtgtcctcctctaatgtgttagccgaattttgggtataacaactaccatggctctaaggccagttgttgggaatattttaccaggatctagatttactaacaagtatattgaattaacatcctgaatatgaatatctctaaaacaatgaaattaaatacataagagtttagaaaaccttacattggtttcaacaaaataacatgactccttctgctcagatctctaacccttgttcctttctgtagcaaagtattattaagatttgagcctagatctttttctctccttcgggttggttaccacagtctttcacactatgattgagtacttggcttactatgtgtgggcatagcactctatcactatgggcgaattggttgaagaacaatgaaggagggttcgaatcactatagaaggtgtctctcatatactagttgtctgacagagttagaaactagattttggcaggttgaaaaagttggataagatgagagcatattaggtttgaattatatggattaaaaagaataaaatattgggcaaaaatgacacactaaggctggccactaaacgaccattttctagttataattttgtcactttattt

SEQ ID NO: 332814 - DNA, 609 bp, Cannabis indica
tttttctatagcttttatttttctgtttgaaattattatcgtaaggctcaaatttggttaacgaaaatctacgttaacagtttggtgctttcattgagagcctctatgaaaaagctaaaaaaaaacctcccttctttcaaaaaaataaaaaacaacctccttcatggctgaaaatccagaaaatgttaacaccccacatgagaaaaccaatcatcattctaggaaagagcccatgggctccaaaagacctaccaacccacagtccagaaggaccatttgttccaggagggttcaacccaagggtggccctagtgcacggaccacacattctcagagaacttgacccgacattgctcctagtacgcggacaacacgctcgaggagaactcagtgtgggaacggtcaaaatctcaggacgagggatgaagagctcaatcgtggaggtgccaaatttttgggagaaataacttatgaaacaaaaagtcactgcctgagacgccatctggatgaggcgcaacgtcaaaatgctgagttagagcgtgaggcagccttggccagggcagcacaagggatgaatcccaaaattaacctgaacctagagtgagaaga

SEQ ID NO: 332815 - DNA, 1373 bp, Cannabis indica
aggttgatgaagaccctgagcgacgtaatcctcgcagccggccgtcacgagacaatgatggaatccgcctcttcatcctcgcatggtcgtacacctagcagatacacaaggtccggttctgtggagacgcaacagggaggacgatatcaagtccataggggcgatctgcgtgatcacctcaacgcggttttcagagcgcgctcccgcgcccctcgtgacgaggaaacaccccgtgatccccccgtgggcgatcaaggtgtaaacactcgcactaacccgcctaacgcaccggcagcgactactggagttaatatcccagcaaacctcgccgcagtagtcacgactcctgcagtcgcagcagtctcgactcctgtagctggaggaattgaccaaagcatgcttttgcaagctttgaaaatgctcgagcagcagagaaagcccatatacaagctgcatgggacctctccttttactgcggaagtgcgacaggctcaacttcccaagggatttcgactgtccgaatccctaaaatataaaggtacctctaatcccatagattatttagaaaagtttaacactataatggaagtggatcaggtacctcagctcgcgaaatgtcgcattcttgcggcaacgctggaggaaaacgcccacgattggttcacccaattgcctgaggcctcaatatcgacatgggaaacctttgtcgacttattcctcacgcattttcaggccacgatgacttataggcctccctatactactctggccaacatcaaacaagaacccggtgagtctttacaagactattttaaacgatttaatgcggaagtaacaaaagtcgagaaggctcccgagtcttcgcttgtttgtatgttaataacaggtgtcctgccaagaaccgatttttggaaggaattacaagctcgaagaccagaatcactagtcgagttcttcgctatggccgaacctcataagagaattgagaattctctagcagagttggaaaaaggcaaggacaagcgtaagtcaccagtgccgcgatcatgatctcgcagtccccgagggaaaaattccagaggtcgaagcccaagaagacgcagcccacggagacagcgaagcccgaagttggccaaatctcctccaaagaaggagtcttcgccgaaaaggaaaggtggaccacgcttcgtgaaatataccgaactcgcggtgccacgagaccacatctatgcaattgaggaaagaaatggagtcttcaacaagtcgcccctgatcaggggaaaccgcgacaagagagaccctaagaagtctcgtaagtaccataaagatattagtcacactactttggaatgttgggtcttgcaggattaaat

SEQ ID NO: 332816 - DNA, 703 bp, Cannabis indica
tttgtttgttcgggcgggtggggttcaactcggtacactttcggacgggttcacaagttggtttttatggtcactgggtttcgggttgaacccgaacccacccgccaacccggtcactttttatttttattttaattttattacatatataatatattaaaaataaaaaaaaacctaaaatactaatcattttattttattacatagataatatatgaaaaataacaatatgtaatatattatatatactttggaacttaacttttgtattttaaatttgaaattaataaattttttatttatgtcatcaagcaattcccaatcatcctcgtcaccaactgacataattgtacctttacatgtgctcctccaatattctattgtgtaatatgacgaacataatatgtacatgctaatacttcattgctgagctgcagcacatgcatgaggacaaggaaacttcatgcaatggaacaagccgcaagtgcaaatctgttttcgcaagtccactacgccatcggtctcaaatgtttctccagggtgaacctgcaacatgtaaggtccacatgtgtcaacgttcaaatatcgagatttttcaaattgcaatgccaagtcctcctccatttctggtgctagggtcttcgtccacttgtcaactttttcttttcgtgcagcaaaccattgttggactttggacctcagg

SEQ ID NO: 332817 - DNA, 872 bp, Cannabis indica
gcattgatgatgaagcctagaaactttcccgagctgactccaaaggagcatttttaagggatttagtttcatgttttatttcttcaggactttgaaacattcgtccaggtcgtctatgtgccccctagcctttatggatttgacgagcatgtcatccacgtacacttccatattcctgccgatctggtctttaaacatcttgtttaccaatctttggtatgtagctccggcgatttttagaccaaacggcatgactttgtagtcgtagagacccatatcttttcggaaacttgtatgttcttggtctggcggatgcattttgatctgattgtagcctgaataagcatccatgaagcttaatatttcgtgcccggctgttgcatcgacgagctgatcgatccttggaagtcaaaaacagtctttagggcatgctttgttgaggtctgtgaaatcaatacagactcgccatttcttgttcggcttgggcacgagtacaggattcgcgacccaagtcaggtaaaaaccttcaattatgaagttgttgttgcgcagcttttcaacttcatctttcagggctactgctcattctttattcagcagtcttcgtttttgctgaactggccagatgttaggatcgatattcaggacgtgtgaaataatagaatggttgattctgaccatatccgcatgtgaccaggcacaaacatctaggtttgctctcagaaattttatcaactctgattttacttcgagcaacaaaccctttccaattttttgctttcaggccgggatagctcaatcgatctcgatctcttctaactcttccataggtccaatattgctactcgggtccccaagtcgaggatccacat

SEQ ID NO: 332818 - DNA, 793 bp, Cannabis indica
atataaagtttgcttattagttatattatttatttttacttttgtggttgactgaaattctaaactcgttatttttctctttatatcttttattctttatttcttattattctcaaataattatcatggcatcataattttcgcatggtgttttgttcgtgatgttgattggtattaatttctttgagtttcatattcgcagtacaattgagtttcataaaaacgttgattgatatcataagattagacctcacggtcattacataggatagagttagggatagccgagggctccacaatacctgcgatagtttgagcaaaggctcatctagcgacattgtgagccacaaagttacaacttctagaaataaaacaaaaattacatgataaaaacttcttagagagttgattacaagcatacaaataatgaacaatgttccagttggactggacacctttagttgcatttataaccacttctgaatcactctcaataataataaatgcatgcttcctcgtagcagcagtttccaaagcaagctggcacgccgccgcctcgccaatcaaaggatctgtgaaattgagtatgttggccacaccccacaataccgtccccgaatgatctctagccaaggcagcaatgcacatggactcacaacctagcttttaataataacaacaattttcttatcatataaattagaataatagtagtgagaagctgttgttgatcatgtttttcaccttcaatttatgccttctaatgcagcaaagaggaagtggtagcttccac

SEQ ID NO: 332819 - DNA, 531 bp, Cannabis indica
tactaaaaactttccatattaaacattagctattaaaagatattatttttcctataattactaactattttgccaaacaagatatgagaaattcatatgtaaataccgtctcatatccaaacacaccttgcattttaaaatatagtgtaattactaaactgtataattactacccttataattaccctacctagtaattacacagttacttccaaacacatgtgtttaaccttatgttccaatacacaattgctattggacttattttttatttttgtttcaattatatttatttttgacataagaaggagaattgaatttaaatacttggtaaaaagagtatttattttttttactttttattttagggataaaggtaaaaaaaaagtatgttattcaagtttattgacagtttaatttgttttaaaaaaaatgattattttttggtaactcacctttaccaaaagagtgtttcgataggttttatatctgtttcgacatttataagagctttttagttttttttttttt

SEQ ID NO: 332820 - DNA, 555 bp, Cannabis indica
gggcataaaacccaacaagtctgtcatctattcacctgtgcaagaatcctgtatatcatgagaagagcaagcacattgacattagattgtattggactcgagagaagattgaggacagggttctggaatcagaaaaggtacacacaagtgaaaaccctgctgacatgggaacaaaggctctcacattcagcaaactgatgcattgtctcagtttgctgaacattggttcttgttgaacatttcgagatttcacatcatcaagacttcagtgaaaagactctgataggttgctttagagaatcaaggtggaaatttgtggaaatcgatcctctaaaccaacctattatccaactccttaaaccaactaacttaactaactatcggttatgttagttagttagttggtgctatccttgtttgagttgggtctatatataagtctagtctttttcactttaaggagcagagcaacaaaagcttgaagagagagaataagagagcggatttgagagttgcttagggttctaagctgagagttctgttcttgaagagggt

SEQ ID NO: 332821 - DNA, 700 bp, Cannabis indica
aaaaataaagcaattaaataagataaataaaaaaagtaaaaacagcaaagtaaagtaaacaccagattttaaagaggttcagccccgtgaaaatgataatgtaacatcctaactaattaggcatgtttacgtgatttttaatgtactgtgcatctcgttgctaatcaacgagattaacgaacaaacgtgattaattaaaatttgcttaattaattaaaaacttaaagtattacatttataaaattttgggatcccgttacaaaatacatgtataaaattttgttatacatacacaaaagttttgtcgcctagcaactatacagtaaaagaccctgatgtcccaaagatcgtacgctccaggcctaactgccccgacatgtacaatcttcacctgcttgctctcacggctcctccgctttagccttgcccttacccacacatggaagtaacactgtgagtcgacaaactcagtaagaaaagcataacataaaacatactactatcccgggttataacctgtcgcccatacacccgatcataaccctatccctgtgtcccacacggtactgagtctagaacattcatacgacaatactatcgaccataatgtccgcctatactcaatatgctagtcatactctagccatattgatgtgacatcatcgatcagtattttagccaacatacatttatcagtaat

SEQ ID NO: 332822 - DNA, 622 bp, Cannabis indica
gtataacaattgcgccttaaaaagtccatttttaataaaaggtgctttttatatgattatcgagagtatttttgtcataatccatttttgacaatatgcatgcctttgatttttgcggttttgtgattttgagggacatcattagcattaatgagccatcctttccacttctctatcgtttttattggttggatcttttacattttgatctgacgattattaacttcaaagtataaaatggtaaagaatttatttttaccatttttgtgtttttaaaactcaagctttctgaaaattttcatccaagcttcctgaaaccgtgcatgccctctttatctttgacattcttcctgcaaatttactcagacttgctctttgactccatgtgttccaaaaactcatcacgccgttcatcacgtctccatctacaaaattttccaacacccgactactcaacttcacacaataagtgtctcatccccttctctttttttaagttttctgggttatgattttcttgcattttgtcactccattaggtttagcaattagggtttatgttttctgggttatgattttcttgtcattttgtcactccttaagtctctggtttaataaattt

SEQ ID NO: 332823 - DNA, 1044 bp, Cannabis indica
tcgaataaatatattacatctgcttcagctatttgagatcgcttctggtcaacaagttaatttcagtaagtcctctgtcttcttcagtactaatgtgcctaatgctagtcgagaccgattgtgcgggatccttaggatgagacttacagatgaacatagtacttatcttggcctcccttatgtcatgggaagaaataaggatgccattttggggtttttgaaagaaaaaatgcagaagtgcattcacaattgggagggtcgtttcttgtctaccactgggcgtgaagttctgataaaaactgtagcacaatctttgccaagttttgcgatgtctgcgttccttttgcctttgaaaacgtgttcacatttggagagccttatgtctaagtattggtgaagttcgagtagtcgaaaaggtgtgagctggtttagttggaggaaactatgcaaaaataagaaagcatgtgggatgggttttcggagtttgcgtgagtataatctatctttgttgggtaagcaaggttggcggttattgctgtaccaggactcccttgtgggtaggatatataaggctcgatattttcctaactgttcattcttgggggctgagtttggtggcaatccgagctttatatggcgcagtgtctttgaggcacaaaagctactcaaagatggtgtccatcgaagaatatgacctggttcatctactgaggtgcctaacagtccttggcttttgtttgatgctaacccgtgtgtggtgtctaatcatccggcactaccaattgtaaagtgtctcaactcatgaagccagatagtagacaatgggacttggagcttattgaggacttgtttgattcccgtgatgttgagctcatcaaacatgtgcctttgtgtgttaatcttgtgagtgatagttgattttgtaacaaggatccaactggttttttcattgtcaaaagctcctataattacttacagtcggctaatgatagttggaattcatccatggaggatgatgtttggaaaatgttgtggaagattaaa

SEQ ID NO: 332824 - DNA, 492 bp, Cannabis indica
tagtacataaaaattactgaaacagtacatgtcaaagttcgggcaaaaattactaattagcctaaaataaattaaactcgatattgaattccactaataataatattacacatcagaaagatgctaaacaccaaatgtgtcttttaacaattctttttttatagtatggagacgtggacggttaataatctcatggtggtaggagaacgggcttgggatttagaggtggtttcggatatattcaatgaccgagataaagagattatcattcgaaccaacattgatcaggagactcctattgacacttggtattggcataaggatctttatgggttctatactgtgagggaggcatatcggttgctgcaccattcagagatcactaatactagtgagtttgagattaagatatggaaaattgcatggaagcttcatgtccctcccaaagtgtaccaactcatgtggcgtgctttatctggttgtttggctact

SEQ ID NO: 332825 - DNA, 1219 bp, Cannabis indica
taaacatttctaaagcatcaaaaaaacccagaaatcacagatatgaaaaatgccatgtgagctccaagctttgagttcaaaactcaaacttggctaaagctcacctgcaagcattaaaacctgctccattcaccatgattcaccataaaattactccagaaaaggaacccaaacataatcaacaactacagtagcttaatcaacatttcaccattgaaaaatacaagattttgagtttaaaagcttcacttatgcatagaccaacaattaacaacataatcagttcaaatctattcaatcaagcatgcttaaactttagaaaacaacacctaatcacagcagcaacaacaactcaaaaactacacatgcaacctattcaatttccttaaacattcaagaaaacatgaagacaatttcaagaaccttacctacaacttgaattacacttagaatggttgaaaatgcttgaaaaaccaaggaaaactcccagccctagcagcccacatcaaactgagagagagaaagagaaagagagagtttgaatttcctaattttccaatttttctaacttataataaaatgaagaataaatgataaattcccttcttatttcagccaacaaacaacaattaaaatcacataatcacattacacttagtccactaaaggacaaaatatcaatggggcaaaatggtcattttgcccctccacactaaaataacataaaggggtactaaagggtatttttgggaaattctaaatttccgactaatcccgaaattcccaatgtctaataaacagccccaacatactaacatgctaagttgtgattctactgagccaaacactgagttccatgttaccgagcatcgaaaatgcaaaattatgaaattcactatatgacataaaaatgcattccgaattcaaaaataacagcataaataattatttaaatatctataaataattttcataattaatcataattaactgctaatttccaatttaaactaagtggtctttacagttcgtccacggagggtgagtcagggcctaagatcaggccaaaaggcgtagtcgatgcacaacaagtgaatattcctgtactaccccttgttgggcccgagggatggaggaggctaggttagccgaagatgaatggggctaaccgatctgccgaagctgtgggatgtaaaaatgcatcggtaggggagcgttc

SEQ ID NO: 332826 - DNA, 552 bp, Cannabis indica
gttgtgagacactaaaactctacctatattgactaggagtggtgtcgtcttttatgagaattgggacttattctctagaaagttcataaattggatttgtgcacatgactattaacggtgcaaaagcaatccataaagttcttgagtgaacatagcaaaggtgtgtgtgttatcaccagcttgttatcaaggaatagttgttcaatgctacgacaaccaaaatctcgacaaattttgtggtaattacactaaagtaaaatttaagtcgaaagacatattacactatgcacaaatgcaatggtttttattagagtgaagttatttaatcaagtggaaaaatattatattactctataatataatgtttgattgattaaataaaatattgtgttataaaattatttgctacaaatgagattttatttaatctagtgagggaatgttatattattttatataatataatttagattaaataattaagtgtgacacattttatttttgtcaaattgtagcatacattatggagttacaaaatgtgtgtagaatgat

SEQ ID NO: 332827 - DNA, 914 bp, Cannabis indica
tgaccaatgggtcatgatgagggaagcgcaccgtcttggcgtcttcttccgtgaacgtgatgggttggtccatcagccggggcctttgagctgggagttgagtaacctcccaaacctcattatgtttcacggcccctgcgtatctttgagctccttgcgagtagttcctccgatatggggacctccggagatcatggctaccctcccgttaggtctgggcggcagaccggggatgtgctgggcgtcgcccgcgggagcagctggagctaacgctcctgctgtactccccggtgttccctgaggcacacccacagtcgcctggcccggattgaggtgaggcagcctatttttgatccactcatagaggtggcccaaccggattaggttttcaatctcgtccttgagattcttgcattcattggtgctatgaccaatgtcgttgtggtactcgcatcttttgctcggatctctccaagagctatccttgtacaatggttgtggtctccggtagtgtgtattttgtctagtagcaaagtagacacgctctttggaatccgacagctctgtgtattgggtgtactggggagtgtacccccttttctgacgttctcccccgtctgggtgctgcccttggaggatcttttacttctcgagccttgggaagggcctgccaggctagcggtcggaacggagtgcgaaggattttgtccattcattccggacggtttgccgaaatgggaggaggccagcgccaaggcctggccctgactatatccgggggtggcagagaattgtatgctgcttgtctgtggagttgcggtcgaggcagtacccgaggtcggtactccgggcatgtaccctgctatcccggtgggatagtatcctccataagccactatttgggcttcttcgag

SEQ ID NO: 332828 - DNA, 594 bp, Cannabis indica
tttgctacttgcatatgttatttcattatatttgctttctttttaaaatgcaggactgggttaacaaatacagtcccaatgatttctacagatcgaagtgtgtgtacgagtaatttttctgttattaataacattaagaataccttgtttgtgaatttgttaactatgttccgagacaaccagtttggtcattttttgggatatattagactttgtttttcacccccaagttgttcatagcctacttttgagggaggtttaccagcccaatcccaaagaattttgggctaaggttgccgaggagtattacttgattactggtcttgattgctttggcgattgcaacaaactattgttttcccatgaatcaaaccagttaattgaggtttgtttctgtggcataaaaaccattgatcataaagctatagaggatgctttcttaggtagtaggtggggacaggatgagtccctaggtttgaaactatctgctttgtatttcatccaatgttttcttcttagcaatactccggataaggaaatttctaggtttaatctagatgtccttgacagcggtcgatgggatgagtattgttg

SEQ ID NO: 332829 - DNA, 804 bp, Cannabis indica
cagcaaaggcagaagagtttatacgattgactcagggcagcatgattgtgacagagtatgtcactaagtttgatcgattggcaaaatttgcttcagatgaggtggctactgaagctgctaggaaagcaaagttcattcgatggttggatgaacatatcgcacgggatgtgattgttgcttctaaacaaccgggggttgctcgaacttatgcccagatagttgaactggccctagtttctgagggtgcaaaagatcagatacgaaagaaaaatattgccagaagagattcatggaagaaaacatcaggtgctggttctggtaggggtactgatctcggtgactgcaaggaaagacctagtgaatcatcaactgtaggcccaaacaaaaggttccagggtaaccaaggtttccatcgaggtgggaacgaaaattggcaaactttccctgaatgcccgaggtgtaaaaggcgtcaccagagcgagtgtcaggctagggcctgtttccaatgtggggtagtgggtcacatgaagaggaattgtctacaactgctacagctagagcaaaagaaggatgatacacccgctcctgcctgagtgtttgccctgactcaggctgaggctgatgcttgtccttcttctataataggtcagctttttgtcgctggtactttattgactgttctaattgattcggtgcgacgcattcttttatttcaagtaggataattgagaagttgaatagatctagtgatgtactttctagaggttttggaactttgctgcctactggggagttggttatctc

SEQ ID NO: 332830 - DNA, 682 bp, Cannabis indica
atcagtgtaaatctaatgcactgatgaatcgtgaaacataaacttttgaagcatataatcacattaccttccacttgattgacatcactgtaattgtgaattaacatatgttctagatatatcagaaattgtatattaaaccttaaacctgaaaactacatgtaaacataaatgatttctaatcttctattgataacgaataagattatattgaaataggtttatttaggacataaaaatcccaacagtgactaagaataaaagccatacaataatacttatcttttgagattctttgacgttaaattgctaatgaacgaacatctattaaggatgaatctcactaaaataagaactatgtagaaccaacaatggagatagaatatccttataactaaagctcattattttaaggggtgtattttcttttgatacttatttcaatttatttattttaatattaatatatttatttaattaaaattactaatttaaatatctttaaatatgaattttaattgaacatttataaaattataccctaaaaagatctgaaaaataaatatttatttaccatccttagtgttaattttttaataaatattatgaaatttacttaatttaagtgggtgtaaaattaattaaataataaatttttaactcaaatttaattttctataaa

SEQ ID NO: 332831 - DNA, 650 bp, Cannabis indica
aatagttctagctttttttttttgatcaagaagaagaatacttcattaatctactcaacaaatacaagcaaattcacttctacaagagaagcactacctcaactccacctaattacaaatcaaagtatgaatcaagttcttctccttcctagaccacttcctatttttaatcaataagagtttatacttcacttcacatttaattgtatttacaatgcaatttacagaattggaaaaggaagagactaagcaaatgtttcagttccaccaaagatggtagatcacagccgcaagcaaaaggaccattatcctgtccaccatagtcggcctagggaggccaagccaaactctccaactgtcatagttctcggaccaaccaaccgtgcccaaccattgaaatattttgtataagaccaacaaagaaagcctgcacttgaagaataagtggctatgactctccggttcaagatcacaaaccacacaattcagattatacatagggatattcagcttgctaagatggtcccttgttaacaacttgtctggttgcttgccaaagttggaaagcatgtttaggcatgttcaaaccataccatatagcccctgctgcaggaaataaaagtctgcttcagcgagctgcaataaaatct

SEQ ID NO: 332832 - DNA, 558 bp, Cannabis indica
acttcaatcccccccagtatcggggacaactttctatcctcggttacccgtgcaaccttagtcgcctctgtcatgaatctgctgatgcaggctcagagaggctccctggtctttgctttacttcgacctgatctccttggtgcaacggaagttggcgagaggaggagaattgtgcatggaactgcgaggagaaagccttccatgagttgaactttctgggtgcaaacttgaaataccattgttgggcggcttctaaaagggtggcaggaaaaaccctgcaacatacatctcctcgtactcattgcaggtccatttgcatctcgaaatacttgaggtgggataagggatcttccttcccagtataaatcttccaggttggcatcttaaacttgtggggcgattccaggatattaatctccggggagaaaggggttccacctgctcggtccaactcaagatcgttgttcctctgaccggctaggccttggaacatatattttagttcgtccaactgtgcctgcatgggtggactaacctgttcagcctcttggccgacct

SEQ ID NO: 332833 - DNA, 1455 bp, Cannabis indica
gtttatttagggcagaaaatccaacagtaagtataggatatttaagggtagtttcggtgttaccaacacaagtaccaaggggtacggagtgcatgtggtcaacactcagtaactcccaaaagtacagtaatggccctaccaacacgagtacggagtcgatactctagtgcatgtggtataacggtcgtactttcattgagaacgtttttaaccatttggtgagccttgcgtttaggctcaagttggcttaagtacaaagccagtatcgcatgcttatatatgttttatgcatatcttactgagtctgtcaactcatcagttttctaccttgtgtaggtaagggaaagactaaggtggaggagcagtgagttggagctcggtaaggattgtacatatcacggcagtacatcccgaaaggtttcggtcttactgtattttgagtcatattttgttgctgccctatggtttgtaaaaaaattaaattatgtaactatattatggtatatgtatttttcaacagtggttttaaactcgggatcccaacttacgaggttttataaatataataaattatgtttaaatttcaaattagtaaattttcaagtatgggcgttacaattttggtaccagagccaccaggttattcactgaagaccttcaagatatgtaaaatcaaggccagtgtcgagctcaactcacggtttcgtaagcttttacctgttagcaaactatttaagttgtattgtaattatgtgtgaaacgtaatttaaaccctaaatgcggtcttggaaaatacattgaccactgtctaacctacatgccttgtgggttcgcaggctaagtcctagataatggacgcccagggaaacgtaagaggttagggtgaaatggttgagactagaggtggtcgaggtggtaaaaatccccaaaactcccgtggacgcagtagaggtcgcagtcgtactcaaagaggtggccaagagaatccaccccgggctcctttcgattggaaacagaggtttgttgatatgcaggcccaaatcacttagcaagaggaagagattcagaaacttagacaacgggatgctcttgttaagcctcccctgcaaccacctactgttgtgtttcttgcggtgtgttatagtgagatttctctcacctagaaactcgagaccagactcctctttaaaggacacgtgtattcagatttccaatgaaggctgaatgtccgtgagagatttctcgaagtttagacctcgcgcaggctaaaaatagcgagatactgtaggtgcgacttaagtcacaccgcataaccataattctcatcatgcagggtagatccaattcgcatatgtcagaacatgtgcgagtgtccccctctatacctccgcgacgagtatagagaccaatgccctatgatgcagttttggtcccagcgacccaatagccctaaca

SEQ ID NO: 332834 - DNA, 542 bp, Cannabis indica
cctatcatgttactaggtttacacacagatgaaagaagattgcaaaaatttacatgttacaaattatttatttgacctattgacaattgaaccattgattaaaatcagatcattggattggtcaacaagttaaccatgacaatttagatcaaacaataaaaggctttataaaaaagaagttttaataattaaacaatatataaaatacacacatgcaacaaactagatagttggatataggatttatttaatttaaattaattaaataattaaattattttcaaaaaatctaaataataaattattatttttcaaaataataaaattaaattaaataattaatttaaaaaattaaacctataaatttgaaaaattaggttttcaacaatcataaatatctattcaaaagatgtcgccatgtctgtagtctgacatgtacgggcaaagcttccccgtgatacaaaatgaggttacaactcagctagacttcttacgcaacctatatgggcgctttgtgggaagaattgttggaattattttac

SEQ ID NO: 332835 - DNA, 546 bp, Cannabis indica
agttcaacgatcttttatatctaattgaactctagatcatattcataactccacatgatctctataacactaagaggtggatcataatctctatatcccttaggggtggattaggtggatcataatctctatcccttaggggtggatcataatctctatatacttaggggtggactatactattgaaatatgtagtttattttgaactctggactatattcagtacaccaaagtactctttgtcacacatattttaaatatggatgtaatataatgaattagcaaaattatcagaaaaaattcttgatcttgatttatgttccagtttaatttattattgttgcaagagaaattgatactaataaaatttctttgacattgtatcacactaccttaattgaatgggagaattttaaaattctttacccatcctcatttggttgacacttgtgataggaactttagaacactactgagaaagtaaatctaaccattcatatggatagaaataacttattaggattatgagaataagatagtagaatt

SEQ ID NO: 332836 - DNA, 927 bp, Cannabis indica
gtccatgcaatagccttgttgtgtgcctgaagtactctgagcaatctatcagtttccacatcagaaggtgaggttgacactataactggcagcttcttatcttctcccaagaactcatatcgtagatgactgggaagcaccttcaactcaagctctggaggtttttcagtagatggcacaagctcttttggtactactcccaattcttcataatactttctgtttaatggcccataggaatcaagccatttaacataacccgtcacttcttttccttcttgctttgtcaaatcatcttcaattaaactcagttctaaagggtcatctatcaactttttctccttcgggtaagtcatggcctttaacacattaaaaaccacttcttctccttggactcgcagctttaattcacctttctgaacatcgatcaaagcttggcctgttgccaagaatggtctcgcaagtatgattgggacattgttatcctcttccatatccagaacaataaaatcagctgggaagatgaacttgtcaactttgactaacacatcctcaatgactcctttaggatgagctagtgatcgatctgccaattgtagagttaccgtggttggctttgcttctcccaactgcaatcttttaaaaacagacagaggcatcaagttaatgctggctcccaagtcacaaagcgcatttattccttcaattctctcaatggtacaatgaacagtgaatgtaacgccctaaataattaggcacgcaacccaaaatgcttatgaaaccctaatcccctaatcgggattactaattaaaatagcgcagaatttaaacttttatattaaatagactgaaaataaacttgtaatatatttaaattttcaaaatagttgggatcccaaaaatatttacaaacttattacaagttct

SEQ ID NO: 332837 - DNA, 697 bp, Cannabis indica
atgcttaagtcagtaaggtgaaaagatatgataaaattaaagcttaaattgaaaataaatttgaaagtttagaaatgatactgtcttaggtgaacagcgttgcaactgttgcttatatcacgtccatctgatgcttagagtttgtaggctccttgtccgactatccttgagatcttgtaagttccttcccatgtcggacctaattttctagttcttgcttctctcatatattggaaaactttccttagaacccaatctccaacgttgtactaacgaactctgatgttcttgttaaaatgttgcgctactttatgttgatacgatgcgacccttatcaatgcttgttctctttgttcatctaatgtatcaagtgtgtgagccatattctgccagttttcagcatctattgtatgttcaaatcttgtggttgggagccctgcctccacgagaatgacagcttctattccataagttaaggagaaatgtgtttccccgatggaagtctttgtcgtcgtcctatatgcccataacacccctgggagttcatctgcccatctacctttggccttgtctagaattttctttaaagatgccaccattgtcttgtttgttgattatgcttgtccatgttggaaatattttaccaggatctagatttactaccatgtatgttttattaacaacctaatatgaattc

SEQ ID NO: 332838 - DNA, 636 bp, Cannabis indica
aaataagagtctgtttgaaatggctatggagattccctttggaaacagacacgctttggcatagagttataaaaagtcgatacgaaatgtcagacaactcctaggatactaaaacaggggaaagaatgtcctctcgaggaccttggaaaggaattgcaagtctatatggtgaatatttaagtttggttccatttcaattagggaatggagagaaaattcgattttgggaagatgtgtggattggacagaattctctattgacctcctacccggatttagccattttggctagatcaaagaataagtgcgtcaaagacatggcaataattgaggaaggtggcttcagggtgactaattgggactttaatttcagaaggaatctgttagacagggaagtcccaagtttaatggagctggtgcagcgattggaacatgtgaacatagctcattcctcgattgatagtaggggttggaaaccagagtacggaggctctttctcctgcaaatctgcctttctttggctcacctcaagtcacgaatcaagggacttcgaatggaccaaaactctatggaaatgtagcgctccggtaaaagtaaaagtttttggatggttagtggctctaaggaaagtaaatg

SEQ ID NO: 332839 - DNA, 602 bp, Cannabis indica
agccccatgtcgtgggtcaagatctggatcccaatatttggtccgattcggatcttgggtccctgtccgtgtccatgtccgggtccaggtttgggaacgaggccggggttggggcttgggtcactgtcccagtcctgggtctcgattcttgttctaatttttagtttgggaccccaatctaggtctgggtcctgggtccaggtttgagtctccaatccaggtccaggtcctgggtccgggtcttggtccaagcccatgtctaggtttgggttcgtgtcccgagtcttgattcaagttgtaattcggatccgcatctcgtccgactctagttctgggtcctagtcagattctagttcctagactcaaacccagtcttggactcagacccaagtctcgggtacgggtgtgggttttggtcagggtgtgagtccgggtctgggtttgagtccgggtatggatcccagatccaaagactgactacgggtcagttccaagccatgaggtcagggtcccagtctagttcgactttgggtcccaggtccgtggtgcgggtcctggttagggtccgaatctgaggtcgggtctcgctcccaatttttatg

SEQ ID NO: 332840 - DNA, 473 bp, Cannabis indica
acaggttcgcagtaagtcttccaatatctgaattgttctttgtgactgaccatcagtctgagggtgaaaggctatgctaaactttaacttggtacccatagccttcagaagactcacccaaaattttgatgtaaactttggatccctgtgcgacacaatagatttaggggctccatgtagacgaactatctcctttacatacaaatcagtgtactgatccactgaatatgtaactttgaccggtagaaagtgagctgattttgtgaatctatccattatgatccatactaaatcatacattcctgtagttttaggcagcccagttataaaatccattgcaatgtcctcccacttccacacaggaaggaccaaatgttgcaataaccctgccaacctttgatgtttagccttgatttgctggcaggttaaacatttggacacatagtccaccacatctcttttcatcccatacc

SEQ ID NO: 332841 - DNA, 703 bp, Cannabis indica
gagggcgtctcttttgctacaccggaggcatgtttaggttaacattcaagacatgtgtgatcacatgggggcttatgccagacatatccccctggcaccacgcgaaaacatctatggctgcccttaacatttcaatgatcttgcttctttcctccggcttcaggttcttccttaggcagatgactttagtggggtcaaggtcgcacatactcacttcctcggtatcctccataggttctacagctgtttcggatcccacgcagggatccaactcgtcttcttctatcaaacttggctcttcgtccccgtgcaccaccaatactgataggtgcatcgcgacattgtatttgaaagtgctctgtggggtgtctaggcatagggtgataggaagcctcattttgcccattgtgataagtgttgttccattaaatcctgtgagctgggagccgctaagcaacagaaccctattcgtgagcctatggccatgaaggcttttttgaacaatagattcacgaagctcctgttatctaccagcattctttccacggccttgttggcgatgggagtgtctataaccagagggtcgtggtgagggaagcgcaccggtttcacgtcatcctccgtgaaagtgatgggttggtccatgagcctgggcctttgttctaggagttgagtaacttcccatacttcatcgtgttttatg

SEQ ID NO: 332842 - DNA, 672 bp, Cannabis indica
ataaaaataagacatacatgacctatgccgtaggtatcatagggattaggtgagagtaatctttatccttccttgattgatgtgattcttcataatggagccgtcactagactctttgattatcatgtaatcacaataaacgaagcttacgccatctgtcatatccttttatgggtcttataatacgtttcccccatgccgcattaaatgtgaaatgaatgttcgagcatgttccccttctcccggagatgctttgttgtatctctagctccaggagagtagaggcacgctttatgcttctctccgagggctcactccctgaagtgcacttgcttgtctatatataacttagctaatttcgtgggtgaggtgtccttgaaatcaacgtgcaacatgcagccactgccacgtattttggaaaaatctgaggacacaattgaattttttttgctgtattattggtagggttggtttcacttctttcactgtttacgcttattagggttgttgctacgatcaatttctaaccgcttattttttgtgtttcacagtttccatcatcagacaagggtcttttgttggattttgtgccctaaataaaactcattttaatataatcatatttactaattaaaaaagattagaaattattttatatttcatggttcacat

SEQ ID NO: 332843 - DNA, 1012 bp, Cannabis indica
acattgcttcacgaatagtttaatagtgatagaatcaaaagaagcaatgaaagagcataaagaaaaggagagatgattataagaaacaaaaaaagaaataagatatgtacatcggcatttacctttacgtagtgcaatgggaagatcatctttaagttctagatctgatgacgaagatgcaggtacaagacatgaaatgggaggtggaggaggtggacgcctagtgtacactataggaggcctaggaagtggtggaggtggtggaggtgtaggcattttgggagctatgaccgaggcaggtaacggaacaagagactcgtcagaacatgtatcagacgcagagaatgtgacagaatataccaacaaatcatcatcctccacctaacgaggagtaggtgaagatgaaaattaaggtgtattttctacaaaagtagcatcaatagaaataacatatttgttgagatctggacaataacacatataccctttctgaatacgagaataaccaagagagacacactttaatgccttagggtctaatttggtgacatgtggacggacatcgtgagcaaaacaaacactgtcaaatgcccgagaagcaactggaaacaatgacttacaaggaaaaagaattttaaatgggatctcaccattaagtacagaggatggcatgcgattaataagaaagcatgctgtggaaactgcatcagcccaaaaagatttagaaactttcatttgaaacaagaggacacatgccgtttcaagaagatgtctgtttttacattctgctaccccattttgaggtgcaatatcaacacaagaagtttcatgaagcatgtcattagaggtcttgtaaaattgaaattgagcagatgtgtactctatggcattatcacttcgcaaagtacgaacagacacattgaattgaatttgaatttcagcacaaaaagcacaaatacagaaaacaactcagaacgatttttcattaaatataaccaagttatacgagaat

SEQ ID NO: 332844 - DNA, 695 bp, Cannabis indica
gatttttcattaaatataaccaagttatacgagaatgatcatccacaaaagtaacaaaatacctgaattcaagttcagacaaaataagagaaggaccccaaacattagaatgaactaactcaaaaggaatactaccagatttattgactcgatgactcaaactaacacgatgatgtttggcaaactgtcatgactcacaatctaatgaagataccttactatactgaggatagagtttcttaagcaaagaaagggatgaatggcccaaacaacaatgagccttaaaagcagaagcaacactcggacaagcaatagaggttgctgaatgtggatcaagaacataaaggccaccagattcatgtcttttaccaataatcttctttgtcataagatcatgaaacaaacaattatcaagaaagaatgagattgaacaatttagattacgagtgagttgactaacagaaagcaaattaaaggacaaattaggtaaatgtaagactgatgacaaagtgagcaaaggtgtgggagccagatccaagaacagaagatagtgaaccatcaactaaagtaacaataaaagtgggactgagacaggaaaatttggagcaaaaccttataatgctccaatgaatctacatgtgcatcttacacgtgatggggaatcatttgaacatcttgagaaatatcacaaattg

SEQ ID NO: 332845 - DNA, 457 bp, Cannabis indica
tttttattttacagcttttattttttctgtgtgagactgtcacttttaggctcaaatttagttaacgaaaatctgcgttaacactacttcataaccaaaggttgatgatatcgatagacatcgttaatatgtatggaagcatcaataattagcagaataactcaaaaaaaaacccaaaattaaaccttatcatacaacattaacataatgttgttactgatatttcgcaacaccaaaaagtacaatttaactggaaaaagagagaataatttgagagatgacaaatgcgagtattcaacctagaatggcgagtactcgaataggaatgcgagagtaaacaacaaagctggaaaaataaatgagacggtgaattatagtggttcagtcagatttcgttctgcttagtccactgtagcaagggattcgtaggtccattttcacggtggatcaccccttt

SEQ ID NO: 332846 - DNA, 1139 bp, Cannabis indica
catatttaaaccattagcatgtaaattcatgcaaacatcaatcacttcaaatttcttatattgataactaatcagattgtaaagagttttatttagggcataaaacccaacaataaaaacgccatcatcaaagcgcttagtaatgattgcagacaacaggggctaggagctcatctcttttagccttcttcagggcctaatctttgaaatccctgagctccttcaccttaacggtcaagttggccgtcgtatgcaagtcagcctaatgaagctcttccatagacttcagcctggcagaaaaatcttcaacgacctccttagcctccctcagctcgcgcctcgccttagccacggcctcatcccgggtcttcagctcctccgccttggctgccagtgcctcccaatgattcctctccgcctgagcctccctctgttgagcctcttctcagaacgctttcctctcagccgccaaatctctcagacttttcatggcctcgtccatgcccccaaactcggacatgacgtacccatgattgattaaagtctttgagaggcgaacggtctctgtagcgatctggcaaagtaagaaaaaaagatttaagtataagagatcgaacgccagagtaaagcacaaaagaaaagaagaaaccattaataaagacttacgacggtcatagcagtgttgatatcctgaacctaatagattgagtttgtggaagcataggctgcgtatcgttttgccagaagttgggtcagattggagacaaaatggctcgtcaactcagaagcaaaaggagcaagagtaggaccgacgaagcagttgaaccagttcgtcagggggtccatgttcatgtcccaagcattcctaaaagcctcctcacgtaaggaattttgctgagcctcccgtaagcctttttagggcctccacctcggcattcccccttgtcgtattcggccatggcatagttatgcttggcaatccgaagttgctccctttcctcatcagcgaggatcggagtaaggatgatgttgggggggtacagtatattccttgggcttcaggagggctcccgaaatcagagttaacagccggagtggccacctcttagatttttggaagactcagcctcaccatcttg

SEQ ID NO: 332847 - DNA, 747 bp, Cannabis indica
gaccttttggttgtcccatcgagggtttcgaaaaatgacggctgtaattattagtttttattacatttatggtgccacgtcacaaaactcctcggtttttgtgtaggcgttgccatcgttggccgttagattgggcgaccttaggcattctggctgccacgtgtcgtaatcccaattaataagggatatgggtatttaaattctttgatacgaatcaaaaactcccatttttccctcttgctcttaacatcttctttccctccattacagacacttcaaaattccattcccagattttcaaccacttttccacaacattctcaatctcagaagtgatcgagagcaatcgcagaaatcagaagtaaaggttagttttcaagtcattgcattttttcgttttctgtttggagagaatatgctttactttctgggttcgggcatttttaaggcttttttaggaatgtatgctagtgggtgtttatgaggctatgtgttttaggtaagtaaacctgggtaaatccatagaatatgacctgtaaactgatataaccgcacataattcataggcactgtttcacgtattgaatactcgcggatattcggatgaacaacttgaatattcgctggtgttcagatgaacagcttgaatactcgcgtatcgccaagatttacttccattttgattgttagctagatctttttaggattttttatatgtcgcgggctgagttgcgagagtatcaatcg

SEQ ID NO: 332848 - DNA, 654 bp, Cannabis indica
atgtgttctgatgcaagctgacagaatcatagcttatgcctctcgtcaattgaaagattatgagcagcgctacccaactcatgacttagagcttgctgctgtggttttttccctaaagatatggcggcattatctttatggtgagaagtgcgagatttatactgatcataagagtctcaagtactttttcacctagaaagatttaaacattagaccgaggaggtggctggaattagttaaagactacgactgtgagattctatatcatcctgggaaggccaatgttgtggctgatgccttgagtagaaaaggtcccgagtaggtttgcaccacggttttgatagcccctcaactagcctccgaaatgattagtgtagggattaagtttgtggttgggaaattgcacaacctgacacttcaatctgatctgttagaaagaatcagaaaggcataattagaagatcccgaggtagttaaggttcgagatgaggtaatggttggtcggcctagagacttttcagtctcgaatagtggaatgttgttgtataaggctcgagtttgtgttcctggtgttgatgagcttaagaaagagatacttgatgaaactcataccacaccttattcattacatccgggaaccaccaaaatgtatca

SEQ ID NO: 332849 - DNA, 1503 bp, Cannabis indica
ataaactttctctcttccttactctctttctcacacgcctaccctcgaatcacctcagcacttgagttttgtcattattgattcatatcttgtattcctatgggtgctatataacatctctcctatagtgatcttgatagtcttaaccatcggtacaaatataactgaaaggggagtaggtcatcacccactatcacaagggggttgaacctctacaaaaaatcttgttgtttattgcttttcattcttatttgtgcaaacacgtggcaagcatcagatctatacgaccccgctgttggttgatcacttttttggtcaatagtttggtgctttcattgagagcgtggatatcgtgatctgatcaaacgccatagttgacacaagaagaactcatgttgcaccatctgcatcttcaggtgtcgctcaatacccacaaattgtagatccatacactcaggttccagtcacaattggaatccctatgagcattacaaatgtggtgaatcctatcaccacaacaggcgcttgattacgatgttttcgctcagtagagatgcaaatttctaacatggatggatgatcaggagtacatcctttgatctcaccaagcaaagttagattgcctcaactaggaggccagcgatctcagaagatggttcaatcaaagaactgacagaagaggccaggatctcgttagagagccacttcaaggaagacttccgccaagttccttaggaactaggatagatcttcccttgccagagggaggtcaaacgatgagaatagccaaaccctagcaaccagcgacaaggggggtcggccaaggatctctggctcagaaacaccccccattctgcagccactggtcggctagccactaataggagtacccatgtccagccaaagtacacgacttcctcccataggggagcgaggtgcccagaggtcaatcttcgaccaacgtggaccacgagtgggtggaaacacccaaaaaagtaatttgaggggtgaatctaatcactttaggcatctagatccaccaaactccaacaattaatgtggtctaccacctatcaacacacagctagcaccagtcgaccgaagcatcacgtgcggccagaccctgcccaatgcagttctagccagctaaggaagcatcacgggtggccataccctgccctttgtaggtttggccagccatggaggagtatttggcagccagactctgcccaatgcaagtctagccagccaaacatagaagccaggtgtaggcttggccgtcctaggccaactcctgtacttgggaataatcggtcagggtctacatttcaacacaggtctagctgaccttcaccatacactctcccagggtatggtcagtcagcccctatctctctagaatcagtagcctcccctaggtgggccagtcaatcaggtccccacagaaacatatccttctgtacaagcacagttggaccaactcagggacatgatccagggcat

SEQ ID NO: 332850 - DNA, 863 bp, Cannabis indica
ttggcttagagaagtcaaggtgctgcacgggtgttccgctgcctgaaaaggtgaggccatgacagttggtatcagagccaggttcatctcagtgggaggtgaacctggttggcccatcctagagaggatgtaggcgggtggacggatcgagatggtccaaatgttggaacaagaagtcgttgagccagttagtcttttaaagaggatcagtaggctgatatggagttaagactgggttgcttttcttcatgggaatactggacatcctagagaggagacgttgatggttgcttcgagtcaagttcagagatgctagaaagacaactaccacgtgcaactgtggaggagcgcaacagaatgtttggaactcgttggcataggacaaggttgaggggatagtccatgctatatgcttggtacactaggccaagtttgcctgagtgacatcgtaagccccaggaggcgcttttgttgaaaataaagcttgttggcaggagtgtggaagtggtgcagggaccgtcaaatccttgttagtcacgatagaggttgagagttgataatcgagatggttcaaattgggacagacatggaatgcctcagttgcgacattgggtgtcgagagggacgcatatggagaccaagggggcatatgccgcaatcgttagaggatgattgtacttggaagtgttcgcatgggagttgtatttgatccatacggaagcgccgaggcagttgagttgaatgtgttggcttgttgaaccgctagagggcgtaagtcacacaaagacattgatagagatgcagagttgtggaataaaggcatcaaggaagccagcagggcgaagaccgagcgcaagcgttga

SEQ ID NO: 332851 - DNA, 866 bp, Cannabis indica
ttttttttattttttatgatattatttcaatatgaattgtttacatttttcatgatatttatttttattttcaatgtgaattatttttatttttatttcacatatatataatatatgagttagctactgtttttttttataagaaaaacttaattgatttatcttaaataatggaagatattagagatatattttcaaactcttatttagacacacaacaaagccacttggagacaagtgtgcaaaaaaacttctaatacctaatgttaaatagagagaggtaacacaataatatacatttgtatattctagctacaatagtttcttagtctaaaaactattgtagtaaatagggtctagttaaggaggaaaactcggaattatagttgaggtaaaaattatagtttcttaattagtctaacataacattttcttatttcaacattagttttacttttaaggacgagatgacaattcaccttaaaatactaatactaaataaatcaaaattaataagtcaaacaagatacaacaattagaaaattgttatttattgaccattagtaagaccgtacaataattacagatgagcgtaccccaaagatagaagtggttgttagaaatgtatggtaaaagttgtaaatgtttatataatgtacatatatatacgtgatcatttcattccaggttaattatgcaatatgaaagtattatgccttatttatacaaaaacaaaagttctccttctctttccacaaaacatattttcttctatttatcccacagaagaaaccatctaaaatttacgtcattttgtataactccttaaacactttaatcataagttctttttttaaaaaaaaaaa

SEQ ID NO: 332852 - DNA, 582 bp, Cannabis indica
aaattcttttgatcactcaaattctttttatcacttaaattttgcaacctcactttgtcttcatagacttgttttgatgtcaaaggagctaaagtgactgttcggtgtcggaatgtgaatgattatttgttggtgaaactatcatgctggactcgctgatcaaatttctaaggccttcctagaaggaggtgtccaacttgcactggaaccacattgcacaataccttatcctcatatttgccaaattcaaaaagataccaaaactagttttgtaacttgcacttcaccactatcattcaaccattgtaacttgtaaggacgtggatgtttaagcgttggaaccctgacttctcaaccatagataaactagcaacgttatttcagctacccccattaataatcacactacatacctcgtctttcacatgacaacgagtatgaaaaatgttctcatgttgtacctcttcctcatcttcttttgcttgcgagtttgatgcttgtctagtgactagtgcaagcatgtcactgtatctggcccatactcttcatcttctatagaagcatctgttggaaatattttac

SEQ ID NO: 332853 - DNA, 561 bp, Cannabis indica
tttgatgatttttcgaaatctatcgatcatagaaatttttttgggtttcttctcatttcatatgacatagtcactctcttattttaatttatcttgactatgtagtctccaccaatattattatattcacatatttccattatttgttgttctaaaattgtaaaacttgattgtttgatacaaaaataatgtgttatggtggacactttatttatgattatcaatatattaaaagcaattcatctatctcttttagaaatttggttgaaaattattaattttcaatgattgttttctcactaaattttacatgttgaagaaaatattatatcttttggttgactatatgtgtaattactttcccaaaagtagcatttacaaatattagctcacattccatgaagtgagttaatatttgtagaaaatagtgaatcgaattgtgtatgtatttcatagaatagtacatatttatatacaaagctaggagactaaaataggtaactaccaacaaaataggaaactactaaatacaagttactctaattcttttacaactaatat

SEQ ID NO: 332854 - DNA, 801 bp, Cannabis indica
agtattatggtgtcatgaacactccttttatccagatagcattgtctctgattgtagtgtgttagtgaattatatttgtaacaatggaactcataatttgcatcttaattcttttgttattggaatcaaaagcttgctctcttctttccctaaagtgtctcttagctacatcccaagagaggccaattttgctgcccatggtttagctaagactgctttaggcttagagcaggaagctttatggatgagctctactatccaaaatgctttatctcatgtaccttgtacttcaaattctggttaatgaatacaggtttttttctcaaaaaaaaaaatcttctttgtgtttcctaggatttaatttgggccgtcagattgacagcacgcggatcaccacatcgtttctggtaaatatcagatactgcaactgagattttccaccttctgcttcgagtacgatcaagatgcacccaaatgcaccacccccaatcctcaccattgatcccttaaagcaatcggggccattggatttccaagcagaagtcgtggaactattagggagcagtcaaagtttccagacgaggctcagactcatcaatcacatacccccagatacaatttccatacgtaagtatgttctataccaaaaatgatacgttttatatttatcaactcgcaagcgcacgaatctttattgtagtgtagagattgtgaagaacgaggtcgactcatgagaattgcatgagattgaataaattacttatttaatctaagctattaaaactctaacctagttctgaa

SEQ ID NO: 332855 - DNA, 830 bp, Cannabis indica
atagctacacaactatcaatggtcaactaatagagctcctacaagtcgaaaagtaacgggtgttcttgaagtagatgctttgaccactttcaccgctcaaatggcctcaatgaccaacattttgaagaatgtgaatatgggaggaagtgtacaaccagccgctgccattcaaagggcagaaatttcttgtgtgtattgaggtgatgggcatacttttgaaaattgcctttcaaatccagcttcggtttgctatgtgggtaatcaaaacttcaaccgtaacaacaatccatactcaaactcctacaatctagcatggaagcgtcatatatttatattggtctaaggtatatcgtttgtatgtgatatgtatatcgtaaataatagaaaggaaaagaaactattaaatattaattgaagtatgaggtatagatatatttgactgaggtatattgattttatgttcattgatatttcatgaatgaaagaataagaaaaaaaaacttgtggaatattaaattaagttttttgtataattttttttcactatgctggtggtatattaatttttgactatggtatatctgcttatgattgtggtataagtttttgtatgctactgtatattgtggaaaacaattcatttaatagtatattagtttaagtttgtgatatatgtatattggtttaaggtatattgtttgtatatcatacgatatattaataaaaaactaattatatgcttaaatacatattagacaccaacaacaacagcaaaaatctaaaagaacaaaacatataatacattttatataataaaaaaatagttgaca

SEQ ID NO: 332856 - DNA, 552 bp, Cannabis indica
tttttctggggtgggaatcggggctgctggtgtggagttggggcaggttgggagggggggaggtgtggtgtgcccggcacgttggtttccgctggagatgggtgagtttgtgttatcggttgacgctgtggtcacaccggggagggggttcgctgagtttggtggggttattcgtgggggtgggggtgtggtgtgggcggcttgggtcgtgggtggagttggggatttttcagggggtagtggcggagctccttgctttgcgtacgggattgctttgggcgaccagattggggtacaatttggtgcgggttgagacagattcttctgttgttagctcttggataaattgtcctaattctattattatgtttaaaccaattgttgaggagattaattctcttttagctgttgttggtggtggttcttgtcgtgtcatcttgcatgttgcgaatggtgtggcccatgtattagaatatttctatttatagaattaaataaataattgattttgtgataaatgaatattttatattcattgaatctggacaaaat

SEQ ID NO: 332857 - DNA, 656 bp, Cannabis indica
aaatttatattatcattaatgtgttatgttcaatctacttgaaatgttaaattttagtatgaacaaaattgtatacacacatgaatgatacaattagttggataaaaattgatgttgcaggaacctctcatctataatttagaagtccatacatactctggaagagttatagaaaatatatgatcaaagattgtatatggtgatattttaaaagtgataacaataatcttatgagatctattatcaccaaaagaattatggatcatatgtgcatgagggggagacatattcatgttgcactcttttttccttagttcaggttttgtcccactgggttttcctgacaagatttttaacgaggcaacttgcaaatagttatgaatatgaaatatatattgctctctttttctttagctcaggttttgtctcactggttttcctgataagattttttacgagaaaactttcaattatgttaacatacttgcactttatgaagcaagcagagaatgtgtgggagtgagatcattgacatagtatattcgggaaacatatggattgcactctataaagaagtatcaacacaaaccgttctctatgaagataatactgcttacatcgctcaactaaaaggagggtacattgaaggagataga

SEQ ID NO: 332858 - DNA, 1039 bp, Cannabis indica
aaggaactacaagctcgaaggccagagtccttagtggagttcttcgccatggccgaacctcacaaaagaatcgagaattctctagcggagttagagaaagggaaggccaagcgccggtcacccataccgcgatcacgatctcgcagtccacgagggaaaaactccatgggccgaaacccgagaagacgcagcacacgaagacagcgaagtccgaagctggccaagtctcctccatagaaggaatcctcgccaaaaaggaaaggtggacctcgcttcgtcaattatactgaactcgcagtccatcgagaccatatctacgcaattggcccgcttggcctcaaaatgcacacgcagacgcattggcccgtttggcctcaactagagaagccgaattgctcgatgtgattccggtagacatattggctcacccaactataaatcaagaagtgatcatggagatagacaccgttcaggagattacctggatgactcctatcctcgcatatctggaaaaggggctcttacctgatgataaaatagaagcacgaaagttgcgacagcgagccgcccgttatgtaatatatgaccaaaggttatatcgcaggagttttagtcaacctcttctcaaatgtatcagcggagaggattgtggttacatacttcgtgaagtacacggggggatttgtggcaatcataccggaggtaactcccttgcgttaaaaatcatgcggcaagggtattactggccaacattgcgacaagatgctctcgcgtttgcaaagaagtgtgacaggtgtcagcgaatagccacttatacccaccagcctccgagtaacctccattctatcacaagtccatggccctttgcaatatggggaattgatctaatcggcgagttacccaaaggaaaaggtggagtcaaatatgcggtagtcgcagttgattacttcacgaagtgggccgaagccaaagcactcgcaaccatcacagcaacaaaattgcgcgagtttgtctatacctccatcatttgtcgctttgg

SEQ ID NO: 332859 - DNA, 741 bp, Cannabis indica
caacaactccattttgttgaggagttttgggagcagagaattcatgagttatacctgtagacttacaaaaatcatcatacactgaattctcaaactccttaccatgatcacttcgaattcgaacaattttcccaatattacaactttttcaactcttaatctcaaacaaagagttttaaaagcatcaaaagtgtcagacttttctcttaaaaaatctacccaagtaaaacgagagaaatcatcaacacacacaaaaatatatcgcttaccatttagactttcaacttgaattggacccataagatccatgtgaagcaattccaatacttttgaggtattgatatcagacacacgtttgtgagtgatttttaattgtttaccaagttgacatggttcacacttaccaacactttctttaccaagcttgggtagacctcgaacaatacctgcatttgacaattttttcaaatttttataattaatatgtccaagcttggcatgccacaaatctgtggtgttgttgatggctgaatgacaagtaaacacaggagttagggtataacaattatcattggatcgaaatccttgcaaaatacattgattatcatcattaagcacataacaatgatcactgtcaaatgagacagaatacccttggtcagaaatttgatctgtaaagcccgcttagttaatttggaaattagcagttaatcatgattatttatgaaaaattatttatag

SEQ ID NO: 332860 - DNA, 811 bp, Cannabis indica
atgcagattaagttttcaattttccaaacaatttacaaatcataaaaatttagaatatgtctaatgttatacaacacatctaaaaattaagtccaataatcaagttgagtccctacctctctcaagtcgttaaactttatccaaatgatgatcttaagctctctcaagtcccgagctctaattgtttagtccaatcttagatattactctcatcacctataccattaaatggttaaataatgcattctacattcaaaaccgagtccaacgatatataatatgactatatttaagatttgaggttccgaagcctcacctaagcggtgcagattaactatgagtggcagtaaaaattggtgtactgaaaacatcgtcggaaataggggtagtgtatattatcaaaacgaccacctcgacgagtagatcacacttatgccgaccgtttgtgaaaacagtacacaatgtcgccaaaaagcggcggagctacaaaaatgtcactggaaaaagtagcgaactaggtgaaatagcttagtgtaggttgttctcctcgacgagctgagtctagtggtgaagacgactcgtcaaatggacaccggaggtgatcggaaaatccgttcaaagtttgaaccaccaaactttgacttgcgatctcgagctaacgacagcgaaaggagcggcaccgcttgtgggttgaggttgccggcaccaggggattcgagtggtccggtgtgtggagctggtcggtggccagaggtgggtcgtcagagtccaccggtgatggagcttgtggttttttttttttttgtgtttt

SEQ ID NO: 332861 - DNA, 937 bp, Cannabis indica
gctagccttgacatttttgcaacacgaaaaatgagtggctttcgcgggctagaccgccggtagagatagagcgattacgaaaccgaagatgagaatgaattgcccgccaaaggatgaaactgtgtttgggaggagaaactttggcaccaaacaacatattcccttgagaatgtctctctatgtttcatgagtttttgccaataccagtctagcttcaactcatgaaatcatatatcttggctttttaagtagatattattaagggaaaattacataatttgctattattttggttaaaaaattatgtttaattttgctaatatttttacggtattttaaaaaagtataaaaaaataataaaaaatataaaattaacagaaagcaatattgatatctcatcaaaacaacataaaattgattttatgtaaataaaatcttaaaaattattaatttttttgtttttgttattttttttaataatccctactattaatccactccatgcataacacatccttttcagaatttgaggcccaaatgtatttttgtcattgaagctttgtttctatttgctcaattgtgtaattttattctatttttaaaaagcattaatagagaaagtttgaattaaaaaagtttatctttatgtgtacgaaaatttctcaacaaaacagttatatttattttaagtgaaatttaaagatgttttctaatttttagaaagagaataaaaaggaaagaaaaataatggtagaaaaataatggtgcaagtagggatgcatatttcccccacggggatggccccgcggggacccgcccctaatggggcggggattccccgtctaaatggggaacgtggcggggccggggattattttttgtccccgaatgttaaacggggcggggacggggatcacactccccgccccgacgggga

SEQ ID NO: 332862 - DNA, 921 bp, Cannabis indica
aaatagattttttcgaacaacattatacaattctttatccatactcttgacagtgttttaaggtggcgatttggggatcatggacctataattctaagctccaacaaactaatttatttattaagtctcatcaaccaaataatcttgtttattaattctataattacttcacaattaatataaaattgaactcttagtaattataaaattatatttattgagttttactacagtctctattaatattatcaattttagtgattaaccctccttgtattggttcgtaattagttttggtcaaattaccattttactttttaaattacttatttatcttttattatcattaattcactagtagaagtataatttagatatcatttaaatttgggtgtaacttttcagttctagaataaacacctaaagagaaccaacattcgattcgttagaaaaattatgattcctgcagatcatgttctcaactatccacattattagattcctaaaacagaaattgtaagaattatcttctttgaaaaacttttacgagtgaatcaaagaaactaataacatgaacaggagctcatgattgctcaggatttaggtcgatctactattgatcatcgttatgatatgaattaggtctttatagtaaacagtaagtttgataaatacaacttcattcatgtcgatccctttcatatataatctctataatatacaacacattcacttaaatgtcatactacatcactaattcgaactgagattacttgcatcgaagaatgggcatcggtgaactgtattagcaaccattgattaaagattctcaaactttaatatattgctaactattttattcatggctaaatgattttaatttttcgtagaactacaagtcacagcctcatatatgaataa

SEQ ID NO: 332863 - DNA, 970 bp, Cannabis indica
ggacactcagtgcatcatcgacaacctattcagatttatccttcgtcccttcaccatccttttggtccacacccacatcatccttcttctcggtctcccccttgaaagaaagtgagcgctgaactttgctcgtctcaggtatctcgaacacttcatttatattatccttgccaaggtaacttgagactaccttcagtaacagctcttttgtatgttcaccttcaaatcaagcggaagactctttcaactcacagacaactttgtatattgcgtcatttgttgattgcccaactacaccgaattcaaaactttgcactaacacataagtgttagtcaatttcacctgcttagttagcatatctcccaaattaaattctaacgcatcagaaaattaaagtagtaaatgtacttttccactagtgtgaccaccgtggtctcgaatccacttgtacactgattcgcactgttttatgttccaaaaatcaattggagccacaatgcggtccatgtgactagcattccagtcaagatgagtcaaatatacaagctgccacaaaacaaaaatacatacatctataagcactgcagtacacaagcaaataaaattaataccatcacaataaggggaaaattgacatgtaaaaatatggtgcagccaaaaatatatttcgtgttcttagtcttgtaccgctgtagagagttcattagatatcaaaagctagcagtcacccaattcttcttcttaattgaccttgtatcaattaaagagtgcatgtagctagtgctgaccttggtattattcttgggcagcaagactgttccaatacaaacaagcaaaaatttaatgagaaacaggtaatttctctcgctgctttccttcagctccttctccagcagagtgagggaaaacctatagtctttggccttcaaaattttgtcaaactcaaggaggtcacggtcactttctgtt

SEQ ID NO: 332864 - DNA, 599 bp, Cannabis indica
tacgtggttttgcagttaaaattttatatagttcactagtcaatgttattcagatttctaattgttttctcagggcttcccctatatgagtttttctcgtacccccccccccctccttttgaacttatttgcctctatttataattacatagtgcgcagttaatgataaaagttgactatgatctttacagtaattatttcctcatatcattgtatttgattacaaatcacgctaagtaaatgtggtttttatttagaattcacacagttgtgagtatctcgcttttactgggccgagatgaacgcatattaaagatatacagtaagccttatctcatggggatgcctcgctaggaatggagccaagttaactttgatggcgagctggtgctcatcatataacttcccaagattgatattgctttaattctgataactacagtttctagtgtcgagatgatctttctcgtgtacatatcatcttacagcgagatagacgcctcactgtctgtcatcttgatcaaccaaattatttatacatagtttgtattctgtatcatatacgctaagtatttttattgttattatatctcctccac

SEQ ID NO: 332865 - DNA, 744 bp, Cannabis indica
ttataaatgatattttagtaaattagtataattactgaaataaaaactcttctatttatgtttattaagccaggttctaaggaaattattgtttcacttctaaatagttatagaagttatagatttcatatctatgattagcgctcctactcaactgcaccactatattttcaagatataagtattggatcgattcaaatggtcagctttaacgaacaagtcaaaaaatatatgtaatacttttaagctagaatctaaccatctcaagattaagatcttttaatctaagatcaactaagtaacattgacttagaaaagacataacagtaagtttatgatatctttttcactgtcaatatcggtccagtccgatgtatagccaatacatccggcactagtatactttgctaatgccctgaaaagattattccacatatcattatgtacgtaaattttatcgctgattatcatgttagtttaaattcagtacactgacaaatcatgcatgagactaaataatttgaaacatataatcactattactttctaatgtgatgacactattgtaattgtgagtaactatatattttagatttaataaaatttgtatattaaaactataacgccctaataattaggcacactacgattatccgataaacatgactacttcccgctaaactgggattacaaaaaaataagagcagaatttaaactttaaattatttacagaatgaaaatata

SEQ ID NO: 332866 - DNA, 598 bp, Cannabis indica
ttttgtcaaactcaaggaggtcacggtctttctgttccacggttctcccccatccctgattctcatgacatcctcaaagagcttcgatgatagttgaatcgttcttccaaatatccccagccgggaagtggttggatccacgtgatcgataagccaactaactatcttagcatcaatgtacgggtcatcctcccttaagaatgtcgagaaattggtatttctaatcgtttcttttttagcatcgttgagaagtgggactattctacccaaacgttcgaaggagcaacgaccagatacttgaacatcccctaccccttcattgttttttagagattttattacaatagaagaaaaatcaagatacattacaactctattgtaaaataatacaaagattagaataagagattgattaaatctatgttacaatacatatatatacactatacatattacatatatatatatatgaaaggtagaagagaagataaattacacaatattatataatatatatatatataatatgaagaagaaaaagatcactcactcactaccttgagtgtagaatagtggggatcaccatgacttgaacaag

SEQ ID NO: 332867 - DNA, 688 bp, Cannabis indica
aataataataaaatattaaaaaatgtgaaaaaatatatgtaagctatatttgaccgttgatggtgatctaacggtaaaattgacttcggaggtcggtcgtcaattttaagagcttgaatcacgttcgcggacttttttcaagtaagttgtagttgaaattcgtaactcatttgaggataaaatttgaaccaaatatctttagaattacaatttgcttgtgagacatgacatgatagagaatttaaatacctttgaaatgtaatttaaatcacgttaatcgccgatggaggcctcaccttgctaatggacctgacaagaggtgttgaatacccctccacatcaatcatcatggcatagcctggtggaggagcatgaggagacagaggtaaataaataaaataacacgaaaacaactcaaaaacaaatgaagcataaataacaagtaacacaaaaattaaaaaaaaaaacagcacacatctacaaccctttttacagtgacattgtcaaaaatattatctgattcaacattcttaactgagatttaccctttctctacatataaacaaaataacaataaacaacacaaaaataattgttaaacaacaaaatactacattcaaacaaaacaaacacacaaagacaagataaaaaaaaaaaaaacaacatattacatatgaaagtaatacat

SEQ ID NO: 332868 - DNA, 580 bp, Cannabis indica
ggcaatttctaataaaaagacttgttatgggttaaatggattaataccatatacctgaaacaagaatcttactggttgtatgagctaaaacccgacacaagttggtattggcgtaagctttgccacttgaggaagagattcacagaaggtgacataaaggctgctgtgagaacatgtaaactcagaactagtctgttatataacagcttgcttgatcaaaatctctttcaatgccataaaactatttggagttctcttaacttaccaaagcgtagatttattctttggcaagtggttaactcctatttacttacaaaagataatatggcaaggtttcacattcctgtggagtcgaataagtgccctgtttgtgaggatcactttgaaactcatgaacacttgttcttctcttgctgcttgtcccgaaaaatgattgagttggtgtttgaatggcttggtactcacatgtggcctttagattttcaaaagttggataggttggctgtctttgaacatggacaataaggtgagaaaaaatcaagcatagcagctgctgccgcaacctgctactacctttgga

SEQ ID NO: 332869 - DNA, 764 bp, Cannabis indica
ttatattttatatttttgttcacatacttgaaccttagacccgaaaccagacccggaccggacccagacccaaaccttgaaccccgaaccccaaacccaaacctgaacccgaatcccgaactcgaaccggacctggacccagacccggactcagacaccagactcggacccggacccggacccaaaactagaccctggaccccagacccggacccccgaccctgaaccccgacccggaccctggaccctaactcggaaccaaagcccagaccctgaaccctgactcggacccagacctgagacccgagaccctgactcaaacccagacccgagacccccgagggatcccggacccgacccaagccggaccccgaacccgacccaattctcgaatccagacatggccaaggaccttggacctagccctaggttttggatttgagtttgggtctaggttcggggttaaggtccggggtctgggtccagggtcctggtccgagtttggagtctggggtcggggtccgagtccggagtctagtgtcttggtcgggtctgggtcgggtttgggtctcgggtccgaggtctaggtctggatacaggtccagattcaggtctagggttgggtttgggttcgggctgtggtccaggttcgggtcggattcggggtaggatggttggtgtagaatattgaatttttttcgtaagaaaaaatctaaaattaattttaaaaaaatatatgccaaacattattaaatttgtaaaat

SEQ ID NO: 332870 - DNA, 566 bp, Cannabis indica
tagtgtggaagattgtgaagaatccagattcaagagaagacattaaattccgttgcaaccactgtaaggtttcttatactttatatgtgtttatttaatatcgttttagaagttcatatttaggatgtttaaacaacatacttgttagtaagtctaagattctggtaaaattattccaacacatttttctattctatgttttcaaaggtttacaatataattagattttagatttaatttaatttaagtttttgttttacaaggtatatctttatattaatgatattaaatttttatttttaaatttatttttaccgtaaggtccgtaacagttcacattacgtggctatttaataaaataatgtggcattgttataattgacgtgtcttgctatctagtgaataaaatgatgtggtattgttataaaggccaataagaatttttgcctctcgaatattgatgtgtatcaaatcacgttctcttaactttgaagatcgttaaaaattctccttgaattattgaaattgtttgatttaaagacttttgtctgattttagtaagaaaa

SEQ ID NO: 332871 - DNA, 947 bp, Cannabis indica
caagagctacttctaaatcacaatacagttcttataacggttcctttcaatctttctacgccaagcatcaaacaaataaaaaaactcattggagaaatcaaaatcaagtctgccaacaaaaatatcaaaaataagatatattcttattgtaaatcaacagttgaaagtgctttaataagatgtaccaattcacaatggctgattattagaaactagaaccataaaaaatctactcacaatgttgtttctagtccaaaaaagtcagttattcaaaagaagattcaagaaactcaagatagaattcattatatcaccattctcatttcagctacacttattagtagtagtccatacaacaacaacccacatctccatttccacaaacactaccaaatagctcacagctacagccactatttcaccttctatataatcttttttttttctttttctgataacagaataataagggtcattatgtacctgtgaaagaacataattaaacaaacaaaaaaaacatataaataatctgaaattaaaaaaaaaattatatttagattaaagttttgaataatatatccaaattttaactaacaaaaacacaacctaaaaataactacactttctccatacaaaatcacattttcaaatcttcctccaacaatttttatcgtatataatctgaaatggaaaaataaataaacgtaaatgaaataaaaacttgttacctgatgcggccgtctgctgcgcctaaggagaaccattcgcgccggcctcagatggggaaaaatttttgggtctggttggggtaatcgcacgagagagctagggtagggtaatcgcatgagagagagagagagaggggtaggtgtactggggaagaggatgaatattaactatagggctgatatattttttaaaaaaaataaaatggcctatggtgacgt

SEQ ID NO: 332872 - DNA, 636 bp, Cannabis indica
tgagaaaccagcagacacatctaggatagactttcttttcttttttgtgaatgaacgcaacactactgtcccctttttcttcgttcacatccttattctttttttctttcttccaccttgttaaggaaatttcataattctagaaggatccaattagttcatcaagatccagttcctccacgtttctcatttctccaatggaggttactttagacataaatcatataggcaaaactccaagaactttacgaactagctttgcatttgaataagtctttcccaaagcataagactcatttgatatgtcacacaatttagcatggaactcagccaccatttcttcttcctccattgataaatcctcaaacgcttttgccaaagcatgaagacatgatttctttactgcatccgttccttcatttttaattcgtagtttttcccaaacctctttggccatctcacagttcgcaatgaccttcaatggacttgtggacactgcattgaatagatcatgcatggcctttgaattcaaattggccctctccatctcatctagagtccacaagcacatccgttttggttcggtgacaccattatcctgttgggttttgtgcccttaataaaacccattacaat

SEQ ID NO: 332873 - DNA, 1204 bp, Cannabis indica
ttaattaatcaagtataattctaaaattagagtatgtcttatttataaattttcactaagcaaatgcttaattgtgaagaaaagagattttatggtttatttattaattgatagactttgtaaggtctaattaataaataagttaaataacaattttatttaatagttaattataattattaaataaatagttttgacatttataagattaaaattaaaaaatatagcattattgaaagtaaagatgaattatgaaataaagtgacaaaattgtaactagtgaggcccactactatggccgaccacttagttgatttttgtctattattttatcttttttaatccatataatcaaattataaaccctagaagaaatactataaaaggaataagatgctcgcattctaatccaaccttcaacctagttttcattctttgtcagacaactagtaaatgagagtctccttccttagtattttgaacctctcatattgttcttcatcaattttaagcctttagtgatagagtaccatgcccactcatagcaagtcaaatactcaatcatagtgtggaagactatggttaaccaaactggaaaggaatcaagggctaaatatctgaatgggacgagacatattattctgataccaccaatgtaaggttttctaaactttatatgtgtttatttcatcgtattaggatattcatatttaggatgttagattgtagttatttatcaaacatacatgttagtaaatctagatcttagtaaaataatttccaacattaaccgccaagaactcttataaaacgaaataagcaatcacatgaatgtgtttatattactttgaaatcaaaatagaatgttttaaattataaaattatccttgataaattttttataagtatatagaacgtttagaaataaataaatgagagtaaaaataataagaaatttttacatcaaaaatacaaaatgcaatctttattacactaatatcactacacgactatatcaacttttttactcttcttctttattttatcactattttaccacatgcacactcattcaaagcatcggtacacgtgctgacctatgacccctatcaatcaaccatccatcatttctctctctttttttctgtatttttatttttttctttccatttcttttcaacttttttaaatagtaacctccata

SEQ ID NO: 332874 - DNA, 2003 bp, Cannabis indica
cacaccttattcaaatcagagaagtcaatacaagttctccaagttctgttaggcttcgagacgagaacaggattggctatccacgagggataaaacacctcgcgtataaaatctttgactaacaacttttcaacttcctattttagggccccttgcctctcgaaatccaagggtctccgtttctgtcgctttgctgggtagtttggataaatatttaactgatggcagataatattagggtcgatccctatcatatctctaggactccaggcaaactgatcctggttccctttcaaaaagcttattagctgctatttgagctgctcgtcaaggttcctcctaatgtatacacattttgtgggatttcctgggttgggaataacctcttccaattcttcgattggtttaagaaggtttctttcatcttgaactcgaggatcaagatctttgtctttcttctcgttttcttctgccaatatcatcggcttttctatgttgtaactctatgtgggtcaccacgcaccactcccacaccattttgcgtttggaatttaaaggataggtgcttcattgaactgactgcccctagtctgatcagtgctggatgacccaacaatatgttgtaagtcgagggcaagtcaacgataagaaatcttgcagtagcagataaaagtgcctcgcctaaagtaatgcgagctcgattctgccaaagctggtgatattgtcttcgctgaatccgcaaaggttcaccatacaaggccttaatttggtattttcgagccccatttactttagggtctccttataaaggatatttactgagcttccattgtctattaacactctcttaatccttttattggcgagctgaatggttatcaccaatggatcgacgtgaggatatctcacgtttttctcatcttcctccgtgaatgtaatgggaggttcctcagttttcaacttcttggaaggttctggggcaaagatcgacttctcgttatttatttctttcatatatcttttcgtggcgttattgctttcccctgggatatgcggccctcccgaaataacagggatgtcctctccttccacaagattaggttgtaacccctagttatttgggttattgggcagactgggctggttgtatccctggccccgtcatttcacgtactgcttaaaatggcctcgagcgatgagactttctatctcgtccttcaattagcgacattcgttggtcgtatgcccaatatccttatggaatttacaatatttgttgtaatcccttttgctcctcgaattcctcataggctcgggtttgccgaaggccacctcctgctcatgtgcgaggtaaatattctcccgagtttcattaagctcagtacaaatagtatgcactggcacgtatttttcatgcttcttttctttctttctatcctttgacggttccttacttccgtcctttctcttcgaagcagaagcccccgagttatctattctagtggaagcagtacctgttgaaacattgctaggtttgcctcccgagcttgttttcaacaagttcatttcctttcgggcttcttcctttcggacaaacacataagccctttcgttgaacttagtgatgcttctcactgatcgtccttgtaaatcatcccacaactcgccccctgtagtcagtaaatcattagagattcccgcataaagggctgtaagttgtgtgttgtcattcgaatttataaccctagcggcagccgtgctaatacgacttaagtacgccttaagtgttttgccaggctgctacttttattggttagcgaggccgcttcgggtcgcctatccctagcagcttgaaattgcttcttgaaatccctggatagtggctcctatgaagttattgaatgatgagtaaactcgttaaaccagctactcgctgctccaacaagcgaggtggggaacaaaatacaacgtaaattttttatcacattactcgctcgcattat

SEQ ID NO: 332875 - DNA, 870 bp, Cannabis indica
cccataggccacctgagaagtgcaatactcgagaaacatatctttggaatcgcccaagaaatcaaaatttccttggggattagccttccacaaatcatagaagatctcgagaccagctgtctctaaatcattcactttctctccaagcctcgccacttcagctctctactgctcggcctctgatttgtacttctcaacctcagcttcaagctcctcctccttagacttcttctctgcttctaacctgtagaaaacaactcgaagaccctccctttcttcttggaggctagtcacttcttttgacaacgaagcaatggcagttttcagttgatcagaagcctctagatctttagtcagctcggccaccttcttctcggctgcgagaagtttcttgttaacttctcccagttctatctggattgcaccaagttgaacctggcttcatcagcatccttcctggccaagtctactttcgcccgcatagtattggaaatggcagcgttcttagaggcagtcgacttagctcgggaataagcataagccatcttcaaaccagcctgcacaaagaaacaacattaaaatctaaactaagtgaagaaagacaagtggaaactctaaggaaagacttaccctcgtgaactccttcaggactcctcccatcacaagctccagagaaaggtcattatcggccccggccagctgctcattcaccttagggaccgaccgagtcatgtagtgggtgagcatatctttgcctctcttagtctctggatgcagcactggaggtggggcaggtgttggaaattattttaccaggatcttagatgctactcacaagtatgtttattaacatcctaaataagaactttc

SEQ ID NO: 332876 - DNA, 794 bp, Cannabis indica
aagtaaaggctgaacaccagaggtcggcagagttgctacagccattgaacataccagagtggaaatgggaagatatttctatggacttcgtggtagctaggtttgcctagaaccacgggacagtttgactctatgtggatcatagtggacaagtttacaaagtcagcgcacttcctacctatttcgacgaatttctgcattgactagtatgctgagttatatgccagagaaattgttcgtcttcatggtgtcccaaagtccattgtttcggatagagatctgaagtttacgttgagattctgggagagtctccatcgagctatgggtactcagttaaagtttagcacatcatttcatcctcagacagatgggcaatccgtgaggactgtccaaatttttgaagacaggctacgggcatgtgtgcttgattttgaaggatcatgggtaaagtaccttcccctgatcgagttctcttataagaacagctatgaggaaacaatcgggatggccccttatgagcttttatatggaaggaaatgcagatcatctattcactgggatgaagtgggtgaaagaaagttcttgtgtcccgaggctattcaaagaataagtgaggcagttgacaagattagagcgtgaatgctcacggctcaaagtagacagaaaagttatgcagatccaaagcatcgggatattgattttcaagtcggagacatggtatttctctgaatatctccgatgaatggcattaaacactttggtaagaaaggaaaacttagcccgaggttcattgg

SEQ ID NO: 332877 - DNA, 1689 bp, Cannabis indica
ccccataatttgggggttcaacctcttcctctccctcaacctcggaaggactgcccggacgtgcatcgtccagctcctcaacctcctagacctcagcgtccccctcacaattctcttcgatcaggacggccaaatcttgttcggcgctgggcatagtggcaagtcgagcaagttgaggattagaagcatcgaccagacgcgtggttttctttataccagccatcatcctatggctaggtacaagatcagaagaatgtccttccctaaaaggaggactagaacgaagatgaggatgatcctcgttcagaagttgaagcaaatcctggtcgatctgatgcctgagtttccaagactcacctgagttcatctacaaaagataacacacaagatgagtgttggacggaatatcaaacaataaacacacaaatatgccgaccaggagtactcaacagattaaagaacgactatgtctaaaaaaaagtaagaactcaagaagtcaagaagttttcttgagttagggcaaaaacattcatgaaccttagaataagcaagatgaaagacagatgcaatgcggttcagagacaagctctatggctgtaaacccacatgaagacatgataaagaagagtcgctgaagtttttaaccctagcgtttcctaagcatttttctacagcatagttgcattcaaagtgtaaacatacaaagaaaaacataaaggaaatcggaaacttagtcaaagattcgaatgtttgggttcgagcaacgtcaagcacaacagcaattgtatgaaggcacttcggcagcttcaaagccagaaaactctcttttcgctctggagtttacttaacaaagaagggtaataaaatgagtttatatgccaatgctatgggtatttataggcaagtcacgaaaagaggtaactgcatcaaaggaacctcggatgcctcagcttcccgcctcaaaaacgaatatgggaaatcaaaagtaatcgagtgcaaccgtcagccgtggagagagaaatattaattagccgaaaacagaagggaggcctagtgagcttcacatcgggtctcaaacgatcatactcgacacatgtccccatccgaaggaagagccaactcggtagaagtctacacgtaacctcaggggtcccatacagacttagggggcaaatgttatcccaaattttgcactctgacgtggcatcacgagaatggtgacacgtggagcatctgttcggagtgatagaccgagcaggatgcctcactagcacatcctgagtaagatattcagcaatccgtgcagaggactcaacacttagcgaattcagctttcggatcatgagtcatcagctcaatccctatcactgagggatcaacttacgtggatatggcatatacacgatcccactatcagtgtactcagcctcaatcccacgatccttgcattcaacattgatcacacgatcaatctgtttatgcgcattgtaacgagagatgaaactcttcctcctagagtttcccagccctataaataatgaggaaagttcactggggaaggggaccgagagataaaaaagtcgatacgcagctaagctaagactatattattatctaataattatatattcagagatactgttttcagagctataagaaaaggaatcttcttccttgttcttaagtcaa

SEQ ID NO: 332878 - DNA, 426 bp, Cannabis indica
cagagcattatcaagatttgaacatggatttctttctctccttccttgagcccgattctgcttcttgttgattggattcttcacagtcttccacactatgattgagataccacttgatgtgtgtgggcactcactctatcactcaagatatgaaaatttgaagaagaaaagagagggtataggttcgactatatataggtaggaggctcaattttttgaagacaagaaatttcatcaatcttttaagtgtgagccatcatgtgacagtcaatagtcccgtgatccgtaaggggaaatactgggtaagctgtgcaatcccacatcggctggggaaggtcaagtgggataattctgaaactgtgtaggtataggactacacaattgaagagagcttaaattgattgattggtactacctatgtcaaca

SEQ ID NO: 332879 - DNA, 574 bp, Cannabis indica
aatgcatattgaattaaattttagtttttagcggttttattatgagatcatgagaattaggttagattaaactaatgtttattatgtatgttggattataaagttttaaattatgttttttatatatatatatattatattttaattaaattaacttaaatggtagctaaaaaatattggatggatctaatctaatctaataaaaaatcagtcaatgcatccaatggttggaactggtccaatccaatacatccattggatcggatgactcaattcgattggattggatcagatgacaaaattcaatatccaataaataattagattggatcagttgggtccaaatctattggatgtgatccaatgaacacccctagttgacacatggagccgattttgatggaaaaggatgatgtgtcaacgtatagctataatagagctaaccttgcatgacataaacttgcgagaaggtgtgatcgatacaatgtatcatcgcacactatgcctaacatagttgaaaaataagcaagaccgagagaagtttatacttgtgacagtcagtagtcgtgtgatc

SEQ ID NO: 332880 - DNA, 519 bp, Cannabis indica
atttgcttgcaagaaatttagactttaaaacaatttgtatgtgatttggatggtttcatgttgttttgtgtgttatatgatgattgattgatgtttgtgagtcaggtatattaactttcccacaagacgttgataccttccttgatcaacttttgtttcgtctgtctgtacttcaagtttggtattagggtccatcagagtttcactttgcttgcatcccgtcttcccagtttcctgtaagagatcaaggacatatttccgctgagtgactgagataccttgacaagatcttgcaacttccattcccagaaaatatcttaattggcctagatctttaatctcgaattcgctggagagaagctgcttcagatgagaaatttcttccatgaaattacatgtaaccacaatatcatcgacataaataatcaatgctgtaaattttctaccaactgagtgttttataaacaaagtatgatctgattggcactgagtgtagccatctcctttcaacacttttgt

SEQ ID NO: 332881 - DNA, 1227 bp, Cannabis indica
cagattaaggagacaattgatccgatgggtaaaattttttttaaaaaaaaggaagtggaaaagtttgttattaaatgttgatgtgtctcgaagccacaaactgccaaaatcaaaggacatgcgttttttttaaatcggattatgacaaatataccctctataatcatttaaaaagcacttttcactgaaaaaactttttaaggggcaattgctatacctgaaattcagctggcactttggaagaggacacgtgtcaactttagagaatatgaatcaatgaatataatagcatttatattaaaggatattaaaatggaataactcattaaatgcagaatggatagagtatatttataacttgctgactgtaaaatcttaagcaagataaggatgtacaaactattgactcatgcattggcgagaaaccattcctcgttagaagacacaatcataaggatggcatcagtaatacaaagggaggcaccaacctcgctacgtataaaaaggtggtggcgagacatgttgactgttagaacacttagcatataatatacattatataaactaatcataacaattgaacaaatctgaacaacgaatagcgtggtatccatctcgctatagaaaggcaaactcatggtaccttcactaatcagcaccaaacatctttcaatgacatcaactgctccgtcaagtcagctctctcagatagaagctgacagtcaaatgatggtgactgcaaaagttcaccttgtcaccaagaactgcgattctcagatggagcgttatgttttcaaaagcaaaaacaacgagattcaaattatcaacctcaaaaaaacctcaaaaagacatgggaaaagctccagctcgctgtcagggttattgttgttatcccagcgagatactctttgcagcgtatctaaatccaagtcaacattgacccattaaaagtagataaataacacctgtgtgatttaaaataataaccacatttattttacgtgggacgtaatcaaataattttagggaaatattgttgtgggatatgaatctgattgtaattaaccgcctccctatgtaactataaatagggacaaaatgtactgaaaaagggacgaaaagtcctgaagagaaagaaccctagtttgtatcagagaaatctaataagatagactcgtgcactatgcagaattttaactacaaaaccaagtaaatgttgggttttat

SEQ ID NO: 332882 - DNA, 1193 bp, Cannabis indica
agagtatacatcagactagacctatattgacattggataagatatcataaacttactgttatatattcctaagtcaatatcacttagttgatcttaggtcaatagatcttaatcctaagatggttaagttctggcttaaatgtattatttgtgttatttgacttgttcattaaagctgaccaatttcatcggcccaatgcttacatcttgggaacatggtagtacaattgagtgggagcgctaatcataaatatgggatctatagcttctataactatttgaagtgaaatgatgatttccttcgagcttggtttaatgcgataaatgattgaggccccatttcagcaattatattagtttactgaaatgtaatttacaactagctaagtattttaaggataaaatacattgaatggtagaacgataaatttatccctgctcgatgtagaacatctatagaggattttttgactatttgaattgaaacgatgggtaattcaaatcgcatctatttctgtaatagaacattctatgtaattaagatttcaattccaaatctatagtggagtcagggagaattaataagttagaaaatttaatttacttggtaaattttggatctacttattggaagcctgattacatagggtcatggtccttgaactaactggaataaaattattttgtagtctcaattaattagttttaattaatcaattagaaatctaaataaggctatgtattgtttgtgaatttttcattaagcaatggcttgtttgagaagaaaagaggatttagggttaattaagagactttgtaaggtctaattaataaataagttaaataataattttatttgatgattaattataattattaaatagatagaattgacatttatagagttagaattaaaatatggcgtttgtgaaagaaaaaacaagttgttaaataaaataacaaaattaaaattaatggggtccacaatgaggtcggtcacttagggtgcgtttgaaaagccacaatgtaattggatttgtgtgtaattggaagtaattacacaatttgacatatttgtctgaccatgtaaatacactgtaatgtgtaattggaagtaattgaggagttccaattacactctccaattctcatggccccccatgagaattgaatgtaactacactgtgtaatta

SEQ ID NO: 332883 - DNA, 776 bp, Cannabis indica
tcagaagcacccagggatttggaatctctactattgcaggacatcgagtaagacagtagttagcacgtagagttatgtacggtgacgcttatattgtaaataatatatgtgagtaattagtaaccgagattagggttattaccctaacatgtgcggtttaatagcctagggttattaccctagtgatatatgttatgtaaatgctatgccatgttgaatatatgaatatattgagatttagggttatgtgttcaaggcataaccaggttggactcggtaactagaactgagaggaaccgttctaatgccttattgtatttagacgtgtgagcgcaacacgtaggtctatgttatatagacataaataggcatgtgagcgtaacatccaggtctgtgtcacacaagcatatgagaatggcattaatatttatatagtgtgataaatatgttattgataaattatactgtcttgctgggcttggctcacgggtgctctactgtgcaggaaagggtaaagctgtttctgatcagccatgagtatgagagctagacagtgcatgtacatgttcaggccacactagaccaagcagattggggtctaccagtgatgcatttttaggactctgttttgccgcctaggtcagcttgtgaaaacgaacttgtaataacattttgtaaaatgttttcttgggatcccaatacatgaaacttttagtttataaagtttaaattattacaagtttactttccttccatttgtaattaaagtttaattt

SEQ ID NO: 332884 - DNA, 541 bp, Cannabis indica
tatgtatccttcaaatcaaagaatagtgactgaggcagctctaatctctgttcaaggaaaggtactagcgttgttcatcatgtttatttcatcttattatttgtgactataagcatggacctattctgcatccaaatttcataaagacattttaaattagagattctctgtttagaattttgttttgaatggtgtgttttctattttctatagtggctaattgaatgaattaatagtgactgattgctcaaattttgttgcaaaaagtgtcaagaaagctaggagcttggcagctttagttttagtaggagatacatgtgttgtatcaatttatgttagtttctttcacaattttttgttcatatactaccatggttgtaagtttgtaattgtactctttattactctgaataaaactatatttattgttataattattttcttaaatcataagaaaaagtattattgtaaatcattgtgaaagctatagtaataatgatattttaatcttatgaacatgataacataatacaaaaaaaaa

SEQ ID NO: 332885 - DNA, 1145 bp, Cannabis indica
tttcgatctcgtccttcaagtttttgcatttattggtactatggccaatgttgttgtggtatttgcatctcttgctgggatcccttcgggaactgtccctatacaaggggggaggcttccggtaatgtgtattttgccttgtggcgaaatatactcgctcgtgtgtgttcgtgagctccgtgtattgagtatactaaggggtgtattccttccgttgtcgcttatcctccatccgtttgctaccctttgaggacctcttgctccgggagctctgaggaggtcctgtcaagcttgcggtaggagcggactgagatggagcttgaccactcatccacgttgggttgtttatgaggttcccaaagtgtgatgaagcggaagccaaggataggctttgattatatcctggtgtagcagagaattgtatgtcgctcatttgaggagtggccgggggcatggctcccgaaacctgaactctgggtacatatcatgacactccgattggatagtattccccgtaggccactatctgggcttcttccaaattgatgtacttttggaccctcttctagaaatcatggagattggttgctctctcgtgttgtaatttgttccaaaatgggctccccgtacggatcccagcttggagaagggcaagttattgtccgtcatccaccttcttggtctttgaagcttcctttttttaacctttttatgaagttctttaaggtttctgtgggcaattgttttatgttagtcagggcactgacttcgagattattctttctcgctgcaacaaactgtctccggaagctaacttgtagtttgctccagtagtccactgatcctggttccaactttttgaatcattcgttagcggaaagcatagacacttggcatcattgttgaccccgatgactgtcatcaaccggttgaaacgggataaatgatcactagggttaaagtcttcggtatatgctaccatttcgggcatcttaaaattcttggggagctctgcctctaatatgtgtctggcacatggctctcggtcctcgcaatcggaatttaagtcatccccttttttacctacgagagaccctagcaatgtctttgcgcagcgttgccaactcaaccagaattccttcatt

SEQ ID NO: 332886 - DNA, 648 bp, Cannabis indica
tttatttcaaaaatagaaaaaaaaatcaaaattcaacctttctctctctcttgctctaccccttcaagaaccagcagcatatttgtgggtttcttcaactcaatcagggtattctagctagattttcatagctcaatccaccaagctcctttctctttgtgatttcgtaagttctaagctaagtttcatgcatgattttggacttagggttgctgtagatattgtttaatattgtttgagtattctgaggttatattattgatgttatttgagttgaatcggtggctgttatggtgtttgagcaaggtttgagtttaagaactcaagctctgctctttaatggtctttttggtttcgaagttaattgttgtgatttattacttagtttcagtttattatggtataaataggtaaactagaagttcttgtgaagtttggggtcgaattgaggtgtttaataaggaggtttttggtgtttccttcactgaaccgatcgatcgatttagtgggacctgtaggaaccaaaattccagttggtccccaggaaccccacagaactggacttcggttgggaaatcggtctgccgattggggcagtttggggaaccctagtttttcccatttttgtgatatttagggtattgccat

SEQ ID NO: 332887 - DNA, 512 bp, Cannabis indica
aagcaattgtagtttttacggaactttgattccgataaaaattgaaagagttatgaatttttgaaaatcggattgaaagtggtgtcgagtaggtgcatcgagtgcaccaggcactcggacaaggagcagttctgcgcatgtgacaggggacaaaaccctgtttgaagcacgcacgcccagctcattcacacactccactttgagcgcgtccaccctgcacctgccgaggtttctcggccaaggatcatgcagatccttcattccgcacgcggccaaccctgctagcagtctctcgtgggctgcacgtgcagggtcttggcagcaacaccccaaaaccctatttttgtgggattttttccaattttccgaattttgataagttcaaaccccaaaaattaaaataaaatattatttttaatatatttaaacttaaatataaattttaaattaataatgtttattttttaatagattattattaattttatgattttttgaggtttaaatttaaa

SEQ ID NO: 332888 - DNA, 1322 bp, Cannabis indica
actaatcagattgtaaagggttttatttagggcacaaaacccaacaggtcgaccccttaaagacaaggtttgtaaatactctcacgactgcaggtatcatgacccagttaactaaactattcaggatggcattagatcaagctcgttttgaggcgaccaagaatttttataaatgcatagattaagtctcatcagaacatgtgtggtcacctgctccaaatggctaattacttctaagaagctgagagtcatggagctattatagatcaggaaactcaggtgagtttgatcttaaatagtttgatttcagcttttctgccctttaaataaaattatgtcatgaaaaagttgatatttgacttccacgagttaattaacgagaaaacaaagctcctagttctgggactgctaatggtacagccaatcctgaggcaaacattacctctacttcgaaacctgacaaaaagaagaagtggaagaatagcaagaaacctcttaaagctgttaacaaaactaataagaataaaaaggctgctgattcaaaggcaaagcaaaaaggaaagtgtttctattgcaacaaaaagggtcactggaaaccccagtgtcctatgttttgggcaaagaaataaggtatttatatctttgctataaacgcatgtgttttagagaattagtatcccctttggttattcattctagatctactaaccatgtttattttctttttatttcagctccatctacttaaacttggattgctatcctagcgagttgagtcagatggttggacggaagggttgagattttccaagttaaagatgaagctcgtcttttatttaatttttgagttaattgttttagttatcgaacaatttagtttcaattattagtatgggattttttttccctatttcatattttgcagacaattcaatatgaaatttttgagaatattaataaaattttctctttaagagtttttcattatgaattgcttttatgaaattgagctttatatttaatttaacttgtatgaaaataccgcgatgtatttatatgtttatcatgttttatgtgttttgtgtttaattattgatgcaaaatctacgatatattattctctgaaaagagataataccaataaaacacttataatttatattcaatgtttatgaacaattgtctgttgggctttatgccttaaataaaactctatttaaatgtaatttctatcatttaaatatcaataaagagacaaaagtattttcatcactcatttaatgtgtcatttggttcatgttgtcatttatatgtttatttga

SEQ ID NO: 332889 - DNA, 560 bp, Cannabis indica
cgtgtatgaacctctcggggttcttatttcatggaatgcctgcgactaaatgggttgcatatcaagcatttgtgtacgaacctctcggggttcttattacatggaatgcctgcgactaaatgggtcgcatatcaagcattcgtgtaggaacctctcggggttcttattgcatggagtgcctgcgactaaatgggtcgcatatcgggcattcatgtatgaacctctcggggttcttatttcatggaatgcctgcgactaaacgggtcgcgtatcgggcattcgtgtatgaacctctcggggttcttatttcatggaatgcctgcgactaaacgggtcgcatatcgggcattcgtgtgctgacaacatagaactcgcgggttctggtcgagttgtcgtgcacattggtcatccggaccaaatgatggtaaagatgcagtctttacataggcttgagggagaaaacaccaagtcatcacatatactcgatatatgtctcgactgtgctaacttctctctacgtcatgcttttattctttttactatgcgatgcatagtgtgcg

SEQ ID NO: 332890 - DNA, 1217 bp, Cannabis indica
tttatctttaagtgtgataaattcaattcaaacaagcatctgtaaaatgatctggaatgagaataaattaagaatatttttttgcttctatcactacaagaaatgtcacttttaccaacacagttcactactacactggtagcgcattttgcaaactacgctagcaaaaaggtcaaagttttactagcgtacatttgcagtggctaaaatctaacttttaccagcacatttacgcactaggaaaagtcatttttgccagcacttttcattttgtgcttgcaaaagttctaataccaacgttgatttaccaaccccttttgccaacacatcagaagtaaattctattttaccagcgcaataccaaacttttgccagcacattttgtgacatttcttatagtgtattttagaagcctaatgtatgcctaagtgcatgaataagactttgcattgtatttgtttcaggatcgttaagtagtaactgaagttaagaccactttattttttatacaaagtgacgaggtatctttaagatactaaatattatattcatgcatattttgttgagatgaattgaccatctggaaatatagttaactaattaaattccaacgtacttcactggttatattaatttacgtaaatcaatgtttgattatgcccttaagattgccagtaagttgtgttgtggagaaacttaattgttatttccactatagaagataggttcatttattgttttgagaatacatctcgtatggtgtattatagagtttcatagtaagcttagagttcagaattatattttaggccactaaattttttttgcgacaagttcagttacaatatttgtggctaataaatataagagtactgctagcatatcgacattaattatttagtcataaagagacgtgataagtggtcattaagcacacaaacagaattggatgatcgtatatccttgactaaaggtatcgtaaagtaaatgtgggattcagttacccaatatacaattttgtttgtacaactaaaattatttaatgaaattctaatttcgatattttctcatatttatgtgcaccttaattttatctgagaatattatcataagaggaccagaataaacataaggtttagggtttgtttgcttaagtacattaccacattaagtatattgttatataataaatatatatatcgtaatacatggaagat

SEQ ID NO: 332891 - DNA, 1998 bp, Cannabis indica
ctaatctcgaggagtctctcatggacatctcatctttccttggggaaattgagtacacgtgtcctttaaacaggagtctggtctcgagtttctgggtgagaaaaatctcactataacacatgcccctagtttcgcgacttgacaggtgcgatcataagggaaactatacgcgagagacaggtgaaaggttgtcacgaggtggtgacttttggttgtcccatcgagggtttcaaaaaatgaaagctgtaattatttcattttatcttatttatggtgccacgtcacgaaacccttcggtgttcatgttggcgtgcctatggctgaccgttggatgagatgaccttaggcattcctgcttccaggtgtcacaatcccaatttatgaggggtaacagtatttaagccccatgatatgaagcaaatctattattttccctcttatttccaactcctcttttccccttctctctatagtttcaaagacttacgtccttcatccatatttccgccttttcttcttgaatctcttaagtttcagaagtaatcgagaccaaccacagggagaattgtcaaaactaaaggttagttttcgaaactacttgcgtattttggtttctaattttgaaaaaactgcgtttctaagttttttagcactttgagaagtttgacaatgcatgtttagttgtagggaatacacatagagttttactcctttgtttaaaattggataatccccaggaaaaacagacctgtaattagcataaccgccaatttaggaagaatagttttaatactcgcacctttttgattgcttatccctgaatactcgcggatattcagatgagcatcttgaatactcgcatatctgcttcctttaggatttcctagagactttagcatttttacctgttgtttagaacttagggttttattttgttgtgggaatactggttaagtctttcgaatggtgggtgtgtcaccgtattctaatgttcatgcgtgcgatcgcatgttccttgaagtactgtgattcacccagccatttgcaacataggccagtgttctctgttcccaaataatcgtattcttcgactagtagatttgctcgaaatggtgggtgtttcctagtaactttaggatcatgctccaaaacgcatgccccttgggtcactgggaaacgcccagccgttttttgaggtatatcgctagtcggatacgcgtgacatactcgtaggttgtgattggtcaggttcctcaaaacggtgggtgtttcccagtaacttcaaggtcatgctcgaaaatgcatgccccttgggtcactgggatacacccagccgttttttgagatactcctctattcgcacacctgcgattttgtgccttggtgggctgattggtttttcgcgagaattcgaatcagccttctaagaggatttaaaagattttatgcgggtgaggtcacttatattgttttcgcacgttcatcacactgaaaatatcttctatctttcagatgagcgatttatcggacagtcagatgtttggctctggaggcgatgacggtgatcaggaccaggaggacagctttatcccaacctcgatttcagaagaggagaccccagttgctggaaatgcagagataggtccgttgtcctccgtagacatcgaaaggatggttcaggagcttgctaaaccaagaactatcgagattttagacagcgagtctacggtgtcagctcgcgaacaccttgttcattcccggcatgctcccgacactgaagtcgaggagatggacgagggctggaatgctctagatcgcgagtcggatgaggaagacgacgctgagggaagtgggaccgattcagtggataatacacaattggacaagcccttctcgtgcgaagacatggtctcgcgagtcaccaaatctgatctcaccacctttacgagattaaacttgttgccactcgcctccttgcgtcctcgtcctacccagaga

SEQ ID NO: 332892 - DNA, 696 bp, Cannabis indica
aaggtcaggatgagagcattcatcaagtcacaagatgagaaggcttggagagctatacttataggctggtcgcaacctactgaaagtgatgataaaggtaatactaaggtaaaacttgaactcagttggactattgaagataaaaaaaattataataataaggctttacatgctatttttaatggtgtcagtgaaggctttattaaattcatttcatcttgtgaatttgcaaaggaagcatgggaaatccttcaaactcagtttgaagatactgttgatgtaaaaagatcgcgttttaccatgttgcaaactagatttgatgaattgagaatgtcagaaactgaaactttgtctgaattttatgaaagattatctaatatttctaatgagtttttttccttgggagaaaaattagacgaatctatcttggttcagaaaattattcgtgtgcttcctgacaagtttgacacaaaattgctagtaatggaagaggcaaaagactttggcaaaatgaagagaggaactcataggttctttaagaacttttgaattgaatcaacaaatcaagaaaaagggtaagcaaagttctgtgagtgagaaaagcaaaggtattgattttaatgtttttgaaaatattatttctgatgatgaaatggccttgttgataaagaatttccaaaaatacatgaaatctgt

SEQ ID NO: 332893 - DNA, 666 bp, Cannabis indica
tgtgaaccctcgtaacaaaaagtataacaaaacattaaataataaataaagaagataacttaaaccagttcatcaatcaaccatatgaaaaaacaaaaaacacatgcacacaaacaaaaaaattttaaaactcacaaatataattaaaataacatacaatgcacaacaaaaatttaaaaacaaaatataagtataaaagtagtttcaaacctagaaataaaataataaaaagaaacttaaaattaaaaaatatacaataacttcataaaattgagcaacctcattacagaacccttaatgtgaaatcagtttcgaacctgcaaaaccagtttcaaacaaaaactagtttcaactaatctaaataagataacaaagagtttatatcaaagctaaaaacccatcatacaaaattagttttaaccaattcacaaaatatagtaatgctacaaaataaccaaaccaaacttttaacactataatcaacaataaacaaataatactaaaccagtttcatcacattaacatcaactaaaaactaacacattaattgacaaaaaaaattctgaaaccagttccatcaaacaccattaacataattgaccaaaaggaatgaattaaaaccagtttttgtaaaaggctaattagtaatttttctccccgaacttt

SEQ ID NO: 332894 - DNA, 775 bp, Cannabis indica
gttcggttcttctgggccaatcgtagcaggaggatctgttgcttgaacaggaggtacatcagcactctgaccggaggttgaagcagccgcctcagttttgtcataggccacttgggacgcgcagaactcaaggtacatgtccttagcatcacccaagtagtcaaaatttgcctgaggattagccttccaaaatgaaagaagagctcaagactggctgtctccaaggcattgaccttctccttcaacctggccacctcagccgaaagctcctcctccttggcttcctttttctccttcatctgatgaagaactactcgaagggaagtcctctcatcctgaagacaatttaccttagcagataaggtctcgatggtctcctcaaaacagtcagcaacctcgagatccttagtgagctcagtgatcttcttctgagcggcaaacagtttcttgttcgcttcacccaactccaaccgaatagctccaacttcttccctggcttcttcagcatccttcctagccaagtccgcctccgcactcatggtgtcagacagagccgtgttcctggaagcagcagacttagcccgggagtaagtgtaggccaacctcagaccgacctgcataaggaaaaagctttagcatttgagctaagtatggaagattaaagggaagtatcctaaaagacttaccctggtgaactccttcaagactccgcccactagaaattccaaagaatagtcattgttagcaccagccagttgctcattgacctcaggaa

SEQ ID NO: 332895 - DNA, 1779 bp, Cannabis indica
aatttgtgtcacacaaacaaattcgattgtaatttattaattataattttttggtagataacaatcgataatacttgggtgaccatgagaaatcgtaaggatccagcttactgggaagatctccaagtctttatggcacttgcgtctaatcacaaagattgtgacggaagaatttctgtccttgtgttagatgtaagtaccatactacatcctttgaacactgtgcagacacatatctttacaaaggattttgaaagcagttatgagaggtggatttaccacggggagtcggatgagccagtcgaggccaacaacaatgttgatgtcgatgagatggttgatgtaattgaagatttcctccctcctataaacgatgaagaaagagccgtcgatgatgatattcaaaggggtcaatattatgataaaatttttgaggagatcgaggtagaggtgtacccgggttgcgattggatatcctcccttaactttacagcaaagttaatgcccttgaaaaatttggagaaaataccaaattatatttttgatgaattgttgaaattacttaaatttactattccaaaggataacaaaattcctgcaacacataatgaggcaaagaagaaattaggaaaattaggcctagggtacaaatcaattaatgtgtgcgtgaataattgttgcttattttacaatgagcatgcattgaaatatttttgcccagtgggtgggaccagtagatgggttaatgatgagaacacaaggggaaaatagtagcgcataaggtaatgtgttactttccgttgactcctcgattgaaaagattatatagttcaagacgtacagccaaagagatggtatggcatcatactgggcgcgtgaaagaaatggtgttatgcgtcatcctgtcgattccgctgcatggaaaaactttgataacagacatcttgatatccgcgaaatgtttgattaggtttagttgttgatggatttaatccttttggcaacatgagccaatcgtatagtatgtggcctgtagtgttggaaatttacaatctgccaccgtggatgtgtatgaaggataaaaatttcttgttggctctccttattcctggacctaaatcactaggtaagattatagatgtatttttgaggccactcgaattgtggactaacgggattgaaataagagatgctacaagcaattgaatgttcaagttgcacgcagctcttctttggacagttaatgattttcctgcccgcaacagcttgtctggatggagtggccagggatataaagcttctcctacatgcaacgaggatactagctccattcgagtgattggtaagacctcttatgttggccatagacgtttctttccatcaaatcaccgtatgagaaaggactgtgaatttgatggaaatgttgaaaagggacttcttccaagacgatttacttgttccgacatattagaacaagtgaatgcgttaccacaacaagctatgggaaaacgaaaaagaggtgtgattgaaagtaattggagggaaaaaaacatattttgttaacttgatgttggactttgtgccctaaataaaactatatttcaatgtaatctttatcattcaattatcaataaagagacagaagtattttcatcatttatttagtgtgtcatttagttcatgttatcatttatatgtttatttgatttataaattcatccaaatccttatcacattgatatttttgtttattgtgtcctcagcacagtggaaagtaat

SEQ ID NO: 332896 - DNA, 847 bp, Cannabis indica
agagagagagagagagagttcggccacactacaggctgaaaaactcttggtttttcaatcgtattttcaatcccaaaaattgtattgtatcgtcttaattataaactatatatatcatatatatattattaaaacccttttttaaccctttataaaataaatgataatattatttttaatttgaaatttaaaatctaaattcaaaaataatatctgttgatgctgaaaagtggccaacatcagctcgctagattagcaggatgataaataagtttaagtaaataatttagagagacacacgaaatttatagtagttcatccccatgtcgtgatggtaatggagctacgtctacttttagtttttctttctcacgagagttctagaaaaaggctaagtgtttaagccctagtttttagagagagaaactagagagagaagctctaaccttgtgggtagttcattgaatgtaagaaatgacctaagggacctctctttttataggtgaatgaggcccacaaaaataggaaaaaaatacaaattacacatttttgacctaaatgatgatcgaacggtgaaaattagcttctagtggtgatagctttttttcgtagcctagtggatcccactgcgggtacccagagcttatttttgtaacttccttgggggtgaattttgacgatgatagctttcgaaatacgtctaaagtgtacgacatgacttgatagagcattgaattagcttcgaaactcaagttgaatcgcatcaattgaatcaaaattgagtgagttatggttgttttactgaaggcagttcatgacccaatgcccaagttgacatccagtgccc

SEQ ID NO: 332897 - DNA, 646 bp, Cannabis indica
ttcaaacaattttactacagttctgcatcatttaaattgtttaataatttcacttggtaattattgaaaatagaattgtgattttagaaaattgtgttttgaaagataaattgacttgtgttttgtgattttagaattttttttcttgagagaaaaataatcattttctcctaggcatattcgagtcaatcaatcaatggttaatgtttgaacatcctttgtgtagcattatttcaagctcctatgcaagaatagagctacctacatcagtgtgtaaaagccatcttttgagtaagttggtacttagtaattcgcaattatgaagaagatacgctaccataaaaaagggctaccatgggtatagtgtgacatcgtcttcataggttataatttttacatttaaaaaaaactttcttgtcaaatggacaatgttcccttgcatacgttatcacacacatatgtttgaaactttgcagcaaaaatattacacggtttattttaaaaaaaaaatggatcaaactcttacttgttgattgattttcttaaagaatatgtgtttgtaattgaatcgtgcttgtttctctcaaaaattctaactattttttcaaaaatcacaagtatttttatctctatcatacactaacat

SEQ ID NO: 332898 - DNA, 846 bp, Cannabis indica
tagacataaatagacgtgtgaggataacacgtgggtctatgctacatagacaaaaatagacgtgtgagcgtaacacgtgggtctatgctttatagacataaatagacgtgtgatcgtaacacgtgggtctatgccacatagacatatataggcttgtgagcgtaacacataggtctatatttaatagacaaatagtgtggtggcaccattaattatgtgttatatatttattgtgtacatggttatttatactgtcttgctgggcttggctcatgggtgctctactgtgcaggaaagggtaaattagttgtgatgccatgagtgcgagatcttggcgatgcttgtacatgttcgggccacactagaccaagcgggttggggtctactagtgatgtacttttgtaacatttcctcttaggtcggctagtgaaaaggacttgtaatattttgtaaaatatttttgggatcccaaattatgtcacttttgtttataaagtttaaagttattacaagttttattttcattatgttttagataaaagtttaaatttctcttatctatctagtaatctcgttttaggggagtagggtttcattattgattagcatagtgtgcctaatagttagggcgttacagataaaatacctcgtgtataaaatcgttgacaacccgcttgtcaacttcctgttttagtgcctcttgcctctcggaatccaagggcctccttttttatctcttcaccgggtagtttggatcaacatttaagtgatgacagataatcttagggtcgatccctatcatatccccatgactccaggtgaattgatcctggttcgccttcaaaa

SEQ ID NO: 332899 - DNA, 812 bp, Cannabis indica
ttttaattaaaaagaactttttagggggcaattattatacctaaaatttggttatttaccaaaagctgacatgtgtactacaaaaagaatatgaatcagctaaatgagtataatattaagttgcattattaaatgcgtcttaaataatttgtttcaattaattatagttgatagaaatattcaaactctctgccacataagcatacatgagataagaataataactattaacagatgtgattgacgagacaatatgtccatcttggagcagacaaagtatataatagaagcatacaagacgagacatcaagaatcttgcagctcattgacccacatacttgggagtaaaagcttgcaactcattgacccacatatttgtacataaagaaaataactacattcatccatctcgccctctacatgacggagtagccatgtaacgccctaaataattacacatgctacccaagttatttacgaaaccctaatcccctaaacaggattactaatcaaaatagcgcaaaaattaaacttttgcaataaacggaatgaaaataaaacttgtaataatttaaactttacaacagttgggatcccaaaaatatttacaaactttattacaagtctctttcagttagccggcctaagcggcaaaatagagtttcaaaaattcaacactggtagacccttaacccgcttggtctgatatggcccagacatgtacattcttcgcccagctcttgaactcatggctgatcagctaatgccttaccctttcctgcacagtagagcacccgtgagccaagcccagc

SEQ ID NO: 332900 - DNA, 1892 bp, Cannabis indica
ctcctcgccctggggagtgccccaatcaaatcaatcccccatattgcgaatgggtacggcaaggtcatcattcttagttccgttggtggtacgtgaggtatatgtgaaaatctctaacacttatcgcattttttgataaatttgtgtgtgtctttatttatagtttgccaatagtattgttgtcaaattattttcttcaacaagctttaccaacttgcatggtctccacaaaagcctctgatataatttgacatctactatcatgtagcgaggtattaaatatagaagttttcgtgcctcattgtcttctggaagttgctccctgagaaaatagttgactataggtgtcatccaagtgggcgagttgtcaatcatctcaacttcttccttttcacatatactcatttcgtttaacacttccagcagtaccaatttcaattcatcaagttcgttctgtgaggccagtttttccaagccgtcagcgttagagttttgttctcttgatttgttcgattttaaaataatcaaacttctccaagttcttccaaaccttctctaagtatttttccatttttaaaccctttgcctgatattcgcctagaacctgattcacaattaactgggagtcactataacacataagattattgacttttaacactttagttattctcaaaccagctatcaaggcttcatactctgcctcgttgttggaagtgtcaaactggaatcttatggcgtagtgaaacttaaagttttttggtgaaatgagtatcacccctgctcccgagccatcttcgttagatgctccatccacgtacaacttccaactgtctgcttcttactgtctaaaaggattttcatctggagttatcccttctgttaggaaatctaccaaagcttggcccctaatgaatgtccttgggtgataagttatgttgaactgtcccagttcaatagaccattttatcaatcttccagatgcatctggttttgacaaaccttgtctcatgggctggtcggttagcacctttcttggatgtgcatggaagtaaggtcttaattttcaagatgcatgaattagacataggacaagtttttcaagagggggatatctcgactctgcccccaacaaatttttactaacatagtaaacgggttgctggtgcttttcctcttctcgcaccaatgccgcactaaatgcgttctccgagatagccaagtaaaagagtaaagtctccctagttattggtttagccaaaactggtggtgttgataaatgcattcgtctgtcaattcgaactttttgttgccctgcagtacattggagaatggtaggcacttatcagttgatttcgagatgaatctattaagagctgccatttttcttgttatggcatgaacttccttcaactttgttcgtgatggaatttctatcaaagccttaattttttctagatttgcctcaatgcccctcgcgttgactatgaatcccaagaattttcttgaggaaaccctgaaggaacatttctttgggttaagtttcatattgtactctttcagtattccaaagcactccacgaggtcttttatgtgatctccactttttatcgaattcactaacatatcatcgacgtagacctccatgttcctgcctatttgtttttcaaacatttcattcaccagtcgctgatacgtcaccccaacattctttaaaccaaaaggcatgactttataacaataaagtcccatgttggttacgaaacttgtatgcttttgatcagggacatgcatcttaatttggttatatccagaatatgcatccatgtgttggaaattattttaccaggatcttagatctactcacaaggatgttgattaacaccctaaat

SEQ ID NO: 332901 - DNA, 525 bp, Cannabis indica
agtcgggtatcgctgttcatatttttttagctgatgggaagcatgggcgataagccgatcggcctgcatcagtacacaccccagaccctgtttggatgcatcacagtaaactaccaacttttctttatcagaaggtagggctaacactagagttgtggttaatctctaattctgctcctaagagcttgcttcacacttgtccgtccacacaaactgctgattctttttagtgagctcagttaagggtgtttaaatcttaaagaacccttctaaaatcgacggtaataactagccagacccaagagcttctaacttctgcaactgtcttcggtcttggtcaatccttaatagattcaatctttcctggctaaaccttgattccatctttactgagaatgtgtccaagaaaagacacctgagatagcaaaaactcgcacttcttgaatttggcatacattttttgttctcgtagccgctgtagaaccatccgaagatgttgctcatgctcctcttctgattgagagt

SEQ ID NO: 332902 - DNA, 915 bp, Cannabis indica
tttccatattcttccagtcttattatctttaaagattaacaataaactttttttttgtaaaggagattaacaataaactttgattctcgatttaaatgctatttttcaattctattttcatatattcaaaattttcattccataaaatttctactaatgtttttcaatcaataaaacgaaaaggcaaactttaattcatgtatgaaaaattaagttttcaatcccaataatcaatagaaacaacatcaaatttcaagttctcaaaatctataaaaataaataaataaataaaaacagatctcatagatacaaactcaaacattagaaccacagtaaaacacgagatgtttactaattttatatataagaactaggtatattgtaatttcattttacgtgataatgtgtattttattgtaccacatttgttttaaaggttatcaagttcgatctagttgtattttttagatgttagattttattattcgattcgatttaattaatttcaatcaactgattgattttatatttgttgaatttgatcggttctatctattaaatgcgtttcacgtatatcgattacattgactcggatttattcaatattttggacctaatatatttttggatcgaattgtatccatacaattttttagatccaatatttattaaaattggatccaaataaaaaaaaagtgaaattttaatcgtaattttgacactcaaaatagtttttttttttttgtatttttacgaaattccacacaaaaacccctatagcaactaacagagcaatctaaatcgcaacccaaatccatatagcaacccacataaaaactgtcggagaaaccaccggagcaagccaaaccataaatttgaaaaaaaaaaagttaaaaaaaataaatatataaggta

SEQ ID NO: 332903 - DNA, 563 bp, Cannabis indica
tatgaagctatgctgcctgtagaattcgagccaccatcccacaaaagaatgatgttcaaacaagataccaatcatgtactcctagccgaatcacttgatgaaatcgaagagagacgagccactgaaaacttgaagttgatggcctataaccaaaaagtagctcgatatttcaacaaaaaagtaagggctcggaaattcttcgtcagagatatggtcctgagaagggtattcttaaacaccaaagacaatacgacaagtgtacttagacctaactgggaaggaccatatcaagtggtcaaagttctcgaatccggagcatacaaattaggtaagtatgatgaaaaaatgcaactcgttctagtaccacggtattggaatggggaacatttaagaaaatactaccaataaagtaccaggtcagacgaccacactaagtactgaataaaaatttactcttaagtgaatggcctgctgggcggactacgctcaaaggtttcgacaaaaggaaaaaagtactcaggtcaggcgaccaccatttaaagtacaatttctatttctgcaat

SEQ ID NO: 332904 - DNA, 1040 bp, Cannabis indica
ttgtatccatcctcctcttccactagtccttgccgactactggaagccatgataaacacaagtactcacaaaagatgacaaaatagaacttttcaacaagaacagaacacacagaataaaatctctctagaggaaagagtacacaaccatgtcacaggacaagacttttagaaattgatggaatctcatactttgaattataattatatttaatcatataaattaatacgatgttcattataattgataacataaggaaaatttcactttttggccttaataatacaacacatatcaaattttataccccttactaatttgtacaaaacaattccactatttttaaattctacccaaaataccccttacatttaattttcccactctctctttccctctctctctctctctctcttctttccgtttctctctccgtctttccctctcctcttcgtccctgcccacgaaacaaaacaaccaacaacccaacccgaccacgaccacgactaaacccagacgccgacgacgacgacccacccccacgactaaacccacagacgcgaccgaggacgacgactcacccccacgatgcgaccgaaccacccacgacatcccacacagatccacattgatccacgacgacccacgaccacccacgaccagcacgaccacgaccacgaaccatcgagggaacccgaattataaccgtaagttcttttctcattaaaaattagaattttcatagatttggatgcgaatttgtgtatgttcttcatattagattgttttagattgtgtattcgaatttggatggttttctgcatgttcatcagttgtgtctatttgttgaaacaattttatcgatgcgatatcgataggatatcgatataatatcgacaaaatgaccattagaaatgtctgtgtgataaagtgtatcgataggatgtcgattgtgtgtcgatagaatgtcgacatatgttgagtgaaaaaattttgaactgaatttagtgtttaaatttatttgtcgaccacatgtcgat

SEQ ID NO: 332905 - DNA, 956 bp, Cannabis indica
attaggttattttcacgttacaagttatttattatttatttttattgaatttctaaattaatcacaaccatttaatagtaatccaatggcttaaaaaatgtaaccatatggttacaataaaaatattaccattgaaaccttctccttattagtttttattttctttgtatttgggattaaatttgagacattttatgatttttaagaatttatttatagaaaatacaatgggataattacataaaacactattttttgtaaaatttttacatttttatgattaaagatttttttttttatatttttatgatattctataaaaataacaagaaaacttcataaaagtaacagaaaaataacatccaaacaacatcaaaataaaaacagaaaataacatacaaataacaaaaaatcaacaacaaattaataagagtacaatataaaaatatatcaaaagactatatttttttaaataaaattataaaaaatcgtaaaaatatttaaaattccgtacaactgtatttttgtaattttttgttatttttgtatcttttttgaaattattcttttttatattgtactgttattattttgttatttttgttattgttaatttttttttatcatttgtatattatttttatattgtttggatattggtttcctttatttttatacatttttcttgttgtttttataaaatactgtaaaaatataaattaaaaaatatttgaacgtcaaaatgtaatttttttttttatcaaaaatagatcttgtgtaaatttttcaaatttattttttttttaacaagaaaaaggatctttattacaagcaaaggaatacagcacaagcaaaggaaaacatgttgggttttatgccctaaataaaactcatttcaatataatcagatttgtttattaatatagatcagaaataacatttaatgttgcatggtt

SEQ ID NO: 332906 - DNA, 836 bp, Cannabis indica
gtatcagacgacatcctgaagctcgaataagcaccacgctcaggttgacaatggcctggtgcgctgggttctgcttatctgattttgattttgtctcaatcattctctagattttcataataattgagagccatgaagtttgaacagtcaaattcataacttcattttttcactttttcaataaggtgatttactcaaaaactaggtaggtttgagtctcccactttgcaaaacatcaacatctctaagaactggtgaccaactttgccagaaaacaaaaatagaccaagtgatgtcaaaatatcacttaggcatcaaaaaatacatctctgaaatgttttcccactcacccagcgtccaggttgacatcacatgtcaaccggggcattagatgccacttgggcgctgggatgtcaacctgagtgctaggcccagaatagcctttagtaaaattatcataaatcactcaatatggatttgattgacacgattcaaattgagtttcgaagatatttcaatactctatcaagtcttgtctcatagttcaatcacaattctgaagttattggctcaaaatttcactccaaaaaagttacaaatttaagctacaacttactaggagagggtcccgccgtcatgagttggactccaaaattgacgttcaacctctgaagttaattttcaccattagataatcatctacaatcacaaatagccaccttttattttttttcatattttttggattattttattcctattttcaaggaccttcttcacctataaaaagagagctcctgtagctcatttttcacattcagaaaagtagccataag

SEQ ID NO: 332907 - DNA, 688 bp, Cannabis indica
cttatccgattttgattccgtcttgaacattcatctagtttttcacaataactaagagacatgaagttaaagttgtcaaattcacaacttcacattttcacatttttgacaaggtgatttactcaaaaactggataatttcgagtttcccatttctacagaacagtatcatcttagagaactagtgaccagcttcgtcagagcatagaaatggtctaagtgatgttaaaatatcacttaaacaaaaaaagaaatacatccccaacacattttccccttacatagtgtctaggttgacatcacatgtcaacctgggcgctggatgttaacctgggcactaggccctgaacaaccttcagtaaaatagccataactccctcaatattgatctaattgacatcatttaacttgaattttgaagatatttcagtgatctataatgtcatgtctcacactttaatcgcaattgtgaagttattaattccaaattttacccctaagaaagttacaaatttaagctacaacttacccaaagtgggtctcgccgccgtgactcaaactctaaaaattgatgataaacctcaaaagttaatttttactgttagatcaacatctacggtcaaaaatagcctaaatattataaaatattataatttggagaaagaaaatagagaagagatgagaatttt

SEQ ID NO: 332908 - DNA, 1227 bp, Cannabis indica
gtcctatttaaagtagaatttacagaattctaaaactttgtttgataaatatagcatttttaaatttgtgtactttatataacaactaagtaatataaccgttctttgtgcaattattataattttttgataaaataattatttatcaatataataaataataaattaaaaaaattattttaataataactttatttattaaaaaatatattatgattttttcttaaatttatttaccatattatttgttaacggaaactttcgttaactaaaattgagcctcacaatattgatttcacacagaaaaaataaaagctataaaaaaataacgtacgaacacaagatttttttacgtggttttacagttaaaattctgcatagtccacgagtcaatcttattcagatttctgattattgtttttttttagaaactctcttgtatgagttttttcgtcctttttttggatcctgtttgtcactatttataattacatagtggacaattgattacaaagttgaccagaatatgattacagtaattatccctaaaatcgtgggatttgattacatatcacgtagtgtaaataccgtttatgatttaaaaatcgtatagctgtgacttttccgcttttattgggtgaaaaaaaatcgtgtattaaacacatctttagttgttgtatctggagatgtctcgacagaaacttcgttatagtgatccaaatagcgaactgggaccattcttccttccgtggtcgacgaggtatgtcttgtgtcgatcgcggttatttacaaagaattcttttgaatcgccagggttgtaagcctcgctcccgttagctggatgaagctatagaaagtcttcccatagcgagatggtcacctcgcttgcttgttcttgagccgatccgacttttacacttagtttgttcattgcacgctaaggattttcacgattgatatgtgtcgctttctccagtgcctcgctattcgcatttagcgatatatggtttctcgctaataataaattaagtgccagcttgtacattgattcctcgcctaagatcttacagtcagcgagttacaaatatactctgactcttatgtaattaatgagttattccataagagcaattgcatcgattcacattcctttcatcttgacacgtgtccttcattgaggtggcagcagaattttgggtataacaatttgccccttaaaaagttttt

SEQ ID NO: 332909 - DNA, 698 bp, Cannabis indica
tgagctagaatgagattgtacatgtcgaagcagtgcaacctgtgttcggtctcgggacatctgggaattgtattttgtagtcgctgtgcgacctgattattatgtattttggtatattacgtttaagagtttgaaaacgggatctcgacacttgtaaatattttgaagtaatataaagtttaatatataatataaaagttttaatttgacacttttttcaagaaaactctttaattagcaaagatcgcactgtaattgaaaagcactgtagcgtaccttagcattagggcgttacattcatggttagatgtagaaccaaaaactatatcatcaacatagatttgagctttgataaaatcagattttatatgcttgataaaaggagttttatccacactacctctttgataatcatgagaaattaaaaattgagttaacctttcataccatgcacgaggagcttgtttcagaccatacaaagctttttcaagtttgtataacatggtttggaaactgaggatcttcgaatccttttggttgctcaacataaacttcctcactcaaaataccattcaagaaggaagatttcacatccatttggaaaaatttaatatcaagaatacaagcaatacacaagagtaaacgaattgatgctaatcttacaacaggagcaaaagtttcatcaaaattaatacctt

SEQ ID NO: 332910 - DNA, 1173 bp, Cannabis indica
ccaaaaatagagggctatggtccaacggagctccctccaaattgtacagtttagccaaagaaaagagttgaagccaagagtgtgtagttaacactctatcaatatggcattccatccaattagatgtaccacgacctctttcccaagtaaattgatggccaactaattccatatcaataagatgtgcttcctgaagagcttgattaaacccacagattaaccattggggatatggagctcctcctctcttatcttcttgagacactatattgtttaagtcacccataacacagcaaggcatgtttgaagccatagccaaagtagtcaacaactgaaacttcaacaccaatatgattttttgaaaagccaaggagttttgcttgctccttttctttccaaaataaagctaacccaccattatgtccatctggttcgacaacaaacattccttcgaatcccatttgtcttctaaatacctccatcttattcttcttgcagaaagtttcacacaaaaacacaaaaacatgtttttttttaatgtaccacatcctttaggaactgaacattctgaggaagtccaagaaagaccccgacagttccaactcaacaaactcattgggaaaggcgggtctgacccatagaacccgccaattacaagttttattgtcccacagtttcactggcctttagaagttccaatcttacctcagtttgggcccgcgacccactttcattattcataaaactaatgtcaaattcgtggcattaacctccagagattttctttgattcaccgttattccaaccacctccgatcggccactgttgaaacctgtttgagattgaccactacgttccccttcgttgatgccaatcctgagccattgagcccctattaacttggactgttttcgatatggtgctttcatgaagattccataaggcttgacaatgttcgcctccggtgcatcgaaaagctttggacaaaatcgttcagaatgaccaataatatcacaaataaaacaaaacattggacattctcatatttgaattatttattaaaaataaatatgataagttattttattttatatttattatatattattttattttattttataatttaattatttttattattccttttattttattttgaaaattattatt

SEQ ID NO: 332911 - DNA, 502 bp, Cannabis indica
tttttaattaaaaaaaatataaacatagttttaaaaaacttgaaccaaatactattaaatttttaaaatgataagaaactgtttctgttttcacttttaaaaacacaattttaaaaattaaaaattaaaaacatagcctcttaatttctgcattttgtttgtgtaagtgttagtattttgtgacagtttagttttgttcaatgtctagtcgtgtctggagtttttagtctgttatatctgcactagcgttctgttaagtcagttactgttaagtgttagttagtgccaggtgaactattttgtggatatataaatagtcgatttcagttagtaaaaaagatcatccataaaatcgtatagtttgttaattcagttgttcgtggagttagtgtcgtatcttgtttcttgttgttgtgtctacaggtctgatcacatagcttgaagatggtcatcaatggcggaatgatcagagcctggagttgctgagttctaactgaaggga

SEQ ID NO: 332912 - DNA, 716 bp, Cannabis indica
gtttagggagagagcgatttggagagagccagaggaagattgaaagtaatatttggaacccacattttatttaaaattgtcttataagaagttaatcttatttccattctaataaaatttctatcctcaaaatagaaaaagctcatacaaaacatactaaaatattatttcataccaaacagcccctcaaaatatgtgggtttaatctctgaaatccaaatgaaaaaaaaagtgtgttaaaaagcattttattttagagataattacttagacaaccgtaaatacaattttatttacatcaactacaatgtttatattgattataataagttgaacatgttataattttttataagttgttttaaaataaatttaattaaaatatatttttatgtaaatttaaaattaaaaaatatatataattaaaattaaatatttagtagatataaaataaaaagtaaaaaaaattatagtttagagttttgttacttaaatttataattaataattcaagattaattataaataaagaaatattaattattgtgtagttttcaaaaattaatttgaactattagattaaatcaaaagttataaattattatgcctattgataggtattttactgtagtagtcccctataaatatttttatatattaaaagtgtctatctaacagcattttttggtttaacatttattagtttaacagaatat

SEQ ID NO: 332913 - DNA, 892 bp, Cannabis indica
gcaaatgctcaatattctagtggttttttattaccgagccgtgaagccgagcctatttataaaccctagctccacctattgcctcgatcacataaggatcttcccagtttggattaaatactcctgcagatgcatctctcgtgttcgcaaatactcgccttagcaccaaaacaacgacattaaaaagccttttcttcactttcttattaaaatatctcgtaactcggtgtcgatatgctgcattagtaatttgcgacttagaaattttttcttcaagtagatccaaggacaattttaagagttcttggttttcttcctaattatagaaatctcgtctgtgtgtcgcaatattgacttctactgacaacattgcctccgagccagatcccagcaagaaccgagtatgccctgttgctgttttctcagtcgttctgtgagcccaaagtacttgcagtagttaatctacacatctaccttttgcagcatccaacttctttctaatagtatccttcaagtttttattaacagcttctacttgcccatatgcttgaagccttgagactggtgagaagctcttaatgatcttgttcctctcacaaagctcagtgaataactcaccatcaaactgagttccattatcatatactatcttaattggtattccgaatctgcaaattatgttcttgacgacaaagtcgagaactttcttgcgttgaaagaggttcaacctctgtccactttgcaaagaagtcgacaaccaccactgcgtactttgctcctcctcaccttgtggggagtgccccaatcaaatcaatcccccatattgcaaatgggtatggggaggtcatcattcttagttctgtggtggtacgcgagatatatgtgaaaatct

SEQ ID NO: 332914 - DNA, 553 bp, Cannabis indica
accatccttctttttcataaataaaaccggatctccccaaggcgatacactgggtcggataaaacccaatatcaagcatcccctagagtcgcaacttaagctccttgagttctgctggagccattctatatggagctttagaaacaggttcaactctaggtgccagatcaattacgaaatcaatttctcgttgcggcggcaacccaggcaactcctcgggaaacacatcgaggaagtctcttaccaccctgactagagtcaattaccactgctagaaatccaacacaaccactgtctagtaaatctctatccttcaatacagaaatgactgggatccgagacccctgaacagatccaacataaacaaacggatcttcaccttcttgctgaaaaatcaccatcttccgcttacaatctatactcgccgaatacttggacagaaaatccatccccagtataatgtcaaactcagttagttccagttctataaggtcagcgctcaactccctatcttcgatcctaaccgacatagacctaatgcgcctattagaga

SEQ ID NO: 332915 - DNA, 502 bp, Cannabis indica
agttgtctactattaaaggtatgctagctatgactctacaataatattgttcacaatagatttttgtttttttaagctatgaatagagtatatatagctatgtgggactcctgttggttttcataatccttacagttcatcatgatgagcataaataccacttgtttagtttgtattttaattatacgattaatgtttttttatatcttttattttacagttcaagtcagacgctccctatagtaacgaggagatcaatgcagtacgggatgagtggactgaatttgtggagcctttgattatcaattaagtacaaggttactacttttgttataatacatgagtaacaagttttatgattattgttatattttgcatatgtaattagtttatatctagtttacgatatacatagaatttaagttttaggatcgattctattaacaattttagtattatgtgattagttaatagaatcgattactaattttatgtaagtttt

SEQ ID NO: 332916 - DNA, 632 bp, Cannabis indica
gcttggttccctagatttttgcctttaggtacttggcgaggattcctctagttcctttccaagtccagcgggcatggctttaggatgcacgtggattccagctgcttccatggctttttgcatggccagcattacctcttgcatcttttgattttttgcattttgggctgcgatctcagcctcatgatcgacagccttttgtcttaagagcaccaactccgagtagctaccttcatcgtaggcgtactcgtcgaggtttccctcgtaatcatcgtcaggaattccttcttcttcctcggaaccctctgttgcccttgaggccacgtcttcctcatttgggtcttgagcatcttcaagagggcgaggttgacgagtgcttcgagtctccaccattgttgtaatgtattgtgtgtttacagaagctttcttcagctctcaatgaaagcaccaaaatgttgaccgaggttttcggcaaccaataaaataataagagtttagagagctgtaagaaattaagagagagatttttacgtggttggggcgttaatgagccttagtccacgagtctgtatatttatgagtgtatttaatacagagaatgttcttggtgagtatttactcttcttgcactt

SEQ ID NO: 332917 - DNA, 633 bp, Cannabis indica
ctattttgtgttctactggtgttttataaaaacacaacttttgaaaaaaattccgtgtgacaatatttttataaaaattaaccaaaattctagtattttttgtaagtttcccttttgtagtttgttttgattttgggcttaagcctaatggctaaaaaggtctccaatcatccccatactttcaattaattcttttagtgtttaagcctagatttttttagaaattggtggtgacttcaacatttatatggttatattatataaatatatatatatatatatatctttgttatatcaaatgtgattgtattataaaaatattatttctttttaaaatatttcaattcaaatttaaattactacacatatctctattatcttttatcttatatatatataaatatacatatattaaatgtaactatataatataaaatattttcttacactacatttaaaatataaactcattacacatatctaaaaaatatctttatattattatttttaatatccaatctacaaatctaaaaaatatctttccattattgtcttcaataaaatagaaaaattatttatttcttaaagaatcactgttgtaatgccgttaccttttgcaattacaaaaagcat

SEQ ID NO: 332918 - DNA, 989 bp, Cannabis indica
ccttggaacatatttttcagttcctctagctgtgcctgtacggctgggctaacctgctccacattttggtcgatttgaatcacatcgttatcattctgagtgggaatttgagcacgggctccgggctatacgattgttgtgacaatctgatcgtatactcctctccttctgttcaggtcactccttaggtcatgagtcatccccaacctttcgaatacagaagtgcctggctatcttagcaattgatttgcctggttgacaggtggaatggcactgttaacctggttggaactatcaggtatgacctctcctgatgaattactagataaggtctgcccgcctacaactaggcccacaagtggaactcatgaccggggatttggtggctgaccatttgcagtctggcaagtattcatcgctggatcttcatccgtcttgcccaaggggatgacactcggaggttactgacctacagtttggtaggctttttgtatcagcacggtagcttgccgattacgattttcaatgtttgtatgatgagcccttaacgcttccatctctttgtctctccacttggtaaacatacgcctttcttcctagaacacgagatttaccgtagtgcagagttcttcctgatcatgatgtagggtattggcatgaccctgcacgagtccaagagcagcacggagattttgtaactcggtatcatctccaatggtcgttgagtgttggtaacgggcggaatggctgtgctatgaattccctggttgggtgctaaactgttattcccagtctcttccacactaagcgcaatttcatctataggagtcattacactgtgacccacgtttgccagttgttcaggattaagtgttggtggaacccttgcgtttcctgggttctgcaatgcatgatccaccgtctgtggattcgctagatcaactaggcccctacgagtttgtaccaccatcgaacttgtatttagattt

SEQ ID NO: 332919 - DNA, 897 bp, Cannabis indica
ttttgcactctgatgtggcatcacgagaatggtgacacgtatagtccacttggaacatctgctcagaaagacaggccgagcaggatgccttgctggcataaccagagcaagacattcagcgatccgcgcagagcaaccaacacttagcgaatccagctttcgcatcatgagtcatcagcacaatccatataactcagagatcaatttacgtggatatggcatacacacgatgccactatcagtgtattcaaactcaatcccacgatccttgtattcagcattgatctcacgatctttctgtttgtacgcattgtaacgagagaggaaactcttcctccacaagcttcctagccctataaatagtgatgcatattcactgggcaagggatcggtcgaaaagtagttaagctaagactgtactattatctaagagttatatatattcagacatactgttgtaagagctataagaaaaggaatctttctccttaatcttaagtcaatacaagtaacgaggattaggctattaccgaactgctcggggctgaacctctataaaatccctgtgtcttattattgctttatcatatatctgttactatatatcgtttatcgcttataaaatagactcatttttgttggctaaaagtgaagtcaacattttggtgctttcattgagagcaagatgacgaatctctctttattcaatatcgaacaaccaatacgatggtgcaaactcgtagaggcctaactgatccagcaaattcacagacactagatcctacatcacagaacctagggagttcaagggttctgcctgctgttaatcttgaagagccagcaagcgtggggaattgtgaaacagttcctattaatggaattgtgcctggtgtgcaa

SEQ ID NO: 332920 - DNA, 703 bp, Cannabis indica
tgtatggaaacttcttgtaagagaagaaattctcttatgaaaagtttgtttttaaaggaaactttgactattattattttccttaatgagttcgattgtgtctatttaagatcagatcaaacacactatttatggcaggtatcaagacccatgatcggacacgtttttggcaagtttccttttctggtctgatttgctgcgacagaatctgtttctgatgctgcaaatcaaggttttatttaggaaagttttgtacagctgtatattcgactttgtggctgtctaaagggtttctatgttctataaatagaacctacagagcagtcatttgaatcaactcttctagattttatttttttattgttctcatttgtgaagagagagttatttttgtgagaacctagttgttcatctaagttctagtgtttttcatgtctattcttactctgtctttgagtttgttagaacaacttgattgaataagagagaggtctttgggagaagacttgttcaagccttacttcgggagaaagtaagcacacacactttaaagacgaagggagttcgctatttgaaggtgtttcagaagtcagattcataaagtgcattacaaaggattgcggcaataatttagagggagtataaacttgtttatgtcaattgtctttgtaattgttgatactttattaattgatttcattct

SEQ ID NO: 332921 - DNA, 1147 bp, Cannabis indica
tttaaaataaatctaagctatttagtgacacactttgaggtaattaaacccagtgctctgataccatttttctgtgacgaccccaaccctaggtcgtggcagatatgtaatatccataacttgggtggtcaaagatcacactttgacccttgtaggaagataaaacttataaatgatcctttaattaatttcaaaaaaaactaatttaaaaataatggattaattaccatatatttataagaaaatattagtaacaacatcatgaccactcatcaatataaaagaacaataatatccccacagttatgtagtcactgaatagatagatttaataagttaataaaacaccaaaataatatctagcatccattattcctcatttctaactgacacttatccaatttaagttctccagactatcctttccaatttaaatacaaaatcagttacatagaaagattaaagagttgaataatactaaactaataacgactttcttcctcaacggtaccatcctcatccactagcatcaaactgagttcgtagagtgggagaaaatatgggggtgagcttataaagcccagtaggaaaataactaatatcaaaggacctcggtttaataaaatcttggatggtaagctttgtaaaattaaaatatctcatcaccagtatcaaaatgtataaacaaagtagagagaccacaaataatcacaaaattaaacgtcaaatgcatatcacaccgtctactagactcctagctctcaataccattcataaaaaacatccaaaaccgggtagtcgcacctgatatccaccatataatgaggggctcagatttaattcactccctatacagattctaggtcttttacctacaggtgagtgcacacatgatctacctatgattacacagagactaggttgtgaaataattatatgcacaaatcatgatcaatatagctctcatcagtataaccaaagcaggaaaataataagaataacaaaagaacatattcctttttattttctaaaaaattcagcagcataacgactgtattttgaataaacccaaaaatcataacctgcataaatatttgtacacaaaaatatatttggcactcagtgccccagaacagtccagaaaaat

SEQ ID NO: 332922 - DNA, 548 bp, Cannabis indica
aaagtgtaattaatatttgaatgtgaataattataagacaaatatcatcgttagatcatacttctgaatcacttgggcgtgatgattttactttgtatggataattttaagttatatataaagccttcaataattacacaatgaaaatttaacaactattaggcaccaatcgtgcatgtcgcaaatttacgattggctagcgatacttcctaaataatattatattaaattatatgtgacccgatacttagttggataaataccgatattaacacataggagggtgttaaacaccactagtgccctttagcatttctcaaaataaaaatagttaagagaatgtaggatatatacaatgaaatttgtgatgtacactagtaaacagggctcatttggtacaccgtataagggtcgtattgtattaaagaataaataacattatgtttggattaagtaatgtattgtattaattattacgaccaaatttttttaatataatgtatgttgtattgtttaatacataataaataatctatattagtttgtat

SEQ ID NO: 332923 - DNA, 539 bp, Cannabis indica
tactttgctaatgctctggaaagaacattccatttattcaagtgtaagtgaaccacatcgttgattatctcatcagtgtaagtccagtgaactaataaatcatgggattaaatagttttgaacatataaaccatactattatcatgaataataatatgttcgagatttaacaaaatttttatattaaaatatataattatgaaagtaaaatgtgaaccaagtaacatgaaattatttttgatctttcatttattagcaaataagattatattaaaatgagttttatttagggcatatgaacccaacattctcctctagtgaaggtgagcatttggtatgcaagcttaagaagtctatctacggattaaaacaagcaaccctatagattaaaacaagcatctcgtcaatgttttctaaaatttcattatgtcatctcttcatttgaatttgaagagaatctcatggatcaatgcatataccagaaggtcagtgggagtaagatttgtattcttattttatatgtggacgatattcttctt

SEQ ID NO: 332924 - DNA, 1121 bp, Cannabis indica
tttacaaataaacatatatgatgaggtcgggcggcctttgaacaactttggtcatctttccgaggttgggattgaccatgttatggaggagactgttgacccccgagtcctcaagcatggggaccagctgaaccgtggatatcttccccgtcctctatcttttccaagagactcgatcagattaaggcaggaggactggtaggagtgttcggtgtgataggcctaccagggatcagctagcacatcgcctagcatttaggtggatggcctggtcacaacgccatatcgagtagggagcggtactacaaaaagggtacttaaatacctcaaaggcacaatgcatcacgagctccgcttaacaccaagtgataatttgactctttaaggcttctcaggcgctaactgagcgtgttgtctaatgattgcagatctgtatatctgactatcgtgtattttttggagagtcgcttatttcttggtcatccaagaaacaaatggtggttgctagatcaagtaccgagtccgaatatagatctcttgcacatttagaagctgagataacttggcttcaagagctactgcaggaaatgaagtttaagtcaccaactacctcaattatataatgtgttaatatgaacgcttgtgcacttgcatttaattcggtttatcacgctcgcacaaagcacatagaacttgatgtgcatttcgtaagagagaaggtattacagaagtaacttgatgttcaatacactcctttgcacgatcaaattacagtttgcctaacaaaaggactttcacatggtagatttaaatttctaatcgacaagtttggactgatagaatcaccctattgcttgtggggtggaggtaagaaatgaagaaaatggactaagggtcttagtcttttaccaaatttttcaagatatttggtaacgactttattcttttatttctgtgccatgttgaatttagttcttttttcacttgttgtaacaaactttacacgtgttgttatcgtaatggcccttgtgattttctgtatcttagtcttttggttatataagctaatgcatttacctcactcattttttagctgagaaaatactaatttttttaaatta

SEQ ID NO: 332925 - DNA, 965 bp, Cannabis indica
ctaaaaacataaatattaaaataaaataaaaatacataacataaataactagttcattactcgctagttgtaagaaattaggtgacataacacatttatataaaattttcaattataaatgacaaaccaaacaaataaatggattcactttaggaaaagtcattccaattctaccaacattccaatcaactaaacactaccctaattagttaattacaacttatacaacaacatgaaccaaactaaaacaagaattttagtaatatataaattaatatgaattaattgtgagaaacctagttaattacattgtgtaagtaataactagttataattagttactaaatactgttttttttaaagatatttgttatggataaatcatagatgcgtgaggagagagacacacttcaatttcaagtagggttcgatgcatttttagagtttgccttaaggaattctaaaaatcccgaatgtattcattgtctgtgtgtacatagattgttgtaatgaatctaaagaaaatattacaatgattaaggagcatgtgtatttacgaggttgcaatagaagttatactattgggtagtggcatggcaaacattttagctgatgatccatatctattaagaaagcggggtgtaggtgatattgagggtaatgatttcgatgattatccattggacttgcttaacgaagcacatgaggaatttcttaatgatcctaaaaaattcgataattttcgaagtgatgctgataaatccatgttcgatggttgtaaaaaactaagattaccaacaatagtaaagttttacaacataaaagtagaaaatggagtgagcgataaatgttttactcaatttttagctgcttttaaaaatatcttaccatttgacaactgcttcctggaatctacatatgaagtgaaaaagactttaaatttcataggattaaagtatgaaaaa

SEQ ID NO: 332926 - DNA, 686 bp, Cannabis indica
ttttatcttgtttgtcactatttattattacatagtggacagttaattgcaaagttgaccggaatatgtttgcaataatcatccctaaaatcatgggatttgattacatatcacgtagtgtaaatacagtttaggattggaaaatcatatagctatgattttcccacttttacttggtcaaaacagtcgtgtattaaacacgactttagctgttgtatctagagatctctcgacagaaacttgattccagtgatcgcaatagcgagctgggaccattcttccttttgaggtcgacgatgtatgtctggtgtcgatcgcggttcttatcctcaaagaattcttcgaggctcatttgaatgctatcttctggctcgccaggattgtaagtctcactaacgctaacaggatgaagttatattgtaacgctctaatgctaaggcacgctacagtgctttttcaattatagtgcaatctttgctaatcaaagaattttctcaaaaaaacgtgtcaaattaaaacttttgcattaaatattaaactttgcaatttaataaaatatttacaagtgtcgggatcccgttttcaaactttgtaaaattaacttttcaaaatatacatttattacaggtcgcacagcgactatcaaaatacaatccccagatgtcccgagaccgaacactccaggt

SEQ ID NO: 332927 - DNA, 568 bp, Cannabis indica
ctactgaagatgataagctatctgcttacaatagtaagctttacatgttatattttaatagagtatgtaaatgttttattaagcttatatcttcttgtgaatctactaaagatgcttggcaaattcttcaaacctaatttgaaggaacaactaatgttaaacaatctagatttataatgcttcatgttaacgcagattttcgtcgtaataaatattctacagaatttaataataataaatgaacacaagatattttacatggttttgtagttaaaatctacatactccacgagtccttcttattcaggatatttatctagatacagagtacaattttcattaaatgtaaataatcatttttccctccagtttcctcagattctgctcttatttataggtgtataagatgcaattatttttattgggatctatttatttacaactgttcatgaaacatggatattctccacattctatttttatgcacatggtgttgggttttatgccctaaataaaactcaaattcaatgtaatttattttattcaacatcaataaagaaacagaagt

SEQ ID NO: 332928 - DNA, 585 bp, Cannabis indica
cctaaataagtaaaatatattagtaaattgattcctccccaaacgatacggaagagaagaagaccgaccgactcatccctgaatcgaatcgagcagtcatcatctcatctcctctagcaacgacaagttctcatccctgcaggctgcaaccagatcaattcgattcttccaagcaagttgtccactgctactactatatctcctttctctcctttttagtagtttaagtttaaagttaaattttatatattatatattgtatatgatttagatagtgcatatttgttaattttgagttcgttacttatttttttatgtgtttctctatatttgtttctgtaatatcaatgattcaatatattatatatttgtttctcaatattatttataatcgactcattgacacaagtgaagacacccttactataacgccctaaataattaggcacgctacccaaaatatttatgaaatcctaatcccctaaacgggattactaatgaaaagggcgcagaatttaaacttttataataaacggaatgaaaataaaacttgtaataatttaaactttataatctaaaagttac

SEQ ID NO: 332929 - DNA, 1498 bp, Cannabis indica
gtgccaaagaaaggagaaatcacggtggtggctaacaagaacaatgaattaattcttactagaaccgtgacttgttggagggtgtgtatggactaccggaagctgaataatgcaactaggaaggatcatttcccgctgccatttattgaccaaatgttggatcatttggcgggtaaagagttctattgtttccttgatggttattcaggctacaatcaaatttctatagcgacagaggaccaagagaaaatagccttcacttgttcgtatgcacctttgcctttaggaggatgccatttgtgctatgcaacgctcccgccactttccaacggtgtatgatggcaattttctcagatatggcagagagtattcttgagatcttcatggatgatttttcagtatttggagaatcttttggcacatgtttggctaacttggagaaagtgttaaagaggtgtgaagaaacaaatttggtactcaattgggagagataccattttatggtaaaagaaggcatcgttttgggtcacaaggtttctcacaagggtattgaggtggaaaaggctaagttggaagtcattgaaaagctaccgcctcctaccacggtcaagggtatcagaagtttccttggacatgcggggttctattgaaggttcatcaaagatttttcaaagatttcaaagcctctttgttcattgttggaacaaaaccgcccattttagttcacaaaggagtgtcatgaggcatttgtgactttgaaaaatacattggtgacaaccccagttattgtagctctgaattggactttgccaattaagttgatgtgtgatgctagtgactttgctattggtgtagtacttgggcagcgaagagaaaagattttccattctatttactatgcaagcaagactctcattgatgctcaaattcattactcaaccaccgaaaaggagttgttggctgtagtatttgcttttgacaagttccgatcttatcttgtgggaacaaaggtgattgtctacaccgaccattcagccatcaaatatttaattgccaagaaagatgcgaagccaagactcattcgttgggtgttacttcttcaagagtttgatttagaaattcgagatagaaaagggacggagaaccaagtggctcaccacttatctcgactggaaacaggtgttgaacaggaagaaaaaatgcaaattcaagaaactttcccggatgagcagcttcttgttgtaacacaagcaaatactccttggtatgctgattttgtaaattacttagtgagtgggttgcagcctcctgatctgaataggcagtaactaaaaaaattctttcatgatgtgagattctactattgggatgagccctacttgtagaggcagtgtgcggatcgaataatgcggcgttaaataccggaagaggaagttgcaagcatcctagagcattgtcattcatctccctacggtggacactttggtggacaaagaac

SEQ ID NO: 332930 - DNA, 870 bp, Cannabis indica
cccatcttttcataagcaattttgaacaagatattggaagaggctccgttattaatcatggttctggccaccatcttattagctatccggacctctacaaccaatgggtcgttgtgtggaaatattattttgatagcatcttcgtcgctgaaggttatggtaggccctcctgctcgtggaattttgggcttcctttcttctacggtcaggataacttcctcttgctcgtgcttcaccattcgggcatacctctctcgagtttttcccgaatctctagctatgtgcgggcccccaacaatgacttgcagatgtccatctacgagtggaggtagcaagtcttggtcattgtcgttcctctgattctgatcggccttgacatacttctgtaactttgggttgtttttccttaacaagaattcattttcccacttcaggttgttgcattcgttagtgtcgtggatgtagtctctgtggaaacgaaaaaactttgtcatgactctcttgctgacatctttcttcatcggcacaagcttcttatacggggctagcgactgagtggccatgtaaacactttctatgccttcaatcaagatggtaaatgcagtgtactttgcttgattctcacggggagcttgctcggttttgttggtgagctttccctgtttcccattcccttgcctgttgttgttgttggaacgtttaacatttgagcttgaattatttgtgtaatgggggatttgggcggacgttccagtggaaggagcctttcgtactgtcccacggcgttttgtctcaccttctgcttgttggaaagcttgttcgagcttgatgacgcttcagcacggtcaagaaataactcattgagtctac

SEQ ID NO: 332931 - DNA, 948 bp, Cannabis indica
atacaacggtaagattataatatctttaccaagatcaatatcggtcccagtccaatgtatactccatacatccgaaactagcatactttgccaatgaattggaaagaacgtaacacttatccaaggtgtaagtatagtttatcgctgattatcacatcagtgtaaattcagtgcactgatgaatcaaggacattatcttttgaagcatataatcataattacattccattgtgttgatatcactgtaattgtgaataactatatgttctggacttaacagactttgtacacattaaagcataacacatgtaaacataaatgacttctaatcttctattgataacaaatcagattgtattgaaatgggttttatttagggcataaaatcccaacactttccactgtgttgacaacacaataaacaagaacatatgggtagagatgaatttataaatcaaataaataaataaattatcacatgaaccaaataacacattaaataagtaataaaaaataaatttatttctttattgataatttaatagaaaaatattacattgaaattgagttttatttagggcacaaagcccaacaaactcccacttgcactaaaataaaactatcagtacatttcaaataattataaattcagtctgtgcttttcaaatgtagttacagtcaaaactttggtgaatggataagctaagttgtcttcagtatttactttctccaccagtatatcccctcttgccacatattcctagatgatatgatatttcatctctatatgtttgcttctcttgtagcttcgaggctctttactattgcctatagctccatgttatcacaaagtaaaaccaatacttttgccattccaagaacaacaccaagtcctgagaagaactttttaagccagactagttccttagcagcctcagcggtagctat

SEQ ID NO: 332932 - DNA, 703 bp, Cannabis indica
cccctttagtgttatttatgtcattttagtgtggggggcaaaatggtcattttgccccattattgttttgtccttttgtggacttttatggtggaattatgcgatttattaagttaatggttggctgaaataaaaggttgttaagttgcatttctttcttttattttcaaaattggaaaaagttagaaaattagaaatttcaaagcttctctctctctctctctctccctatttcggccctttgagcagcaagaaaaagtggtgttttcctttgattttcaagctctttttctttgaatctaagtgctcttcaagtgcttggtaagacctttgtatcttactctttaagtttctttaattttgatgaaaagatgatgtttgcatgcttagtttaggttgttgttgttgctgtgattttgttgttgtttgcagaggtttaagcatgataaattgaggataattaagctgattgtgatgcatgatagttaggttgtttagagttgtggaatttttagctgagaagtttaaatttcaaaatgaaagttgagaaattggtggctgtagttgttgcatgagttagagattggtttctacagtttttatatacatgaatatgtaattttaatcaaggtttgatgcatgatagggttgtttaaccaagtttgagttttgaactcaaagcttggagctttaatggtgattt

SEQ ID NO: 332933 - DNA, 956 bp, Cannabis indica
catggtattccaagctctattgtttctgatcgggatcgcgttttccttagtcacttctgggctgaactattcaagcagcaaggcacgcttttgaagcatagtacggcataccatccacagaccgatggtcagacggaggtagttaaccgctgccttgagacttatttgcgttgttttgcttcggagaaacctcgggtgtgggcgaaatggctgtcttgggcggaatattggtataatactagttttcattcctccttgggatgtacacccttcaaggtgctctatggccgtgatcctcctcccttggtgcgctaccccttgggtggttcggcggtcttgacggtggaccaaatgttggaggaccgggactccttccttgatgatctcaaaatgcatctccttcgtgctcaacaccgcatgaagaccacagctgattcccaccgtcgtgaggtccgttttgaggttggtgacttggtgtttgtcaaactccggccctaccgccagaagactttggctgtccgtcgtaatgagaagttggcagcccgctactatgggccatttcgagtcttgagccgcgttggtgaagtggcctacaagctggaccttcctcctagtacagcagtacaccccgtcttccatgtctctcagctccgagtcgtcattggggcagcctcctcctcttccacctttcctccccaacttactccggagttggaactgcaagtggagcccgaggaagtgctgaatgtgcgccatggcaccaacggtcccggtgatgaggttgatgttttgatccgttggaagaacttgcccttgtttgaagcctcgtgggagaagtttgagaccattcgccaacaattccctactttcaaccttgaggacaaggttcgagatatagggggggggggtaatgttaggaccaaggtacgttttacttatgctaggagaggtaagaa

SEQ ID NO: 332934 - DNA, 844 bp, Cannabis indica
aggagaaaggttccttttcttatagctcttacaatgatatctctaaatatgaattcttacataatatctctagggtaaaatctcttgaccctttgtccactgaacatgcatcactatttatagggccatgaacttggagaggaagtatttcccttctcgttacaatggatataagcagaaaaattgcatgataaatgcagaatacactgatcgtgagatttggacagcttgtcatatctctgtgatctgatccccaagttatagggatttctttgatgactcacgatgcgaaagctaaattcactaagtgttgatcgctctacgcggattgctgatcgctttgcaccacgcatgcctatgaggcatcctgttcggactataccctccgagcagatactcaaagttgattccacgtgtcaccatcatgtgatgccacgtcggagtgcaaaaatttggataacatttgccccccaagtctatatgggacttccgaagttgtgtgtagacttcatcggagcagcttttgcctttggatggggacacgtgttgagcacgtctatccgagactcgatgtgaggctgactgggcatcccttcggtttttggctaattaatgctctgacaattaatattacaaaatccaatttctctcaccacggttgacggctgcacttgattatttttgatttcccatattcgctttttagagggaaacgagacatctaaggtccttttgacatgattacctcttttcgtgactttcgtataaataccaaagagcattggcacataaactcattttcaccatctttctttgctaaggagttcagagcgaaaagagagat

SEQ ID NO: 332935 - DNA, 1162 bp, Cannabis indica
atggcgacaaaagaaaaggtattaaatcatagacataacactattcaattccaaacatatatatatatattaatcctcaaaatttcatatatactgtttaacaatccacgaatgcataattttggggtcatactaaccaatcttaacacttaactctacatactaactattttgagctccaaacttcaatttccttttgctactcattgttgttaaaatactcttgttaagtatcaatatgtactaaaaagaaatacacttagaaaaaactccagcttgctctggaaacttcctaggaatatctcccttttcatctggcttcgtcttccagtttggtttttttcttttgctttcatttttcgtcttaaatctttttcttctctttcatttctgtgcatttattgttgatgcctttctcctctctcctcagcagtcttcttttttctctatgtgttgatttgagaggcaaagaggatctttttaatgtgcatttaattttggctgctagtccctcttttctcgagtttaatttattgctgcagagtttaatctttggccaaactccattcctccatccaatcatttatttaattcccgtcgatccttcttctattgggatattctgcagtaaaagatcttctcttcctggtgcagagctatggctaggatggcctgatctgggttttcctaggttcttaatgaagcctctttcatccaggtatttctctttttttgtctatttaaggttaacaatttatgggattactgctatacctatctcctctttaatttccttccttttctatacttctcctattccttaccaaccctcaccatgagtatttcccctcaacaccacgaacacagtattaacctcactgaagaagaagctttagttcatgaatttgacaacatctcagttcgccgtgatgcatcccctcaatctttttgccttgtagccaaaatcttgacccctaaaactatcaaagctgactgggttgccaatgtcatgaaggatgcctggataattcgctgccctttctccttctctgactaccattctagcatatttttggtgcggtttggttgtgaaggagattggagacgtgttatgtgttgggttttatgccctaaataaaactcatttcaaaataatcagatt

SEQ ID NO: 332936 - DNA, 993 bp, Cannabis indica
atagccatcatcttgaggggaatgttgtggacattgtcccacatagaataaatggtagagaattgagccatatataagaacatgggctactccactcattgccaattggttttgagatggaaccccatgattctcaacagattaagctgaattgtgatgtcaaggtgggatttaatagtatgtgcattgctgttgttgcaagggatcatgttggcagagttattagagttcagacggctcggaaagatttcttggatgttctctgcggagaagctgcagcatgttgcttggctgtctcggtagccttagatattggatataaatttgtgattgtggagaatgactcgagtgtgattatcaatgctatcaatgggaaggactctcgctgggcgcttgaaaactacatctcattttgtattaagacttctcccttttttattagttgtaattttacttatataagtagaatttgtaactttgccgctcataatatggctagatgggcgtttgctcatcaggtgtttgggtctatcccggtttcgactttacctaacaatatattgtgtaacgaccgcgaggtctaactatttgaatctatgatataaacgctttttctctaaaaaaaaaataatttttataaaaactcgttagtgtatttatttatgtgaccctttgatggtagttgtgaagctgtcataattttctatcacaatatcaaatttactaccaccattcaattataacaaatttatttctatacttctcataatttttattatttaaaatcataaataaatcatgtaaatagtgataaacctattaaaagtaataatcagttgggactagttcataaattaaaaaaaaaatagcaaaaattttatatttttacaaatctattttgtttttttttttatatatatatttttacggattttatttttatttttttacaaaaatataaaatgttattttttttttggttgtttttaaaaa

SEQ ID NO: 332937 - DNA, 717 bp, Cannabis indica
ataaaagttctcaatttgagaggatgttcctaaagggcctaacgaattcctaattggaattagaggttctactttaattgattcttttatcccattggaatattgtacatccttgaatggactcatttgaaaacaattagatgatgacaaaattatcaaagattgagattccttacttctattcaacaacgtatgaatagttccttgattttgtctaagtgattgttgaatcttttccttggaataaatagaataaaatggattggtacaatctgacctattatcagagatcaatcctgaacctaacggatcatttctttttctgatatagcaaatattggatttcgctaagttgattcttaggaaatcgcgaatcagaccagttgtacttacttcaacaaagtaaacgtgggcttcttcgctagaagaacttttgttgtcttgatcccagttcaacattaaacaagtccgaactaattgaatactagttccagaaattcccaaaatgggtttgccatttccataaagaatataatttacaactctaagttctagattatccttttcctgcaacaaatcctgtggaaaaagtgtttctaaatttataccgtccgctatttcatatatgattacgggtcgaaccaaaacaaaatattttttcttggtaggtgtgatccattggacatagatccaatttttcaattttttggattcctt

SEQ ID NO: 332938 - DNA, 746 bp, Cannabis indica
atgtaggcctaactgatgaatcacgcactactgattacgatgttttctctcaatagagatgaaaattcctatgatggatggatgaccaggagtatatccttcaatttgaccaagcagagttagatcactgcaactgagaggccaacgatctaataaaatggtacaactgaagaaccaatagaagaggccaggatctcctcagagatccacttcaaggaagacttctgccaagatccttaggaactaggacagaccttcccttgctagagggaggatagacctttcctcaaatgtcaaattacaaaagtagccagatcccaacaaccagcggcattgggggctggccaaggatctctggctcaacaacacccccaatgtgtagccactggctggccaaccatgagtaggagtacccttggctggctagagtacaacattggtggaccctacattgcatgtaagactaaaaaatctaaggagcgctatgctcagacactccatcatgagcctaaaagcaatatcttaactattgaagatcggagctctaagcaacaaaagcctgaatagcccacaatatccttcacaaaagaagatgctgctcaggtcagtttcccggacaatgaccccatggtcattactgtgaaaattgagagcatgatcgtggcaagatgtaaggtggatgacggagcctcttccaaaattcttttcaaatcaacatacaaaaagatggggctccaactcactga

SEQ ID NO: 332939 - DNA, 600 bp, Cannabis indica
attctcattcccattccccagcctattgccattcctattgccattcccattcctattctcattcccattctcattcccattcccatccccattcccattcccagtcccattcccattcccattcccattagcattccaattaccattccctgagccattccaattctcattcccactcccgttaccattctcattctctcactcattcccattcccattctcattccaatttccattcccattccctggcccattcccattcccaatcccaatcccaattccattcccattttttgacccattcccattccctatattatatgacatgtttaataataagtaatggaaatcaatggtaaggtaatcattcccttacatttgtttacttacattattaaaattagaaaagggagaacttgattaaataagggagaaaaccaaggggagaacttcccctactaattttgtaaggaatgccattaagggtaattgattttaattatttttattttattttttaatattaaatatataatgacaattttgtcttttaaaatatatcatataaaataactaccatataatatagtttaactaaaa

SEQ ID NO: 332940 - DNA, 1367 bp, Cannabis indica
aaataaattccaacaattatgtcgataaaaattaccaaaaaagaggttggcagtcctcatcgatatataatcgacacaccatcgacataatatcgacaaagactccccaatgcaatttgcatgtcagacacgtgtacaatggtaattaatcaattcaactatcgacaagctatcgacattgtatcgatattcactcgacaaatacacattgcatttgtttcattttttacggttacacatttaatgttaataaattttacctacgttcccaactgccacgttgcatgtcagacacatgtatcatcgataagctatcgacataacgtcgactagtatcgacaaaatagtatgtggtttcattaaatatgcatgttgtcgacatatcatcgacatagtatcgatattctgtcgacaaatacaccatttcatgcgtttcacctgtacagttacaaatttaatggccattaaatttttctacattcccaacatgtatactgctctataaaagcaaatccctttctattcccttagtgctcttgtcttctacttctctcttacacttaaaaattaaaggcaaatttctcttaagttctaaatatggcgcctagaaagaacaagggcaaattcccaatcttaactcctgaagagctcaagcaggagcctgatgttggcataattactcctcaaatgcagaaagttctggacgccgatagagctttcgaaaaagaacgaaatcggaacgagttaaggttgatacaacttgaagcacaatttagcaaaactggtgtatggccggctccaccaccagggttccccgaaggatgccgtcgttgcaaattaggcatctttaacggtaaaccggtgaagcctggaactttatgcaagtattgcaagtcacccacaagccaaacaattttaataatttgttattttatggcttgtggtgagttttatttaatgtttgtttgtttttttttttatgaacttttattttatgttattttaatgaactttatgttatatttatggattatgttattttaatgttattttatgttttatttatggttttttttcaattgcatcgatatattgtcgacatactatcgaaaaaatgtcgacaagttctaaataataagtagattgctttacgtcgacatactatcgacaaaccgtcgacaacttctaaataataggttaatttgcttttcatcgacatgctatcgacaaactgtcgataacatgtcgataatggtcatcacttacctttcttggcagaatattgacaaaccatcgatattccatcgatatatcatagataacaactggaaaaacccagatgtcgactgaaaactagatctgccaga

SEQ ID NO: 332941 - DNA, 508 bp, Cannabis indica
ttttagagcctcgctgggataaccattatctaagttttcagtattattactatgttatctacacttaccaactctgtactattcaattcaatcaacatttgaaggaatgtaggtgttgtggaattcaatgttctttatgacactcttttgatcaataacatgttctgtttcgccacttcactattgtctttttcattccatagaactaccatctaacattcaagagaagataatagataatttgcaatggttctgtgactttgttcaatgatcatttgcttgatatttcaataaattcataaacaaataaatcagaacaattcaaaatctcaaatcaagaaaattaaaagtttagatttataatctttacaaatatgaaaaacttaaatagatctattaccattgttgttgtcgttgcttagttactgaatttttaaacaaaaactactaaaacttatataaaactaaaatttacgtggctcgacacgtaagtctcatctagtatata

SEQ ID NO: 332942 - DNA, 1074 bp, Cannabis indica
agcccatctcgaaagaactccacagttaagcgtgcttgacctgggaaaatttcaggatgggtgacctcttgggaacttttctcaggaagcgtgcaagtgaggacaaaacacgctggaaatacttgtgttggtctgtagggtcagtcatcaatccaggcagcagccagagtggcgtactcgtgtataagagccattcattctgtgggtgtaagggcccaatggaggcttgaagcggggatgttacagttgtgttagtattatttaatacaatactatatttgatatataataagttgtataaatttataatattttttttaataaactcaaccccagcatcgactacaggtcaggtctaggtctggtctagtgtctgaatccggatctcaagtctcaggtctggggtccagggtttgagtcccggatcggctctcagtccaaggttcaggtccggtctgggtccaggttgggtctcggcggtcttgagtttgggtcctgggttcgagtccgaatttgggtcacgggtcccaggtctgggtctaggtcacaggtctgcggctgggtcttggattccaagtcgcgggcttgggttcgggtccctaggtctgggtcggagattggggtcagcttcaaatcctttgtaaatattataatacaaactaatacatgtcatttgttatgaattaaataatacaacttacattatattaaaaaaattatcgtaataattagggaaatttgcggcaaaagtccccaaaaagttcacgttgatgctgattagtccccaaggtccaaaaatagcggcaatagtcctcaaggtcacactttttatttgtccgttggtctccaagttaacagatctgttaaacccaattcaaatgccacgtgttgaaatattattggtgggtattattattttaatttaaaaaaataaaaataaaaataaataatttaaaaaaaaaattcctttttttttttctttttctttcttttcttcttcatcttcttcgtattcttcttcttcttctcttctcactgccagcaccaccaaccaccaacccccaactctcaacc

SEQ ID NO: 332943 - DNA, 826 bp, Cannabis indica
cgacaattatgtgacgatgaattaagaaagcattctctgcagtcgcttacccacaaagcaacggacagactgaagctgtcaataaaataataaagcacaccatcaaagggaaactcgaagaacataaggggacctggccagacgagctttcacaagttctatggtcatacaacacaagttctatggtcatacaacacaacccccttctcgctttcttatgggtgcgaggccatgataccagtcgagattggggcaggttccctacgaagagacgttttcaacatttcacaaaatgaggaaaaacagtcgctctaccttgatcttttggaagaaaagtgcaatcaagcgtgcttgagaaacgcgacttatcagcggcgaaccgctagatatttcaagtccaagatcaaggcaaaaatcctgcgagcaggagacttggtccttcgaagagtaatgccgaataccaagaacccagcgcatggggtcttcggggataattgggaaggaccatatctcatcgcggaaaagattggtgacgctacataccgactcgcagaactcgatggtactgcgattccacgggcttggaatggcgaaagcctaaaattctactatcaatagtactcgcattgtctaaattgtattcgccttgtatttatacttagtcattgtttataaaaaaaaatcctaagtatagggggtatataccatgatgtactattgattatataaaggaaattcttcaaagtgcgagtatttttcaagttttatgaaattctctactcattacaccaagttgtaattaaaatcaaaatattatagataataa

SEQ ID NO: 332944 - DNA, 845 bp, Cannabis indica
ggcggccggtgatactgagggtttgattccagccacctccacgatgttctccagctggtgggggcaggttagggtggaatgaagctcagccgcctcccatccggtggcccgtgacttatacccctcctgggcaacaggacccagtgagacatcttcaagggtagccagacgcttaccactcttcttggacgactttgaaccggacgcagacatgttttgattctgaaaaaagagttaagattccagcagttaggccccataccaaaccctaaaccaagaaaaagggaatgggggtcccctaaccgctggaaagaggccccctccggacatctgtcaatcagaaaaccctagaaggatttcctggacaaaagtcgggtgcaaagaactcacagaagacaatatcgcgcgtaaaagaaaaagaaagggcagaaaatcgagaaaaacaaagtcttctctatgccctagaaaggccagtacacaaaaagcgtatggtcctttgtaaaaataacaacaaacacgtgacaagagtaaccctaacaccagaaatggtgaatctagacctgttacgtgaaaaacccaaaagaatgcattcccagaaacttcaaataccaaacccagaaaaacaacaaacagataagtaaagcatgccatgtacacaaacagtaaagcaagggatgcgagaaacttacaatgaagtgttggaactgggggttatgttgtcgatcaaacaagggaaggtcgactgatagtagtgaatgaagattaactgggaaatttgtaaagtgttcgagggtgttctcttggtctgaggattttttctctctggaaaactcgagcaaagttgg

SEQ ID NO: 332945 - DNA, 838 bp, Cannabis indica
ctgtgagtcgagatatttacttcaactgacaacattgcctctgagccaaattctagtgagaatggagtatgtcctgttgctgtcttttcaattgtcctatgagcccgaagtacttgaggtagttcatcgacccatctacctttgtcagcgtctagtttcttcttgatagtatccttcaaggtcttgttaacagcttccacttgtccatttgcttgaggcctggatactgatgagaagcttttgattatcttgttcctttcgcagaactcagtgaataattcaccatcaaactgagtctcattttctgacactatatattttaatgggtattccaaacctgcaaattatgtttttaaccataaagtctagaacttttttatagattatggaaaccagaggttcagcctccgtccattttgtaaagaaatcgacagccaccactgcgtacatggctcctcctcaccctgtggaaagtgccccaatcaaattaatcacccatactgcaaatgggtaagacgaggtcatcattctcagttctgttggtggtacgcgaggtatatgcgaaaatctctaacacttatcacacttcttgacaaattcatgggtgtccttgtttttggttggccagtaatatcgttgtctaataatcttttttgatagactttgccaacctgcatgatccccacaaaagccttcatggatttccttgatgatctcgtttacttctgcgggaaggacaccccaaaggaggggcattgaatagccccttctatacaattttccctctactatcgtgtagcgagacactgaatacaggagttttttgttgggttttatg

SEQ ID NO: 332946 - DNA, 884 bp, Cannabis indica
cccttaggtcacagggtgttcccaacctttcgaacatagaagaacctggctgccttagcgattggttcgcttggttggcaggtggaatggctccattattttgagtggatccatcgagcatgactcctcctgatgaattcccagacaaggtctgtccgcctacctcttggcccacgagtggaactcgtgaccggggattggacggctgaccattgtttgtctgggaagcattcaccgttgggtcatcttcggtttctccaaggggaatgacgctcggcgcctgctggcctacagtctgataggctcttcgtatcagcacagtagcttgccgactacgatcttcgatttctgcatggtgagcccttaatgcctccatctctttatctctccactcggcgaacatacgcctctgttcgtcaaacgcgaggtttactgcggcacgtaactcctcctgatcgtgatgcagggtattgttgtggccctgcatgagtccaagcgcagcacggagattttgcaattcagttgcgtctccgatggtcgtctgggcgttgatgcctggtggaacagtcatgttatgaatatcctggctgtgtgcggaaccgttatttccggtctcttgcacaccaggcgcagtttcagtaacaggagttgttccatcattcaccacgcttcccgtctgtccaggattgacagcgggtggaaccgtcgaactacctgggtcctgcaacatcggatccagcgtctgtgagtttgttgggtcggacaggcctttgtgagtttgcatcatcgtgtcgaaagagcgatcttgagttcaactctcaatgaaagcaccaaaatgttgacttcgcttttagccaacgacaatgagtctttttgataagcga

SEQ ID NO: 332947 - DNA, 1064 bp, Cannabis indica
cccacacaaggatttaggaaggttagagttgctactaagcatactccgcaccatgtccattaatgttcggtttcttctttctgcaacaccattttgctcgggtgtaccgggcaaggtgtaatgggcaacaatcccattttcttcaagaaacttcgcaaatgcaccaggtgcttgtccatcttctgtgtatctaccataatactcacctcctctatctgatctcactatcttaatttgcttgttgcattgtttctctacttcagctttaaatatcttaaagacatctaatgcttcacttttattatgaagtaagtagatatacatgtagcgtgagtaatcatctatgaatgagatgaagtatttctgaccatgtgactccatatctggactacatatatcagtatgtatgatttctaatatttcagaactcctatggacaccagttttgacagacttggaggtttgctttcccttaatgcaatccacacaagtatcaaagtcagtaaaatctaaggtattgagtaccccatcttttaccaaccttttaattctatcaatggagatatgtcccaatctccggtgccacaatgtacaggaatcctctttcataacacatcttttagtgccagcgtgaacatgcataacattattagtggtattattttgtaaattaaggcagtaaagaccatcagacaaaataccatttccaacacattcagatttataatataaattgaaatatttgtctgaaaatgtaaaggaaaaaccaaagggtataagtcttgaaactgaaatcaagtttctagagaaacttggtacataaaaggtcttttctaactttaaaataaaaccattacttaaaactaaattgcatgttccaatagcttccacatgtgagcccatcttgtttccagataagatgctttgctcacttgccactggcttccttagattttgaatatcctgcaaggaatttgttatgtgaattgttgaaccggaatcaatccaccatgtgttaagattaacattagccatattagattcataacatactaaggaaattg

SEQ ID NO: 332948 - DNA, 559 bp, Cannabis indica
aggttctagttcattgtattttggtgttcttaatctattcgtaaagtcgaccattggatcttctcgtgacagtatagattaaggacatggtagtccaattgagatggagcgcaaatcatagatacggaatctatagcttctatccagacatagaagtgaaacgataattccttcgagcttggctaaatagagataagtgatagggcgctcattttagtgattatattagttcactgaaatatcatttataggttgctaattgtgttaaggatgaaatacattgaagggtgtaattgtaattttgtccctacaccatgtaaatcatctataaagtatcattgattattaggattataacaatggataactcatagcgtatctatatcgtgcaacatatagagcattctatataattgagagtgcaattccaaatctatagtgctgcaaggaggaattaataagtaagagaatttacttggtaaattctagattagcttattggaagctgtgttatataggtccatggtccccatactagttgagacaaactgcttgtaag

SEQ ID NO: 332949 - DNA, 876 bp, Cannabis indica
ggcggtaaaaggtctaacaaaaacaacaataggaaaggcaatggggaaaagggaaagttcgctggcaaaatcaaacaggcccctagagaaaatccttccaagtttactgctttctctgtcctgacagaagatttggagactatctacatggctactcagtcagtggctccgtacaagaaacctgctcccatgaaaaaggacataagtaagagagacatgtccaagttttaccgtttgcacggagattatggccatgataccaatgaatgcaacaatttgaagcgggaaatttaattgttaataagaaacaataacccgcacgtgtaaaaatatgtcaaggccgatcaaaatcagagggctgtccagacagacaataatcaagaattattaccaccaacggtggatgggcatttacaagtcattattggaggcccgcacatagctggaggttcaggcaaagcccgggaaaggtatgcctgaaccttacagcacgagcaaaaagaagtggtcctagccattgaagaaaggaagccaaaagtgccacgggtaggggaacccacaataacatttagtaaagaggatgttgtcaaagtaaatttcccgcacaacgatccgttggtcgtggaagtaaggatagccaacataatggtggcccgaaccatgataaataatggagcctctacaaatatcttattcaaaacaccatatgaaaaaatggtgctccaacttaaagatttaaccccctgtctttagcccgtatatggtttcttcggtcagagtgttgcaccactagggcaaattcgcatacctgttgcgatattttgcacacgcaagtgtacgtatcgtttcaagtagtagactcactaggagtgaggt

SEQ ID NO: 332950 - DNA, 1015 bp, Cannabis indica
actcatggcaatggtttttcacaaaaaggaaaaacatatgggatcagagaagaatagtgcttgatctcagacaaacatgagagcataattaaggcagctgctcatatatttccagaaataacgtatggctattatgtatgccacctattaagcaacttgaagcaaccttgaagaagaatgcaagcaagctcgataaaccattcttcgcagcaacaaaagcatacacataaaggaaatttgaataccacatcaaacacaacaggtattcaactatgacttctaacattgttgaatctctaaatgcagcaaacttagcagctagagaactactaatcacaacactaatggagtcattgagagcattaatacaacaatggacatacacaaacatgaaaaaagtacagaaaaccacaacagtttggacacctactacaaagataaagctagtcaacaactttgaggactcattgacagaaaatgtataatcacttcatactacaagttgcattatagtttcttttaattttctttacaatttgaccattgattatcttgacctaatatgtaggtaaagccaataaacgagaacatgttcgaagtggtagaactaacaagatcatgggtgatcaatctaaagtagaagacatgcagttgcaacagattccaaattgacgaattaccgtgtgctcatgcacttgatgttataaaagagatgaacttaaatgtgtacaattactgttcacattattacacaacaagaacatggcttgaaacatacaagtggtcaatatatatggtacacaatcacaaaacatgggatgtaccacagaacataaaagatatccttgttctgccaccaaaccagaaaataagatctggaagaccaaggaaaagaagatttatagctgattaggatacaaaaaaacagaataggtgcagtgatgagttttgtacactcattcttagtcaattattagatggattagtatttatttttgtatagatttgatgtgtt

SEQ ID NO: 332951 - DNA, 582 bp, Cannabis indica
ggattggcttctattcctcgctgattaaccatgaacccaaggaatttcccagagccaactccaaagacacatttcagagggtttaaccgcatcttataccgtcgtaatatatcaaacatggtctgtaagtgggcaatatgatccttcgcatgttgagattttacgagcatatcgtcaacatatacctccatggtttttccaatgagatctgcgaacatcatgttcactagcctttgataagtcgcacctgcgtttattaaaccaaaaggcattactttgtaacagtatagtcctcgatcagtaatgaacgaggtatgctcctggtctggttcatacatcgggatttgattatatcccgagtatgcgtccatgaaactcaagagttcgtgacctgcagtggcatcaacaagctggtcaatgctaggaaggggaaagctgtctttgggacaggctttgtttagatctgtaaagtcaacacatgtgcgccatgagccattaggcttaggcacgagtacggggttcgctaaccagttggggtaaaacgactcccgtataaagccgcaggcaaggaggcggtcgact

SEQ ID NO: 332952 - DNA, 1112 bp, Cannabis indica
acgaatgctcaaaatcaacctgaacctggagtgagaagaccacagggcaggcctcgtagctcatgaaccaagagacaggaaaatgcccaggtggaacaacccagggaaaatgagataccccctaaaaatccaaatgaccaaccagaactctctcacgaaaatgagaatgggaggtaaccagaaattgatgaacaagaaattgctcatgaaaatgaggaaaatcttgggaatcatcctggagaacgaaggtcacctgcgaggaattaccaacgttcttcccaaacccatagagcgaggactcgtgcagatcctaatgggggaaatacgacgaaccgcactcggggaaaagaacagagcgtgaagaagcaagtgtgacctcgaggcagtcaagaacccacagtcgatcaactcgaagaggataaagtactcaacgagctaatgatcgagaaagtatgggaaccagtaaattcgcgagtcactcaaagacaaagtctatgagtaggacgcgatctgtgagtaagacgaggtctttcagtaattactcccaacgagatctgtgagaccacttgaattggaagaaacttgactttcgctaacagcttggtccaaagcaagaggatcccatccaattgggataaatgagttggaggacaagttcaggagatatcaagtgggggaactggggagacaatctggatacgactcagacgaggagcttgagccgtatcatccagatataatgaataccccttttcctccgggattcaaaaacctgcatgtctcgtcatatgacagaaccaatgatccggtctcgcatttgaacaactttaatacaataatgcgagcgagtaatgtgatgaataatttaagctgtattttgttccccacctcgcttgttggagcagcgagcagctggtttaacaagtttactcatcattcaataacttcctgggcatagttgtctagggatttcaagaaacagtttgaggctgctagggatagacaacccgaagcggcctcgttaaccaatataaagcagcagccctgtgagacacttaagacatacttaagtcgttttagcatggctgaggccagggttaggaatttggatg

SEQ ID NO: 332953 - DNA, 818 bp, Cannabis indica
gctatcaaagaaagtatttgggtgaaaggggtcctagaagagctaagattgctagattctaaagctgtgatttactctgacagtcagagttgtgtacatctatgtaagaatcctatgttccatgatagaacaaaacatattgagataaagtatcactttatcagggataaagtgacacagggacacataagtattgacaaggtgcctacagaagaaaatcctgcatacatggggactaaagtaatcaccctatccaatagggctggaccaaggataatgtaatcctaaggatcacagagctatgaccctcaaatttgactcgactactagattatcaactcagtaaaggtttaggtggaaattgttggattaaacctctacttacactgatattcacttacttacaaggataaaagagtaaatacatgcaaatccctaatttgggcttcgacctctatatccctaacataaattagttagaatggattaggttataatccacacctaactaatttatgtaactaactaactactaaaccagatcagaaacctagtgctatatatacctgctgcaaatccagctatgacaacggttgagtgatattcttcaagatccagggttgtaaaacttgaagaagaaggagaagaagctcatacatgcacagaaaacaaaagagagttagtatagtgtgagaaagagggattaaaacacaatacatgtaaaaacagagagattactagtcgaattcatatatgtgacttggaatctcatccttgtaactctgaacatcaattttatagtggaatcgagctctcaa

SEQ ID NO: 332954 - DNA, 849 bp, Cannabis indica
tcggaattgaggtaagattagtataatatcatgcatatgttattacatgtttagcgtgcatgttgtttatgcctgttagattacattgatagcagaaatagtatacatagagttgtactaattactgataaatgtatgttggctaaaatactgatcgatgctgtcacatcaatatggctagagtatgactagcatattgagtataggctgacattatggtcgatagtattgtcgtatgaacgttctagactcagtaccgtgtgggacacggggattagggttatgatcggggtgtatgggcatcaggttataactcgggttagttgtatgtttatgttatgcttttcttactgagtctatggactcacagtgttatttccatgtgtaggtaagggcaaagctacagctgaggaatcgtgaggacgaggagatgaagattgtacatgtcggggcgattaggcctggagcgtacgatcctcgggacatcagggcttttgttgtttagtcgctgggtgacaaacttttgattatatgtatagaaaacttttgtaaagtattttgtaaacgggatcccgaaatattatatatgtaatactttaagtttttaattaaataagaaaattttaattaatcaagattttcaataacctcgttgattagcaacgagctgcacagtatgtttaaaatcacgttaatatgcctatgctagttagggtgttacatgtctcgttaaaagccttgtcagaaaaactcagtacgtgggacaaaacccgaattaagggaaaaatagttcagcatgaatatgtctccccctcatgcacatacgatccataattattttggtgataa

SEQ ID NO: 332955 - DNA, 1271 bp, Cannabis indica
tttgaactttcctacaactaccttaaacttttttttttcattcatttaagctccataagttggattagtgcactcctctccactaatgtagtccaaacttatccccttgatcaataggactttactaggcttgtaatgtgaggcttgggttagggtatggtaaaggatgtatttacgctagctcaagacctaaccacttcacttgtccaaaaccaagcctcttaaaaaaacatatttttctcgcccttctctctctttcggtgtttcaccggagctatggcaaaaagagcgaaaatggctggaaaagggaaatcaaagggcaagaaagctggtccctcatcctcggatagagtcattaagactcgatctatggatgctgtacttaggattcaagaactagaagttgaggaagctgaagagccaatggaacagtgccatcatacaatggaacagtatgtggaaaaagtcttctctccggaggagtcagaggaactgattattaggcagagtgagattcgccaagacttctccgattggcttacggttgcgaatcgagctactcaagatattaattctgggaagaggatttctcccccaattctcagatctaacattgtcaggaacctggaatcttcttttgatcaattgaagaatgatccagggaaggaaggaacaaagaggaaggtcaagatagagtttgccgatatcgaagatgaaggtaatttctggcaaccatctgtggtttgttatgttattggagttaatcctccaattagcatactggaaggtttcgtgaggagaatttggaaagatgaggttgttaaggttggattgctagccaaaggcatcttcattatccgatttcaaagtttagaacaaagagacaaagtgatgcagcatgggtatgtgttttttgatcgtaagccaatggtgatgaaaccctggaaccctatcgacgatttcaccaaagaggaagttactaatgtgcctacttgggttcagctaaaaggtctggacatcaaatactggggagaagcttctctgttcaaaattgcaggccagctgggaattcctttgcaagtcgataatgttactaaaaatagggatcgactgaaatatcccgggatcctcattcaagtaagtctagcacaagattttcctaaaaaaatcagtcttattgatgagtttgatcatgaagtggatctagatgttaaatatgaatggtttcctttagtttgttacaactgctctggaattggccatagcacttc

SEQ ID NO: 332956 - DNA, 793 bp, Cannabis indica
cagctggatgatgaagggtttaaggtcagcaaagggaaaaaagtagtgtcaatgaaggaggaaaaaggggcaatgacaaagaatatgtttgaatcccttcatgatgctgctgatgttgcagtaggcactgagatggattgtggtataacagacaaggaatttgggcacaaaaaacaggaggggagggagatccctcgtcctcaaatggataggtttttatgctggaatgtgagagggattaacagccagaataagcataatgagatcaagcaattgatgtattcaaagcaagctgggtttgttagtctcttacaaacaaaggtgcagaataacaatatgggaactctgtatacaagtctcttccaaggttggtgtttctcaaacaataatccttggttagacaaaggaagaatagtaatagcttggcaaccaaatgtctactcaatagatattaaatattgctctagccaaataatgcattgttatgtgcaatcacaacagcaagtagggaagttctttgtgtcactgatctatgcttttaatgatgagaaaaagagagaagagttatgggctgacctagaggaattgacaaagaaaattaatgagccatggattctaatgggagatttcaatgagataatgaatggagatgaaagaataggaagaagagcccaatgtattccatctcagagattgcaagattgtatggagaactgtaacatgacagatttgaagtattcagggtccttctacacatggaacaacaagcaaaaacctgaagagagaatttttt

SEQ ID NO: 332957 - DNA, 574 bp, Cannabis indica
cacatgcaaaccaagaacatcatacactttttttttcatgattttgaacaataaatttcagcaagaaacatcaacaaataaaaggggttaagaactacctcaagctgcaaacaaagctaagcacaaaacccaccaaaaatccaagctttcaagatgaattttcgaaattttccttcttaagatgcaaaataactcttttcaatctcaatcacaaaagccacaaacccgaagcttgaatccaagcaagcacaacccaaaatcaagagttagaatgagtttttgagaggaaaggggttcagccaaagggctgggaaaaaaatgcagaaaaataaatctttattttgcttaaaatcccttttatgaaccttactccaaaattgcaaaattaatcaattgcccttaaggccataaaacacccacataagcacttcaagggtaaaatagccgcttgcacacacaaataaactcaaataatttttagattattcccatataaataaaataccaataattaaacccaaaattgtattttggccccgaacccggttcagccgaaatacccgattgtgactat

SEQ ID NO: 332958 - DNA, 1055 bp, Cannabis indica
ttacattgaaatgaagttttatttagggcataaaacccaacaccaagtcaatgggagaagttacttatgaaatggaaaatcaccgcctgagacgccgtttggaagaggtgcagcgttggaacactaaattagagtgtgatgcagcctcagccagggtggcacatgggaagaatgctcaaaatcaacctgaacttggagtgagaagaccacgaggcaggcctcgtggctcacaaaccaggagacaggaaaatgcccacaaagaaatacccagggaaaatgagatacccatgaaaatcaaaacgaacagccagatgggaggcaactggaaactgatgaatgagaaattcctcatgacagtgaggaggatcttgggactcaactaggagaacataggtcacttgcgagaaatcaccagtggtcttcccaaacccatagagcgaggactcgtacagaccctaatgggggaaatacgatgaaccacactcagggggaaagaatagagcgtgtagaagcaagtgtgacctcaaggcggtcaagaaccatagtcgatcaactcgaagaggcaaaagtactcaacgagctaatgattgagaaagtatgggaaccagtaaatccgcgagtcactcaaagacaaagtctatgagtaggacacgatctatgagtaagaccaggtctgcaagcaatttctcccaaccggatctgcaagagcacttgaattgaaagaaacgtgaccttcgccaacagcttggtccaaagcaagaggttcccatccaattgtggataaacgagctggaggacaagtttaggagatattaagtcggggaactaaggagacaatctggatatgactcagacaagaagcttgagccatatcatctagatataatgaataccccttttccttcgggattcaaaaacccgcatgtctcgtcatatgacaaaaccactgatgcggtctcgcatttgagtaattttaacccaataatgcgagcgagtaatgtgacaaacaatttacgctgtatcttgttccccacctcgcttgtcggagcagtgag

SEQ ID NO: 332959 - DNA, 582 bp, Cannabis indica
tgtttttcatgtcctctagttaaaccaagtccctttatgtagactgttaattgagtaatttcttttcatgttgttgttggtttaggtgttcaccttcagaacccaacagcccttattgcagccgaataccttgatctggtcaattacacacgaagagtgttgtgggagtctacactaatggcatcacaagagggctcaatctattgtatagcaaataaaatgtttggtgaagtactaacagaattggtcggatataagccatccaagatttatttgatttttttagatttgtctatgttatatattttaaattatgttagattatgttagagattttgtattatcaacaatttactaattgtatgtatatataagttattaattctattaaagtgagtttagatattttaataataatttttttaataattctacaaatatataattagaaatttgcattactagaataattaaaattaaatattaaatataaatttggttgaaaaatcacatacaattcaatttaaatttattttgcaacaaaatttcagtagcagaattattatatttttaagtactaaa

SEQ ID NO: 332960 - DNA, 704 bp, Cannabis indica
gtttttaaggcctttcagcgtcgattttggcgaaattgactaccgacgctgattcgggtgacgctgaaggggtatgaaataaccaacgctatagggacgctatgtagggaccctatggagtcagtttttataaaataaccgactccatagggatttcctataaattttttcagctttaattaatataatttttttaacttttattaaaaatctaaatttattttttattattaattaaattaaataaagcataaataaaattaaattaaaaatttaaataaatacaaatttacattgctctaagtgtttgtatattaagtatttttttattcatattttatattttataatatgtgtttgtatttttctaatattttagaatcatttttataattttttaagttatgttttatataataattagtatattgaataataaataatgtgtaatattttaatttttatgtaatttaatatttttatacatttaaattttataatatgaattttgtatttttctagtatattagtattatttttataattttttaagttatgttttgtataataattagcttattgaataataaataatgtgtaatattttaatttttatgtaatttagtatttttatatatttaaattttataatatgggtttgtatttttctagtatattattattatttttataattttttaagt

SEQ ID NO: 332961 - DNA, 586 bp, Cannabis indica
ttttgtagagagatgatgagattgccatactagtgagtgtgagagatttgactgtattcctcaagtatttgtcagaacttgagagtataatattgtgtacccattattattgttatagtagaaggtttaccgtggtttttattagccacgagataattcttggcatgtatttagttctttgattattattcgtaaagtactatttacgttggaagatatccaaaaattctgaatatgctctgtgattccagctttgactgatctttcacatcagaaaggaattttggagtccccattgtattttcccgcaaatattgatcctgaaggggaatcggaatattgtcctttattcccaacattaaggtcattaaaaatgcgtcatgaactattgagattgttggacttaaagacttttatccaattttagtaaaaaaatatagcatgaatgaaagttcaagagacataatttagtatattttaaagttcgaggggcataatttggtatatatcaaaatctggagagcatggtttagtacataaatagtaaaattgaataaaattagacaaaagtccttaaatttaacaa

SEQ ID NO: 332962 - DNA, 521 bp, Cannabis indica
ttgctgcgacagaatctgtctctaatagtgcaaatcaagaattttttaagaaagttttgtacagctgggaaatcgcttttgtggctgtctctagggtttctatgttctataaataggatccagagagcagccaaacgattttatctcttctattcccatattttcatatcttttgttatgagaagagtgtttcatttgtaaaaacctagagtgttcaactaggttttggttttcttattatgatctcatactatttatagaataggttgaagagatgcttaataagtgtgggtcttcgggagagatgtttccaagtctcattttgggaggaagtgagcatatatcttcgggagaagatttgtttaagccttacttcgggaggaagtaagcacagatcaatagctgaagggagttcactacttcgtgtgtttcagagatcagtttagcaaggtcgattacaaagagttgcggcaaatcactagacggagtctaaatttttttaagtcaattgcttttgtaat

SEQ ID NO: 332963 - DNA, 567 bp, Cannabis indica
gagtggatgtcatacacaccagggccaatgccagcgccatacttcactccctcgcgaaacacagacagaagcttctcatcagatcttgagttctcgatggtaatcacatcagcatccatgttgattatcgagtggatgatgccattgaaatttgagtagcacatgtgggtgtgaatctgttcaacaaaataatttagacaaccagacgcgactcttcacatttgaaacattgattgaattttctcaaaatctccctatattttcaaaagtaggtaaacctagaagtaacttttatcttaggatacaaatcacagaacttcatgtaaaatagatcagtatgactgaacctgagtagtatcttggacaccacagttggtgattctgaaggagtgaacggcccaatcaagatagaaagcctgctcggacttcctaagaggcaaaccttctcttaaagcagcctcatcaatctggataacagtaattccagccttttcaagatcctcaacttcatccttaatcgccaaagcaatttgatagcaggtctcagacctgaaagcaaaaagacat

SEQ ID NO: 332964 - DNA, 601 bp, Cannabis indica
aactttgttaatctcctccttgatcgcactgacataattttcttcggagattctaatgtatacaccaataacagttcagttagttcaaacaaaatcatttagaaattttttaggacaattatagcaatactcagctagccaggagctcactttttagccttgtattcacgacggactcttctgagatccatggtctgagggaaggatccaattgtggtagttggaagaacaggaaggctcaactttttctgctgggcatccagcctgacactcacatttgttgctcgacggtggtcagagcccttcaaagcagcagcctttaaaagcaaagaattgcagtccagagtaaggaaaagatgatcacatcaaaactatagaacacgagatgttgaagatttaacatagacttactgatttttgaacatgctcatttgttaccctaggggaagattttcttgaagcttgagctgctgcattggcagcaaagaaagcctggagacaaataaaaaatcagacactgaatttatgcacttgtattgtagaattatatagtaggccagcacaaaaagttacataaaaaaaatcataaagtaaaatccaa

SEQ ID NO: 332965 - DNA, 521 bp, Cannabis indica
ttatatctttttttttttgaatttctcaaaattttacaagatatcttaaataactacaatatatacgatcgtataataaaattggactaactaattttctagatatcgaaataaataagggtgcatcagtacactcctctcaaggagtgcattgtagaatttttcctaaaaaaaaaattagaagctaaaacaaatacaggtacattggtacatctaatatcgtaacaaatatattcacttatcatttacttaaataatctcataacctaataatttaatttaaactaaagtaattattttatatattatttttaattttttttttaaatttacgggttaaattactctagtagtttgtacgtgagttgttatataaattttagttacaatttaaattgttttattaattactatatgtgttgctatatttattttcataaaaaatataaaacaaattattttaaaatgtaaaaaataaaaaaaaaaccctaataaactattataaatgggaaatttgaatt

SEQ ID NO: 332966 - DNA, 525 bp, Cannabis indica
attaaaaaaaagatagagattgctttgatttgttataagtaaattgtatagaaaagttaaggcgtactttgttaggtgcttataggttgtaaagttttgttttgtggtgcaatgaaattctgaattatcaaaaaaaaaaaggaacaaggactaaagatctgaactgaaggagccatagcattccactgccacaaatgtaaggttttctagaactttatatgtatttagtttattattttaggaaatttatgtttagggtgttagattatagaatataatttaacatacttgttagtaaatctagatccaggtaaaatatattccaacaggttgtacttagaagcatgtgttttcaagattgttttaaggttgttcagtagctgatatccgtaatatgtgtgtgtaatttctgggtatatttctttgcttctttgatgaggctctcattttcgtctaaaattagacatagtttttctttgacgccatatgcttcttttaattttttgaaaaactatttccaagatt

SEQ ID NO: 332967 - DNA, 809 bp, Cannabis indica
aagagttgcggcaaatcactagacggagtctaaatttttttaagtcaattgcttttgtaatctttgatactttactaattgattccattctctgggcgtggccccatggactagtagtgtttgaaagaacattgataccacgtacaaatctctcgtgtcaagtgatttaattttctacaattatttttatattctgccagttatggttcgtctctgcaaaacttgtttctgcagtaacaaaattacattctggtgctgcagacttatggagttttatatttagtatattttgtaataattattggcatttgtaaaatctcatttttcaattagtataagagcgggacactaaactcttagtgtgatccttttaacattttcttgtgtttttgcaatatgtttccctttacagaaggaacttctattgttcgcccaccactcctcagtgatttcaactatccttattggatggttagaatgagagcctttaccaagtctcaaaatgagaaatcatggaggatggttctttcaggatggtcttctcttgtggtagatttcgaaggtaattctaaatttaaatctgaacttgaatggtctaatgaagatgataaattgtctgcttataatagcaaagctttacatgctatatttaatggagtaggtgaaggctttattaagcttatatcttcttgtgaatctgctaaggatgcttggcagatccttcaaactcagtttgaaggaacttttgatgttaagcgttctaggtttattatgcttcagaccaattttgatgatcttagaatgtctga

SEQ ID NO: 332968 - DNA, 577 bp, Cannabis indica
gaaaacatacaagtgacctcacccgcattaaaaattcaaggtttccttagaaggctagttttgattctcgcaaaaacccaatcagcccaccaaggcataaaattgtaagtgtgcgactagaagaatatctcaaaaaacggctgggagttacccagtgacccaaggggcatgcattttcgagcatgaccctagagttaccgggaaacacacaccgtttcgagaaatctcaccaatcacaacctgcgagtatatcatgtatatccaattagcagtacatctcaaaaaacagctgaggaatctcctatatctcaagcggcatgccttgttcgcataaccattgggctaacggaaacacctcactatttcgagcaaccctactagtcaaaatatacggttgtatgggaaaaagggaacgctgacatatgtcgcaaatgggtaggtgtatcgcagtacctcaaggaacatgcgatcgcacgcatgagcattggaatacggcgacacacccaccatttgaaagacttaaccagtattcccacaagaaaatataaagagaatataaagaaagccctaagttcta

SEQ ID NO: 332969 - DNA, 824 bp, Cannabis indica
actatgtctagtttctgaattttaactaagcaagggcttaattgtgaagaaaattctagggcttatttattaattaagagactttattaagtaattaataaatatattaaatggcaattttatttggtaattaattttaattattgaataaatagttttggcatttaagtggttaaaattagaaaaatgacatttttgagaaaataaggaaaaattcttgaaaaatggaaaaattccaagtggggcccacatcctatggccgaccacttatgttggaatttccatttaattttttcaatattttaatgcctaataaattcaaacctaaacctaggtggttgcctatatatagatagtgatggctcacactaaaagatgatgaaattcaagccttcagtcaaaatttcttgggtccgggtcggggcccggaccccgaaaccagacctagaccccaaacacggacctggacctgggaccccggactcgggccccaaccccgaccccgaccccagacccaaacccgggcccgaacgtggacccgtgcccggactcggaccccgcgcccggaaccagacccgagacctgggacccgggacccgaactcgaacccggacctagaccctagaccccaaacccgaacctatgacccagactcggacacagacccaaacccggactcggaccccagactcggactcgagacgttgacttgaacctggacccggtgcccgagccacagacccggaccccggacccgaacccggacccggattgttaggttttatgccctaaataaaactccatttcaatgtaatctattttat

SEQ ID NO: 332970 - DNA, 578 bp, Cannabis indica
tagcagaataaagtctctttacaaggtatggtacaaccgtcaagcaacaagtaaaatgagttaattaagcgagccgtcaagaaactgcacaaccacactactacaaaataagtctttagaggaatttttttcaacataatattaaataactgacggtatagggttggaaattttaagaaggaaatattacgccacttatggcgtcggttatttggaaataaccgacgccatagggtgtgcccccatgtggcgtcggttatttccaaataacaataaccgacgccaaaagggtttataaccctagcccagcccttcgtcttcctcattcgattagccaacccaaaaacccccaaaccagataaaccccaaaccctctctgccaaccacaacggaaaatcaccccatttcacaattttttcactattttaactcatttttgtttctgaattttctatttttcatacctaaaactatatacctgaaaaagatcacatttttcctcattttttagggtaaaccgaaggtagaggtagtagttgtggtggttatacctctggccaccgtttttagtggagaaa

SEQ ID NO: 332971 - DNA, 831 bp, Cannabis indica
atatatccgagacatttgatcccccacttttttttttaaaaaaaaaaattataaccggttttatgaggtattatgtgttatgaagtattttattgtgaaactagttttgtctttaatttatatttcagtgttttaggaactgatttcttctttgtttttaattgtaatcggtttgagttattgcgtgttacttgtttgtattcattatgttatataaccggttctattttagttataaccagtttgagttctttcgtgttatttgtttttattcattataacactgttatagaaccggttctattttaattataactggtttgagttattttatgttatttatatttatttattatgttacagaaccggttatatttcaattataaccggtttgagttattagtttttattcatataaccggttatatttttagttatatatgagacatttactttggtgacttttccagtaactttttcagcgacgttgactttcctgtgacttttccgacgacttttccggcggccacaattttttcaacgactttccggtaccggtgacttttctggcaaaacttattgttgttttacaaatatgggatttctacttttttttaacaaaaatatggcataaaaaaaccatataaatgtaaaaaaaaaataaaaaaaaacccataaccctatagtgttatttatttatgccataaaaagtaaactataccttcaattcccatatttatgaaaattccccttacaaatacttagaaaaatttacatggtatactaatttttgccatttttttacaaaaatactgtcaggcgatatttttt

SEQ ID NO: 332972 - DNA, 1116 bp, Cannabis indica
aaaaaaaaaaaaaaaaaagttgccctaatatttagttttgggtgattctacaatgcaccctcttaaaagggatgcactgatgcacccttaacttgtttcggcatccagaaaaattttttagtctaattttttttcatattcatgtacattatagctatttaagatatcctacaaaattttgaaaaattcggaataatttacaatatagaaaacaatgttcaaacatacacgcgtataaaataaaacagtcacgcgtgcaacatactgtttgaacataattttcggcgtgttaaacttttccaaattccaaatttcttaaaattttgcaggatgtcttaaataactataacatacatgaccatgagaaaaatttagactaaaaattatttcagatgctaaaacagataggggtgcatcaatatatcctttttaagggggtgcattgtagaattttcctttagttttttagtttcagaaaatatacaagaaattattttatatattattttttaatttttttattcaaattttttatttgtacaccgtaattaaaggctcccctgtagtaattattattatttatttaaaccaaagtccttcattcaataaatcaaagtgtccttgtaaagcgagattagcacaaaagaaattaattataatccacatgactctagttttgttagtcgaagtataattggttaaaacgtgagcaaccttatttacttctcaatatacaaaagaaatctcaattccattcccaaataataataaatgtctaatgtgatcaagtacaccatcaatgtatcaacaactctccccctttgtttggattaattaaatagttttgagacaatcagattcgatactaaactgcacgtcgctaaattccaagctgtcactacaagaaatgtcacttttaccagcacagttcacttttaccagcgcatttcgcaaactgcgctagcaaagagatcaaagttttaccagcatacatttgcagtggctaaaatctaacttttactagcacatttacgcgctgggaaaagtcttttttgcccgcgcttttcattttatgctggcaaaagttctaataccaacattgatttgccaacacat

SEQ ID NO: 332973 - DNA, 1057 bp, Cannabis indica
ggagaggctttcgtgtcgttgaactattgaaacagaggttttgaatgtgggattgaagagtcggagtaaacgacgtgtcgtttggagtgtggattaatgctttggatattgggtgagaggagttggagtttgtggtcaacagtgtgtggatgaaggctgaggtaagtaaggcatcgtcgtccatgtttttgaacattggagctttggaatttatgttgagatgtgattacaggaaagaaatgaaacactgaaaatatgtgtgtgtctgtgagtgtgggtacatacatatttattctatgtgtatgatttttatgggttaattataagctgctacattataaatggtgtatggggtaagcggtttttatattatttattaaataaaaaatgaatgagattatatattttaagaattttttcaataatatacataaaatataaattatttataaaaatattttaataaatctcaattacaataatattttgctacgtcattaaaaaataccttaattttaaaataatatgcttgaagcgaaattaatctctaatcatgtttttttaattattttcctgggtattcaaaagtaattttttgtttacttatgatgctcagaagaaattaattagttatttttatgtgaaaaaaactttatttttaaattatataatttgagatacaatttggttaactctaaaactttatttgtaaacatctccataatcaatcaacttatattgttctatgttattatttaaaatacatttggataaccttaatgtttattttcgtgattaatgaattgtcatataatataataagttactatttttattttctaattattttatatacctttttattttgaaagttatgtgtttattttttagattatattaaattaatttgttattttaaatatttttacgttacttaatttttattttacttttgtaaaaaagtttatgttaatttcaagtctatttaataaactaataagttgcaataaagttaaaaaaaaaaaaactcacataacttattagtaaaattggtaaa

SEQ ID NO: 332974 - DNA, 530 bp, Cannabis indica
atattaattttagtataatatttaaattaaattatatatataataaaaattaagagcttaaatcccaccaaaaaacattttgtattttttatttttaaatttacttttgtccttatcttaaaaaaaaaaaaaaaactctccttactttaaattttaaatctgctactacatacatagaacgtaaaaaatagtattgtcttatatttgtttttgtatgatatatgtataatataattatataagtacttttcatgttactcgtattatacacatgaaaataggccaaaaaggaggaggagaagaggtcattaattataatgtcatgtaatactttcaaaaccctatcattttttatatatacacacatataaatatatgtatgtatttatgtataattagtttttttttttttagttaggggtattatgtataatagttgtacgttgaagtttgtgagtgatagatgcagaccgaaattaaaagccccaccggagacaacaaacgcttcttctgttgcacggctcgcacca

SEQ ID NO: 332975 - DNA, 546 bp, Cannabis indica
actatttatttaataattaaaataattatcaaataaaattgtcatttataatatttattaattagactccacaaagtctcttaattaataaattaaccctaaaataatatttctttacaattaagcccttgcttagtgaaaattcttaaacaagacatagtctaattttagaattaaaatttaattaaataaaatcaattaactgagtcttacaaacattttgtctcaactttattaattcctcgttgaaccactatagaacttggaattgcactctcagttacatagaatgctctatatgttccacaatatagatatgctattaattattcattgttataatcccaataaacaatgatcctctatagatgatttacattgcatagggacaaaattaccgttacaccctttcaatgtattttatccttaaaaacttagccacctataaatgatattttagtgaactaatataattactaaattgagcgctctatcatatttatctctatttagccaagctcgaaggaaagcatcgtttcacttcta

SEQ ID NO: 332976 - DNA, 763 bp, Cannabis indica
tcgtgaattagattggatgggccaatgggaaatcaaattaggagagttcaaatgtaatatatttatacaagaaggaaaagcaacaatatgttttgattgataaccaaatttattatacgaacctgcagaaaatgactctttcagctccctcactacctcattgttcataacagcattccaaactgcttcatcagaagacaatgatttcaccattttctacacaatcaaatcaaataacaacacaataagaccatgagatttttcaccatagttctctacatgtacataatttagtgcatcaagttatctagaaggtaaaaatcccaacatcttaactatttcaactcccttccaaattccaatctccatatttggctttggtaggaagtactacttcaaccttttacagcttatcatatgagaaagtagttaaaagttaaaacaatagaaatcaacctgtactaatggctcagtccgcaacagattgaaagcatcataaactcgatcggatccatgatactgcagcaatttagaattacacatacaaattgatggttccatccaatctgaatcggactcatcagacactaccggagaaactactcgttgtgctaaaccagttggactcatgactagatgatcttcatgatccctatccaattcaagagaaaacctatcccttataaggttggagtaagaatcagcattgaaaaccctgtaaacaaaaacaccattggacaaaaatcatgtatcacacaaatta

SEQ ID NO: 332977 - DNA, 976 bp, Cannabis indica
gggcacgagcttatgtacattttttggacgcatattctagatataaccaaataaaaatgatgtcccagatacaagaacacacaagcttcgtaaccaacataggactctattgtaataaagtcatgtcgttcggactaaagaatgcttgggcaacgtatcaacgattggtaaacgaaatgttcgcaaaccaaatagggcagaacatggaagtttacgtcgatgatatgttggtaaaattaataaacagtaaggatcatacttcagatctcgcgaaatgctttaagatattaaagaagtataacatgaagctaaacccaaaaatattttcctttggagtttcctcaggaaaatttttgggattcatagttaacgcgaggggtattgaagcaaatcctaaaaaatcaaggcatcaatagacatgccatgactgacaaaacctaagaaagtacaagccctaacatgaagaatggctgcacttaacagattcatttcgaagtcagctgataagtgtgtgccgttcttcaacatattacgaggcaacaaaaagtttgagtggacaaaagagtgcgaagaggccgttcagaacgtaaaaaggcttctagcaacgcctctagttttggcaaaaccaataactggagagatgttgtttctctatttagccatctcagaagatgcaattagtgcagctatagtgcgaggagagggcaagccccaacaacctatttgctatgtaagtaaaaggttactaggggaaaaatccagatatccccctctagaaaattttgcgttatgcctagtccatgcgtctcgtaaactacggctatacttctaggctcaccccataaaagtattaactgatcagccgttaagacaagttttattaaaaccagatgcatctggtgttggaaatattttaccaggatctagatttactaacaagtatgtttcattatgaatttctaaaataatgaaataa

SEQ ID NO: 332978 - DNA, 894 bp, Cannabis indica
gtcaagtctcgggtgctcggtagcccaagcaccggtgtaaaaatgaacttgcttcgtaatctgattctgattcctcaactatagtctatggtactgtgtttagtaaatgtcccaatgcaaatttgtacccatttgcactacgatggtacctgaaaactaaaaccctagttaggaatgtcaacctatacactaggtgaaatcctaggttcccaggttggcttccagagtgcaggttcgtgtaatttcagctcccaagacttggatttgattgctccatgtctccataaaatactggaagatagtgagttggatcaaagttattttgtttgaacttccatctcagagctcctagagtcaacctaggtgcatgactagggtcccatcccaggtcgactactatgactcaggtccactcaactttttgatatcatccttcttgccatgagtcaagcattaatgttctcgtcactagggaaagtttccaagttaaagtttgcccccaatttaacttcatacttgtgtgaagtggacttgatgacgtgaaccgagccgtttctcttgaaactgccagatgggcatcattttgacattcttaggcaattttctttattcttcaagtattcccataaaattaagattttagattctcttgctttttccttgggaatttttgaaaattaattaacaaagaaaaagaagaaaaacttatcattttttctcttatcttttctttgaaaatttgattttttttatttgttatgactttaggattaattagatttgaatcctaatcctatttgatagtgccattcaaaaattaggaagagaaaaagaagagaaaaattttgatcttttgcttatcatttatcttttcttttaaatctctaatttttc

SEQ ID NO: 332979 - DNA, 789 bp, Cannabis indica
ggtaaaatattcccaacagttctgatgaggtttcatctgtgcattgatgaaattcttggtcacctcaaagcgagcttgaattgatgctatcccaaatagttcagttaacacatgatttctgcagccgtaagagtattggcaaatcttgtttttaaggtgttgaccatgctagacagcataaaatatcgagctttgttgttagcattctaccaacgctcgaacttttcctcgactgccttggtcgcattctcacctagctgctcaggagcctcttcagtcaacacaaacagggaattttcaccgatgatagcgatattaatgttctctctccatttgataaagttagctcttgagagcttgttgtcagtcaacattgacaccatgggattattcatagtcatattggacactacaaataacaataaatagaagtcaagtaaggtttaacacaaaatcgcattcagaaattattagcacttagcaagtaggaatgacaagtgaaaatactaaaacatacaatcctaaataatttctaacgttttcaaaaaactgataccagtgtcccgtttaggcgagagtcaaagatactatccattgaatagagtagtcagctcatctcaaatgagaaacattctagcaaccttttattcgatcaagatgagaatccaacgttgtcccgtttaggcaagagtcaaggccattctatcttatgagcttccaccattgtttcatacttttgtaagtcttactcctagcagccaccattagggtgatcagtactaggaataa

SEQ ID NO: 332980 - DNA, 870 bp, Cannabis indica
tttagttaacaattacgtttgttgtagaaacttaaaaattaaaagttagtacgacttaatttttatacaacatactattagtttagtcacgagtttaacgtttttgttgtagtaaattaaaatcacatttactcacagaaaatttgtgttgtgactaaaaggttgtcacttaaaggtttttttttttttttcagtgtagtactgaagttctaatccatataactgaatccagattggaaccgatcgtatcatctcgagtaaaatctgaacagtgtatatcaatttttgtacggagatcgaaaaactttatatactggtgtggagttggtgttgtggtttttggtgtgggtttcctcgatcgtgttaaggtaattagagtaatcaatttcatttttttgttttttaaatcttgttcaaattgtgggttagagtaagcaactgatgctttcattcagttgaccccttgctgcaagttcatgcttgcaaaagtaggggctcaatagttttaccaattattggatttgaatcaatgactctcgtcgtatgaaaacgatactctaatggctgatgttccccacatctgagtgatcgagttgcctcctctcccacttaatcaatgctcgaggccaagcacttatcggctggcggacatgcagtattaaactgacacaatcttagattcaagtttgatttcttatgcagttaagagtggagcctgctagcaagaagtccaattatgaacatatatcaatccctcaaaagaaaacctttcttccatcgtatgggtgtctgagacaaaggaatcaggtgtcgatagaaaggaatcctcttatctagagactggagtgagggatcatggacctaaatagt

SEQ ID NO: 332981 - DNA, 474 bp, Cannabis indica
ggttatgataaatatgaatatagcattatctaaccaatacaaactaaaaatatcgtttttttttttttaaataaaacattaaaaagaaatttggatttaaaattcataaaaataaaaatttaattaaattactataaaaaaatattaaaatttctttcatatttattttttttcaaaaataaaataaataaaactatagtgattgccgaagttgtcactcgtgctggaaaagtcaccagagtttactgccggcaccggaaaaatcgtcggagtagccgccggtaccgtaaaagtcacaggagttgctgccggcgctgaaaaagtcgttagaattagcattgtcgctggaaaagtcaccaagaaactggtttcttgatgaagaaaccggtttcttggaaaccagtttcttagtatttttccggtaattttaccggtgacaatgccaagtccgacgactattctggagtttgatgt

SEQ ID NO: 332982 - DNA, 800 bp, Cannabis indica
aagttaagatggggaagaagcatgcaaatcaaatttctaaggtttggtttcagtttcttttcaattttgccctaattttgaaatgttgtctctgttttgtttagtattttttcttgtgattttagttatagggttttatatatttaatttattttgttgctttcttaatgatagattttataatttagaatattgttagattctattttaatttatgtttgagacatctaattccgatgatgatggaagctatgatgacaactccagtaatttttccgataactttttttagcaacactctatgctccagtaacttttcctgtaatatttattattagaaatttatttactttatttatgttcttttatttggtttcccgtatttaaaattttgtttattttttaatcccatatctttttacattattttttgaagccatataaaagtaaatttttaattttccctcatatttatgaaaatttacgggatgcacttatacacttctatctcttttggtatatctgaaataaatttttagtcaattttttttctcatggtcatgtacgctatatttatgagaattgctaaagggcaccactggtgcctagcaccctcctacgtgtcaatatcgctattggtgcaattaagtatcgggtcccatatagtttaatataataatttttatggagtatcgctaaccaattgtaagacgacacatttagaaagtgctaggtaccactggtgcccaatagcaattctctatatttatttaaaattttgaaaaatccgaaaaaattta

SEQ ID NO: 332983 - DNA, 688 bp, Cannabis indica
ttcggattaatgtgtttaaagttatgtgaatatgagtattatcctctaaatgtgttcatatatgtcatggaaataatcttttacattttctattgagaaatatatgagttttaacaatggagaaacccattttggattcatcattttatgatgtattattctgtgttattagagtaaatgggtattagaaaatgatagaggattaaaaatgagacaaaacgcttcaaacggcgtcgaatttggtggtcggatgtgggagatacggccgggtcacgaaccgggtcgggccgatccgagttgcagacctgcggacccgttggggaatgttttgggtgacagggacgagaaaaacgacatgtcgtttgcctctgtcacgcaaaaacgacatgtcgtatgatcacacggttcagcaccttacagaaaaacgacaggtcgtttatgaccttccaccaaacgacatgtcaatttctcataacgacatgtcgttcggtccgatgctgaagccccctaaccgcaaacgacgggtcatttctgaccgaagtttttggacgtcgttcggccaaacgacatgtcgtttcttcaaaacgacatgtcgtacggtcaattaaaaaaaacagaaaaaggtgaggcgcgtgggggagcgtgcatatcccatttttggccctttttcaccattttgttccatttt

SEQ ID NO: 332984 - DNA, 1051 bp, Cannabis indica
tccgagatcaaccggccttgcaataacgcactttgagtatcacatatgatagaggcataacactcttaagtctatcagcaaccactttggacacaatcttgtacaacacattgcataacacaatgggtcgtaaatcccccatatccataggctgtttctttttagggattaaccaaaatggtttcactaaggtctgtaggaagagaaccattatgaaaaaactgcttaaccatattgatgacatcatccttaacaatcggccagcacttctgaaaaaaaccgggggtcattccatcaggccctggggatttatccagatgcatttggaacaaagctttctgaacttcttcatctgaaaccggtaatagcagctcagcattctactgggatgatacacgagtttgcacactacttgtaacttctctctagtcagtttgggaagaggaaaaaagctcgtggaaataagaaaccataagatcatccaaaccactctcccagtcaacccatgcacccgaatgatctttaagttttgcaacaagattattccttcgtgtcgtagttgcagaagcatgaaaatacttgctattattatctccctcttgtaaccacagttgcttcgatctttgacgccagaaaacttcccgttgcacataacattcggccaagttcttctttgcttgtttataattggctacagagacctcatcccgacccaatttccacttatgcacttcgtttttacactttttcaacctttccttaaagttgccagtaacctctttaccctaatccgccaacttgtccccacaaaacttaattttatgcataatatcattagactcacaaatctcccagctgttacgaaaattctgtttattacgcaagtgtacgtatcaagtagtatctcacgcaagtgaggtcgaaccacagggaattggattaagtactactaaattatacttatgattctatttggtagaataaatagtttgcaatttaaaaataaagaactcagaaattaaaaggaaaataaacgaagattaatcaagat

SEQ ID NO: 332985 - DNA, 650 bp, Cannabis indica
tttatcatcaagctactaaaactaaaatcaccattaaaatgccaaacttgaactcacaagcccaaacctagttcaatctctaccaaaaccgttcaaaccaacatatgatcgtctatacaattcaaaaataatcgaagatgcattctttaaattcccaaaatgaacaaagttgaaaatctcataaattgcatgttcaacctaaagaaaacttccaaataacttaataaaaaagtactaggaccttacctttgataatcctcctaagattttagctagaactcattacaatttgatggagaaaccctagtttcttctgttctccttggagccaaagtgaagagagcaagagagagagagagagatagtatactttggtttgattttaatgattttttcactaactaagataattcaaacaataactaacttactaattaaaatagtggtcagctgccaacaataggaaaagccacctatccatgcaatcaaaatgaccgaaatgcccccactaaagctttaaaaaggcaaaatggcttaggggtaaaatggtccaatgccattatcccgcctatccccgacattccaaacgtctaactaactcgtcccactattctaaaaaatattaaaccataataaagtgactttactgg

SEQ ID NO: 332986 - DNA, 701 bp, Cannabis indica
caaggtaagtcttttttgatacttccctttaacttttcacacttagctccatatgttgaatttttttctttgtgcaggccggtttgaagttggcttacacttactcccgggctaagtctgttgcttccaagagcgcgactctatctgaaaacttgaaggcggaggcggactcggcccaaaaggaagctggagctgttcggctggagttgggcgaagccaacaagatgttgttcgctgccgagaagaagatatttgtgctgacaaaggatctaaaagctgctgatcgctttgaggagaccatcgagatcttatctactgaagtaaacagccggcctcgagctcttcttcgatttttggaaggctaatccccgggccaactttgactacttgggcgaggctaaggacatgtaccttgagtactacgcggcccaagtttcttatggtgggaacaaggcggctgcttcaacctccagccaagctgcttcaacctctggttaggctactgatgcttctcctgttcaaacaacagatcctcctgctccagttggcccagaagaaccaaaccaagagcctgggactccagctgtttaaacatctcctttatctctttttttttttatatatatatcttattcagccttcgggccttttctaagacatcttgatcggccaagtggtctttaaacttggaattatttttc

SEQ ID NO: 332987 - DNA, 654 bp, Cannabis indica
tcgagataaaacacttgctttgcttgactagcaagtatgtatgggtcatctttataccatacaccactgacattaatactagtgataaggttctcgacgattgttttcttccgtcttggatttgtattgtaccacttgcacttaaataatgtgacagagtaaacaccagtgaaggttaactttagcacttcagtgagtgtgccgtaataattaaaaccttctgttcctgccacaaacactccactattttgtgtgctcctcttctcatctcgtttggtagccataaatcgaactccattcacaatacaaccttcatagtaagtacctaagtgatcagacccggatgctaaagctagcaactctttgccattctctaatgatccagacttgtgcaagtcatatatctataaaaataagtacctcattagaaaatgacaaacaccacttaagataataaacgtttactacactatatatattcaccttcttgtgaaaccacagacgaaaatgttttttgtgtagaacattatgatctccattcgggtaattttgtcggatcacttccaagtgttcactgtaaaataaaatagatttgaattgattgattgaaatttaaggtgaaaaaaaagaaaaattaaataaaaaaaaaaaact

SEQ ID NO: 332988 - DNA, 1295 bp, Cannabis indica
tcagcagtaaaatcctgggcaagaaattcaacatcagaattttccaatccaggacccaaaacatcaaaaattgcagcagcagcatccacactacaaccctgggtgctaaagaggtcagaaaagtgagagacaaccaaattagctatctcctcttgggtattaaccacacgaccctcattgtctttaagatattttatagcattagttttcctcctaagggtggcctgtttatgaaaaaactttgtgtttttatctccagcatgaagccacctcaccctagccctttgcttccaatagacttcttccttatagagaagagcatctaacattgaattcaatttattcaaatgaagtctatcagcttgagtgagaacatcttggttatgaaaattttctatttcctgtgtcaattcctggattctagatctaaaaagatgattatgagtcttgttccaatcctttaaaaaactagcacaatgggtttgtttatccaggaaatacttaaaatgattggagggtgaattattagtggaaaaatcatgccatttattttgcataaggctataaaaatctggatcctctaaccaactattttcaaaacgaaatcgcttattaacaaaattaatagacctactagtattgttggcaaaaagaagttttaaagcacgatgatcagatccatagtagcctagatgatgtaaactattttcaggaaagatatcacaccaagattcagaagctactgcccaatctaaacgttcactgatagtattattagtccaagtatatttacagcccacataaggaagaggaaacatagaaaatttattaataaaatccgagaaaaaagtcataacaccctgatcaggggcttgacctccaagcttatcagtattaaaaaggtaactattaaaatcccccattattagccaaggcaaatgtgaagcattataataaatatcatgcaaaagtttccaagtaaagtgcttttgagaatgaacaggggaaccataaaaacaagtaaaatgccatagttcattaacattaaaacttacagtacaatctatatgattagaggaatagttaaaaatatttacagaaacatcagccttccacaacaaaagtaaaccccctccaaaatgctgcctagggatttcaagaccaaaatcaaaacctaacaacgctttaaacctatctaccgaatttggtttaagcctagtttccatcaaaaaaataagaacaggtttgtgagacttgatcatgtgggaaagccgattgaatgctcgagggttccc

SEQ ID NO: 332989 - DNA, 527 bp, Cannabis indica
cttaattttgtaaaaaaccattgccatgagttgttattttctgaatccacaatagaaaaagctagggggaaaatgtgtccatttgcatcttgggtataggctgagagcaatgtccctccatatattgattttagtaaagttccatcaaccacgattatggatttgcacttgttccatccctttattgaagcatctactgccacaaacaagtacatgaagctattatcttcttcagttttcatgtgtactatggttcttggattagttttctgcagcatgtgtaaaaaacttggcatttggttgtatgattcttttgcttttcaacgtaattcttcatgcacgtgctctttacttctccatgctttcttgtagtttatttttacgccatacttattttcatttctcctctaatgtcttctggcgtttgagttgtttttatgttattaaatcttggctagatgtagtttccaatcaattttgttgtagcctgtcttttgtctacacatcttatgtttagatcacaagtg

SEQ ID NO: 332990 - DNA, 502 bp, Cannabis indica
gccatggtaattgatttactttcaagaaatttggacttaaaacgatatatgtgtgatttggatgtgattcatgttgatctatgtggttttttatgattgtttgatgtttgcaatttttttctggaattatttttgttggataggttggaaaaaattaagcaattcattttttttacataactcaatttcgatttaatttgaattagttatgaatttcgttaaattggaaaaatcaggggtggtgtcacccaacgtacatgcgaatccccttgatttaaggggttcacgcgtattcggacaagccttgtctgaattttctcggtcaggacaggctgagatgtcggaatctcatccctgcgcgcgtggagaggctgctagcagcctcttgtgccgtgtttactctgccatgcacaccatcgtgtgcgcgcggatggtatgcaattcataccatccgcaccaaatacaaatttttccattttttttcatggaattaatttcgatt

SEQ ID NO: 332991 - DNA, 551 bp, Cannabis indica
ttacggattatgaaagacttggtcggtccgtttctagatgtcattagtgcccacttgcattttagatccaagcaacaaattttgtatgtttttgcaaaagtacttttttaccttgtattgaaagttatttctaattgcatagaaactaagcacacttttgcagtgtttctttgtccttgtatatttgtgcttcttctatttcaggatcttgcgaatctgtgattagtagtttgtcataatcagtgatttctgcctctctatctgggttgttttcaagttgctcaactatttcctcagccaccaattttgcatagtccatgaagtcaaacactgtttcaccatcttccggcattgttccttacattgtttgttgttgagttgttgattcttctgttggtggtgtattgccattggttcaattatatttgtttgtgcaactaatgagttgctcatttccaagaatgatggattgtttgttgttgttttgttgttgatcacattcacacacaatggatacgttgtgaagttaggttccttcagttttagttgta

SEQ ID NO: 332992 - DNA, 1364 bp, Cannabis indica
agtgcctccccccataagttgttgttcaacttggagtacactatcatagaattgaccatttcaagaaatgttctattcttcctttcggctacaccattttgttgtggtgtatgtggtgccgaactctcatgaattataccattttcctcacaaaaatgagtaaattcattagagaagtattcacctcctctatcacttctcaacacttttattttcatgttgagttgattttcaacctccgctttgaaaatcttaaaagcactaaaggcctcatccttttgctttaacaaatatacataagtatatctactataatcatcaataaaagtaataaaataccttttaccacctctagttagaattccatttaattcacataaatcactatgaattaaatctaacaattttgaatttctttcaacatttggaaaaggttttttaatcatctttgcttttacacaagtttcacatttaccataatttcttatatcacaatcaatcataccacattttttaactcttttcatagttgaaaaaccgatatgagctaatctaagatgccacaaaaataaagaatcatgctcaatcatataagtggaactagatgctttattattgctaacattgaaagttacatcattggtgcacaatttcaccattccctcacaagagtaccccttgcccaaaaatacattagacttggtaagtatgagcttaccggattcataaacggccttaatgccgggttttccaagtaagtcaccactaatcaagtttctattcatatcgggcacataaagcacattcaccaatgtgacttttttaccggaggtgaaaaacacatcaattgtacctttgccaagtacctttgatttgacctcattgcccatttggatctcatggttaccctttgactcttcaaaggttttgaacaatgatttgtcatatgtgacatgaacggtggcacatgtatcataccaccatcccttcactttcccttgcacggaattcacctcactaagagtagcaatgatatcctcctcgatagcatttactttgggtcccttaaagtcttttctatgcttacaatccttagcatagtgtccaagtttgccacacacaaaacatggaccttttccacctttgaattggtttggtttagactttggacccaaggtattaccctttttggtatttcccttgttcttattaggaactttggaagttgcatttgctttggaagtctcatcattagacccctccacaagcttatccctacatatcgattcctcctcgattcgaatatgtttttggatttcttccaaagagtaatcctcatttttatgaaggattctcttcctata

SEQ ID NO: 332993 - DNA, 563 bp, Cannabis indica
atccaggttcagatcttgattttgttctgctacagaaaggaatcaagggctagggatctgaacggaaggagtcattatattccgctgcacccaatataaggtttcctaaactttatatgtgtttaatttcattgttttagaattcatattaggatgttaaagaagcatacatggtagtaaatctagatccttgtaaaatatttccaacaccataatcccattctttccaacaatatgccccaaaaatgatacctcagacaaccagaattcacactttttgaactttgcatacagcttgtgatccctatgtcgctgcaataccattcgaagacgatgctcgtgctcctcttctgactgggagtatacaagaatatcatcgataaacactataatgcagttatcgaggaaatccttgaataccctattcgtgagatccatcaatattcataaatattgaattttaaattctaattatttatgtggtattaactctttgcagagataaatataccatagattttgtatcattaataaaaaaaaaacatacaaacatgataaacata

SEQ ID NO: 332994 - DNA, 664 bp, Cannabis indica
gttgggttatgcattgtattctcatttggttcaaagtaagaaaattagaaaaaaatggaaaattgctttctctcttcctctctctttcggccacttcttgagcagctggaattggtgtgtttcttctacatttccagtaagaatcatcttggtttttaggtgcttaaactttaggtatttttccttgtagcttttcttggtgttttcttgtgttttaaggaaaaattagtgaattgcatgcttagtttaggttgttgttgttgctgtgattttgttgttgtttccagaggtttacgcatgattaattgaggataattaagctgcttgtgatacatgatagttaggttgtttagagttatggaatttttagttcaaaagcttaagttttcaaagagaaagtttgaaatttgttgatgtgattgttgcatgagcttgtgtttgttttctgcagctttagtatgcatgtttaagtagttttgcactgatttgaatgcatgatattgttgcttaaccaagtttgagtttgaaactcaaagcttggagctttaatggtgatttttgatcctgtgaattctgggtggttttgttgctttagaaatgctctatgggatgtttagaacaggtctggaaggtttgggtgaattggatttgatttgagcaatgt

SEQ ID NO: 332995 - DNA, 536 bp, Cannabis indica
gcctttactaatccaaattactaaagcggtcattacataaatgatgctagggctagggaacacacggtgagaacccaataggaagatatttctagttgctacaggcacttcttgcaagaaatatccgaaggcagatgtcgattattacgagaagcagcctggccagaaccacccagtgtgtcctttattcctttggcaaagcctttgtttttacccaatgtcacaattgcttttgaaccagatgacttggattttgaaattatacctcccaagccacgtacgtctaaaactcctcagcgtcaccttcgaggctgagttaatagaatcgaaggttcaatctatctctggctatacgggcaagatgctaaagacctgtggaattgcaattgggcaattgtgctaggttaggtcagtaccagagggtgaacttagttgctaccccctgcacgcttaatcagcagtaacccaagaaccagtggtgagattagtactagtggttcaactagtatgggcgcttggagtcttgagcatatttg

SEQ ID NO: 332996 - DNA, 583 bp, Cannabis indica
tttaatttttttatttaaatttttaaaagttaaaaagtgaaatatgtcgaatgtattttctaaaaaaaaacctaaactcctctatcttttttttgataaggagtcaattactcaaaaaactaaaccagagtcgaaaaacaaagtcaaactcccccagaaaatgaagcaaccttaaactcgaatagaaaaactcgtacttagttcttctagctataaaaaaataatttaatatcatttaaaataattaattatttaaaaatttattatacaagaagagaattcaaatttgtgtaagaagaagtctaatttttgtaaaaaaaaattaaagtttcatcgtaaaaattataatgaaatagcttaactgttaaaataaatataatagagatttatgtaaaaaaattatttattattattaattgctaaaaaaagatcttgttaagtatttaattaattattttaagaaaataattaattataaataatagattctaaaaaggatattttacctattgatattataggtgtaaagtccttttttggcaagttaggtgacaaaataatttttcctttttatggtaagatt

SEQ ID NO: 332997 - DNA, 592 bp, Cannabis indica
ttagaggacattggttttctttttctgaaaaagacatttcccaagccttgtaattgccagaaaatgtactaaattctataatgtctatggatcaccacttgatgctcactgaactcactagtgcacggactgacttgaaatctggggagagtcttcgaattacacatcttacctttgctcatgcatctctcatgaggtttgcacttagcaattggcttcccaactcaaacaagatcgtggtgtctcaagatgtggcctcattcatctttcatatcacctcgggagcatccatcgacttggcctcccacattttgaatcagattatttcatttcgaagaggtaaaaagcgcacttttaagcttgtgtttccaaatttaatctttaatattttgtcctctcagaaagatgtggcccaatctcatgaaactcttgagcctcatctgactggaaccgtttttcaaccctcggagtattttgatggagcttttacaaagcatcctaaagctggtgctgctgctgctgctgcaagttcgcgttctgcttctgcagatgttcaagaagtgaagaatgaggttcagctggtgaacaatcg

SEQ ID NO: 332998 - DNA, 1049 bp, Cannabis indica
gggtgtagaaatatttggttatgcagttcaaagatcattaagttgaactttgaattatattcaaacttacctccctaaaaattcgaattaaatattgatgaaaaatgaaaggtctatgattagttactagcagttgcctaagtccttctagggaaataccttagtgataggaaaacttaagaatgatggaatggttatgtacttagtgtacactatttttagattcagggatgtcctgatcatgaatataaaaaaagctagagctattaactgaagtttgcatgcttgatagctattctaaagtgattaggggtggaccatcctatggtcgttaagataagaaagtgtttgtttcaacaaatactacttttctaagaatatgaatacatctgattgcaaagtagaggagatattttcaattccaaagtgttccatcatctcattctatataagatggtctcactgcctttattgtattaccacaaccgatgaggataatacctttaatgttccaagaaagaaagtcacgataccttgtcgtagtgggagggtttaaggaacccaccctgttatgacttggaagacacttgtgataaaaatccattgttagtttaaacaagtaatggatagtcagaataaggaactgagaagcaaagccaagagaactatggttaaaaccattcacatggagtaaccaaaagttttctattacaaggacaagaagggaaattttgataataagtctattcaatggacataacataatttcctaatcctagtcttatagttttgagattatttaaatctgtggcttgtggtatgcctggtaatttacttactctagtgcaagcaatttattttagtaagatattggagcatttttctaatgactaagtccaaaggaagccttttgactcatagatataaattttatttatctaaggaatagtttcaactattccagaaaagataaagtcatgaaagaattccttaagcatcaacagtgagaggtctcgtgtatgtttaggtatgcattagaccagacacct

SEQ ID NO: 332999 - DNA, 1710 bp, Cannabis indica
actcagaaggatttgaatatgaggcagcaacgatggttggaattggttgaagactatgactacgagatcctctaccatcctggaaaagtaaatgtggtagcggatgctctaagttgaaaaggttcggaggaagtatatgacctgaagaagatctcactagaattggctgaggatatgaccagagcaagagttgagtttgtatttgggaaactagccaacattagattacagtctaatttgctaggaagaatcaagacagcccaacaaagtgatccagtgttacaagagtataaagaaaaatttatggttggatcaacaaaggatttctcaatttcatcaaatggcttattgcagtataaagacagggtttgtgttccagccgacgataatatcaaacaggaaattctggatgagtctcataccatgccatattcattacacccgggaacaaccaagatgtatcaagatgtgaaagcagtggaatacgtgtcaaaatgtctaacttgtcaataatttaaagtagaacatcgagagactagtgggattacttcaacctcttaagattcgtgagtggaaagtgggaggatataaccatagactttgtggttggattaccaagaacaacgaggttctatgattctatctatgtaatagtggatcgatatacaaaatcaacacactttttaccagttcggactacgtatacagtagatcaatacgttgatctatatgttaggagataatttggcttcatggtgctccaaagtcgatcatctaagattgagatccaaagtttacatccaagttctaggagagtttacaacaagcaatgggtactaaattaaagttcagtacaattttccatccttagagtgatggtcaatctgagaggactattcaagatacttgaagatatggtgcgcacatatgtattagactttgaaggttcctggaacaagtaccttcctctgactgagttttcatataacaataattatcaaagtactattggtatggcaccgtatgaaatgctatatggaaggaagtgtcgttcgcccattcattgggatgaagtcagtgaacggagataccttggacccgacgcattccaaagaactagtgagaccattgagaagattcgagctcgtatgcttacctcataaagtagatagaaaagctatgttgattcgaagcgtagagatattgagttccaggttggggacttcatcttcctttgagtaccaccaatgaaggggatttagagatttggaaagaaaggaaaagtatgtcccagatttattggtcatttcgatatactggaaagggtaggtcaagtagcctatcagctagccttaccccctgctttatctggagttaacaacatgttccatattttaatgcttaggaaatatgtgtttgatatgacccatattctgagttatgaggacattaaactttagacagacttatcatacgaggaacaaccagttcagatcatggatagtaaggagaaactattgtgaaacaaaaccatttcgctagttaagtgttgtggagaaataacaaggttgaaaaagcgacttgggagttagagtcgcagatgcgggagcagtatcctgagttattcatgtaaatttttaggacaaattttttgtaaggaggggatagttgtagtagcctgaaaattatgattatgttaaattggacata

SEQ ID NO: 333000 - DNA, 1128 bp, Cannabis indica
ttgtgactgtatatggtttaatgcagagaaagatgtaaataacgactactgcaatacaatttttcattagattttctttttcttttttcttttttgggggtgggaatttgaacaattttgtccccagattatatattgatgtgtatgttcaaaatctaaaggtaaagggaatttgtgtaaattgccacaatgtttgacagttaagttattattagattatactactttcatgtatgtgaccaacaaattaaatttaaacaagttagaaaccattaatttccactagttttgttcctcactcaatcttccaattttagcaatttatgtgtcatttttaaactgacggtataacttttttgtgacggtttagaaatgctacaaattattttgcgtcattttcaaaccgacgctaaagataaaataaaagtgtgtatattttacgtcggtttttaaataaagataattattttttgcgtccttttaaaagtgacgctaataaaaaactatttgcgactacggcatacacgtcggttttataaaccgacgtaaattctttaaatgacatttaaaaactgacgagaattgtaatttctgtagtagtgatctcacatctatgtgtttggtcctttcatggaagacctgattcttgcttagatggagtgcactctgactgtcacagtggatgacaacagtgctttgttcaacaccaagttccctggtgattcccttgagccagagtgctatcttgacagcttcagtacaagtaatgtattttgcttcggttgttgaaagagctactacagtttgtaggttagccttccaactgattgtactgttatacattctaaacacaaaaccggtttgtgactttcttcagtctaaatctcctgcatgtttggaccatagatcaggcctatatccattgttccccttaagtatcttagtaaccacttcacagcactccaatgttcagtgcttaggtttcccatgaacctactgacagtacttacagcatgactgagatctggcctggagcaaaccatgagatacattatgttgcctaccacatttgaatatggtatatttctgaaaaaccgtgtttttgcaaatgtcagttgtatataagaa

SEQ ID NO: 333001 - DNA, 1124 bp, Cannabis indica
tattctattagtattaaactagtttatataatcacacacgtggcgtccttatagattagggcgttacaacttggtatcaaagcagccattgttttaaaggtcctgaagactggtcgaatatgtatatttgctgcgaggacaggtcgactgatggtatagtaagtatttatattatttgttattgcattacctgcctaggctattataaagtatgttggaaaagtagcatattgaaaattttgataagaatatgtgtatggtatatgcatattgatattgatatccttctcagttttaaatggttagaagatgtggactaaatgtatgataagttatgcaataagggcaatggaatagtttggttagcgagctgtttgggctcggggcaaacggtaaggaagagaatcctttattgttgtaatactggaaacatgtaaattctgttatacaggatatgattagacgaccaaaaaaaataaatctaagatttgaaaagataacaggctcatcttgtgtctgttcttatactaccgacacatcctgttgtaccactggatgtggtgaaatatatgaacccaacttacgagcagatcaataggtggaaactaaatgaaccacaaattatgggatagaacgaaaggttctagggtgaccatgatagcggtcaaagtgagtataagagatggtgaccttatcctgagtgttcaagatgcaaaaaggcgccatttgagccaatgtagagccagattttattttattgtagggtagtgggtcatctaaaaagaacctatccatagttaagaaagattgatgttacagaagaaaattgtatgggtcctacccaagtgctagttatgacttaaggggactcgggtatcggtctttcgaccgactcaagttagaatttatgggaaatattataattgttattgatattaaatattgtacatttagttagagacatcaagaaatctgaatggactgtgcatgtatgctatttagcggtaatccatttaacaggatagacagattagaaagatgacaatatgagttaaattgttgatattccctagtggaatatagaacatgagtatttaatggaggcatcgatctaattgattcaa

SEQ ID NO: 333002 - DNA, 747 bp, Cannabis indica
tgattataaaactctcttctgtgtgttgatatgttcacttcaataggcacattgcttccgtgccaaatgctaactagaaaggaacgtgtcatgtcactgtcttctcggtagttatgtgggccccagagtacctgaggtagctcctcaacccatctgcatttgacagcgtctaacttcttcttggtagtatcctttaaggttttactaacagctacttgtgcatttgcctgaggcctggatactgacaagaagcattagatgactttgttcctctcgcagaatttagtgaacaagtcggcgtcaaattgggttccattatcagatactatcttcatgggaattccaaacctacagataacgtttttgacgataaagtcaaaaactttcttgcagcttgtagaaacgaggggctcagcctctgttacgaaaattatataacaatacgcaagtgtacgtaatcaagtagtaaactcacataggtgaggtcgaaccacagggaattgaactgaataccactaaactagatttatgattctatttggcagataaaaataattttaataaagtttaaaataaagataaaaaagaaaattaaagaaagcaataaagttgtttaatcaaggatgagaaattagggaaaataatcatgttgatttaattacgcaattgttaatcctaattactactctctttctctatgtgaatgaaagattataaattaacctaactcttttcagatcttttagg

SEQ ID NO: 333003 - DNA, 562 bp, Cannabis indica
aatcgctcaagtaaaaataaagcgaatcggcaacaaatgaaatatccaacaacgtaaggcacaaaatcattggcttcgatacgacacggaatgatatttattaatactttaattgttaaatatgatttttctttataataaattaatttcattgtttatgttcgtacagggggtcctcctggagagcatggagttgacgcatggacggaggttcatttgaaaaagccgtctggcactttcgttaatgaagctgctgcaaaagattatgtaagtgaataaaatgatttattattaaagtttatattttatattaattatatattctatttatattaattatatattctaataatttttatttaaataggagcaactggtgaaggagcttcataggaaaagacttgaacgacaatcccagagcgatacatctagtactgaatctgtttgacgttctggaaacagttctaggagaaagatctgactatcaaagaggcgtgggtaaaaggctcaaaggcaaaagaaagaagtcattcactcaaagtcagtcgacggtgcctcctcc

SEQ ID NO: 333004 - DNA, 594 bp, Cannabis indica
gcctgaacaacgtgctcatttatatataacccacgattttgagaaactttattcaaacgtatagtcaatcgcagttgcctggcggttcgtcctctcagagttatgccgctcctccacaacagcaacaacaacctcctcaacaacaacagccttcacagtagcaattccaaaatttgtcacagcagcaatttgaaaattttttgtagcagcaacctcaatcttttcctcaacagcaacaacaatgtggtccgccattgggaaatcagttcttatatagaacaccatcagagtctactccgctcggctcaaattttgttgatttttgattatttgggagttcattgcaggagtaacaattttattcaactccattttcaaccaagctgagctcagaaatttaacactgggtttatcatcagatcaagcatatgtgtcttctccaccacaggcttcgggaactcgtaacgataataattcgaatcaagactttataattcgagaccttaatgaagatgttatggaataatttgtttatgttttttaataattttgtttaattttgagacaatattgtaataggattaatgtttaagt

SEQ ID NO: 333005 - DNA, 508 bp, Cannabis indica
ttatacttcgtcaagaagaagagttgtgatgattaaggcaaccgacttcggctacccctgttgaacaagtgttaccaccagcacctgtgccagtggtgggtaaccaggggtttgttatgccgcatagagactcggtatttgagcggttcgtgaagctgcaacctctgacttttctgggaggtattgatataattaagaccgagcagtggatgaacactattacccgtatcccgaataatatgggagtgacgagaactgaaagagtgaactatgcagccttcatgttaccagatcatgcccgcgtctggtgggatatagtgggccaaacctgggatgttagtgtaatgacctgggagaaatttaagaatctatttgaagaaaagatttacaacatcgctgtgagaacttcacacatggaagactttgtgaagcttactcaagggaagatgtcagtgaatacaccctggagtttgatcgactatcttagtttgctggtgatctggtgcct

SEQ ID NO: 333006 - DNA, 1000 bp, Cannabis indica
acagggtctgggatgtgttctgatgcaagctgacaaagttatagcttatgcctcttatcaactgaaagattatgaacaacgctacccactgtgtaaagaccgcttagtttaaatttggaaattagcagataattgagatttaattatgaaagttatttatagatatttaaataattatttatgtcgttatatttgaattcagaatgcatttttatgtcatttagtgaaatatcataattttgcattttcggtgcccgacaacatggaacgtggtgtatggctcagtagaatcacaatcttatatttttgtatagtgggacggtttatttagacattgggaatgtcgggattggtcgaaaatttagaatttcccaaaatacccttagtatcgtttaaattagttttatctaggcaagggcatttcgatctttttgccctttagtgttttgtctttatgtggatcaattaaatgaattattattgattttgattaattagttttggctgaaataagtaaataaaattatttttatcttttatttttacaaaattggagaaataagaaaagaaacaaaatccaaatttttttctcaagccctctctctctttcggccggcctctctttgagaagcaaagaagtggtgttttcctttgtaattcaagctttttttagcaaagatattgatctcaagctgttggtaagactcttgtagctttttcttaagtttcttgagttttaaggaaaagatgttttgaatgctttgaggttttgtttaatatagctgctgtagttgtttgttgttgaatttagagacttagtgatgagtttttatgttgatttatgcatgaattggtggttattaggttgtttgagcaagcttttgagttttgaactcaagtttggctcattagtgatgaagtgttttttagcttgctgtgattgttgtagttgattgctgttgttttcagaggattatttatgcttatttgagtagattaa

SEQ ID NO: 333007 - DNA, 608 bp, Cannabis indica
aaaccgcaaccgcaccgcgaagaatttcaaaccgcattttttttgcggtgcagacggtttgagcggtttgatgaacacccctacttttgaacatataatcattattatattccactgtgctgacgatactataatcatgaacaaatacatatgttccggacttaatagaatttatacattaaacaatcataaaataaatcatgtgaaccatgcaacacaaaatgcagtttttgatctttattaattagtaaatctgattatattgaaatgggttttatttagggcacaaaatccaacaaactcccacttgcactaatataaaataaaaagtgcatttcaattaatctaaacaccttgatatctagatcaagtgtagtatgtagcattgtctccgtaataggatctgacaggttgtattcaatacaatacaacctgtcctctaccattacatttccttaattacaaaatacttgatattgtgaaattcctctctatatgtttattcctctagggatattggattgtttactttttggcaactaattctgggttagtcaggaacaaacactagtagttaataaatgttgggactgttggaaattatttta

SEQ ID NO: 333008 - DNA, 1150 bp, Cannabis indica
atattgatcttggtaaagatattataatcttaccattgtatctttctaagtcaatatcaccggtttctcttagatcaaaagatcttaattctgacatgagggtggcccaagcacacggaccacccgctccaggaggacccaaccggagggtggcccaagcacacgaaccacttgctccaagaggacccaacctgagggtggcccaaatacatggaccacacgttcaaggaggacttaacatggagatgtccagaatcctggagtaaaggatgaagaacccaatcttggaggttcccaacccatggatgacagtgcttatgaccctacaaggtacatgcctattatccaattagaaaactgccatcttaggcgccgcctggaggaggcaaactgacggaatgctgaattggagcgtgaggcagctacagccagggcagcctagaggaataatactcaaaatcaacctgaccctggagtaagaagaccacgaggtagacctcatggctcacgaacaagtaggctggagacttcttaggaggaccctcagaacgctcaggaggaacaacttagggaaaatgctgttccccacgaaaatgaataaccagatgatcagccagaaccatctcatagaaatgagaataagatgtgaccagaaaccagggaacaggaaattcctcatagaaacgaggaaaatcttgggacacaacttgggggacgtaggtcaccagcgaggaaccgctagcgttcttcccgaacccatagggaaggggctcgtacaaatcccagtgagggaaatacgaagaaccacacccaaggagaagaacaagacgtgaagaggcgagtgtaaactcggggcgcacaagaacccgtagtggatcaatgtgaggaggagaaagtactcatcacaacaatgatcgagaaagcactggtacaagtaagactgcaaagtcactcaaggacgaggtccatgagcatgacgaggtccatgagcaggacgaggtccgtaagtagggcacagtccgtgagtaaaatgaggtccgctagtaattatagccaatcgaatctgcgagaacactttgaaccagaaaaagcctgatctttgccgacaactcgatctaaagcaaggggatccaatccaattacgaataga

SEQ ID NO: 333009 - DNA, 422 bp, Cannabis indica
gcactaacacgtgtagcgagagaattaagctactaaaacacaaacacgtggcagagggcaaaaagaatgaaagaataagaacacgtgtcagcataacaatggcaaaatgaaaagtaacccatgcaagcaaaaagacgtagaggatatataaagaaggatcacgtaaaagaaaaggggattaggaactgaaaaaagaaggaccctcaaaaagaaatcttgactgttttccggctaaaacagtttggcgccgtctgtgggaagctttcttttttccagaaaaagaaccttttcgtaagataatcaacaaaagatatgcaaatgaacaggaggatctgactcttcaaaataacccagataaccaccttggagcaccggcgaacactggcgacacaggcgaagacgccatggacccaacctaccat

SEQ ID NO: 333010 - DNA, 674 bp, Cannabis indica
cttttggttttcatccatacaaagccaatgtggccatgcaagccacagttttccgttgcttgtggacttggtcgatgccacggatctaacttttcttggtgagatcaaaggatgtagtcttggtcattcatccatctcaagaattctcgtctgtactgagcgaatacatcccaattagcagcacatggctcttcagttaggctggcttggtagatggcctctcttagtctagacaactcgagatcttctcccaagtccacatgaggctcaccgattcctggtcttgtctctccagcatagtactagagacgagatctggttgttattcatgggggctgttcactaagggtccttccttcagtgggaggcactagtggagggtcctcttttggaggcaagggtctgctgttcacatccaccaggatgttcgtgtcactctcgccagctatagtgactagattcgaggtgcctgccatggtggcaggattggccacatctgcggtgttcatgggaattccagtagcggctggaacatggacatcatgatctgcagtcagagggtcttgaggaagacccaatgatacagatggagcaattagacttctcctcgtgttaaccatggtgtttgatcagttatgatatcaactcgctctcaatgaaagtaccaaactgtt

SEQ ID NO: 333011 - DNA, 972 bp, Cannabis indica
tgacttgcatgacaggtgatcgctcgaatccgagttcccggtgtaagctgccatttcgggcatctaaaagtttttagagctctgcttccaggattgcgttttggcacacggctcccggcctcacaatcagagtcggagtcgtcgcctttctgtctccgggagactcgggcgatgtcctttcgaagtatggcaagttctgccatgattccttcattcaacgttcccgtagagatcgcgggtctgtacttcttttggtccaggtgatcccgaagatcaccatggttcccattaatctgatttctcagatcgatgggagggcatttctggccccttcttcctctcccttcgggctcttggtgcacggaaatgctctttcggtcccctcgatcctgagggccaagactccctttttggagtttgcccctctgcggacctttccctttagggaaatctgagcggacctttcgcggatcctgcgcctttttctttctcccgggagtggaagcagggtttttcttttggttcccttcagagggataccttatagggctaggttccctagacctctgcttttgggcacttggtgaggattcctctggttcctttccaagtccagcagggatggctttaggatgcacgtggattcctgctgcctccatggctttttgcatggccagcatcacctcttgcatcttttggttttgctctttttgggctgcgatttcagcctcatgatcgacagccttttgtcttaagagtaccagctctgagtagctgccttcgtcataggcgtcgtactcgttgaagtttccttcatactcgtcatcgggggttccttcttcttcctcagaacccacatttgctcttgaggccacgtcctcatcatttggatcttgagcatcttgaagagggcgaggttgacgtgtgcttcgagtctccaccattgttgttttgttgtaatgtactgtctac

SEQ ID NO: 333012 - DNA, 703 bp, Cannabis indica
tattttgtgtttttctagaagcatcacgatctttcgtgttaaattgagtactatttatgtagtatgattgatactttagtacagtaaatgaaggaaaatgcgatatcgaaagtagcaactgagatacattgttcggggagtcactcatttccacaatcacctagcataaatcaaattaattagtagttacatgaaatgattatgaaaaacataccaatttcaaatcactcggtattgcataataccttttctttcaaccatgtactaaaatttcgataatgttcatcttgcacccatttgtggttcctcgacttactaggataagtagtcttgatccaatcaaaatgtttccttcaagatgtagttaaacattattcttattagtacacttttaatttgaattgaatattaaaaattaaattaaacttactcaatgtacggttgaacctcatcaacattttgcaaaacgagtcggtgtgcttcctctcgatcagctcgacttacgtcgcaaacagaaacaccccgaccccctttactaatttcattatcaaatctaggaagacacgacccaacagttgctacatttgacaagaagtctgaacaaaattctacagcctcttcaacgatgtaggattcaacaattgaaccctctggcctgcttctgtttcttacataaccctttaggattttcatgtaccgttcc

SEQ ID NO: 333013 - DNA, 921 bp, Cannabis indica
acttataaaattaaactactataacaagaaaccaattatagcaaacaaaaaaaaccagttatgtaaagtaaattaaaaccccattataaaatcctcaaaacatgtgaaccataagaaaaaattgagaatcagcaaaaagaagcaaaaggccaacctgggataccgggggaaggctctatgaaacaaagtaaggacataaaagactagattttggtcatgaggtggtgtttggccacaaattttagaatgttaaagaaagtggaaatacaaaaatttcaaaacttgttcaccaatttaaactgtactaaacaatctggaggtaccaaaaacatgattttctccacaacctcacttggcaaatcacaaaatctagccatttataccatgaatgatcaaactataagcttttaatcaaaactttttattcataaaaacagaatatactaaaaactcaagagcacaatattaaaaactctatcttaaagataaatgaaaatgaaaatagtacaaaaattcaaaataatgataatagatacacaagtgaatgagtatagctgatcttaatttgtgtatgattaagctcttcctcttttttcttttcaacctggtatttaacctaataaattggaaacaaaaatgcatgtaatcaacaatggtgggtatgaaattaagttaaaaaaatattggtttgaaaatagagtataatgaattgattgatgtaaataaatttccaaaatgaattactcactcagtacttgtcgtctcttcttgaagagcaatagcataagagttgatcagtgaaaaacttaaagagaaggcaaaaggcagtagcggtggtcgagaaggaatttggtcaccggagctaccactgatcggtggtcagagaaaggtttcagtccgattggagagagagagagagag

SEQ ID NO: 333014 - DNA, 507 bp, Cannabis indica
tcacttttatagaggttatagatgtaatgatttgtgtaagattttttttttataattttatagggactccatttaaaagttttgctatgatccccgcaaaagcttgagatgatccttgatatagtggcaaatccaagatttatagtaaaaggggtcataattttttttaaggcaagggaaaagataaattaaattagaaaataaaaagtgttaattggtaagattttaacccttacctcaatcatatagaatctaccttaattattacatcaaaactaatataatgttcaaatacattaacttttattataaatatagggacaggatttggtcccgttatgccaaaatagggaatacaatccctgattgtactgtagccgttggattgaattggggcatgatctaatggctggggttaaagtaggggtatttaggggagaaaaaatggtaaccggttgtttttgttaattttaattatttattttaaaaaactgacaacgattgacg

SEQ ID NO: 333015 - DNA, 815 bp, Cannabis indica
acaaaatgtttaaagaccaaatcgggcgaaatatggaagtatatgtggatgacatgctcgtcaaatcatggaaggctggggggcacatagatgacctggacgaatgcttcaaagtcctcagaaagtacaacatgaaactatatcccttaaaatgctcctttggagttagctcgggaaagtttctgggcttcattgtcaatgcccgaggaattgaagccaatccaaagaagattcaagccctcctggatatgaagtcgccaactaaaaccaaggaagtgcaaagtttgactagtcgaatcgccgcactgaggagattcgtttcaaaagcaatagacaagtgtgtcccattcttcaatatcctgtgaggaaacacacaattcgagtggacagaggaatgtgaaaaagctttccaagagctgaaagcacaacttgcaaaacctcccatactctcaaaacctttggacggagaagatcttggaatatactaagctgtcacggagcatgctatgagtgtcgtgctaatcagagaagagaacagcatacatcacccagtctattacaccagtaaaagactcattgaggtcgaaggccgatacccattgatagagtaactcgcttattgccatattctagcaacaagaaagttaaggccttattttcaagctcatcctgttcgggtgtacactgaccaaccattactccaaatattgcaaaagccagacgcctctaggtggctactcaagtgggcggtggagttgggccaattcaaaattactttccaaccccgaacagtaattaaaggtcaagccttagca

SEQ ID NO: 333016 - DNA, 589 bp, Cannabis indica
aaaagcaatctctcaaaagcttgtagaaccatctcctgaaggtagcactgttgctcttcttcttttgtagacttgattacagactcaagataatactaaatacataaacacagaaaaagatgtgaacaaactcttctctacaaaataaagactcgcttttcaaaagatatgaatacaattcaaaatgtatgaaagagatacatgatctagttgttataaggtgtatttataattaatatacaccttattgacagctcatacatggtctaagaccacaactcacttgaaaattctaaaacacttcaatcagcctagaaatttcttattctgtacctacagaatcgtgagcagtaagtgcgactttccttttatggaaaagaaaagtcttgcttcagttttcctcataaaaaaatctgatcaaacatttcaagaaactcgcaaaggatcatatacacacagctggatagatagaaattggttgagtcatcaaatttaccatttatgccttactttccataaatagaaaaattagtcatatttcttactttatataatctaatcaatataaaaacacaactaaggaaacaac

SEQ ID NO: 333017 - DNA, 1330 bp, Cannabis indica
tatctaagggccaaagacaaaaatagaaaatatgtccaacaaaaacaagaaagaaagaaaaacttatgccccatagagcttgatcaatgaggacaactccttgaacatctcttgctgaacctcctccatggcagcaagacaattgttcacctgttggacctcatgcttgacctcctgaacatctgcaggagcagaacttgaacttccggcaacagcaacatcactagctttaggacgcttcggaaaagctccttcaaaatactctgagggttgaaagatggttcccataaggggaggctcaagtatttcatgagagtaggccacatctttctaagaggacaaaattttatagattaagttaggaaacacaagcttatgagtacggtttttacctcttcaaaatgaagcatctggtccaagattgaagaagtcagatcaatggatgcccccgaggtgatatgaaagagaaaggatgccaaatcttgagataccacggtttttcaaacctcatgagtgatgcatgagcataagggagatgtctaatttgaagactctgcccagatttccattcgacccgtgcaccagtgagttcagtgagcatcaaatggaaatccatagacatgatagcattggacaaaccttcgggtaattgcaaagccacaacaatgtccttgatagtaaaataaaaccaatgcccccgaacatagactttaccaaaaaatttcagagttctcatcaagcaaatcattagtcaaattggcataaatttctttgacaatactttcaatatacccttcaaaaccagtgagagtatttttccattgatggtattgaacaaacttaacaataccatacaccctatgagcatgtaaatcataattcctctcactttcaaacattcgggtagcataaagattccagtaacgttgattatcacgataataaaatctagaattgacagcttgagaatgagagatatttccaggagatgaactctgcataggctacttgcctttggcactagtagaggctttggctgctgaagatgcatgaggaggtgtaggagcagatttggtctatggaggctcaggttcaagatcagtttcctcattgtcagaggagactccaaagtcttctggaagctctttttcagaagggatagacatggatttggtctcagaatcatcaaatgggacctccattggttcttcctcttcagaacttgaagaagccgagggaggattcaatttcagcttcttattggcaagaggagctggtctgtcatggcttcgtatagtccaaagttccttctgttggaattattttacca

SEQ ID NO: 333018 - DNA, 1312 bp, Cannabis indica
aggatgcgttttttccaagaaaagatcttaacgaaaatgccctctgtaattattaaaaagctctttgtactaaaaaaaaagaactttttaaggggcaattgtcatacccaaaattcacctggaggacacgtgtcaaagggaatgtgaatcggtgcattaatttttatggaataactcattaattacgtaagtatcagagtacacttataacccgctgactgtaaggtcttaggcaaggaatcgatgtacaaactggcacttagtgtgttagcgagaaactatatgtcactaaatatgaatagcgaggcactggagaaagcgacacgtatcaaccatgaaagtccttagcatacaatgaacaaactaagtataaacgtaagatcggttcaagatcaagtaagcgaggtgaccgtctcgctatgggaggactaaccatagctttatcacactagcggtaacacggcttacaaccctagcgagtcagaagaagtctttgcaagtaagaaccacgatcgacggcagacctacatagtcgacctcggaagaaagaatggtcccagctcgcagtaacaacgtttctgtcgagatatctacagatacaaccattaaagacatgtttaatacacgattgtcttaacccaataaaagcgggaaaatcacagctatatgatttttaaatcataaaccgcatttacactacatgatatgtaattcaaatcccatgattttagggatgattgttgtaaacatattctggtcaactttgtaattaactgtccactacgtaattataaatagtagcagacaagctcaaaggagggacgaaaaaatcttatgcaagagaggccttaaaggaaaaacacaatcagaattctgaataagattgactcgtggactatgcagaattttaactacaaaaccacgtaaaaaaaccctgtggtgatatattatttttctgtagcttctatttttcctgtgtgaaattattgtcgtaaggctcaaatttggtaaaagaaaatctgcattaacactctattaagccaagctcgaaggaaatcatcatttcacttctatatccagatagaagctatagattccatatctatgtttagcgctcccacgaaatggtactatcatgtttccaaaatgtatgttttacccgaaccaaatgttaggctttaactaacaaatcaaagaatacaaataacactcttgagatcgaacctaaccatgtcaggattaagataaactagtgatattgacttggaaagatacaacggtaagattataatatctttaccaagatcaatat

SEQ ID NO: 333019 - DNA, 621 bp, Cannabis indica
caaaggccaacatcataaaccatgaagtgttacagattatttcaaaggaaattgcaaagttttaaacctagattttctatctatcttctatagcaaagtcaagaacacatgtatgaaacccaaaaattaaacatgcaaagtgaaagagaaagagatggaaaacttactcactatttgacatccaagttcactccagatcaggctgcttggatgcttttggtagaaatctcacgacacacttggggtaaaaaccctttttgctctatgtttggtttaatggaaaatttggtaaaagtaaatttgtgaatgttgctcagccctatttataggcagaaaaagtgaaaaaagggcaatcgtttcaaatgtcttagacgcatcggttccccccaaaagcaaatattgggaatcaaatataattaagtgttgaaaccgtcaaacgtggtgagaaaaagccgggtttcgaggaattcattgagtcagagcattaattagcccaaaactaaagttgcgcttggtcagccccacctcgaatcgcaaacaaatgtgcctaacacgtgtcacacattcaaatgcaagggcagttcggatgaagtctacacgcaactttgaaagtctcgtaca

SEQ ID NO: 333020 - DNA, 595 bp, Cannabis indica
gtaatatattgagttggtattttatttgttttataataaaaaacaccaaaaaaattattcttattcacatcatatacacataaatttaaatatatatatatataccaacttatttattttagtaagaatacatatatactttagtataaatctaaagatgagtacatatatattgacatgtatgtgtattgatttgatttatatagaaatggagatggaaatagattagggtaaatggcggcaaaactcccaaaactttcattttagtttcacttaaccccaaaacccaaatttgggcggtaaaaccctcaatactcgggttctgttagcaatttaacacttccgtctaaatttagctgttaactgtcaggtttgattgtccacatggacacaatatacacgtgacacaattttattggtccacgtaaaaaaaattttaaaaaaaaattaaaaaattataaataaaaaattaaataaattttctttttttttttctttttttttctttctttttctttttctttcgtctgaaacgattctctatctctctctcttgatctcctctctctttttctcttgggttttcaatctaggg

SEQ ID NO: 333021 - DNA, 587 bp, Cannabis indica
tgaatttttttaggttgtgcaaaattcttactcaaattattgggattaatgaaaattttgaaggcacagtttggcacatgttaaaattcaaaaggtatgatttagtagatgttaaagtttagggacacaatttagtatacggacaatcatcacatcactaaaattgaatgaaatcagacaaaagtctttaaatcgaacaatttcaataattcaggtagaatttttaataatttgaaaagtttaggaagcataatttagaacatgtcgaaattcagggagcaaaaattataattgtctttaaaagaatttcatttaataaaaaaataaaataaaaagtaaagtaatttgcgatgtaaatatttaagtttaattctcgattgtagacaaatacataagtttaatttttgacggtaataatattaaattatatttctgaaacttccggaagtacctaaccattaagtgtcaagtgaatgactacgtatcagtccctgattggtcaacgtcattaaaattctattttttatttgaaaattaatttaaatatactaataagaaaataatacgtagataatgacttgacactt

SEQ ID NO: 333022 - DNA, 708 bp, Cannabis indica
ccctttcctgcacagtagagcacccgtgagccaagcccagcaagacagtacaatatatcaataattataaataattaatcacgtaataataatgccatttcatctttgtctgtatgacatagacctgcgtgttacatttggacgcctatttatgtctatgtggcatagacctacgtgttacactcacacatctaattacaataaggccttagaatggttcatctaggttctagttaccgagtccaacccagttatgccttgaacacataaccctaaatcttaatatactcatataattaacatggcatagcatatacacatcatatatcactagggtaataaccctaggttgttaaaccgttcatgttagggtaataaccctaatcccagttactagctgctcacatatatcatttccattataagagccactgcgcatgctctatgtgctaactactgtcttacctgatgtcctgcaatagtaggagattccaaatccccgggtgctcctgaccaagtgccgttaatcctagtcacaaattccaagatttacacaaatagggttattccctaattccacatttataaaatatatacttggcattcaaaacacagatattcacatagagctcaaaacgagctttccaatggtatatagaactcccaaaacggagtctagataacaaagttatgagtattcgaagtcag

SEQ ID NO: 333023 - DNA, 441 bp, Cannabis indica
attcccttcatatttttttttttaaaaaaaataaaacaaatgaaactacagtgatcgccggagttgttaccggtgccagaaaaggcgccggaaaagtcgccaaagtagctgtcggtgccgagaaagttgttggagttgttgtcagcgccggaaaagtcatcgaaattggtattgtcgctggaaaagtcatcgaaattggcattgtcgctggaaaaataccatcaagaaaccagtttcttggtaattttttggataattttttcgacgacaatgccaattctgacatttttttttgagtttgctatcggtaccgaaaaagtcgccagagtagctgtcggtgtcagaaaattctttagagttgctgccgacgccagaaaaattatcgaaattggcattgtcgtcaaaaagatcaccgcaaaaatcactaagaaactggttctt

SEQ ID NO: 333024 - DNA, 1131 bp, Cannabis indica
tattgtgcatctccaatcatttctggaatgtgatcatcctcatactccaaattaacacccttatccttgttagacttagacgttccctcgcccgaaactctattctttttcccgtggtaaacccaaaccttataactcttgtctattccgttcttaaataaatgctcctttatacaagcaatgtccacacgctccatgttacaacatttaagacaaggacaaagaaccaatttaggatttttggcattcttttgacaaaagtccaagaaatggtcaacaccttcactatactctacgtataatctattcgcactcatccaatttctatccatttcgaaacttctaaaagaaaactttattcagttatttgtttaaatgtgtagtaaataatcagttaaattaattgctacacacatatatattctattgaattttatgcattttagtgaaatttatcctaattctagtaaaattttggtagcataacggctgtaattagacattcccaaaaattaaaaacatgaaaaaaataactaataaacacataaaacaatacaataataacaaaattaaattaacaatataaaattatccacccatccgaccgctgtacatgtatttgcagaacctacttcactacgaatgaatatttaagatattcaaattcttctaacatgcatatatagaaacacccatccgaccgcagtacaattaatcgcagaacctacttcactaaagatgaatatcaaacatattcaaactccactaaacaaagaattataaagttttaaagattatatacctttctccaataaagatagctacaattgtgcaatcttcattcaacacaaacaatccaaaaacctacaaataaacacataaatacaaataaacaattaatagacttctttgagtacttatcttaaaacaaattgagtaaaaaaactcaagccaactgccataattatatttttatccaagatgatacatggcgcttattatcatcatcattatctagaaagaaactaaaaataaaaggtaagacttggataaagtatattgagacatagtatatttattcttattatttattatactttatgttacaattttttagtaacatttatgcta

SEQ ID NO: 333025 - DNA, 627 bp, Cannabis indica
gtttccagccatttaatccccaaaataacatctacgcccccaattctaatggaaggaaatctgtgatgacctgaattgctcccaaatcaagctccacttgagaacaaattccctcagttctcaccttgccaccggtgcccaaaagtatcccatagcaagtggtggctgatatgggcaggcctactgccgtaacaacttccattgaaacaaagttgtgggttgcttcgctattgattagtacagtgacggttttatggctgatttggctagccaatttcatggtgttggcggtggagatgctaactagagaatttagagaaagggtggcgagagtctcttcggtgaccactgtctcgcctaaatctggtgagagaggagggttttcatcgggtgaatccgattcttcttcgtctgcagtgagaagaatttgaaggagcttctgttcacattcacggccaaggtgaaatttcttggcacatctaaagcaaagcccctgagaatgtttctcttagtactccgcctcggtcaatcgtttgtaagaggtgccgatggctgatcaagtgcttccagtcttggatgtcgttgaagccgtgactgttgggttttatgccctaaataaaactcttt

SEQ ID NO: 333026 - DNA, 1527 bp, Cannabis indica
catctcaaatcgattttgcaacgattatgagatcacaagttgtatgccaaatttaaaatgtgttaattctggttttctcgtgtctttttcttggggcacatagtagataaagatgggatcatggtggatccggccaacattgaagctgtttgggattggccaacaccaaaatcggccgctgaagttagaagctttctgggcttagctaggtattatcgtcggtttgttgagggtttctcaaaaattgttgtacccttgacagagctgacccaaaagaacttgaagtttgtttggactaatatgtgtgagaaaatttttttggagttaaaggagcgcttgattaccgctccagtattaactcttccttctgataaggaaaatcttttgtttattgtgatgcctcgagacaagctctcggttgtgttcttatgcatactggtaaagtaatagcctatgcttctaggcagttaaaagagtacgagtagaggtaccctactcacgatctaggactcgcagcagtgctatttgcgataacgatttggtggcattacctatatagcgataaatgtgagatatacactaatcataaaagtctgaaatacttcttcacccaaagagatctgaacgtgggacacagactctggctagagtttatcctttatcaccctggtaaggccaacgtggttgttgatgcattgagtagaaagggacagagtcagataaatactgtgaaacaaatctcccagcagctagccaatgagatcacccgagctaaaatcgacttgattgtagggcaattggctaatattaccctacaatctactcttttagcgaatcagagaagcacaattgcaagatccagagttagtaaaatcttgagatagggtttcgcctgggaagactggtgactttatagtggatgaaatgggaatgctgtgattcatgaatcgtgtttgtgtgcctatggatgatggtattaaaagagagattgtgaatgagtctcatacaactccttactcagtttatccagtgtccacgaagatgtatcaagaccttaaggccatgttctagtggccgggcatgaaaaatgacatcactgagtatgttgcgaagtgtcttacctgtcagcaagtgaaggatgaacatcagaggcgtgcagggttattgcagccattgaacattccaaagtggaaatgggaagatattgccatggatttcgtggtagatttacctagaaccacgggacagtacgactctgtgtgcgcacttcttacctgttcgaacaaacttctccattgatcagtatgttgagttatatgttagagaaattgttcgtcttcatggtgtcgaaaagtccattatttcgaatagggatccaaaattcacatcaagattctgggagagtacacatcgagctatgggtactcagttaaaatttagcacattatttcatcctcagacggatggacaatccgagaggactattcagattttagaagacatgctacgggcatgtgtgcttgactt

SEQ ID NO: 333027 - DNA, 638 bp, Cannabis indica
gaaaatgaaattgaacaagttttgaagcaatttcataataataacaatcttcatcacgattttggtgataacctttatgctgatgctcttcgctttcggttgcttagggaacaaggttataatagtgcatgtggtaagtatacacacatgaatgttaaattaaagttataataataataataataataataataataataataataatattaaacgtgatatatatataataataattttaaatgtgatgttctctttaatatttattatattatatgtcacgtttaatattcttttattttatcattaacgttatgataaaatattttaagtctgttcaaagttaataatataataaaaaaaaaatttacaatcttcgataactaaatttgttaattgattttgttttgatagtatttttacaaaatcacatgaaaaatactaatcatgtgttaattggtttggaatgtcgatgtaaaaatagaggtattcgccaaatataagaatgagaaaggaaaatttaaggaatcaattttgagtgacattcgaggaatgttgaacttgtatgaagcttcacaaatgagagtttgcagagaaaaaatactagatgaagcacttatcttcacaactactcatct

SEQ ID NO: 333028 - DNA, 929 bp, Cannabis indica
aaaggaataatctaatcttgtgaaattccaagattgagatctttggctatgatgttaagaattaaagaatgttagtgagaaccatggagattaaagcaaaaatagtatgatgttttattcttgaaaggtgggtaacctgagaatatcaatggaatattagaaacatgtcattggtatatttcataaaggttagattatcttagaataatctcttcctttgacaaagtgtttatctaaaagttataattaaatgtacaattagttaggtacttaaataagggtggtacgagagaaatatttgatacctatttactgagataaataggctaggtagcctatcagctagccttaactcctgcgttgtccggagtatataatgtgtttcatgtctccatgctgaaaaaatatgtattagactcgatccattttctgagatgtgacgatgttaaagttcagacaaatttattatatggaaaaaaatcatcttgtccaggtttttggactagaaaaggaaatactatgaaatgagataattccactagttaagaaagtgttgtagaaaaacagcaagatagaaacagcaatttgagagttagaatcataaatatgggggtaatatccctaattgtttaaataaattttgaggaagaaatttttataaggaggagatggttgtaatatcccgataagtctaatggtgaataattaaggtttatatttacattatgagttaatcaagtaataagtgggattatgatcctactaatctatttcagcataaaatttaaattttgctataagtgagtaaataagcgtaatttataaattacgaacatttatatagcatgtgggaatataatattagctatatgtggaataaaaatatttttaggtccagcgaccttgaagatctgataagtggataaata

SEQ ID NO: 333029 - DNA, 547 bp, Cannabis indica
ttttttaatttatttatatttttaccatattctatttatactaatcttaagtggtacattacctccctgtggatacgacatataatctgtttactatcgtgaccgaagtataactaattgggcgacatcacacctatatcccacaaactagctactatagtcaatttcttgtttttttttccaatagccaattttaaatgatgccaaactattcaatgtataatgtacatttattttaaataagggcttcacctaacaaatgtgcctaattttagttaatttatttttttatcgcatcttactatttaaaggaactatcaaattataaaatatttatgtcaattcatttgccccaactccaatatataatattataaataggatagttctctattcataataattcaaaatatcattaggactgaagaaaaatgaattgctcaacattctccttttggtttgtttgcaaaataatatttttctttctctcattcaatatccaaatttcaatagctaatcctcaagaaaacttccttaaatgcttctc

SEQ ID NO: 333030 - DNA, 500 bp, Cannabis indica
ccacatgtagggaaaaactctctgttctcattctccctctaaaaaatgacataattatactttcacaaatctattgagtcgtaacccaaacctagattgtgcaatcgcatctttgacacatagtgcaacttcggtcattttatttcctccaaaaatagttcaatcaagatagacagcaacatatcaaaagagtggttactctacctattcaaaaccttacagtgcataagctttacaagcgcattgagggccaattttttgcaaccaggatacaactcacactacaagaaaacttacttttgttggtgcaaaaatgcgccggcaaaagtaaactaaatgcgctgacacaattatacgccggcaaaagaggtcagctcgctgtcgcagttttctcgcttccattttgtcatcgggcaagatacccttttccaggtaggcgactattggagtcatccaagtgacttctttggcaacatctatttccatcacttcttctcgac

SEQ ID NO: 333031 - DNA, 778 bp, Cannabis indica
aagactgtgaagaatccaaacaactgaaggagtttcgggctcagatcttggggatactctgcgacagaaaggatacaagggttaaagatctgagcggaaggagtcatttaattctgctgcaaccaatgtaaggtttctcataccttttatgtgtttattttcatcgttttagaaatttatattaggatgttagaaacataattgttagtaaatctagaacctagtaaaagatattccaacaactggcctcagagccatggtatttgatttactttcaagaaatatggatttaaaacgatgtatgtgtgatttggatgtgattcatgttgatctatgtgtttattgatgattgattgatgtttgtgaaatttttacaaaaaacgaatttgattttcgttctagaattattttattggataatatggaaaaaattaagcaattcactttttttacagaactcaatttccattttatttgaattagttatgaatttttgaaaatcggaaaaatcaagaggtggtgtcaccccacttacgcgagcggacacgagtgatcactcgggtttcatgcgcgttcagacagggcatgtccgaaggaacacgcccaagatgtctgaaatttgcccctgcgcgcggagagaggctgcatgcagcctcctgcaccgtgttttctcggtcaaatgccaagtcttgcgcgcgcggatggtatgcaatgcattccatccgcaccaaatgcattttttttttccaatttttcatttttttcatgttttttcatg

SEQ ID NO: 333032 - DNA, 537 bp, Cannabis indica
cagggatccggtacagggactccgttctggaacgagttacagcaagaaggagcctccaaccttcaagatttctagaaaaaagtccaaaaatacatcaacctagaagaggcccaaatagtggcctatgggggatactaccctaccggaatagcgagatatgtacccggagctcagctccagggaactttacaaacagctgccccaccaatgagcgacatacaatttttcgctaccccaggatatagtcagggtcaggccttggcccctgcatcttctcactttgggaatccttcagggatgagtcgacaagtcccgtctcactccgctccgaccacaagcctagcaggtccctctcaaggctctcgaagcaagaggtcctcaaaaggcagcaactggactatggagaagcggcagaaaagggggtacactccccagtacacccagtacacggagctaatggactcccgagagcgtgtgtatttcgactagtaggcaaaatacgcactactggagaccgcctcctctgtacaggggata

SEQ ID NO: 333033 - DNA, 489 bp, Cannabis indica
caattccaactccaagaggtcatctctcccaaaaaaaaaaatactttcaatgctggtgagaaaattggagttgagacctttaagcttttgaagtttttcgatactatttgtgttatggcttgtggtaagaaatggatatggtttggtgcacacacacacacacaactttggggttacaactgagtagttcgcatagaaattcctgatttctagatgatatttcttttatgctttgctagttttgattggtttgacttgattatttagcttaataattttgttctccgcttgaattgctagagactagcaataagctagttggggttgtgattagtagtcaaaaatatcattttattgatgttaaagtttaaattaaattaagttttgattaatattttcataaaattaatatgatatattatataattaaaaatattattttaaatttagtttatgttcattttgtaggaaataaaatgatttttggta

SEQ ID NO: 333034 - DNA, 966 bp, Cannabis indica
cttacaccacaaagagaaacacccctacgccctctacttatttcgctatggacccgagtagggcaagagccaacgatggtaacctctgacaagtagtatgagcagaattcaatcgtctcttcaacaatgtatgattcaacaatacaaccctcaggcctacttctatttctaacataacccttcaagattttcttgtatcgttcaagtgggtacatccatctcaagtacacaggtccacactattggggattattttaccaggatctagatttactaccatgtatgttatttaacattcttaatatgaatttctaaaacaatgaaatttaaatacatataaagttcaagaaaccttacattgattgcagcggaattaaatgactccttcgctcagatctctaacccttgtatcctttctgtagcagagtatcaccaagatttgagcccgattctccttcagttgtttgaattcttcacaatcttacacactatgattgagtaccaacttgctatgcgtgggcatgtactctatcactaatgctcaaatttttgataggaagaagactaagaattttgaattagagaagagaaaagaagaagaagtgtcaaactctctagttgtcaaatataatgaaaactaggtcaagagtcattagttggattatgagacctttctcttctttttatactaattctactagagttagggttgatttatttggaataaaataaatgataaaaatagagcaaaaataggccctagtggccggccatgaagtgggcccaacattagttagatttttgccatttttctcaaccatttatctatttttcacaaatatcacttttgcactttcaaccctataaatgtcaaaactatttatttaataattaaaattaatttttttatcaaataaaattatcatttatattatttattaattagacttaataaagtctcttaat

SEQ ID NO: 333035 - DNA, 517 bp, Cannabis indica
tcaagaaccggttgcctcaccttaatctggttcaggcagcaggacctttgccccaaggagcaccagggggtgtagccggagcattagcaccagtcgcttccccaagagaaacccagcgaattcttggcctgccaccgagacccaacggaagagtagccatgatctctggaggaccccacatcggaggaactacccgaaaggaactaaagcgttacacatgggccgtaaagcacaatgaggtttgggaggttactcagctcccagctcaaaggcccccgctaatggatcagcccattacgttcacagaagaggacgctaagacaatgcgcttccctcatcatgaccccctggtcatagaaacccccgttgccaacaagattgtggctataatcttaattgacaacgggagttctgtgaatttattactcaaagaagccttcacggtaataggcctcacggaccgggatctttcaccaagcggttcccagcctcacagggtttaatggaacaacactta

SEQ ID NO: 333036 - DNA, 801 bp, Cannabis indica
tatattatatatgcttaatttaataaataaaaaaaataattatttgaataaaaaattaatttttttaaagagttgaccgagttgactgagttgaccgggtcaacccgccaacccgctaaacccgaccaaccgaaatccgcaaacccgtgacccgccaacccgaaactcagtaaatccgcccgatgttcaaccctacttattgccccacccttctgaggtcacagcattcgtcatcaaaggatccaaataggtaataagtgtcacgtttttattgtacaaaactatagatggaccaatttatagagtccatgcccgaattggacggcagagaagtggagtagccaaaatccaacagaggaaaatggtccaaggagaatctagagttcacattacaaacaattaatacgaaaatagtacacaaactaaaatcaccatcacaaacaatcaaattaaatgagtaatgaatgaccatctttatttcctagcaaattcacactctactgacaactcatgtccacactctaaagtcaaccataaaaaaagggacccttccctatatttaccaataaattgttaattcaaagggtctactgttcaaaaaattaaaaattaaaagtgaataaattaaaaggctaattaagatttttgctctcgaattttgatatgtaccgaattatgtcttatgaatttttaaagtcgttaaaaatgctccctaaattattgagattgttagatttaagaacttttgtccaattttaataaaaaaagtctaacatggattgaatgatttgatacatgtca

SEQ ID NO: 333037 - DNA, 536 bp, Cannabis indica
gttcgagagagggagacggagtgcgtgagtgggtgagtgagtgggtgagggtttcagatagagggaagaaaaatggagggaataagaaaaatggggggaatgagcaaaatctaatttttttaaccttatacccgacggttttgaaccgtcgggcaaagaatgagcgacgctttaaaactgtggtgaatactttgcccgacggttctaaaccgtcgggaatagtgcatctaatttttttttttaatttttttctctacatttattaaccgtcgcctattgtatacgagtgttaaaaactgtcccctatagtacaatataggcgacaatttttaacactcaaataatttttttagcgacgagtccccaaaaaagaatttttaggaccgtcgcgaatttggcattttgtagtagtggagaaaataagatggaaaaatgagaaaatagaaaaattacaaagtggggctcaatatccatacatggccagccactatatagcatatttaccatttattttttattatttcaatgccaaataa

SEQ ID NO: 333038 - DNA, 784 bp, Cannabis indica
ctagttcctctttgcattctggggcttgtcagccggctgtggctgaagtattgagcgtcaaggaggcccttagttggttgtcgaagaatttgtccaatgtgatagttgagacagattgtattgctgttgttcaagctcttaatagctcggttgctcttccatcagtttttggtttgtttgttcaggagtgtcaattgattctttcttctttacataatgtttctatttgtcatgttaaacgatctgctaacaaagccgcacattgtgttgctcgcggtgcttgtttttggtctgatcgtctttttactgagagcaatgttcaacatgctcttcagtctattgtgttagcgaatattgctgtttaatgaattattttagttcaaaaaaaaatatttatatcaaattattttaacaatgatttattattcctgaaaaagacaatcattattaattatttaaattgttattcttatacgtaataataaatattcatcatctctcatgacccataaaaggccacaagataagagcatctccaatggtagcatccattaaggatgctaaaaatttacacatcatctaaaaatataatattttattttatttatcttccacatcatttttgacattcttactcttaaaaacactccaatgtatagcactctttaaaaatgctatatattgatctcacacattattatttaatatatatcctaatttttagctgcaataactttttaattttaattttttattaagaaaaatgaatagcatcaatgctaca

SEQ ID NO: 333039 - DNA, 2510 bp, Cannabis indica
gacatgtttaaggcatcaaaaccaaattcgaagtaagttcatttttgagcaccaggagcacgttcttcatcttcatcaaaaacatggaaataagtactttcggggaaaaaacaacacttcttgggcgccaaaagtaaggcctagcactcagtgatacttggggctggcccaacacctaagttgaaattttttctacctgggccaattccaatgaagttttacgtgaacttctgagcatcttctccattttcataaaagattgagattcaactatttctggggaccaaacgaaacttttgaagggccataactgggacctagcacccaggtagacaccatgaagttagagaagccaaattcacaactttgcacttcccatttttaacatgggaaactcacttagaaatgacttcattgtctctcattttcacaaaacaagaacatcttcgagaaatggtgaccagtttcgccacaacacaggaacagactaagtgatgtcaaaatatcacttaggcatcttaaatacgtcccttggatgcttttacatttacccagcatccaggttgacgtcatatgtcaacctgggcgctgggatgtcaacctgggcgctgggtcatgaactgacttcagtaaaacaaccataactcacttaatatttattcgattaacacgattcaacttgagttttcaagctaattaaatgctctatcatgtcttatctcacacttcaatcgtaattctaaagttatcgacctcaaatttcacccctaagagagttacaaaaataaacttcgggttacccgcaacaggtcccgctaggctctgaaaaatgaatatcactatcataagcttatttttaccgttggatcatcatcaacggtcaaaaatatctaatttctatttttctcgtatttttgtaggcctcattcgcctataaaatgggagtcccttagctcattttttatattcagaaacttacctacaatgtcagagcatctctctctagtttctatctctagaaactagaccttaaacacttagcctttttctgtaataccatctcttgaaaaatttaaactcgaagtagacgtagctctattaccatcgcgacatggggagtgaactactataaattttgtgtatctctctaaattatatacttacattcattattcatgtcgcaaatctagcgagctggtgctggccactttttagtgtcaatagcgagaagtggctcattaagttttgcagcatcaaaaaatgttgcgccccgcgtggttgaaagcaaagatgacttcttccccatatcttcgtatttggagttgattctcttactaaaaaatttattgtctgcctctaattgaacacacacgtcctccgacaatgaagaagaacaaactgttaagacgatgttagaaggagtaagtggtggaagatttgtcctgtctctaggcaactgggcagaatggacttggtttggctgagatggcaaagcttgagaatttatgacctcttttctggaacgattgctctgcctaggtggtttgtctcttacctgagcatcatttcctcttcgaccaaaagattctaaactctacttcctggaagcagccagctgctgaagtttgtttttggcttcaacccttgatcttttgctatctcttcccagttcagagacagctctattcttttgcgtaaatacaagccaattgccctcatcttcctcatcatcatcaacttcaataggcctttgttggagaggaactatagccaaatgaatctcattcactcctttctaagaagaagagtccaccacagtagaagtggctagaggacaggcgacgacatctgaagttggagcctttagaataatttcttagtctttagcggaagtactaacttcttagctccaacatcagaagattatgtagccttccctttgccacgaccacctttggctaggtcccagacctcttttgatctttggttgatggtgccaagaaaattctctacgaagcccattgaaagtgtgagtggttgcactgcaaaaagaagagacaaaataacagattcaaataatgagcatgtaagcattataacgaaatgaatagaagcaatacacaagtgagatccaaactatttattttggaatatttggggttccctatagaaaattggactatatcctctctgcctaagaggcttccattttggaagaaccaagattacaacatcttattaagattagatacccagacatcatgtgttggtggaatgaagttatttggactctaatgatgtcatctactctatctacataattattgaggggatatctatggtgatttaagctcaaaaagtaaaggtcaaatccaccttggtcaaaatagtttgaatttaccaaagatggagccttaactatatggaatggtgtcttaccacccctgtaggtacttgttgggttttgtgccataaataaaactcattttaatataatcagatttattaat

SEQ ID NO: 333040 - DNA, 900 bp, Cannabis indica
taaaataaaatatttttaaattaagtttctactatatatatatttatatatatgacattacaagaagtagattgattttggtattggctaagaagtagtggtaattaggatatggttcgtgaaaataataaattggaaggcaagtaatgtattggccaaaatgcttatgaatgttattaatattgttgagcttgaccaataaataacataacattgacccatactcctcatttacaatctctatattaaaatgcttccattcacttactcctccaatccatacaataaaaacattttaggaaaatttctgtccaaatttcacatcttttatttttcttttctttaattaagagaaaacagcaataatgtttggcaagcaatttttaatatcacaaattaaaaaaaaatcatacttttactcacaacagaacttgtgattgtgactaaaagtataaaaaagtacttgtgactaattataaattatcattcttatgttgtgactaaaatatctgtggttaaaaatattagttacaaaaattataatttgttgtgactaaatgtattttcagtcacaatatttgttgtgattaaaactaaattagtgacaacttgtatctaaatactatattttagttaagtttttattgtgattaaaaaattcctttagtcacaaaaaattatgttataactagaaaattgtcactaaaaataacacttttttttatagtaatacaaatcaaacctagtataattaaagaagtaaaaataattttattggtttgtgaaattattaccaaaccttgatcaagaagatatttctttcaattataacttcaatattacatttactcgaattttctacataagcctttttgtttgagtaaatatagttagttagga

SEQ ID NO: 333041 - DNA, 615 bp, Cannabis indica
taaagtacaatatattgaatgaatcatatccgtctgagttatggaaaaagttaaaaatgttgtatatgtcaaaattcttaataaatagattatatttgaagaagtaattataagagttgaagacgattgaagaagatgatattagagatcatataaatggatttaataagtgcataactcaattgttaactgcataggtcaaaattgatgaagaagataaagttattatttaattgacttctttacgaaaatcatatgaaacactagtgactgcacttttgcttagaaagtttactttaattgtggaaaaggtttcaactactcttttagagacagatagtatcaggtaaccaagtggtatgtctcatactgatcaagctcttgtgatgaggtcagaatcaagttgtggtaggagtacatcgagagaacgatatgataacataagagacaatcacgcacattcacgctcttagagggaagtggagtgctactattgtcacaaaaagaacatgtcaagcgaaattgtgaaagagttgaccaagcatctttgtgacagtcagtagtcccgtgatccgttagggaaaataccgggtaagctgtgcaatcccacaccgc

SEQ ID NO: 333042 - DNA, 1554 bp, Cannabis indica
gctttcgcctttcctttacctacacatggaagcagaactgcgagttgactgactcaataagaaaaccatataacatatcataaaataccgacttgtatcaaggcgcccatacacctatttacaaggcttaacaggtgagtaagaacattccatactagggtacaaccactataccacatacactacgtacctcactttacgagtgttggtagggtttgttttgtaccccgagtacagctgagtgatataccacacacactcagtactttcgcgtacttgtgccggtatcacattaatgtactcctaaacaacatccactataccaatgcactctgtaccataactgtacaagtgttggtagtgcaactaacacataagcatgcatatacacttagcacatatatacactcaagtattcatattacatatcatacacagttcttaccttctttccagattaaagtgtgctaactgacctgaatgaagactcacgtgctggatagatgccctaatcacatattaaaacaaggtaaatcacatgattgaaaccctaatcctagaaacccgaacccgcaaccttaggttctgttataccctctagggattactctaactgaagaaataaggaaacacctaactaaggcattgaaatggacgagaattgagcaaatggaacattcgggctaccctgccaaaaccggctagctggtttacaccagttcaccccaaaattttcatttctttctcaatcctccaccaaatctaaccaaaccttccagagtacctaattacggtgtaaacaacatatttcaacaagtatttcactgaacaacacactaaatcaatttatgccattaatgaccaaagctttgagttcaaagctcaaacttattgaaatctatctccatagctaaaaactagctacaagaagctatactcaactcaaatgaacattataacttgaactacacaaacactaaaccctacagcccctaattttcaaaatcacttcatgaaactaatctaaagctttaaatacacaaaatcaattgttctagggtttacctttgcttcaaactcacaagaatcttgctgaatctccaaaaaatacactgaatttgatgagcctcctttggtttttgggttggccgaacaaagagagagagaaaggatgagttcttttcacttttttggcttttccttgatttttcttaattttccctaattaaataaatcttagaaaattaattgctttgctaaaataataagaagccacatgtcactctcctaggcagccaccaaacctctctaaacaaattactaaattaccttctaggttataaccttggcctttctcacaactaggggtaaaatggttaaactcgataaccccgcttaacccctgtattttattttctccaatatatatcctactaagaaatacggttctagacttacccatgtgatcaaactagccatccatcgcattttccgttgtcaccgagcaaaaattacaaaaataggatatttcacatatatatcaaataatacccc

SEQ ID NO: 333043 - DNA, 673 bp, Cannabis indica
gatgtggtatgacccacccatgtgtgaacgatcctcgattgtcattcccgaactgctaaggaagattcgaaatttggagatggacgtttccaatttatctgaaacttttaacagcaaagaaggacatgaattagtggagaaccatattaacaacaatgaacaaactgaatgtgtggagagttgtcatgacagcactcccaccattgatggctatccaaatgcaaggcaaacctgtgaatgtcaaaggagtagaaatattagatattttataatatgtattgcatatgtattttattttattttttcaaatcattaacaatgatgtgtaactgaaaacacaaagtatcactgatgattaatgaaagagtatgaaatgtagtcatctttgttttgatataatctcctttcccataaaaaaataccagctgttcatattatgtgcatacttttgtaccagacatgaaaatgtaatacaaaatacctaacaggtatctttctatgtcaatatcaccagttgatcttagatcaagagatcttaattatgatatggttaggttcaatctcaagagtgttatttatgttcttagagttgttagttaaagcctaccaattgcttcgggtaacacatatatcttgagaacatgatagtacaattgagtggaagcgctaatca

SEQ ID NO: 333044 - DNA, 545 bp, Cannabis indica
gttttaaaaaactggtttcattgttcagatttgtaattagctaataaatgtaattggtttctgtgagacagattccaatggctaactccagtgacgactttggcatcaagttgacaaactctagtgacagcgatagctccgaaatttttttcgataattttttccagtaacgatgccgattttgacgactttttttttggcaccgttagaaactcaagtgactttccgtcaatgttagcaaatttcgactacttttttggcacgacaataactcttgtgactaggttggtggtcaagtcttagagcttctaagaaggatgtaaaatttatataagttttagtttttgtatttgttcttttattaagaaactcgtttttgattatatagaattaattggtttattaaaatattgtcttaataaaattattttaatattatttcagtttttataaaaaatataataaaaagaatgttcagttgacatcatttttttattccagtattttattttatttttttaaaaaatacaattttaaagtttttt

SEQ ID NO: 333045 - DNA, 750 bp, Cannabis indica
ttttaattgtatacatgtagtcctatcataagagtatatacctttacatcttaatgaccacatgatctaaaatcaatggtcaaaaaattttcctaccagtaggcaacttatgctaagtcctaccatagtcttgccatatatatatatggaacacttcttaatgggattacccatgaatggttactaaacaaatttaactataaatattaattttaaaaatatcaaactatctaattttgatctaataacgaataatgaaatcacaaatttgaatttatatgcttaatttaactacttaattaaaaaataattctttttacactatattaaaatatgttcatataaaatatttaacttaaactcaactttttattttcatatttttcttgttaaaacctttttttaattttgttttttaccgatggaacaatctcagcccatatgacataaaaatgagagatttttttagttagatagcaaaattaagcataaaaactcaaaattttctaattttacccattcatgagtaatacccattaaaaatgcacccatatatatcttaacatggacgcacataacataatgaaagaattatacataacgtataaatataaaaatatatatagagtaaaataatttttcaaaattattttttgagcattaccataaaatatcaaagaaggattaataaaaagaaaaattataaacacacttctaattttctatgcttaactttatatatatatatat

SEQ ID NO: 333046 - DNA, 1108 bp, Cannabis indica
atatacgatgttatgcgatgttttggcgacttttgtgcgatttattatgttagtgttataccaattatttaatgcgatgttatgcgagttgtatgcgatatatgtgcgattttacctggctgctgtgctggattttttggcgatttgtatgcgagtttgtgcgagttatgtgcgatatatggtacttgtttctttgtcattgtctgcgattttatgcgatttatttacgattactgtgcgattttgaatgttaaatgtttacttggctttctttcagatggttgtgcttcaaatattgtatcctcggaattgggaggtcgactactggaagaacaattgtgagggtgaggtccccacagtggaaatggggttagatgaggtcgaagaaacacaagccgggacgcaagattcgaccgcattcgagacccaagcccaacgggtggcagaatatgttaaaaggtccaaaattattccaccatccccacccaaggaaacagcagacgcctccacatctgccactgtgcccccagcatctgccactgtgcccccaagctctgctccagccaatgactccgactacctcttgttggctaagaggttggagaaggtagaagcgcaacaagttgcgattctcactgcccagactgagatgaaggctgacttcaagagaagtcagaaagagatgaagaatcttatcatggatcaaattgcgaccgtgataagtttgttacagaagcagccttcggagccgacacaaccatcagggccggcacagcaatcagaccccacacatccatcagacacggcagagccattacagacggtacatccatcaccgccgacatatgatgatgatgatgatgtctacccagaagattggcaacctgacgcatgtgacgttccttctactcctgcaaacgccattgtcatttcgctgggtgatactgaatctcaggatgtggaagagttgcaggggccaccagatggagtggagttctgtaggcttaggcgaaagcgcaagccggttttcttgaatgactacactgctgggaagaagaaacaacgacatgggcccgtggtagtagacaccctgaaaccggcggacgcc

SEQ ID NO: 333047 - DNA, 519 bp, Cannabis indica
tttaatagtttcctatttgtatttagtagtttctcatttagtctcctagctttgtatataaatatatactattctatgaaatgcaatacacagttcgattcactattttcttcatggtatcagagtcatacttagaattgtgattcgaaattagggttcataaaaaaattagggtttgagtttgtggttcttttttttttaaaaccctatttggagtgtgaatctattctcatcacccactcaagagggttgcccagccgccgatctaccaaaccctgaaatctagtcgttggattcctcgcgcgtggggctcactaccgactgaaggttcttcacactttcccacgcattggcgcgtggaggcgtgtgtgatgacgtcttcgacgatgttctcttactagttctttactcgattattctaaccccatttgcatcagtctaaggttttaatttagtatttttttgccttcttcgtgtttgggtgttctttctttggtgttttttttcttccttttctct

SEQ ID NO: 333048 - DNA, 1035 bp, Cannabis indica
aatgagttgcattttttcatcatacttacctaatttgtgtgctccggattcaagaactttgaccacttgatatggtccctcccagttacgtccaagtacacctgatgtactgtctttggtgtttaagaatacctttcttaggaccatatctcccacgaagaatttctgagccttcacttgtttgttgaaatatcgagctacattttttttgatgggccatcaatttcaagtttgtagtggctcatcttgcctcgatttcatcatttgattcggccaggagtacatgattggtatcttggttgtacatcaatcttctgtgggttggtggctcgagttctataggcggcatagcttcatatccgtatgccatagcgaatggtgtctgttcggttgccattttctcagttgttcgatatgaccatagaacttcaggaagctcttctggccaatttcctttggcatcttcaagtttttgcttcagtgtatccttcaaggtcttgttgactgcttcaacttgaccattcgcttgaggatgtgccactgcaaagaaagttttgatgataccatggttcgcaaaaaagtaagtgaaggatttgttgttgaactgctttccattgtctgaaactatcttgtacggcagttcgaaccggctgattatgttcttcacaataaagtcttgaactttctttgatgtaatggttgggagtggttcgacttctatccactttgtgaagtaatcaaccactacaactgcatattgcactcttcctttgcctttgggtaattgtccgattaggtaaattccccaaatggcaaagggccacggactttgcatctgagtcaactcgttaggtggagctcgaggtatctttgaaaatctctagcatttgtcacatttcttaacataggcttttgaatcttcaatcttcgttggtgagaagtaaccttgccttagaattttcttagataaactttgcccggcggcatgatttccacaaaatctgtcgtgcacttcagataggagtcgtgcagctt

SEQ ID NO: 333049 - DNA, 797 bp, Cannabis indica
ttcatgacggaagcaaccaaggtctcacgggtaactaaagatggaaagttgtccgcgatattagggggcattgaagtcctcggtgaactttggaaggacataagaaagaacgcctcggtaggctcaatgagtgattttctcaaccgtgttgaaggcttcatcaaacttgaagaggctattcagcgagcagaaggtgagcaaaagcctggtaagtcaaaagctccttccactggaacgtccgcccaactcccccattacccaaataattcgagctcaaatggtaaatgttccaacaacaacaacaacaacaggcaagggaatgggaagaagggaaagttcactggcaaaatcgagcagactccctgggagaatcaagcaaagtacactgcatttaccatcttgactaaggatatacatggccactcagtcgctagccccgtataagaagcacgggcccatgaagaaggatgtcagcaagagagacatgataacgttttgtcgattccacgaaaactaaggtcacgacaccaatgaatgcaacaatctgaagcgggaaattgaattcttgatgataaggaaaaataatctacatgtatagaaatatgttaagaccgatcagaatcagagttatgacaataaccaagacttgctacctccaccggtagacggacatctacaagtcatcattggaggcccgcacatagctggagattcgggcaaagctcgggagatattgtctaagaattcatattcagagatattgttgtaagagccataagaagagaaatctttctcct

SEQ ID NO: 333050 - DNA, 1331 bp, Cannabis indica
tttttctgtgttattttatttctgatataaagcagtatatataacatgtacaataatcctataaagagaaacatatctttatatattaaaagtgcctatctaacggcaattcttggtttaacgatttttgtaacatttttcttttttttcttttaagaaaaagtaaacggaagattaactccgttaacattctcaaaaataaaaattgagtttctaacgattgaccctctgcaacgaaaccctgcaatccgattcattcgtaaccctaagcatatgccatagccctgaacccatgatcaaaacatcgggagagtttctattttgcttgaatgttgtaatcaaatttgtcaaattggaatcgtacggagcccatacgaaatccaatctcatcccaatctcatcaaccacagtccgataatcattgtgcctcctgaagagatcgtttttcactgactcaacagcttggggtttcattgccaaacccaaaagtgatagagcgaagaatcgtgactgtgagtccccggtgactacaatccatgacccgttggcgtttaggagattcgaagcgtcagatcaggtgagtttccgaaagtcacaggccgaaacgtcggtgtgggaggaccaagtctaagacttttcgtattgggaagtgttgggatgagtgtaggtaacattccaaacaacgtcgtggagaagagagaaagatgagtgtcggctgtcgaagatgacgacggaagagacatgagtgttggagcctgcactttgcccagtaagttgcttgatttttcaggtacgtttcgttttacgtttatattgaatggtttatgttttcggtattgtcagattgtgattttctttaaaccttttcagtttcacatttacagatctgttcttattttgcgttgaatcatttcgtttttaggtttctagatttgaatgtgatttggatctgatatgaatgatgtaatttgtataataataggatgtgtcctttctgttagtttgagaaaaatatttatgtcgcatgttaggttataattagcctatgtctcgggtcttccaagttagcattatctcgtctattggtgtcttttggagcagttatttcaggttcccggagtgttaaagttcaaattcagtcaaatggcgaaaaactgggataaactggaaaaaaattggaaaattcgtctccagaagctacagtagtcgcgacttccattgagccaggtcgggaccctttttcctggtcacgaccctgggcgcgacttcgaggtttggcagaaccttcgattttcgaggtttgcctgtagtcgcgaccagcttaaatgcta

SEQ ID NO: 333051 - DNA, 761 bp, Cannabis indica
acgaagctgcacgactcctatcttaggttcacgacggattttgtggaaatcacgccgccggacagagcttatccaagaaaattctaaggtaaggttacttctggccaacgatgattgaagattcgagagcctatgttaagaagtgcgacaaatgccagagattttcaaagataccaagagctccgcccaacgagctggcacagatgcaaagtccgtggccctttaccatttggggaattgacctgatcagacaattacctaaaggtaaaggtagagtgcagtacgcagtagtagcagttgactactttactaagtggactaaagccgaaccacttgcaaccattgcatcaaagaaagttcaagactttattgtgaagaacatcatatgccggttcggactaccgtacaaaatagtctcagacaatggcaaacagttcgacagcctatccttcactgatttctgtgcgaaccatggtagcattaaaagtttctccgcgatggcacatcctcaagcaaatggtcaagttgaagcagtcaacaaaaccttaaaggatacactaaagaaaaactcaaatatgccaaaggaaactggccagaagaacttcgcgaagttctatggtcataccgtacagcggaataaacagcaaccggtcagacactatttacaatggcgtacggttatgaagctatgctgcccgtcaaactcgagccaccttcccatagaagattgacgtacgatcaaggtaccaatcacatactcc

SEQ ID NO: 333052 - DNA, 518 bp, Cannabis indica
gatactcctcttcttcaatctcttttcctggactcaaatgttgagaagattcatagcattcccctctctctatttcaccagaattatcatctcatttggcaccatgaaaataatggaagctatactgttaagtctggttacaagatggctctgctcttagaagaacaacaaccgaacactagcaatacaatagcagttacttgggggaaaaaattctggtcactctcaattccatctaaggttcgaattttcctttggaaagcaatttaagtttgcttgccagtcttggacaccttgcatacaagacacataagtgatactagcatttgttctttatgtcactgtgagaaggagacaattattcatgctctcttccattacaaacgtcccaggaaattttggaagttatctaatttctctattgatagcctcctctcaactcatgtttcactcaaagagctcatgattcatgtctctacaatatggtcaactttgcaattggaacaatttgcttgcat

SEQ ID NO: 333053 - DNA, 2290 bp, Cannabis indica
cggttttatctgacgatctgtatgactattataattcagataaatcggcaaacgaatatgggatgctttgcaaaagaaatatgatactgaagaagctggaactaaaaagtatgttttcagtcgctacctcaagtatcaaatggtggacgacaaacctgtggaagcccaatctcacgagcttcagaaaattgcacatgagatcatctcagaaggtatgactttagatgaacagtttcaagttgttgtactaattgataagttacgccattcctcgaaggatttcaaaagtactctcaggcataagactaaggaattttccttagaaagtttgatcacccaccttcgtatagaggaggaagcaagaaaacatgaatagaaagatgaagtgcttgttgtttcaaacaacaacactaagaagtccacaccaacggttctgaagccgaatggcaaaaaatttaagaatcagaaccgcaactcgaattccaattctaaccgcaacaaccctcctcctaacaataatcagagttggaaccataataggaaccaacatggaaggaagccacctccacataaacagaatgaccccgcacagtttttgtgttacaactgtaacaagccgggtcatttttgtgcttacaccttagaggaggatcctgccaacctccaagaagccttgtcttccatagatgctgacctgtggcaagaggccgttgatgatgaaatggactcacttattaagaataaaacctggcattatacaaacttaccacctgggtgcaaaactataggttgtaagtggattctgaaaaagaaattgaaacctgatggaactgttgacaaatacaaagctcgcttagtagcaaagggttttagacaaagagagaatgtagatttctttgacaccttttcacctgtcactagaataacatccattagagttttaatttctctggctgctatacacaatttagttgtgcaccaaatggatgttagaacagcgttccttaatggtgaattagaagaagaaatttacatggatcaacctgaagggttcgtgatcccaggccaggaacataaggtttgcaagttagataaatctttgtatggtcttaagcaggcacctaagcaatggcatgagaagtttgacaatttagttatctcagatggtttcaaagtgaatgaaagtgacaaatgtatttactataaatctcataatgacatttgcacaattatttgcctatatgtggatgatttgcttatatttggttcaaatatccatgctgttaatgctgtgaaatcattattgtgtgctaactttgatatgaaggacctcggagaagctgatgtaatccttggtattaagattactaggtctgaaaagggaatttctttggatcaatctcattacattgagaagattcttaagaaatataattactttgactgtaaacctgcttgcacaccatatgatccaagtgtaaagctattcaataacactggtgacggtgtgagacaatctgattatgcgagcatcattggcagtcttcgatatgccactgattgtacgagacccgacattgcctatgtcgtgggattattatgcaggtttaccagtaggcctagtatagagcattggcatgctattgagagggtaatgagataccttaagagaaccatgaaccttggattacactatcaaaggtttccagctgtccttgaaggatacagtgatgcagactggaacactttgtcagatgactccaaagctacaagtggctatatttttagcatagctggtggcgctgtttcttggaagtcaaagaaacagactattttagcacagtccaccatggagtctgaaatgatagcactagcctctgctagtgaagaagcaggttggcttagaagcctgctagctgagatccctttatgggaaaaaccgataccagctgtgttgatccattgcgatagtaccgcggctattgcaaaagtccagaaccgttattacaacggtaagaaacgacaaatccgtcgtaagcacagcactgttagagagttcctctcaacaggagctgttagagtggatcatgtacgcactgatgacaatttagcagatcctttgacaaaaggactagctagagagaaagtctataaaacttagaaaggaatgggactattgcccttagaaagatgagtcactcacaatggtaacccaacctaatgactggagatcccaagaattaggttcaacgggtaataacaagttatgaggtgatatgtgttgatcatg

SEQ ID NO: 333054 - DNA, 678 bp, Cannabis indica
ttttacatacatatatatatattatattatttattatatatatataacactttttgactcggtcaaaccgagatcttacagtctaagtctcagtttaagctttttctagttgcggtttggcatatgcaacctagtgaagattttagtaggccctctatatgcatttctacctcaagttggattactccatgggagagtataagctgattgtggatgcatggataatcaagctaatatataagggaaatttgaattaatatacttactaatacctataattttttccctgaatccaaagttattaaaattggttatgtatgaccacttttctaattttcctaaactatcctcctcatttgaaagaatcagcctctctcttcctctctcttcatctctctcagctgaaccccctctctcaaaaatacagccatctcagccagccgaaccatcactcaacgaaccaaccctcaaccccgaccccgagcattccttcgtcgaactgaaccccggccgaacgctcaaccccaaccaactctgaaccccggccgaacgctcaaccccgaccatgtcaaaggtatgtggtttttttttgtttttttttagaaagggtttaaagatttattttgtttgggattgtttgtgaaatattattggttagatttaagaattttgttgtga

SEQ ID NO: 333055 - DNA, 1582 bp, Cannabis indica
aatcgagtataagtggtgcccatcccttccacaaaataatactcgtcaacaaaaccctcgagtttgctcacgaccttgtccacattgcctgtccaccattgaaatctggctgagagaagtagaattaccccgacctgctttgcttatgggtagacttcaggtcaaaaaacaaactgaccttatgcggagaaagcacaccccatttttgaattgcgtaaaggatgaacagggcagacagatacttaatttcgttgggagtaaattgggtcagacaaaggcgaaagtaatctgccaccttcctgaagtacggatgcaaaggcaacattgacccttgtttagtgtaagcacccgttagtggctcggtgatttggagaagggacgtaacattcaagtccgcccagataacaatccttgtacaaggccctcatgtgtgcctcagtgatcttggacggaggactcacccttctggcacctaaggcacctttccttctgtgaggaactgctttagtgagctcctcagtgacgtagtctactccttcgaccaagactttgccctccgcagtcaccggctccccggcctcgttataccctccaaagtttggaggttcagcctcctcttcctcctcagcctcagaagggctgctaggacggacgtcatcctgctcctcaatctcctggacttcaatgtccccctcgtgatctccctcctcctagacgggcagatcttgttcgtcgttcggtaatgtggcgacctgggccacatgagtatcagatgcattgacctttcgcattgtttgctttgttcgggccatcatcctactgttggacggacactggtgcgaatgtcgggccgccgtgacattatgaacaacaattggaatgccaaagttcaccgaacttggtcggtcaggagaaagagtgtcagcaacacctagccagacaatgtatgttcagttggacagcagataacgcctccaacctttcttcaattcccaaatgaagcggtcgtacccctctctggcgatctgctcggagtaatagtggtgttgcactacgggttcttgggtaggagaacattcactactgaccttccattcttcaaagctcgaattagaaagttcgtcacttgaagaggacggactggcatgaagacgagggtgatccttgtacagaagttgaagcacatcctggtcaattcgttgtttgcttccccaaaactcaccaagcttcatctacaaaagaaaacacacgagatgagtgtttgtttgggatatcgaacaataaaaggggaactatgccgaccaagagtgcctaacagattaaaagaatgaaaaatgtccaaaaataagtcaaaaccaagaagcttgaaatttttgggtttgggttaaagttcttgaagcttcgaatgagctaggtgaaagacgaacaatgtgagatcaaaggcaaacgtcataaaccgtgaagctatacagattattacagcgaaaacacaaagttttaagcctagattttctatctatcttctacaaacaagtcaaaaacgcatgtataaaaccctaaaattaaacatgcagagttaaaa

SEQ ID NO: 333056 - DNA, 622 bp, Cannabis indica
gaaaaataattccaagtttaaagaccgcttggccggtcatgatgtcttagaaaaggccttatggccgaataagatatataaaaataaaaagataaaaggagaagtgtttaaacagctggagtcccaggctcttggtttgggtcttctgtgccagtaggagctggaggatctgttgtttgaaagggaggtacatcatcagcttggccggaggtagaagcagccacctcagtttcaccataaaccacttgggaagcgcaaacctcaaggtacatgtccttagcgtcactcaagtagtcaaagttggcctgaggattagccttccaaaagtcatagaagagctcaagatcggctgtctctagagcattaaccttctctttcagcctcaccccctcggctcctcctccttagacttcttctcctcctccacccaacgaagaactgctcgaagagaagtcttctcatcctgaagactattcactttagcaggtaaggtttcgatggtctcctcaagacagtcagaaacctcgagatccttagtcagctcagctatcttcttttgggcgggaaatagcttcttgttggcttatcccagctccatccgaaaagctccaagttctaccct

SEQ ID NO: 333057 - DNA, 565 bp, Cannabis indica
aaccctaaacctacctaaacctaacagccactataattcaaagtcacaagttcaaactaaactttaaagtttctaaaatatgaaactattgttctaggtttacctttgattgatcctcttgaattcccttgctgcaaacaccaaaaatccacaacaaaaccccctggttttggctgcttcgaagagaaagaaaggaaggagagacttgttcttctgtttattttctttttcttaaatttttgcaaaatgaaataaaacaagtagggaaaaccaatttcccttggctgaagctataggccacgtgccacacacctaggcagccacccaaccacaatttaaaattacaaatttaccctttaggttataacttaggtgtttctaaagctaagggtaaaatggtcaagtttcataaccccgctcaatcccgatattttaatttctctaaaataatttccactaagaaataaggttctaaacttaccatgtgatcaaactagccatccatcgcatttcccgttgtcgccgagcaaaaattacaaaaattacatatttcacatataagcta

SEQ ID NO: 333058 - DNA, 658 bp, Cannabis indica
tcaaaacccaggaatagtgaaagaaagaatagagaagaataggtcacttaccattttaagtccagtagttgtatgatgaaaaattctgcaaccgaagatggagtgaacgacgtgatgatctttttgaactcttgaagtcgaacatcaaatccaagtatatgtgcaagaagaatgtcagtgacagtgagggcatgcaaagttttgaaaaaattcggatgaattttttcgcagaaaagctcaagaatttttgaaatggaaaaagtgatggaaaggaggttcttttttcaattttataccattgggtttgatctccgttagattaagaaacaaaagatccaacagatagaaatcgagggagaagtggaaaagatggctcattaatgttatgatgtgctttgaaaacataaaccgccaaattaaagagcatcccttttttcaaaatggattataataaatataccttcagtaatcatttaaaaagcacttttcaatgaaaatgactttttaaggggcaattgttatactcgaaattcggttgtacttcagaatgtgacacgtgccaatctcatgggatatgaaccaacagatttaatgataattatgtcattaaatgaaaaatgaaataactcattaaatatagaataaatagagtatgttc

SEQ ID NO: 333059 - DNA, 725 bp, Cannabis indica
taggtattgggctctacctaaaagtaatttcgttattaacacaatagacaatcactgagattagtgcttctagtatggtcgtccgaaaatcattaaaaactgttctagatatgagcatttgtttgtgtttcatgctttcttatgtcaaaccacaaaaattgcttacgttttactcataagttatttattttatgagtattttatgaataattttatgaaaattaatgtgctaaataaaatactgaacctatattaatgtttgaatattttcttaaaatatctagcactattatagaattaatatataacatttaaatcttaataaattgcactaataataaatttacaaaaataaatataaaatagtactattattataggataataaattaaatacaaattccataatatataataattgacaaatttttcaaaattcattaatttagacaataaatcacttaaatttagtaataaatatttaaatgcacaaatataataattaggataattgttacatgcctaaataaatcatttaataaattaccaaataaaaaaaatcaacttttaatttatactaaataacatataaattttaaatatacgtatcaaataaaaatagaaaaattgaataaatgcaatttactaattaaattaacacaaataaaaaaataaaatcatattcaaaattattaaaactttataattttttttttcgaaaattt

SEQ ID NO: 333060 - DNA, 503 bp, Cannabis indica
aattttttgaggtaccttgcattccagcttcttgtgatctcgattccgtccatagaggacagcctgtacgccccgtttcccgttgggcttaacactcggtacggtccttcccagttggtggataactttgccgctcgggcttcttcggtgttctgaaaaacttttctcagaactagttcccctgggaggaaattccttggccttactttcttattgtattgctttgctaccgcggaacagtaattctgcattcgggacaaggcgcgctcccttctttcctcgacatcgtcagcagcttgtaatctgaggaaagtgttgtcttcgttacataactcggatcgcaaagtaggcacttgcgtttccgtcaagataactgcctccatcccgtataccagtgagaatggggtttcacccatactagtccgtggcatggttcggttggcccaaagtacgccgggcaattcttgggcccatcttcctttaccactttcgagtcgcttttt

SEQ ID NO: 333061 - DNA, 1074 bp, Cannabis indica
acccatgagtttgtcaagaaatgtgataagtgtcagatattttcacatatacctctcgtaccaccaagggaactgaggatgatgacctcgccttactcatttgctatatgggggattgatctaattggggaacttcccacagggcgaggaggagccaagtacgcagtagtagcagtcaatttcttcactaaatggaccgaagttgaaccttttgtctccataacctagaaaaaagtcgtcgactttattgtaaaaaacatcgtctgtaggtttggaattctaatgaagatagtatctgataacgcaactcagttcgatggtgacttgttcactgagaggaataaaataatgaaaagcttctcgtccgtgtctaggcctcaggcgaatggacaagtggaagctgttaacaaaaccttgaaggatactatcaataagaagctagatgctgccaaaggtagatgggtcgatgagctacctcaagtactttgggcccatagaactactgaaaaaatagcaaagggacacaccacattctcgctggcatttggctcggaagcaatgttacctgtggaagtgaacatatcgactcatagacgagagttatatgatcaagaagaaaaccaaaaactcctaaaactgtccttggatatgcttgacaaaaaacaaactgagtcgcaagtcactaatgcagcgtaccaacaccgagtaacaagatacttcaacaaaagagtcaaaaagaggctattcaacgttggagacttggtgctaagacgagtatttgcgaatacgcgagatgcgtcagtgggagtatttaatccgaactgggagggtccttatgtgattgaagtgatagtaggaaccggggtttacaaattagctcggctgaatggcttgctaataaagaactactggaacgtggaacatttgcaaccctactaccagtgaactaatgattgtaaattgcattgctgatgtaatattttgaacttcagttatgaataaagttatcatttctttttcttaagtaatttcaaagtgttactctttaaaattacttaaggggcataggtgtat

SEQ ID NO: 333062 - DNA, 1760 bp, Cannabis indica
cccaagtctgcatgggacttccgaagtggcgcatagacttcactcagtttgaattcgtgtttgaacgggtggcacgcgttcaatgcatctgttggtgatccgatgtgatcctaaacaaaggtctctttgatatttggctcataaatgctgattggttcgtacctcgaaatcctccaaagatttgcacgcttttgacggttgctcttcaggtacttgattacttgattacacaacgttcacttttagggggaaatcgaggcatttaaatttcaaaacgattacacttcctcactaattttcttataaatagggaagattgtccaaataaaccacttttagcatcttctttcttgacaattttaaagcaacaacacctttcacgtctcaaatccttcgaagaatttccagaaagtgccgatcagtgtcatccgaacaaccccgaagctttgaacaatgagtaagttcttcatttttttcctctttaacatttgaatctttgattttctgagtttctattatagaaaattcaatagttcttgaactcgttctaggaaaaccgtaaaaaatctaggtttaggaatatgagattttaattgtgcttaaccatacgacttggctgtaatcgcattctgactttaatttcatgatatttggtttcacttgcccattcagagtttagtgaagattaacctttaatatctgaagtcttgaaattctatgttataaacctaaaatcatgcaaaattcccctttttaatcctttgatcaaacttggtcgatatattttatttatttttgttcaatatcctggccaaatactcatcttgtgttctacctattttagatgaaccctggtgagttttggggaggagaacatcgtgtcaaccaggatcttctccaacttctgtacgaggatcaacctcatctctatgctagtccgtcctcatcaagtgacagcctttccagtttgagatttgaggactgggaggtaagcagtgaacacacaccttccctaaaactcgaggtgcaacaccatttctatcccgaccagatcgcgggtgaaggttacaaacgctttatctaggagctcaggaaggggtggagacgatacttgtcgtccagctaaacatacatcatcctgccagatatagttgatactatacccatgggccgaccaagtcttgctgctgttggtatacctatagctacctttgccgtgtttgttgctaggcacaccaatcaaacgtcgtccaaggatacgatgatggcccacactaaacaaacaatgcggagaattacttcaattgatcctcatgtggcttggcttgccacaatgccaagtgctgaacatgcccggcctgatggtgaggaggaagataatgaaggggacatcgaacttcaataggtggaggatcagggcgaggtccgtcctgacagtccatctaaattcgaggaggagggagttttgcttggggattgcccttcagtggttacaacgaggaaggggaacccatgtttgaggccggtgaagtcttagtagagggtgaggactacgtaacccgtgtttcaatagctcattttccttcgattttgttaagtgattctgctaggagggcatggttagcctcttgatcatatgccaatcttctgtgggacggaggttctaattctacgggaagcatatcttcataaccataggccatagcaaatggagtttgtccaattgatattttttcagttgtgcggtatgaccatagtac

SEQ ID NO: 333063 - DNA, 741 bp, Cannabis indica
gaaatcaccatagctgccaggaaaaaaaaggtaggccgtttatctaggtgcctgaaaaacggccgaccgtttttcccaggaaagggggattttgggtttttctcctcaagtccgatctgattcggggtgtcttttagagtggaattcagggtgttttagagatggttaagttagtttgatccgggggaaagtagggtgtgttcgattgtgagaattagagttgattatcagaaatttgattaaggtttttattgagttttggttgttgtgacataggaccgggattgcctagcttattttccacccaagtcggcccgtacgcttgaggtctgaactaaggtaagaaaagtattaaatactgtataaggttaatattttgattgttacaatatcgattaagattgaaatctcggtatatgttgttgtgatttaaccttaatcaaggttaacaatatgtattggttgtgactcgattatgatcgagggaaataataggaaaggattatcatcgttgagactcggttataatcgagggtaatgatatgaaccgattattatcgttgtgactcgattatgatcgagtaaaagatacggtcattaccgttatgagtaattactcctgaaactgcggataggtttcttacttatcgtttgctgtatcgggcaatgatagtgacataagtagctcgtggttaacgagtggtaagggtactttataaagtaccagtattgtgtgattac

SEQ ID NO: 333064 - DNA, 702 bp, Cannabis indica
ataaattaaattttaaaataaaaaaacaaaaaataattttttctttcttttctactatatcttttttagagattttttttcttcttcttcaatctttttcaaactatcaccactaccaccgcaaccaccatcactgttactgccacctccaccaccaccacgactcaaacacaataccacatcttaaaacacaaacaaacaaatatatttattacatttgtcacgatatcagattgaaatctcataaaatcaaacaaaaacccaaattaaattaaaaaataaaaataccagatccaaaaaaaaccaccacccctgaaatcaccccaccgtaaccactggaacaaccattaccatcataatattttttttcatatccgaatcagaaccttttaaatacaaaaaaatatatatatatatataacaaaaaataaatcacaaacaagatctaatgagacccatccatggggtccgaaggtggctagatcgaacctaaacacgagtgactctgactctgacaagatctcatggtgatgcttaagctcgcctaaaaatagcttgaaagacatggagacgtgaactccgatgagtaactcaacgatgaaaaaataacagaataaggactaagattttgagttgggggtttgtggctggaaaatgcttggctagagttaggcggagagctcatgagagagagagagagag

SEQ ID NO: 333065 - DNA, 681 bp, Cannabis indica
aagagtgtctttgatttgtagaggtgagtgtgttcgaccctaccttagtttatatgtctttataattgttttgagtctgtaaacaagtcaacaaagaagaagaaacaaaagtgcaagccttcggaagaaggttcttcaagctttcaggagaaagtgtttcaagtcttgcctcgagagaaagcaagcactcttaaagtaggtcgaagggagttcgagcacttgaagtttcagcaagattcatttagaaatataaaaagtttgcggcatataataagagagagtctatatatgcataagtcaattactttgttattttgaggtctatctaatgaatatttttctgggcgtgaccccgtggactagtaacaattataaggattgttgataccacgtataaaaattttgtgtgtttttatttttttgcagttacagaatcatgttctgtagctacagattatttatttttgtatccactttattattctgcatttaattaattgattaattaaataataagttggtaattatgaaatacaaaatttcaatattaataaaatgtatgtgtttaaatgataagatatgcaattaggggtgttcatcggaccacatctaatgtttttaggcctattcagatccgatccaattatatattagatgttaaattttaccatctgatccgat

SEQ ID NO: 333066 - DNA, 572 bp, Cannabis indica
gtgtttccctatttccagagttatacttaacccctagaaagtataacagaacctagggttatggttttgggtttcccgggattagggttttgttcatgtaacttacccgatttcataatgtgattagggcatccatctagcacgagactttccgttcaggtcggccagcacaattgaattcggaaagaaggtaagaactgaatataatgtgtgatatcaataacttagtgtatgtatatgttatgtgtttatgcatgcttaaagtgttagttgcactaccaacacttatatagttaaggtatagagtatattggtacagtgaatgttatctgagagtaccgtgataccagcataagtacggagaggtactgagtgtgtgtggtacatcacatagaggtacccagggtatgaaacaaaccctaccaacactcgtacagagaggtatgtagtgtatgtggtatagatgctataccttggtatagaacgttcttactcatctattaagtcttgtaaataggtgtatgggcgcctaaatacaagtcggaaattatatgatatgttatatgcttttc

SEQ ID NO: 333067 - DNA, 664 bp, Cannabis indica
aaaggaatttgcatgatcaaagaccgtaagggagagtcatcaagcgcctgtgcctactaaccatttcgggggtagggataggtctcgtcagaagagctatcaaaataaataacacattagtcaagtacttaaaaaaatggaagactgatgtaaataagaaagaagagaacaatcacttactgagtttgcgaaatgtggttgtgccaatgggggaaagacgagacctccagaagaagtcgtctttgaaggacaccttatttggcaagtctacgataatttttggctcgctagaatgagttccaaggtaaaaatagccccatgcagcgttcttcctcgatggaacgactgtaactgagtaaagatactcaatctctgccggcgtgggacaaccccaattcataattttatataagactttcatactagcaagaatcctgtaagaaatgggatttagctcgaatggggcaaccccgatgtgatttatgtaatccttgaagtagtcccgaagagggaggatggcctctacacaaataaacgcccatactagttgaaccactagtactggtctcaccagtggttcttgggttactaatggcaaagtgtgcaaggggtagcaactaaattcaccctcttgtactgaactaacctgacatgattgcccaag

SEQ ID NO: 333068 - DNA, 821 bp, Cannabis indica
ttttagtgttattttctatttagtaagctaacttttaagtcttgtaaaaattaatattgttaggtgtgattttccaattaattgtgattgtttgttgttgaaaaagaaagcaaggagaagtggaacataagctaaaattgaggcagattgctgaagcaatgctgaagcgaattcagcattctggcagtgacgtggaaacatgagtttcacttatccacctcaggaaattcggagcagtcactcaaaatacaccagctagctgttgtggaaggaaagggactaaacctagtgggccaaagtggaaaaagattgggcttctactttggggtatgaaatttgtaccctaaaaacccaacacctaaaagaagagaaaagaggaagtacaccaccatcatcttccattacgtaatgaaggagggcagctgccatttttgagagaattaattggaagtacagaggaggaagaagaaaaaagggggaccaaagagcaagggagaaggacacaagtttttgtgtttgaatttctcttaccttctctttatctttttctttcttctttctttgcttatttcttgtctttacatatctcaaacttgttgaactgtaaaaaacgggcagcaaccatggattaatatttcttacattggcttttattttttaacttgaatatgagctaaacttttgaggcttgaatggctttgaacttctaagttgggtatgattaatttttaagcttactttagcatctttttgccttgttcattcaagtgagtttcattgtatttgatttttgttcttggccatgaataacaatttgctaa

SEQ ID NO: 333069 - DNA, 751 bp, Cannabis indica
aaattaaatttgtttctttattgataattgaatagaaaagattacattaaaatagagttttatttagggcacaagccataacaaactcccacttgcactaacataaaactatcagtacatttcaattaatcctaaattcaatctgtgcttttcaaatgtagttgcagtcaatactttggtgaatggatcagctaggtgttatcttcagtgtccactttctccaccagtacgtcccctcttgccacatattctctgatgatgtggtatttcctctctatgtgtttgcttctcttgtggcttcgaggctctttactattggctatagcaccagtattgtcacaaagtaaaaccagtggtttttccattccaggaacaacaccaagtcctgagaagaactttcttagccaaacaagttccttagcagcctcagcggcagctatgtactcggcctccatggtagagtctgatattgcggtttgcttagcgcttctccaaacaactgctccacccaaagagtaaaatctatcccagatgtagactttctgtcatcaagacaagcctggaaatcagagtcggtatagcctacgggatttaaagtagcacccttgtagactaacacataatgcctagtatttttcaattatttcagaatatgtttaactaaagtccaatgttcctctcttgagtttgtctaatacctgctcacgattaatactgcatagcatatgtcaggtctagtgcataacattgc

SEQ ID NO: 333070 - DNA, 837 bp, Cannabis indica
ctcatcaaatagatcattaatgacatcaaaatcccagctctttgattccatagaaaataaactagcgacattttgattcactaaaccaggatgagtagagacaacaaagggatgcgtgggatcaggaagccaagggtctaaaagaatactcacattgtttccattcccaattgatttccttgcaccagctttgactattccttgtgcttcaagaatgcttttccaaataaagcttggattttgtcccaaagtagcattaaggaaactactagaaggataataccttgctttataaattttacttaccaaggaatcctcattagtcaataaccgccatccttgtttaccaaggaaagaaagattgtaatctcgaaggtccctaaagcccattccaccatcaatcttacgcctactcaacctcttccaacttatccagctcacccccttcgaacctgagtttgattgagatttccaccaaaatttagccatcattccttcaagattagaacaaatctcctttgtaagcaaaaacacactcatagcataacaaggcaaggcttgggcaaccgatttcaacaacacctctttacccgcttttgacaagaaacgactctcccaagtaaagattttcttcttcatcttctcttgtaagaagccaagtatagctttcttattacggcccaagatgcacggtaaaccaagataaaaactattgtccccagcttccaccattcccataagattgcaaagtgtagcacatgtttcaacagggcaatttttactgaaaaatatggaagactttgagtaatttacctgctgacccgacgcctgctcata

SEQ ID NO: 333071 - DNA, 700 bp, Cannabis indica
gtagatttgaagaagatatgttagaggaagggtcagacatagaagagtaaaaaagtcaagttgcattttttttatgtgtttatttgtttatataataaggagttttagtatggctctactttagttaagagttttagtgtaactcctttagcttgttatcttttggaatttataaataaataaagaagttttatttcatctgataaagatttatataaaaatttatctacttatgttaagtcttactaaatagttaagaaaaaattattgcagatatggaagatatgtctcttagaattaaggcgtcaaacgaaacagtacttgtaaaaataaaaagcattctgtcacttaagatcgaaaatatccgccacgaagaggataagattcttagagctctacgagaggtcatcacaattaatgaagaaattaaaagagtagtagaggtgtggggagccttaatcaaatcacgagaaaagtttctagttctaagggctgctttgtcacacgtccccaaacttctctactatatcaatgacgactggcaccgggtctcggatcttggtgatgcaatccgatacgcatcattcatatgtgaactaacccttgacttccacaactttattttcgaaaagaattatattgtggaaacaaacgacatggaagaagaacgcgtcaagaacatacgatataagctaagtga

SEQ ID NO: 333072 - DNA, 705 bp, Cannabis indica
aaatcacagtaaaagcggttttgcaaaaagaaaagaaaaggtcttcctatgccctaagcaaatgctaaacgaaggatacacggccttcttcaaacaaaactgtacgactacaactaatacagtgaaacgtaagagcagaactcaaagagctcaaacactcacactccagaaatctctgagtacgaacccagaaaacaaacaaaataaatgtaagcatgctagagtctaaagattcgaagaacttacagttgattgttgaactgggggtactgggtatgattgagcgagagttgagaagcactggtgaaatcgaacactggaagattacagaaaatgttcaagtgttaaggcggtttgtgctactttgaggaaattttctctctgagaaattcaagcaaaaatggtaaggaatggaaagtaaccaaaatgaaggaaaggtggtggcttttataggcaaaaatgcatgaggaacaggcgtcttcacctaccaatcgtacggttagggaagcacgcgattcgaattcccaacagatcaacgggccagatcaatccgccattaaggcggtgcaaacgtttgagtatccgtctgacaccatcaatgcgccgcatcaatcagggggcgtaaaacgaatcgacctctgcaaaagtgaatcactgcatttaatgccattattaggcacaccttcacgcgccccacgtcgtatc

SEQ ID NO: 333073 - DNA, 551 bp, Cannabis indica
tcctcaggaagtacaacatgaaagtaaatctcttaaagtggtcctttggagtatgctcgggaaagattctgggctttattgtcaatgcccgaggagttgaagccaatcaagagaagatttaagccaatttagatatgaaatcgccaacaagagccaaggaagtacaaagtttgactggtcggatcgtcgcactcatcaaatttgtttcaaagtcattaaacaagtgtgttccatttttcaacatctagtgaggaaataagcaatttgagtggacggaggaatgtgaaaaagctttccaagagctaaaaatgcaactctaaaagcctcccgtactctcgaaacctgtagacggagaagaacttgggatatacttagctatcacagagcatgttgtgagtgccgtgctgatcagagatgaaacaacatacaacaccgggtctattacattagtaaaagactcattaaggctgaaggctggtacccgttgatagagaaacttgcttattgcctgattctagtaacaagaaagttaaggccctattttcaagctc

SEQ ID NO: 333074 - DNA, 892 bp, Cannabis indica
cagaaaatacagtctttttatattgtacttttgttaatttgttgttgattttttgttatacgtatgttattttttttattattattttgatgttgtttagattttattttcctgttagttttattttcctgtaatttttttttttataaaaaatagtgtgtcattgatgcacccttgtctgttttagcacccgaaataatttttagtcaaattttttctcatagtcatgtacgttatagttatttaagacatcttgtaaaattttaagaaatttgtaaaaacacgtcgaaaactacgttcaaacagtgtgttgcacgcgtgactattttattttatacgcatgtaaaatagactgtttgaacattgttttctatattgtaaattattcgaaatttctcaaaattttataggttatcttaaatagctataacacacatgaatataaaaaaaaaaattaaacttaaaaattcttctagatgccaaaacaaatcaagggtgtatcagtacatcccttttaagggggtgcattgtaaaatcacccattagtttatatatgtagttgtttttttcaaaaaataaaatatatatatatattacaaaacatggttccaattgctgcaacgtgtccattctgccttgctgctcctgagatgattctgcatgtgttggtgcggtgctcttttgctagaagttgctgaagcaaggttccaattactggggtggcgccggatgcaatgttgttctcgagttggttagaagcggggttggtattgtggaactcggtcgaggctcttgaggctggtatggtctgttggtcgatttggaatcgtcggaacgagttggtttggaacttcaagcaccctgatgcaagtgaggtagtggcaatggcaaa

SEQ ID NO: 333075 - DNA, 636 bp, Cannabis indica
atcctagatgaaactcttttacagaaagtgtttaccatggcaggacaacattcataaaaccaaacagtaaacacccacggacatcccaaagccctataccaaccatcatactggcctcccttctctgccttcctatttttcattataatcccatgctgaattctacctttgaatgaatcaatagtcaattcaaaggattccctaccccaacaatactcgtcccaccgaccgctatcaacaacatctagatcaaacctagatacttctttatcaggagtattactaagaagaaaacactgaataaaatacaacacaaccaatttcaatccaagggactcatccaaaccccacctactacccaaaaaagcatcctcaatagctttgtggtcaatggtttttacaccacggaaacaaatttctaccaactgatttgattcctgtgaaaacaacaacttgttgcaatcaccaaaacaatcaattccagtaatcaaataaaactcctcagcactaaaccgtatgcaacggccagcaaccttagcccaaaattctttaggattgggctggtaaacttccctcaataatagactatgaacaacttggggatggaaaacatactcaggcatatctagaaaatga

SEQ ID NO: 333076 - DNA, 510 bp, Cannabis indica
cctcaatctatctttggtgcgaatccttccttgaatagctaaccaagagatgaaagagtgttttggggtgttcaatctcccccaaatctgttgagaccatgaaactttcccttgaactggacagagaagggaatacccatgagacacatgatattgttgctgctgaggacagatttggggacctgcaatgtctcgaaattgatccttgagagttacaagactcctccaataccaactactctgagaggaagccttataactccaccaatcattttctttgagatacacactattgatccaccgcaaccataagctatcctgcttttgagctattgcccaaatatacttccccattgcagcttggttccattcatggattctcttaaaaccaagaccaccttcagctttggaatggcacagagagtcccaagcaatcagtcccggtcctgtaacacaagcttggcctttccataaaaaagccctacaaatagcttccaattgcctaatcac

SEQ ID NO: 333077 - DNA, 574 bp, Cannabis indica
acaaccttgcagtggccaaggctaagaaggaaatatcctccagccagagcccggacaagggaacaaatattcccaagtaggaaaccgcccaaggcgaggatgaagatgtggatcctcgacttggggacccaagcagcaatgttggacctgtggaagaattagaagagatcgaggtcgatccagatatcccggccagaaagctgaaaatcgaaaaaggtttgttgctcgaagtaaaatcggaattgataaaatttctgagagcaaacctagacgttttgcctggtcacatgcggatatggtcggaatcgatccttctatcatttcgcacgtcctgaatatcgatcctaatatacggccagttcagcaaaaacgaagactgctggataaagaacgagcagtagccctgaaagacgaagttgaaaagctgcgcaacaacaacttcattattgaagctttctacccggcttgggtcacgaatcccgtactcgtgcctaagccgaacaagaaatggcgagtctgtattgacttcacagacctcaacaaggcgtgccctaaagactatttcccacttcca

SEQ ID NO: 333078 - DNA, 733 bp, Cannabis indica
caagtgtattgtagctaaaaattttaaataattaaaacaacaacatttctaagtaataaaataaaaaaaaaaacaatgaaaataaagacactaaacaattaagtgttacaaattcaacatatacaaaaaaaatctaataaaaatataataaatatttattatatttttcaatattttttattatataaataattttttaatatatataaatgtaattggattgaattgacttttaattggattttgagattgacatccaataaccgatccaatccaattagaatccaacttttagcatccaatccaatccaattgtaattaaatatccaactttttgtaattgaattggattggatcagttcggttcaattggattggaatggatgatgcctacccgtaaccctacccttagtactcttcatcaccttattgttaattaattcaaaaagatatactttacaaggactagttgctctttgaaactgtttatacaaacaaaataatagaagaatcgaatattaaatcgcgcccttgtttattattataactataatactttttggggtaaatagtggcataagttctcaaagtttcaagtttgtaagtggcataatctcaatgtttatttttaccagcataagtacccaatgtttataaaactgtaatttttctctaatttcgtcagtacaaactctgttattttcttaaataggccacatataaagtccagatt

SEQ ID NO: 333079 - DNA, 586 bp, Cannabis indica
aaatagttggaggggtatagtggtcttttagacttaatcattattttatcttttatgcaattatatgctgattatatagcttagtattgtttaaaaaaaaaaagataaaccctttgtcttcaatagaaatttgagagaaacctagatttttcctaggtctttctttccttctcttttaaccttcaagcatagcaaaggaagagggatttcattgctgtgattctctaagttctagcaaggttttgagcttcaatcaaggtaagaatccctaggtttttatttgagctttagttaaaagttaggttgcatatagcatgagtttggtgttaagttgctgtaggatctaaggaggtttgctttgataatctggagattatttgatattgtttaagtttatttgagctgaatttaattgttgatttgaggttggagcaaagtttgagtttatgaactcaaacttaactctctaatggtgatttgaaaatttgtgtgaattgttgagttttattgcttgggattggtttagtatgatgtttacaggtattctggaagttgtagaaaagtttgggcttgatttgagttaaag

SEQ ID NO: 333080 - DNA, 1616 bp, Cannabis indica
aaacatagtatttcgatacaagttgtcactaatttagttttagttacaatacttattgtgactaaaaacacatttagtcataaaaaattgtaatttttgtgactaatacttttagccattggaccttttagtcacaacataagaatgttcatttataattagttacaacttttttacttttagttacaagttttgttgtgattaaaagtaaaaatttttagtagtgaatataaggtaattcactacttaaattcatgatttttgtggaaagctccatcaatatatatagttgggattatttttaaaatacacacaaaaaaaaaaaagacaaaaaattcaattgcataaaattttaaatattttttttagtgtttaagattttatttacagaaaatacggtctattaatattttccatattatttttatatcgtacttctataattttgttattacttatatattatttttatattgtttgaatgttattttcttgttattttatgtgattttttttattgtttttatattatttttatagaataaaataaaatataaaaaaaaaaaacgtaaaactataatatttttactggcacgtaatttatataaagattccctttatagtttctattaaatctattaatacacaccaataaatactactatagtttttattttattttcaataaatatatttagttttcactagattatgatcgttttaaagttttattttctatttttttgttcttttttgtgtgtgaaaaatcctccgaaatataaaaattattgcaaatgtgttattttaattgtattttattttattttttataaaaaaaaataatttattaatgatgtcacagttatctataaatacatgtatgccatgtagttcaagcccatattttgaaaccccataaaatatgttatattctcattttaatgtatatatatttgacaaataaataaatatttattataataaatgttattattaaattattgagctttttaaggtgtggtacatttggacttgtactacaagaaaaattatctttagtgataatttttagtacaatataaattttttgtgactaaacgtaatttttagtcataacaaaagttacttataataaaaatgtagtatttaaatacaaattatcactaatttagttttaatcacaacaggtattataactaaaaaatacatttaattacaacaaattataatttttgtgactaatagctttacccataaatattttagtcataaaataagaatgataaataagaatgataatttataattagttataatttttttttattttaatcacaaatttgcggaccgaaataaatttgggtacggttgggttctccgtgattctgggggccacgtcttgcaagctagaacggggtcttgaaatggttgtgttaatccggctcttgctgaggcttttgttgtgaaagaggtactaagttggataaaggagtcaaagctttctcatgtcactgtggaatcggatagcctcatagcagttcaagctttccgaagctcggtgaatactaattctcctttcggttgttgcattgcagaatgcaagagaataatttcag

SEQ ID NO: 333081 - DNA, 628 bp, Cannabis indica
ataaatcctccatccttttctccccgaatacctctgctgaggcccagtttcgttttcgtcaagctcttcaccttgtgggggagggcttcattagtaagtaccttggtgctccccattgtgttggcagggtctccaattccatgttccattatctgcttcaaaaagtctcatccaaacttaactcctggaacgaaaaatttttctctagggctggtaaggaaactcttattaaagcggtggtccaagctattccctcttttgcaatgtcctgtttcaaagtccccaaatcgatttgtcataaaattcaaagcttgattgctaaattttggtggggatcccacggcactaacaaagttcactggaaaaactgggatgctatttctgtctccaagttttttgggggcctggggttccgtattctatcctctcataaccaagctctcttagctaagcaggcttggcgtatttggaatgataggaattcccttcttcattctgttcttaaagctcggtatttcaaaaattctgatttcatgaatgccccttctggtcacaactcttctttcacctggagaagtattctttggggtcgccaattgcttcaaaaaggtctggtttggaagattgg

SEQ ID NO: 333082 - DNA, 1341 bp, Cannabis indica
cgacagttctctgttgtgaccaactccccaacatcgagggccttcttatcatacgtggagaaggtcttggcccgctgaagaaatacttgggtaggtgcggtctgcatgtaaggagggatcctaacccactccgtgagaagctccgggcggtccatggcctggaagcctgaggaaaagaagaagcggtgacggtactccttcacatgcttctgatgattgaaagggactgggccctcattcaaaggatgggcccgaaggccataaaaaccgtctttaaatttatcccctttcttggggatagaaacaagttcataaaaatacaatatctcagccagactgggcgagccccagctccgcgcagcataaaaaataaataagcctgaaagcgggcggtaggcttgagggatgagttggtacggcgcaaggccaacaaaaacaagaaagtttataaaataatcctggagagggagcatagccccggacatcaagtgggtctggctccaagcttcgaaggccccgtaattgtggttgggtgtctcctcgtcccgaggcagccgatggtaggtcccgtagaccgaaggtttgatgcctgccaccaccacaatcttctccagctggtgagggcaggtcagtgtggagtggagctcaaccacctcccatccgttggcacggaacttgtaattcttctgggccacaggaccttgcataacctcctccagggtggccagacgaacttcccctttcttggaagatttggaatcggatgcggaagcagacattttggttctgaaaaaattgagaaaattcagcagttaggccccaaacaaaaccctaatgttcaaaaaagggaatgtgggtcccctaaccgctagaaagaggccccctccgaacacttgccaaacaagaaagccccaagaggttctccttggcaagagtcgggtgcaaggtctactctaagccttaaagttgtcattacatgggatgaggatggttcctcaacaaaaacgtagtgaaaagaagtaatctaaacgcgaaaaaggaggaatttaacacatcattcagaaactcgaacaaaaccattcctagaagttcgacatccaacctagaaatcatgaaacgtgctatataaacgaacagtaagaaagtatatgatatacgaagaacttacatgaagtttgaaggctgggggttggtgttgatcgtcggtaaaacgaagactggaaacgtcgaaggaataagagcaggaaatgaatggtgtttaaagcttcttttctctatgaaaaactctaagaaaatttggtgaaatgctgaaagtaaccaaatgaagtaagaaggctggct

SEQ ID NO: 333083 - DNA, 371 bp, Cannabis indica
atatgtgtttatttcgtaatcgttttagaagttcatatttagggtgttaatcaacatacctgtgagtagatctaagatcctggtaaaataatttccaatagttattaccgtcagtttgtagaggggttctctaaaatttctacgcccttaactgagctcactaaaaagaatcaatagtttgcgtggacagacaagtgtgaagcaagctttcaggagctaaaatagaggttgattaccgctccagtattagcgctaccgtcagataaagaaaagtttgtagtctactgtgatgcatcaagattgggtctggggtgtgtactgatggaggttgatcaggttattgtctcccgttagttgaaagaatatgaaca

SEQ ID NO: 333084 - DNA, 1689 bp, Cannabis indica
tccttaaacctctttatgaaattttttcaatgtctctgtgggtagttgcttgatgttagtcagggcgctgacttcgagattaatctttcttgcagcgacaaattgcctccggaaactaacttgcaacttgttccagcagtcaaccgatcctggttccaacttcttgaaccattcttctgcggatccacttaatgttagtgggaagcataaacatttggcgtcattgctgactctcatgaccatcattactcggttgaaacgagataaatgatcgctggggtccgaatccccggtgtaagctgccatttcgggcatcttaacatttttggggagttctgcctccaaaatatgtctggcgcatggctctcggtcctcacagtcagaattcgagtcatcccctttttgtctccaggagactcgagcaatatctttgcgtagtatggctagctcagctaggattccttcattcagcgatcctgtggagactgtcggcgcgtgtttcttttggtccaagtgatcccataggtcaccatgttttccgttgatttgatatcttagatcgacgggagggtatctttggttccttcttcctttctctctgggttccgggtgcacaaaaatgcttttttggtcctctcaatcatgagggccaagactccctttttggagcttgcccctctacggacctttctctttcgggaaatctgagcggacctttcgcggattctgcacctttttctttttccttgggatggaattaggatttttccattggttcccttcaaagggataccgtatggggctaggctccctggacttatgcttttgagtgcttggtgaggacttttccggtgtttcttcaagtcctgcagggatggctttagggtgtatgtggatccctgctgtctccatggctttttgcatggcgaccatcacctcttgcatctttttattttgttctttttgggtcgttattttagcttcatgatcagtagccttttgtctcaagagcaatagttatgtgtaactaccttcgtcgtaggcgtcgtactcgttgaagttttcttcgtactcatcgtcgttggtctcctcttgctcctcagaacccacgttgactcttgaggccacttcctcatcttcagggttttgggcgtcttgaggaggacggggctaacgtgtgttgcgagtctccaccattgttgctttagcttacaagactgttgcctgcttgcagatgcttccttcagctctcaatgaaaagtaccaaaatgttaactgaggttttcggcaaccaatttaataataatatatgagaaagctgtaggaagtttagtgcatgagatttttacgtggttggggcattaatgagccttagtccacgagtctttcttatttatgagagtatttattacagagaatgttcttggtggttttctctcttagtggctctctttaattctcagaattctcgacccctgtcttagtgtgtttgtggggtatttatagtgtttttctggggtgatccctagaactgaactacttgtctttctatgtagtttcagtaggggcacatattcctagcagatacaaaataggaaatacatgacctataccataggtatcttaggggttaagtagatatattctttttcctttcttgattgatgtgatccctcataaagtagccgt

SEQ ID NO: 333085 - DNA, 2068 bp, Cannabis indica
tggtaaaatatatccaacaactatacaaggatacactgaggaaaatgggattgcaacgtgaaaagttaaaaccttgcatggtgattttttgcggatttactggcgatagtgtcgccaatcaaggcattattgaactccattaaccgtaggagagccacctttatccacaacattaatgcaagattttctagttgttgacctactgtcggcctacaacatactgttgggtcgccctgcactgattggactaggggcagttggttcaattaaacacctatctttaaaattttagacaccgacatgtgtaggtgttgtgcgaggtgaccaactactggctcgtgaatactatcatatagaactaaaaaatagaaaagtcagtcattagttaatggtagtcataacggaggaaggcaagaaacaggacgaggatttacatcctcgaattcaagacaaaaagaaccagttgaaaccaatcgagaaattggaagaagttgttttagatccagaaaaccccactaagtgtgtgtttattgggaaaaatctggatgaaaaactaaaaaagcagctaataaattttctgaaggcaaaccaggatcaatttgcctgggagccattcagatatgatagggattgaccctaaagttatttgccaccacttaaatatcgaccctaattacccaactaagagacaaaaaaggcaacccttggattctgaaagacaaggggcactcaaagaagaagtggacaagttactgactaatgactttatacgtagttctccctcgtggatatctaatcctgttcttgtcctaaaaccaaatggtacttggagaacttgtatcgactttttagatttaaacaaagcgtgtccaaaggattgttttccattaccaaggatcgaccagttggtggatgcaactgatggacacgagctaatgacattcatggatgcatattctgaatataaccagatcaagatgcatgtccttgatcaagagcgtacaagtttcataaccaacatgggagtttattattataaagtcatgcctttaagtttgaagaatattggggcaacgtatcagcgactagtaaatgaaatatttgaaaagcaaatagggaggaacatggaagtctatgtcgatgatatgttggtaaagtaggtaaaaagtgaaagtcatacaaaagacctcgcggagtgctttgaaatacttaaaaagtacaacatgaaattcaacccaaagaagtgttcctttggagtctccttgggaaagtttctgggattcatagttaacgcgaggggcattgaagcgaatattgaaaaaattaaggctttgatagaaatgccatcacccacaaagccgaaggaagtccaggccttaacaggaagaattgcagctctaaatagatttatctcgaaatcaacaacaagttcttaccattcttcaatgtgttgcaaggcaacaaaaagtttgaatggacagacgagtgcgaggaagccttccaaatataaggaaacatctatcaacgcctccagttttggctaaaccggtaactggagagactttattcctctacttggctgtctcggagaatgtgatcagtgcaacgttagtgtgagaagagggaaggaaccaacaaccagtttactatgtaagtgaaaggttactaggggcagagtcgagatatccccctcttgaaaaactttccctacgcctaatccatgcatctcgcaaactaaggccctacttccaagcacatcccataaatgtgttaaccggtcaaccactaagacaagttttgtcaaaaccagacgcttctggaaggttaataaaatggtctattgagctaggacacttcgacataacctatcatccaagaacatcaatcaagggctaggctttggcagatttccaaatagaagggatagttcaagatgaaaatccacttgtccaacaagacgcagaaacttggaagttatacgtggatgaagcatctaatgaaaatggctcgggtgcaggggtgatactgatcttgccagataacttaagtttcactacgccctaagatt

SEQ ID NO: 333086 - DNA, 675 bp, Cannabis indica
aaaagaaaaaaaaaattggccaagatagtataaaaataatttctaccctgtagtagtatttttgtaaagattaggccaaaaactagtatttttataaatttccctatataaatgcccaattttaaactttggttcaatgcctccaatatgctttggccagcctaacatatgtgcaaatagaatgttggaattcatagaaagaaatatagctttgggcacacgttacttgctcatcaatttacaattttattatgtcaaattgaaagttgacctgaccactatatactcaataatatcccataaacaaatcgagaacaccattaattttctttgggaatcttcacacatgttatctcatcatcatattcatactatatatctatgtaatggaaagcacctactccaattcatccattactctctctctcaattttctcatcaatggctgaaaccaataatctcggcaaagccaagatgattttttcaacggcggcttcaatggccgccacggctatggtggtacgatcttttatgaatgatttcctaccccatcaattccaagacctcatattctcacgcattggcaatttctttaatcgattttcgtctcagatgactatggtgatcgaagagttcgatggtttcgtcaacaacgaaatctacgaggctgcggag

SEQ ID NO: 333087 - DNA, 736 bp, Cannabis indica
gaccaacctcgccaaccgatcaaactacgttgtatattcagtaacgcgcatattatctttctgggtcaggtgagtgaactcttttctcttggcacttctaacggcctcattgtagtatttcgcattgaagagttcctggaacttttcctaggtcatagttgtgacatcatgtatcatagacaccatgtcccactagaccagagcgtcctcttgaaactaaaatgtggcacacaccactctatcattcacggggacacccataaaattcaatatcctcgtaatcactgttagccactgctcggctttcatgacgtccggacctcccagaaaaaccagaggtgcctgcttgcggaacctttcatacaggggttccattctattcaccgctactactggttcggcctggacaacaggggcaggtgccactggaacttctggaacaggcactgcaggagcaccctgctgtctcaatctctggatctcattatcttgctcctctattctggcttgcatttctgcaaacctaatttcccaattctgggcttcctaattggcttgggcagcctgggcagcctatggcgggttaacatcaccccgaccacgagccctgcccctaggacctctacctcggccccgagcatttgggagaaactgagctccttgaccttgatttgacccgactgagttgccctgactcctggtatttcgcgtggcgtccatctagtctgaacagcct

SEQ ID NO: 333088 - DNA, 789 bp, Cannabis indica
agtttaggaatctttaatcaatatttgctagtatggctcactgatgcctattattcagcgcacgtaatctcaatttggattactaaggtagtatgatatctaagtgaaggtgttgtatataatagagattatatatgacaaggaccgatatgaataaaattgtctttatcaaacttaccatttactataaagacctaattcatatcataataatgatcaatagtagatcagtataaatcttgagtaatcatgaaatcctttcatattattagtttctttgattcactcgttaaagtttctcagagaaaatggttcttacaacttctgttttgggagtctaataatgtggatggttgggaacataatctacaactatggattcctaacggatcgaatgttgcttccctttaagtattaattctggaactgaaaagttgtgcacaaatttaaattggatctaaattatactttcactagtttgacggtactaaaggataaagaagtaattagaagggtaaaacaataatttgaccaaaactaattacgaaatgacataaggaaggcttatcactgcaattgattatatcaatggacactgcagtaaaactcagtaaatataattatataattaataagagttcaattctatatttatagtggagtaatcatggaattaataaacaggattatttgattgatgagattcaataaataaatccaatttagtgagccaactagggcttagggttgaattatatggattaaaaaagaataaaaaattgggcaaaa

SEQ ID NO: 333089 - DNA, 1176 bp, Cannabis indica
tttccactaaatctctagttagtggcttcgtaaacgaatctgccaagttttcacttgatctcacatgggatattgagatgactcctctttaaatcaactcacttacatatccatgtcttagactaatatgtctagacttcccattatatactccactatatgctctagccaatgttgattggctatcacaatgtatcgatattgtagatacatcctctttaataattggaatctcaattaagagatttcttaaccattcggcctctttcccagtggcagctagagctataaactccgcctccattgtggaatgagaaatacaagtttgtttcttggacccctaagaaactgcccctccacctagggtaaatacccaacaagatgtggacaaattatctccaaggttggctatccaacttgcattagtatatccttctaaaattaaaggaaatttgaagtagtgaaggcataggtttttggttttctttagataacccaaaactctccctattgcctttcaatgatccacactttgatattactagtaaacctacaaagtttactcaccgcaaatgatatatcgggccttgtacattggacaacgtacataaagctccctataacacttgcatactccaactgagccactgccctaccactatttttaactagtggtttactattatcaaatggtgtgttggcctctttagcctttagagtatattttatatacgatatagaatatctatataatagagtatatatatatatgatatagaatatatatataatagatgatatatagtagagaaataaagagtgtatatatagtatgtatatataatatatatagtactatatagtcaatatataaatatatgatagtatatatataggagtgtttagaggagaacaagaaaacaatataaaacttgagaatagaacaaaataagaaagaagaacaaacacccaaagtggagatggggatcaccaaaagcttgaacaaagtttctacacctttgtccaagaagattatttccccctctatgaaacacttagggctttgtggaaatacttctaggaattatcaagccttagaactctctagctttgtgtttgaaagatagaagagaagagtgtgtctcaaagggtgaaccaagacctctatttatagtg

SEQ ID NO: 333090 - DNA, 910 bp, Cannabis indica
aaaataatttccaacagttagacacgttgccagaggggcgtgtgtcacccttagtgaaaaaacattcgcaagctgaagttgcaggcactgttgcgtgatgtacaagccatgatccgaacttggatacgacaaaaaaatcttaccacgcagtgccttcaactaatccccacattgtcaaattaatggcaaggggtagagccgctcaggcaggctatattgaaaggcatgtagagccagaggaaagagaggcctgcccggatgcaaggattgtgatgtcatcccgggcaatcccttggggtcctataacgagtctagggtatctctcaatgaagaaggtcaaccttcccacgccggggttgaccatgtagaggaggaggacaaggccctagttcctttatcgcatggtgagggagtgttaggcgatttttagcttaaatttcgagtcactttttatagttattttttcttctttgttattatttttggaataaaattgtaaagtcatttttttggaaatttaggtatcaaaatattttttatttattgtgtgattttttgagcaattaaactgatttggtctccttaatattgtgtctttattgctcttttccttcaaaagaaaaaattatttttcagctttccattttcttattttggaaactttttgtaagagaagagattctctcattgaaagttttatttggaaactttgaccattgctctttctctttaatgtgttcgattatgtcttgataagatcagatcaaacacattatttttggcaggtatgaagtccatgttcatgatcgagcacctatttggaaagtttcctttctggtttaatttgctgctgtagaaacctaattctaatgttgcaaatcaggatttttttaggaaagtttgtacagct

SEQ ID NO: 333091 - DNA, 982 bp, Cannabis indica
gacttggaggcacagaggagatctatccgggaggaggcccaacagaaggaggccattatggagcggagccaccaggagtcgctgcaggcgaaggctgaggaactgaaggctaaggatgatgcgctgaaggtcagggatgcggcagtggccaatgcaaggcgggagctctgggatgctaaggagtcagtgcaggaattgaccgccaagctaaagtctctagaagagctgcatcaagctgatttgcaaacgacagccaacctaactgttgaagtgaatgggcttcgtgaattcaaggagcagactcagaaggaggcggctaaggcgaagagagatgccctcctggccccaatcacctgccaacactacaagaagcgttttgacgatgtagtcttcatggcctggcagaccaatggacagagtcttaacctcagtttttaccccaagcctgaagaggtccttgtccgcttctgggaaaagaagaaaaggctagacgcaatgttagaggagcgcaggggccctcatcttccaccccgagttgattaaaccgcttgtttagcaccattactatcattatcttctctttttttttttattacatatccaatccttctcccttcttcacgacaatttattttctttttcttaaggggagacatttatggcccgtccccaggccctccgttttttttctttctaaagcttttctttgggatctaaacaacttatattatgtttgaatatatataatttttaacttccttaaatttgatctgtttacatttgtccttgtgatatgccttactacctcctgagtgacatgaaaatcaatttttaagtcactcagtcttacaaagtgaaattagaggttgcatatatttgtccagtacaaatttactttacagaacataaactttatttttcaactattggtaatactttcggaggtgattagcattccagcccctaggcaccatggttccgt

SEQ ID NO: 333092 - DNA, 959 bp, Cannabis indica
accccattaatgtttgattagtccttgataacttaagcaattaggttcgggttgtgacggataacattttgtgtgtatatgtgtggatatagtaactttgatgggtgtcaagaaaaaaaaaaggcttttggctcaattcggggtgactattgacaattaaatactctcgggttggctagaaaggctcaatcgttcaagaatggcctagatcatttccaagttataaagctcgctaggatttcgcctcaaggattacactaaccaattctagatgcttaaactttctcaagaagttagctattcttgaaactcaaagtatggtgggataacacaagcacacaattgttgaaagcattcctcataggctagcatttagacaagaataacacttaaaattaacattttcaacacataaaccaagacactccacaaaaggaagaaatggatatttttcatcatcgagtgctaccctaaaccaagttgaaattacaatcactatttttctcatttgcaagctaaaacagaacataacaaacctgacaaaataacatgattaatacacatctactccacataatgtttatcactcacacaactaaagacaacaataaaagtaaactaattaaacaatcaaacacaacaagcaatttaaggaaaaagaaaactccctcaagattcagactcttccctgcttcaaaatgctgaagcgatgctgatgcaatgctgtaacaactgggacttactgctttagcacacaaatctgcttcacaccatattgcggcaggctatttttctatcattccctgctttgcaccaacaataaaaatcaccacaccacagcaaaatcattagtaactataggaaattgaaggttattatatatatgtaattatataagtatgtatataataattttttttttcttttttttctttttttctttttttttttttttcttt

SEQ ID NO: 333093 - DNA, 550 bp, Cannabis indica
atataaatattaaagaaattaacaaatttttaaatctgaccataatttaaaaaattaaaataatcaatttttaaatttaaacctcaaaatatcaaaattaacaatagttcattgaaaaataaatattattaatttaaaaaatgatatttaagtttaaatatatttaaaaataatatttaattttaattttgggtttgaaaattggaaaaaacggatttttgggaaaaatcgcatgaaaatcgcacattgggagtgtgctgcccaggaggctgcacgtgcagcctcccgaggctgcatttggggtcaaacgcgcacggacaaggggtgctgggcgagaatcctcggcggttgcagcatggcgtctgggcgaattgttgggtcttcgtccggcggacacggcttcagacaagagtgatgttcgagcccacgtgcgcgtaacccaggttgtgcgagtgcctggtgcgattgatgcacccactcgacggccatggattccaatcttccaaaattcataactctttcaatttttatcgaaatcgagtttctaaaa

SEQ ID NO: 333094 - DNA, 1419 bp, Cannabis indica
ttccctatttggcaatgttttttcccttgtccaaactctggctagaggatacttcctttttagccttggttagggcaaggttgtaacattcctgggccacttgctgatttcctcttaggcacgccaccccattctttgttgcaaacttaaggcatgaatgaaatatcgacgtaacagtctttaggtcatataaagttggtctgcctaacatgacattaaatacttatggaacgtccaatataaaaaattgtgccattatagttatgctcttcggagattgcccaatagtgaggggtaagcgaatttgccttagaggtgcaacactctggccagagaaacaatacacgggctagagacaaggagttaagtctttgagttggagccccatcttttcatacagtgtcttgaacaagatatttgtagaggctccattatctaccatggttcgggccaccattttgttgtctatttggacttccacgactaacgggttgttgtgtgggaaattaatcttgacagtatcctcatcactgaatgttatggtgggttcccctgcccgtggtattttggcttcctttcttcgaaggccagaaccgtttcttcttgcttatgttgtaatgttcgggcatacctctcccgggctttgcctgaatctccagctatgtgcgaaccaataatgacttgcagatgtccatctactggtggtggtagtaaatcttgattgttatcgaccctttgattttgctcgaccttgacatatttttgtacgtacagattattctttcttatcaaaaattcaatttcacgcttcagattgttgcattcgttggtgtcatggccataaactccatgaaaacagaaaaacttggtcatgtgtctctacttatgtcctttttcatgggagcgggcttcttatacggagctaatgactgagtagtcatctagatagtctctaaatcttctgtcagaacagagaaagcaataaacttggtaggattttccctagggctctgttcggttttgccagcaaactttccctttttcccattgccttgactattgttgttgttggaccgtttaccacccgagcttgaactgcttgggtactgagggagctggacggatgttccagcatagggagcttttggctggccaggtttatgcttgacttctacttgttgaatggcttcttcaagcttaatgaagccatctacatgatcaaggaagtcactgatagaatctactggtccgtttcttctgatatccttccaaagttctccaagaacttcgatgcccccagtattgcggacaatatcatattttcgatcaactgtgcaaccttagttgccaccctcacgaatctgctgatgtaagctcagagaggtcctcttggtctttgcttcacttcgaccaggtctt

SEQ ID NO: 333095 - DNA, 845 bp, Cannabis indica
atattttcttgggaaccaaacaggatatatgaaaagagaagagggatacataccggcatcgatgacagacaaaatgaaggtagagaagtcagagtcgggggaaaggcatgtgaaggaggtgccgggaggagggtcagagaggagaagcttgagctccttctacattcagaggttgagcctcaccgcttcagccattttagagtattgttttgcacacagctaggagagaaacgttaatggcgacggaggagagtattctgcgtgagttgttgggaagtttctggatcttcatgcaaacaccatcctccggttcttattccaatatagattgggaatgggaagtggaggagaaacaacggagtcagaaggaagaagaatatgaaatagtagaagagtggtgaagaagaaagacaaagggcttagggttggagaagagaaaagagggctttctttgatggaagaagaggagtgaaggagaaagagaggatagggcaagcacgatatcaggggcgagttgcgttgtgttggtttctctctctctctctctcttatattgtatttagcgtcattttttaaacctcgcatatacattaggcgagtgttaccagcaaactgtatttttaatttttttttctttattacgtcggtttgctttttagtaacgtttataaatagacgcaaatcatatattattagtgtcggttataaatagacgggtcaaattattgagtactattcacgtcggtcaacgttatgaatagtggcgttgaccgacgtaaatagtgtaatttgtagtagtgaatggagttaagccaatttgacctacactacattccacgcatttc

SEQ ID NO: 333096 - DNA, 1057 bp, Cannabis indica
tccttctcactatcaccaccatctctatttctattttctttgtcattatttttactaaaaatatataggatgagtcatgctctttctatgtgtttctatttagtaaaaataatatttatgttttagttttatgtttaatcttttattgcattattgcttgatgtataatgtcatttctaggttctacataagattaaatcatttcttttatttgcaagaacttgtatactcaaaaatataatgaactttaatgttaaatcatttatcaaactttgtgaatcaagggtacaaaatagctaaacaagcatatggatgattcttgaagcctttctttcttttactattgattacacctttatttactttcttttaatatttattaccaaaacgaaaatcacaaaatcatttgtccctattatcactatttattaaccttttgtttctatttttccactaacatttttgtccataatcacctccttgtggaatggaccgtctaatctatactacaaccaccgctagtggaagtcacattttgggcgttaaccagatagctatggtctcttcatccaaactaatgcctcaaaagctaaaaacctagatgaggcctcttccttcttctttcttcttcagttcgaaccctatagcctttcttcactacataatttcagccaatatgtattgagtaagtgcccacacacatcaagttggtcctcaatcatagtatgtaagactgtgatgaatccaatcaacaagaaggagagaaagagatccaggttcagatcttgataatgctctgctacagaaaggaatcaaaggccagagatctgaacggaaggagtcattatattctggtgcaatcaatgtaaggtttctaaaactttatatgtgtttatttcattgttttagaaattcatattaggatgttaatgaaacatacttcttagtaaatctagatcctggtaaaataattccaacaccatcaccaactctgcatctcgcccctttcgaacaatctcttgagtttcataaatacttcgccacacgaaacttggat

SEQ ID NO: 333097 - DNA, 616 bp, Cannabis indica
aagtaaaaacatacacaacaacccagcaacagattcacaatattttcaccaaaatcacatatttaagcttaaaaattccaaaccttgaacaacacaactagcatgcattaaaacctagataatccatccatttaaaacctaattaagctactgtaaacaacaattaaacacagcaacaaacagccatacaaactaacatgcaacctaccattttcacttcaaaaacatcaagaacacaaagaaaggttgagaaccacttactagcaactaaggatcacaaaatctacacaagaaggacttgaatcaccaagaaaaactcctcctccttgctgctcaaagagggccgaaaagagagaggcttgagagagtttctttttcaaagttttctaatttctacacttagcataatttttgtaaaaattggagaataaaataaaggcacttatctcatttacttcagccaaataaaataaacaaataacatttatttttcaaataaacaagtcactaaaagacaaaaagtcattggggcaaaaagaccattttgcccctccacactaaaatcacataaatcaaactaaaggggtatttttggaaaattctaaattcccggcca

SEQ ID NO: 333098 - DNA, 869 bp, Cannabis indica
tgaaaatcaactttggagaacacttttggtaacacttttggtaacacttttttaatcagttttctgtttttaaaaatcaaaaatatgaaaatgaaaatcaactttggagaacacacttttgttttctgtttttaaaattgaaaaacaaaagtggttacagaacgcatttttgtttttcaaaaacaaaagttttaaaaacaaaaattttactttcattttgtgattaaaaaattaaaaaacaaaagtattaccaaacgacacctaaataattctcgtaacgtgaatatataaaaatagtttaacattaataatcaacaagctgcttgagaaaaaacatatgttctctacaaaacattatggcatattaaaacctttgttctatatcctccaacaatgacttgccataaattcaaaaactttgcataaacctcagttttcgaatgagctcaaaaattttatagaaggggaagactaaaagaggtgaggaagaagatagtgttggattaaaattcttaatatgggctcatatgtatattagtgtgtattgctatttgaagtttggtccaaaatagagtgatcattttagtaattatgggtcattgggtattaaagtgtcatgagcgaaatgtgtagataccctaagcgatatttctaatttatttaggggctaaattaaagtacttaaaactaataacatagctatgaggttataaattgatagtaatccccaataaacaagagctaatttctattctcatcttctgctatttggcttcttctctttgaatcaacaaagatattatttagatctatggttgtcaatttataattatatgcaatatgtttatctataaaattgaatattgtta

SEQ ID NO: 333099 - DNA, 556 bp, Cannabis indica
ctgaacactttcgtgatctttatagtggttggagttccctaattgacttgccttttttaggcaagtatgctggagtgccacctgaagagccgagtttaaacatagcccgtcgtatcctgagggaagaagattatgtcattcaccgaccatattcttttcctatgaagaagatgttgattgtatagaccatgaagacttatctgatgataaatttgaaatgcttgtttctatgcgttcatctatgttgcctgtgagagtaggcaaggacttattcattgaaccatattttcccaatagattcgctcgctttggatttgatcaaggtgtgccatcgaatgaacttcgttctagtttttcttggaggacacaatgtgggatacttggtgttgctgaagcttgggcattactattgagaaggaacactggtattcactttcatattcccagtatcactcgcatgggtcagtgtacttggtggtatggtcgttggtgggtaagaacttgtataccttacttaggaagatccgtgagaaatctccatttagagttaaccaag

SEQ ID NO: 333100 - DNA, 941 bp, Cannabis indica
tattaaaatacggaatttcaaagcatatcatctgttattttttttttagttattgttgttttcttgagtttataatttgtttatttttgttgtttatgcattgtttatttatgtttattttcatagttgttatagttttttatgtttaattgatcttactattttgttttttcagttatgggataataaatttggtaatgaagattttcataccacacgagtgacttttacttgctcgtttaaaatcattgaaactatcatttctattttgatccctgaacataatgaattgtttggacaaactgtttttgagttctttttaagaactccttcttatgttatgcaacactagttgttccatagtttgtcttttagggaggttgtccagccaaatgaaaatgggatgtggtttaatgttgctttgcggatgctaaggtttagcattgaggagttcactttggtttcaggccttgattgttcgggtcaatgtgatatgttgcacatttccctattgtcaatgttgaagtacttcctgaacaagtggataagtatgaatgttaatttttttgttctgttttatttttattatttttatgtttatttaacatctctaacattgattctttgttttttgttgtttctagtgattgtggtgcgtttgttgctgtttttgctgagtatttcattgaggggaagaatattccagctgattttgatgttgaggagtatcgccttaggctttctgtgttgctatacaagtttggacttttgaaacagattgataatgttgaaaatgagctagaaagccgacctaaatctccaaagaagacgaaggcaaaagctaaagggaaagcgagagcaaaagcgaagtgatttgaattcaagaaaaatactctatgtttatcttttgttgtttagccaggatatgatataatacgttg

SEQ ID NO: 333101 - DNA, 705 bp, Cannabis indica
tataataaatatacataagagaaacttaagaatatgatgtggcattttttcattccaatattctattttctctaaattgtaatttttttctaattttttatttaatatttactaacaacaattaattaaaagataataaaattttaataggcaaatcatattaatttttaatttttaaagattaatgataataaattatgtaatcattattcattaagaaaattaatattatcttttcattttttataacttaaattatatataatatttattattattatatagcaaatctatttaaattctttatttaattataataatatgttatacaataaatatttaaaataaatatgaggttctatcataaaaggactcattcaaagtagctaaccaaagaaaaaattggtgaaaaagaattttcacatacaaaaatatactcatgaaattgtagaaatattcaccacacttcaaaatttaagaaagagttatcgatgcacatggttggaggttctacaaatttattcatgaattaagaagatgtgcttcaagatctttatatgttgtcatcaattttcttattcatagatttactttgccctgtttatgtaattttacaatcaataagaacaacaagtgggttgtaagagcattaatcaatacgtttttattttcaaaaaagttttgtcattcttgctctatgaaagt

SEQ ID NO: 333102 - DNA, 649 bp, Cannabis indica
tgtggatcaagttcttccagctttgaatagctttcttgatcttcttgggttgactttctttagcaagaaaccttgctctgataccactgttgggattttacagtcttatccctacacaagtcaactcacacacacaaaacacaaggtcaatcttgacctttaacaactcagcaagtggacataaactgtccacgtatcacacaccaaatcttgacacaatgcattcacttaaagcatttaactttaccaaaagaaaacaaagaaaattgatcaggttttcttgcctagtttctagggttagttctttatcaaatatgcatgcaaagttcaaattgaatgtgatatattatgcaggtgagagttagggaagaagagaatcaaacacagccatttatagaggtttccccttagttgatggggtagtcctcttgagctcgcctcagaaatgagctaagcccttgcactattaaattcagattcaatacaagctttcatggagctttcagctacaagattaactggtaagactattcttttctgctattgtttttctctggtttctacttctgtctctctcaagaacaatctttctcttctcacagattctcactctttctctctttttctcaactctgagttcttatctttg

SEQ ID NO: 333103 - DNA, 741 bp, Cannabis indica
ggaccgggacctagtaccagaccaagacccgcatttgaacctaggacccaactcgtgacacggccccagaatttgaaccagttttggacccgagattgggaaccgaatctggacccatggcttggaccaaacccgtagacggtgtctagatttgggacccagccctggacacgaaccgtgacaaggaaccgaacccacacccagacctgaacccaatcccaaacccaaaagtgtatttgaacccgtaccttgtgacccaaaattggaaccaaaactggaagttgactgggactcgaactaggacttagacttggaatcataactgaaattcgaccaagatctagaacagattcggaccaagacccggactcaaaatcagacttataccccaattcagatccagacctggatcccaacccaaacctgtactcgggacttgaacctgaacctgaactcagacctaaacatggaactagagtagggacacagaaccagggtcgggtcctagacccaaaccacagtctcgattccgaacccaaactcagaaatgtgacctgggacctgaactagaaccagaccgagacccgtgatagtgatccaaatcatgactcgggattcggttaacggggccttgaacagaccagtagtcggtgtcaagatttgggactcagactagggccagaacccagacaaagaaccaaacgcgaaccgtaacctagacctgggacccaaaattagaac

SEQ ID NO: 333104 - DNA, 787 bp, Cannabis indica
aaataaaaataaaattaaaaaatctcgcttctaaaaatttcagtgttttgaattttttttaaaaaaataacattttagttacttttgatgtaaataatatatcaatgaattataattactttttatttaaaaaagttagttgaagataattttttctcatatatttaattgtttgttttgatcagtcaactttaaaattaatatatataataattttcataatataactaattttattatgtttaagataatatttggtaactttataaatttttgtattaacatattataattctttattaaataaatttagtatactatatcgtaacttttaaatacaaaataacaaaagacttagagccatcttctttgatgcttaggacactaattttcttaatttaatgagctagaatgaatgaactatgtttttctttaagtaactcgattcttgtattattatatagattaatagaaaactattaccatgaatttgtaacgaatcaaagaaaactatattctagaaagaaatatgtaacaaaaatattactaaacatatgtattcttgtgtcactacatcttttctaaaattagttttttaattgttatacattgatgtataatttaatttatgtgtgaataaatgagtacaacacaatatttatgtgtagtagttgttttatattagagttagtcccacattgctcatgtgggaataaattatgatatatataagatgaatgggctactccttccattgccaattggttttgagatgaaaccccattca

SEQ ID NO: 333105 - DNA, 567 bp, Cannabis indica
atatttgcgtcaaggaagatgagtatcatccgcaaataagagatgagaaagtttttgctccatagatccacaccgtaagccatgtattctacaagcccgtttagcttcaaaaattaagcaagaaacaccttcaaaacacaataagaaaaggaagggagaaaggggatcaccttgtcgtaagcctcttttaggaacaaagtaacctttggtagagccattgataagaatggagaaggagaccaaacgaatgcaattcatgatcttagttatccacatcttatcgtaacccaagcaaatcatcatagtttccaagaagtcccactcaactctatcatacgcctttgacatatctagttttactgccattttctttccatttccaaaacgcccttttcgcatacaatggagactttcaaatccaataatggcattatcttgaataatccggcctcctatgaatgcactttggttggctgaaattactgaattcatgctttgcttcgtcctattcgctaaacactttgaaatagctttgtagataacattggttggttttatgccctaaat

SEQ ID NO: 333106 - DNA, 770 bp, Cannabis indica
ttcaattttaaaaaaaaaacaattaaaaaaatgttaccaaacaacacctatatgtatgtatacgcgatatgaatatatggatagaaataccttcagccattgattctttgagcttcactcccccacacgatctttggatctgcaaaagaaaataaaacttagctagtgtgtgtattcaggcttccaagctctctttactctctttaaatagaatttattattttcacagaatgagtgaggagttcggggaccggtaagctatatttataggtgatatattccatcagtatctgtgctacattaattgtcagaatattttgacaactaattcgggaaataaattaattagtaaatcgtaatctgatgatatttaaaagatttactcttatcctattttaatttgtgataatatacaatcagcgagtagtcagtgagataaagcaaaattaatttaaatgattttgtattaatattaaaaatattctaatattaaatgaaaatattctaataaaacacgctaggatctaatgtgctaaatcagttttctgttaaccatataagataaaaaataagagaaagatcacaacttagatggcgtttgatttactggaatgtaattgtaatggtaataggaatagtaatgaaatgtaatggtaatagtaatgggattactatttccatgtttggtttattttgtaataaacattgtaatcatttttttatttggtttagtataaaaataaaattgaataattaatatattgaccaaa

SEQ ID NO: 333107 - DNA, 690 bp, Cannabis indica
tacccctgtaccgcaaaaaaaagtaaaattaaaaagcataacagttttaacatagaggaaaatcaagcatctggaacaacaggagcagtctcatccgcgactttgctgacgacctcgttctcgacttcctcagcatccgcaccctcgacctcttcaggaaggttccctccaccaccttgggtttgagtgggcgacatagcgcgaaaagcctcggccatctcagcggcttctgctccgaggatcgagaagtcgaagtctgggactttggaaagagtggtgtaaatataatcagaaactgcctgatcatattgtttcttcccattctctttctcggcctccaagtcgcgagtcatctcctcgatcttcgcccgcgagttcttggcctcgagctcagcctgctccttagccttgcaaagttcttcaagctctttatcctttctagccgcctcttgcttcagcctcttcatgttctcctgaagctgggcattgtgcctcttcagcgagtcagcttccttcgaaccagcggcagcagcttttaggaacagggtcatcgactgcgaagccaactccacagagcgcggaacaagctcctcagaagggatcttctccgccttggacatgaactcctcgcccacgaacttctcctgcatggccaggaagtcgcgagctcggacagttggctcgatcagg

SEQ ID NO: 333108 - DNA, 548 bp, Cannabis indica
tcctggtaaaataattcaaacaactggcctcagagccatggtaattgatttactttcaagaaattcggacttaaaatgatttgtgtgtgatttggatgatttcatgttgatatgagtgttatttgatgattgattgatgtttgtgaaattttaatgaaaaataatttaattttcgttgtagaattaattttttttggatagtttgaaaaaaattaagcaattcactttttttacaaaacttgatttcgattttatttgaattagttatgatttttgaaaatttggaaaaatctgaaatcgggtgcacctttcctgtgcgcacggacacgaagcatcactcgttgtcccacgcgttcagacagcccctgtccgaaggaacacgcacatgtgtgtctgaagttcttcactccgcgcgcggaaaggctgcatgcagcctctagcgccgagttttctcagccagtccactccaggtgtgcgagttttccaatttttgcattttttcatggaattaatttccaattttttgtgtagttttgtattttaatttt

SEQ ID NO: 333109 - DNA, 460 bp, Cannabis indica
taattttttgttctcaaatgttagtcgagacagtaataggaatagcaataaacaggacgaagataatcattgtatgatcattttatttaacgacctaacctatttaaatatcataattaaatagattcttatatgcttctaagcccataagtaaacaaaaataattactgaaatgagcgttctatcatttatcgcgtttagccaagctcaaagaaaatcatcattttacttcatataagctatagattctatatctataattaacgctcctacttacttgcactattgaattctcaagatctgagtatggactagacctccgggtaaactagtaatgaacaaatcaaagaacttgtatagtataattaagctagaacttaattatcccaggattgagatattgacctaaaatcaactaagtgacatcgacttaaaaaagacataataataagtttatgat

SEQ ID NO: 333110 - DNA, 940 bp, Cannabis indica
actaacaatggattttcatcagaggtgtattccaagtcataatagggtgagttccttgaaaccctcccactacgacaaggtaccgtgactttttgtctaagaacataagtggtattgtcctcttcagttgtgtcaagacaacagaggtagtgggaccatcttatttcgaatagatgatagaacactttggaataaagaaaaattatctcctctactttactactttgtttttagatttagtcacattcatagaaaagtagtatctgttgaaacaaacactttcttatcttaatgaccatatgatggtcgacccctaatcacttagaatggctatcaaacatgccaacctttgttaacagttctagcttttcttaagtttacgatcaggacatccatgaatctagtatggtttacactaagtacacaaccattccatcattctgaaatttcctatcactagggtatttccctagaaggacttaggcaattgctagtaacaatcatgaaccttatattatcatcaatatgcaaatcgaatttttggggatgtaagtttgaatacaattcaaaaattcaatttaatgatctttgaactgcatatccaccaaatatttctccacccctatcagttcgcaagatctttaaccacttaccttaatggttttcaccattgatagaaattcatgaaatttctcaaacatttcaaatttctttccccaaggtataatctagagcgatcgtctaaagaatctaactataactcatatctacccctaaatgtaaatatgttatcccaaaattagcactctgacgtggcatcacgagaatggtgacacgtggcatctacttagagcacctggtcggatcaacatgccgagcaggatgcctcgctggcatgtccataattcaatacttaacgagccgtgtagaatgagcaaca

SEQ ID NO: 333111 - DNA, 1359 bp, Cannabis indica
ttatttttatttttattacttaaattatgtttgttgtggcttaattaggtgttctggaaggtttggttcgatttggggttgaattgagttgttggtgaagtttttagggtttcctgcaaggaactgattaatcagttctagcattcttgtagaactggttaactgtttccctaggcaaaatcctaggaaccgattttccattttcagaatctagtttaccagttctagcagttttagaaccctagttttttgtatttagtgatatttagggtattgccacgttatcgatagggaaacttctagttttaattaagtccccaaaaagtgatttagcgtatcacttaatcagttttacgaatgttataacttaggggcttgtaaatcatcgagcaacagtttccacttaggttgatcagcacacctgaattcaaaattaaggtaagattacataacaatatgcatatatgattacatgtttaacgtacatgtttatgaatacttgttagataacatatcgataatgacagttttagtgtacatagagttgcactgaatactgacagatatatatatatttgacaaagtattaattaatgctatcacatcagtacgactagagtaccgagtataggctgatattacggtaaatagtactgtcgtaagaacgttctagactcagtacgcatgagacacgggatagggttataattgggtgtatgggcatctagttataatccggtttatgttatgttatgatcatgcttttcttactgagtctgttgactcacgtatattgtttgcatgtgtaagtaagggcaaggataaagctgaacaacagtgagctcgagctaatgaagattgtacatatcggggtgattagacctggagtgttcgatcttctggtaacatgctttattttggtagtctctaggtgacaacttttgtaactaaatattttgtaaaatagttgtaaattttaaagacgggaccccatattatgttaagtttttaattaattaagtttagagttcaattaagaaaattttaaattatccatgttttcccataaaccctttgattagtaaaggtgtgcacaacattaagaaatcatgataacacatgcctattttggtagggtgtgattacgcccaaacttgtcttcacaaagcggttgttgtagtgtagcatgggtggtcgtgtccacagagagatgtcttatcaaaaagtgattagtagaactttaagcgcaaaaagtaaataaatcgttggtggtgtttgagaaaattttgaaaataaatttaaagcaaataaaattggtagaaaattataataaaaaaatgataaggtttcaagaatcac

SEQ ID NO: 333112 - DNA, 502 bp, Cannabis indica
ataagactctgagcttaattttcgactaactttttttttttttcaatataaccaacttgaagacaatttctaacacgaacagatataaaaaatataaacagttttgtcataacacatttaaatcgaatttttattaaattttattttgacaaaaaatcagttcagagtcctatttgtaccattttggaatatacatggttcattttgtcatttaacaaaacaaaaagtccaataattagtaacttttgcaaaacacaagatccaaaatgatatttaccattattattattattatatgaatattgtagcactaacatttatatttaaaggtaataagattagttacactaaaaaaaataattaaaacaatgtttcacgacataaattttttgtggataaatgtaatttttagtcacaacaaaaatttacttgtgattaaaatataatatttagatacaagttgtcactaatttattagtaacaacaagtattgtgactaaaa

SEQ ID NO: 333113 - DNA, 456 bp, Cannabis indica
ttttttttttaaataaaaagagctttttaatgattacatagggtattttcgttatgaccctctttttgcaaagacgcatgtcctctaattttggcagttgtgcggttttgaggtacatcagtattaaatgaccatcttttccacttgtgctttgaattatgtctgtaggatcaaacctttctctgatctgacgaaaccaatatcatgagtataaagtaagaaaaaaagagccacctttgcattatttccttcattttagaaagtctgaaaaactcttaagcttctttgccaagaatcaccattgagtttgtctgaggacttacatgccatctctgtccttgaccttttttctacgagtttcatccgacttcatcctctcaaaatgatcctaaccacattcaaagatttgcagacggagtaactgttgggttttgtgccctaaataaaacccattac

SEQ ID NO: 333114 - DNA, 659 bp, Cannabis indica
agagaacaacagaaaacattttctcccccacacttactttctcaccaccattcaactattttttcatttggacacaactcgttaagaatgttagcataatgaggctcttctttgattaactcaagacatggaatttttacctcaacttttagaagagtttcaggaatctccttgatgggcacctctttcttagattttttcaatctacttggaaaaggttgatgagtgacataagttggtacaattggtttgtatgacttctttagtgatggaagaccaactaaagtaggagattcaatctttggtggagatgactcttcaaaggatgaattgtcgactcctttagttagaatcaaatcattaacttcttggtgtggtggtaattcaagttgtgtaccactttggatagtgattccactgacattctctataaggttactctccacttgtgaaaggcatagagtttgaacattgaatttcagactcactcatagatgtttccattgactccacaagattctctaacttttgtagagattgttgaaggctctgcatagtttcaagacaactttgttgaaactgcaaggaattaactgctaacatttcaatcagctcagcagtagttggctttccactatatggtgcaacatgagtaggtt

SEQ ID NO: 333115 - DNA, 665 bp, Cannabis indica
attacaattaatagtaattaatagaaaaaatttgattgaattggacattcatatatataatatttcataacactcttcattggatgtccattataactgtcttattaaaaatactgccagaaaacttaataggacggaaattcggtcaaggaaaaaatagtgcagtatgaattaactccccctatttagacattcgtggatatcttctaatcgatgaagtccaatcttgcgaaccatcttctcgaatgttgatgttgataatgactttgtgaataagtctgcaagattgacacttgattgaatatgttggacaccaatattcattctcttgaaatgtattaactgaagaattgtgttttcattatatctccttcaatgtaccctctttttagttgagcgatgcaatagtattatcttattagagaattgttggtattgatacttatttattaagtgtaatccatatgtttccctgctattttggcaagattggagactgtggagagggagtagattgctttgagggaaggccagaccgctctgttaagaggacagacagagattatgggtcatttgaagaccataatgagactcctgcaagatcctagaaggccgacaccagatacacagccacagccacaaccataaccacaagaagagcctca

SEQ ID NO: 333116 - DNA, 664 bp, Cannabis indica
ggctcttggagtaagtatctatcgttgatagaatttttgtacaataactgttatcaaagtactatagggatggctccctatcaactgttataggaaagaaaatgtagatctcccatccactgggtccagagtcagtacctaggtccagagtcagtacaacggaccaatgaggcaattgagaagattaaagctagaatgcttgcctcacagagtaggcaaaagagttatgcagatccgaaacgtagagatgttgagttccaagtaggggatcacatgtttgtacgagtatctccaatgaaggggatcaagtgtttcgagaaaagaggcaagttatgccctaagtttacaggaccttttgagatcctcaagaaggttggacaagtggcatatcagttagctttgcctctagctctttcagcagttcacagcgtatttcatgtctcgatgttgagaaaatacatttcagaccatgctcatatacttagttatgagaaccttgagctgcagccagatatgttatacgaagaacaacaattacaaatccttgacagaaaggacaaggtggaggaagtcacctgggagctagaatcagacatgagagcgcaatacctagagttgttcaggttagatttcgaggacgaaatccgttttaagggggggtata

SEQ ID NO: 333117 - DNA, 570 bp, Cannabis indica
aactttatgtgtttatttcattgttttagaattcatattaggatgtttatgaaacatactcggtagtaaatctagatcctggtaaaatatttccaacaataccaacaccgagtcacaagatacttcaacaaaaaagtcaagaaaagactattcaatgttggagacatggtgttaagatgagtctctgcaaatacgagagatgcattagcaggattgttcaacccgaactgggagggtccatatgtcatcgaaatagtagttggaggcgaagtctactaattggctcgacttgatggcttgctaataaagaactactggaatgtagaacatttcgaccctactatcaataaataaatgatgtaactcacattactggtgtaaactttaatttttagttatgaataaaaggaatcatttatagtaataaattacaaagtttcattctttaaaaattacttaagggacatttatgtatgattaaccagaattcatatggaaatacattgtataatgcaaacccgtcattttaattttttttttaaattcgaaggttctcgactaaacctcttt

SEQ ID NO: 333118 - DNA, 623 bp, Cannabis indica
cacagattcaataaatggccacttaactctataatacgccttactcatatcaagtttgagcgccataaaaccatcctttcccaatcttttcctttttaagtaatgcattatctcaaaagacaccatgatattgtccggaatcaatcaacctggcaaaaaagcactttgagtctctgagataacatcaggcaaaactactttcaatcgattagctagaaccttggatattactttgtacaggacattacatagtgatataggcctaagatcagtcataaactccgcgttcttctttttaagaataagaacaatattagtttcattcaaagaaggaggaaaataccctgagtcaaagaacgaccgcaccaacaaccttacatcgtctcctacaaccggccacaatttttgaaaaaatcccggtgtcataccatccggtcccggggacttatcaggatgcatctgaaacaacgctctccttatctcctcatcagaaatcggctcaagcaacatagtgttctgagcttgcgacacaacacctgacaccgtacccacaacctcttgaacttccaccaaacccggagtaaaaagctgcccaaaataagtagtcatcaagtttggaagac

SEQ ID NO: 333119 - DNA, 546 bp, Cannabis indica
aaattttgtttatattttataaataatttttatatatataaatttattaaatatttgattaatatttataatgctattgaatgtttattatgataatagtccaatatattcaacattttattagaagttcataaaaaattttaaaaataaaatacttatttttttttttaaataaacactcatgtttaatagttatttaaaattgtgtttaaaaaaataaataaaactataattaaatatgacattgtgtatagacattatgtttatattattattgataatgtttattaatcattaatttaatataattattataattttttttggtgataaaattattgatataatgtgtttattaaaatttattatataattttataaataaaacataaatatttattatttatatatatgtttgatgtatatatgttgattatttattttttaatatataatttatatataaaattaagaatatatttaagggtaaataccattttagaccctttgttttacaaaagttaccaattggaccctgtgttttgt

SEQ ID NO: 333120 - DNA, 553 bp, Cannabis indica
atgtgtagttatgagagattgaatcttggaggtcttaagagtttttaaaaactttactgttacactatgcattagaactattatttttataatagttaatctatatataggggtcccaaaatttaattttgtcttaagccccatataccttagaaccggccctgcttggaagtttgagaaatgagaaaattacaaagttaaaaaggcttaccgttatttaaaagagctcaagggtaggtggtctaaaaataatgctactggttttggaggaagtagtgaaatttaaaatttctcccgaaagtcagtaatttggtatgacaagcagtttttggtgcatttcttacatgtgttcaactatctaagagacatgtccctctttgttctatttgtcaaatctacagtacacatgatgaaactatttttcatgctcttgttaggtgttcggctcgggcttgttggaaccgctcgaccatcacaatgttagcccaagatatgtttccaagagggggggggggtgaattggaaatttatactaatttcggtaaatcaaaac

SEQ ID NO: 333121 - DNA, 934 bp, Cannabis indica
aaagtccattatatcagatagaaattcgaagtttaacataaaattttggtagagtctccagcgagccatgggtaccaagatgagacaacttttcatcctcagactaatgagcagtctaagaggacgattcagatacttgaggatatgttgcgagcctgtgtgatggattttgaaggctcctagagcaagtacttaccatcaatagaattttcatacagcaacagctatccgagtactatagggatggctccctatgagatgttgtatggtagaaaatgtagatctccaattcactgggatgaaactggagaaaggaaatatttaggtcaaaaatcggtacaatgaaccaatgaagctatagaaaagatcaagagtagaatgctttcctctcagagtaggcaaaagggttatgcaggttcgaaatgcaggaatgtagaatttcaagtaggagatcatgtattcctacgagtgtctccaatgaaggggattagatgatttgggcaaaagggcaagttatgccataggtttatagagcctttagaaatcctcaagaaagttggattggtagcttactgtctagcctccaccccagtactttcagaagtccataacgtatttcatgtttctatgttacagaaatacgtttcggatcccactcatgtgctgagttatgaaaacttagagcttcagccagacttatcatacgaagagcaactagttcagattttagacaaaaaagataaagtccttcgaaacaagaccatagctgtaatgaccactttagtaaattggattagtaaaggcaattagcactaatttctattatttttataattatttacgaattgaattatttgtggacccaaatattagaaatgggcatttgagttataatttctcgattccgaagattttattaaactctaggggtatt

SEQ ID NO: 333122 - DNA, 673 bp, Cannabis indica
aatacttcatcacatgcatggtctttcagtgtacatatcatcattgtaatgcctgccggccaatatagatatatcaactcttggattttgctattgtattctggaaaaccaaaatattcctctcacaaactattgtcgttttcaaagggggtcagaaggcaaaggtaggcatgtgtgtcaataaatattcctttgtgatccccaaaaagaattttatgtatcttatgttacatgtgagtgagtttatatgaatgctgaacaaatcaaaaccctagatggaactgtaagacgacactaagaggatcttcaatactcaatagtataaagttgtttaaaatctttacattatttttttgaagaaaaaaaatctttacattatttaaaaatataataaataggaaaattaactaactttttttctttttaaatttatggtttaagttgctcggtagttgctatggtgatttctatatgaattactatatagattttaattgcgatttaagttactccattagttgttaagtggatttctctaaaaaaaaaaaatataataaaaactactttaaaatgtaagaataaaaaaaatctattttattatctattttttatattatttttaacaaccttctaaaaatatgtcaatattttctactctccaaattggcaacca

SEQ ID NO: 333123 - DNA, 1785 bp, Cannabis indica
ccaccaaactgggaagagttatatgacgcgatgcaagagactattcggcagcaaagtgaacaaatttgagaattgagggagtagcgagctcagcatgctctaaaccctaaccctgatcctatggcacctctggtagtgcaaccggatgcaggaaatcgtctggaactattgtatgagcggtttaggaagcagaacccgccagtgtttgagggtggtgctgatccactcaaagcggagtagtggatgagtatgataacatccacttttgattttatgctggtcgagaataatgattgggtcagatgtgccatttaaatgttgcgtgaagatgcccgtacttggtggcagatcgtgtctcagggtcatgacctagaatgctttccggaccttgttttatgtgaagtactataatgagtctattcaggcatcaaatgtagaagagtttatacgtttgactcagggcagtatgacagtaatagaatatgccactaagttcgatcgagtggtaaaatttgctttagacaaaatggctactaaagctgctagaaaatcaaagtttattcgaggattggatgaacacattgcacgagatgtgatagttgctgctaaacaacctggggttgttcggacttatgcccagatagttgagttggccctagctactgagggtgcagagcagaacgaaagaaaaatattgcgagaagggattcatggaagcagatttctagtgttggttttggtaggggtgttgacctgggtgatcgcaagaaaaggcctaatgaatcaacaactataggctcaaacaaaaggttccagggcaaccagggtttccgtcgtggtgggaacaaaaattggtagacttttcctgaatgtccgagatgtaaaaggcgccaccaaggcgagtgtcaggccagggcttgttttcactgtggggtagtgggtcacatgaagaggaattacccacagctgctgcgaccagaacaaaagaaagatgacacacctgctcctgcccgggtgtttgccctaactcaggccgaggttgatgtcggcccttccattgtgacaggtcagctttctattgcttgcattttattgattgttttgattgactctggtgcgacacattcttatattttaagtagaatacttgagaaattgaataggcctagtgatgtactagttagaggcttcagaactttgctgcctactggagagttggttatctccaacaggtgggtaagatcccttccggtatttgtggaaggaagggagttatcagttgatctgatagaactgaatttggaggactttgatgttattttgggtatggattggcttgcaaaatacaacgctactattaattgcaaaagaaagaatgtaactttttagcctgagggcgatgacccttttgtatttgtgggtaagatgcagggatcccgaattctcttaatctcagcgcgtaaggcaagaaatttattgtgtgaggggtgtattagtaattttttctcgaactttgacatataccaaatcatgcccttgaacttttttgaccgttaaaaatttcccccgaactattgagattgttaaatttaaggacttttgtctaattttagtaaaaaaattttgacatggatgaaagttcagggggcatgatttagtacatatcaaagtttgagggacatgatttagtagatatcaaagtctagggagcataatttagtacataaacaattactgaaatagtaaaattgaatgaaattcgacaaaagtccttaaatttaacaa

SEQ ID NO: 333124 - DNA, 939 bp, Cannabis indica
tggcaaaagaaaccagaggaaaaagcataaatggaggagatggcgtactacacgatcatcatgcatctatcaaacagtgtttgaagaaaactcaccttagagaagacggcaaaaggagtttagaataaattggaagaattatacttaaagccatcaattgctagcaagattaattttttagaaaggctatacagttttagaatgatttctttcctttctttaaatgagaatattgatagatttaatgagattattgtaggtttggctaacaataaatcataaggttgatgaagaaagctaggccatcatcttgttgagatcacttccaatcacatatcaagaagtcaaggatgctatcaaatatggcagggatgttatcgcgttggaagatgtacttgcggcactaaaatcgaaagattttgagctacaattgaagaaggaatacaagaaagaagaagtgtacttggcaagaggatgataccaagaaactgagttcaaagattaaacaccatcactttcaatcaagatctaagtcaagagaaaaggacacaatgaagtgttacttttgtggaaagtctggacacttgcaaagatcttgcaagaagtacaaggagaaacaaggcttcaacaagtctcataatggaaataggaaggaccttcggtaccatcaccgcaggaaggattatactgcaatcgcgaaagatagtgacggctgctccacagacgaagaattattctccatctcagaatcttctatgaacagggagtggtttcttgactctgaatgcacttatcatatgtgtccgaaccgagagtcatttttttattataagtcagttgatagaggtaaagttataatggataataatcattcatgtagggtcattggaattgggaaggtggccatcattcagtatgatggcagaatcaaggtgttga

SEQ ID NO: 333125 - DNA, 1256 bp, Cannabis indica
tgctcaaccttggccttgcccatacctacccatgcaacaatatctgtgagtcgacagactcagtaagaaaagcataaataataacataacaataacccagattataatcaggcacccatacacccaaccataaccctaactgagtcaggaacgttctcgagaaagtatgactaattacaaatccagcctatactcagtactctaatcgtacttatgtggtagcagataactcatactatctgatagtctaacatatatatatgttggcatctcggtgcaactctatgtacacctcactgatgccatgatatgctaatttgatagatataaatttgcctattctgacggcaactaacatgtacactaaacatgtatacatatatgcaaccattatactaatattagtggaacaactgctcgacgaattacaggccctaaatcatattattcgtaaaattggtgagcaacacgctaaatcactttctaggaacttaaacttgaaactaaaagtttccctattgctatcgataaaaaacatggcaataccctaaaaataaggaatcaatcaaccaaagctctcaaaataacatgaatcgacaacacgaaaaattcaaaaaattggtttctaatccaattaaccggttttacagtgcctgtgaaattggttaactggtttgcgccaggtaacccaaaataattcgaaagcttgaccaattcgtatccaaaccaaaccaaaacttccagacctgcttaatataccctaaagaacatatttctagcagcaaaacaacctaacatgcttagaatcaaaaattgtcattgaagaccaaagtttgagttctaaaactctaacagcccaatcaagccataacctagcctcaaattatctcaattaacattattttaacttctgaatactcaaacaaaatcaaaacataactacagttgttctaagttcaaaatcttgtataaaactttaacttagaacttaatatatcatacacagagagacttaagggttttaccttggattaatacactagaatcttgctagaaatccctgaactgagcaaaaaaactctcaaaccctagttggttctaggaaaattgagagagatagagagaacggtttgaagaaagagaaagagttatgtgtttttttttctaattttttaataatagaaaatactagggtattatctaactaatataggatatattcagatgttgtcgagtgaatttcgcaacaccagatt

SEQ ID NO: 333126 - DNA, 717 bp, Cannabis indica
cattgattgatacggcgcattaatggtgtcagacggatactcaaacgtttccaccgcctttattgcaactcaatctggcccgttgatctttgggtatttgaatcgtgcgttcccccaccgttcgattggtaggtggtgacgcctgttcctcatgcacttttgcctataaaagccaccatctttccttcatttcggttactttccattccttgccatttttgctcgaatttcccagagagaaaattcttcaaaaacagcacgaaccttctgaacactttgccattttttcccagttttccttgcttgctgttatcagtccttctcgtctttactcgactaaaatcaggacccccagttcaacacttcactgtaagtttcttgcatcctttggtaatgacatgcttttacttgctttgtttgttttttctgggttcgcattttgagatttctgggcatgcaagtgtttaggttcttcatgtattctgttttgtgtttactgctttagttgtaggatcgccattatcatgcctctgttattatcgtgcattttcgttgaagaaaaccatatgttcttcgttcaacggttgcttagggcatagaatggggtctttttctttctgttccccttactgtgtaaaaccaccttctgcgattttactgcacccgacacttgttcagggaatctttctagggtttcccatgtgacacgtgtccgga

SEQ ID NO: 333127 - DNA, 767 bp, Cannabis indica
ggccggtcatgatgtctttaaaaaaggcctgatggccgaataagatatatataaaaaagaaagataaaaagagaagtatctaaacagctggagtcctagggtctcggttcggatcttctgggccgataggagctggaggatctattgtctgaacggaaggtacctcaacattctggccagaaaaagaagcagtcgtattgggttcaatataagccacttgagaagcacagtactcgagatacatgtctttggcctcgcccaggtaatcgaaatttgcctgggggttaaccttccaaaagtcataaaaaatctcgagaccaactatctctaaggcatgtactttttctttctgcctcgccaccttcgacttgtgtttctcaatctcagctgtaagctactcctccttggtcttcttctcctcttccagccgatggaagacaatccgaagaactcccctttcctcttgaaggctattcacttctgtcgacagggtgccgatggtagcttcaagctggtcagaagcctcgaggtccttagtcaattcgactattttcttctcaacactaaaaagcctcttgttgacctcacctagctccaagttccaccctggcgtcatcagcgtccttcctggccaagtccacctccgccctcatggtgttggacatagcagcgttcttggaggcgaaagacttggctcgagaataagtgtaagccaactttagaccagcctacaaagagaaaaaactttagaatctgagccaagtaaa

SEQ ID NO: 333128 - DNA, 643 bp, Cannabis indica
aaaacacttgcagaaagacagaataaacatactatataataatatagtccataagcacaatataccataaaattataattttacccttctctagtcaaaattacaaaaaatgcccctgacacactaacgggatcttaaaatgcaataaatcataataatttcacattataaatcatgtaataatataatttctcattaataaataattaagctagttagggatgctaatctagttattaaaccttagggtattacactgatgcttaccacgtgtacacaataagaacaggaaagtaaagagacacaatagttttgtagagactcaacctccttagttagcggttaatgacctactcccctttctgttgtattaataccggagataataccacttagatcacaaaggttgtggaatctaaagtagcactcttaggattacaatatgagaatcaagtaagaaaatctcgagtgagggagacgccttgggcatgtataacatagggagagagagagttagggttttggacttagagcttgaaagcttttggagagctagagacatagaaaaattagggttaggctaatgctctttatataggagagcttacatgaagataataacctatttgttgggttttatgcc

SEQ ID NO: 333129 - DNA, 746 bp, Cannabis indica
taagatcaaggagaaagattccttttcttatagctcttacaacagtatctctgaatgtataattcttagataatatatttaaggtatagtcttagctcaactgttttttgacccatcccctgcctagtgaacatacatcaatatttatagggctaggaggcttggggaggatgagtttcccctctctttacaatgcgtataaatagaaagattgtgggatcaatgctgaatgcaaggatcgtgggattgaggttgaatacactgatagcaggatcgtgtgtatgccatatccacataaattgatccctgagttatagggattatgttgatgactcacgatgcgaaagcttaattcgctaactattggtcgctctgcgcgaattgttgaatatcttgctctgagcatgccatcgaggtatcctgctaggactatacttcctgagcagatgttccaagtggactccacatgtcaccattcacgtgatgccacgtcagagtgccaaaattggcataatagggattatagcaatggataattatagcgcgtctatatctcggaacatatagagcgttctatataactgagagtgcaattcaaagttctatgcgtggatgcaacaacgaattaataagtcagtgaatttacctggtaagttcttggtctgcttattggaagcttggatatataggcccatggtccccatactagttgagacaatactaaaagtaatacctcaatcatagtg

SEQ ID NO: 333130 - DNA, 869 bp, Cannabis indica
aatttttcaaaattttgcatgattacaacgtaaataactatgaaagaaataaactaaaaaattatcttaataccgaaataaatataaaaattattaatcggtgtaccattgcacccctttggggatgtatcataaaaaactctccaatatttattttttttttttcttttgtaatgaaaccattggatttcttaatcaaaagttaagagaaaagtgttcctaggggaaataccaagccgccacaaaagcaacatccttttaataatacttttttttattcattattataacacaattaatattctatttttattaataaaataatatgaaaatatcatggataaaatgaaccaatattctgaaagagtaaattgcatcttaattttcacatcatcatattttaatactcaattccttatcaacctttaataaagtgttcctaccaattagggcaaaaaccaagccgccacaaaagaaattgcatcctttataatatttttttataacataattaatattctatttaattatatagttgtagtaagttgagtacttaggtagcgtttgattagaaagaataaaaataggaatagaatgcaatcaaatttaaaatctataaaaaattgataaaaaaattattaaattttttctcatctttacattagaaatagaaaagtcatttcactaaataatggaaaagtcattctatattggaattatattctaatatttttaaatgcatccaaataaaaaaaatagaattaaaactgtttcatttcaattccaatacattttattaccttcaaccaaacgataccttaagacaggtcgactctaggcatagacgagctaggcttgtgctcttaaga

SEQ ID NO: 333131 - DNA, 551 bp, Cannabis indica
acgtatccaatcttaacatattatataccttagctcataattgtaatttaagtaactccagatatggaaagctatatcatataccatatatttgtactaaacgtacatatatgtatggatcacaaccctgacatcatactcatagcacaatcatagtaataacatataataattatttcaatcatatcacgtctttaccataatgtggcgtatcatatccactacatacacaacctgggccgaactggccctacaataacctgggtacatttagcctaccattgctatacaataaggtatctctacattcaacagcactgtcgatgtatcataccttaccataacaatgtcatacacaaatcagacaaatataggatagtgtacctctacattcaacgaccttaaatcctgtatcataccccaccataacaatttcatacacgacttagaaaaaatgtagggtagcgtatctctacattcaacggtcttaccatgtatcataccccaccatggtccctcactttaccggagatgttagcatacaacttaca

SEQ ID NO: 333132 - DNA, 874 bp, Cannabis indica
ttctaccaatattaaatagcttaggtttaagaaaataattttagcccaataaatataattagtcaaatttcccttttaaaaggggttttttttaatccgtgagctaggtggaccctaggcacaggcctagtccacttatgcagagagtctagtataattttatataattttggaatttttataaaaatactggattttgagcaaaaatttacaattttactgtcacgcataattttttacaaaaatactgtctttttataaaataaccgtaaaacaataaaacataacaattaaaacaatagtgtaacaactaaaaaataactgtggaataaccgtaaaaatttaacacagtacatagtataaaacttatacagtatttttgaaaaaaaaaaatcagttttttgaaaaagaattccgctccacagtgaaaaattaaaaaatttaaaattttagtaactagtgtaaaatttttttataattttaagacgtaaatccttagtttaaaaataaaaaataaaaattggcagcccatgataaaaggttatctcccacacgtaaactgttaattagtatgctttatttattttattttttcattcgtgatggaaagttgcaatttgatttgatgattgttaggactcaaatctaattaactgatttattgagcctgcctttcaagggtagcatagcagtgctctaattctatagactccttttattatatgttaagtacacttttttttttttgctttaacattatgttgagttgagtggactcgagggttgaaattggaagtaagtaatgataaacaaaaggaaaatttagatggtatattaacttttgctatttttttataaaaatactgtcagacgg

SEQ ID NO: 333133 - DNA, 979 bp, Cannabis indica
aaatataattaaataaatattataaatgaaaattttatttgataattattgtaaatattaaataaatagttttggcatttatagggttgaagttgaaaaaagtggtatttgtgaaaaatagataaaataattgagaaaaatggcaaaaaccaaactagtgtagggcccactatgttgccggccactaggtgccaattttactctatttttatcaattttttattccaaataattgaaccttaaccctagtggaaattagtataaatggaaggctatggtctcattatccaactaatgcctccaaagctaaaaacctattttctctctaggattacgagacctcttccttcttcttcctctaattcgaaaataccatagtctttcttcacaaaataaaattcagccattagtgattgagtgcatgcccacacataacaagtgagtcctcaatcataatatgtaagactatgaagaatccaaacaacaagaaggagaatcgggctcaaatcttggtgataccctgctacagaaaggatacaagggttagagatctgagcgaaaggagtcatttaattttgctgtaaccactgtaaggtttctcataccttttatgtgtttattttcatcattttagaaattcatattaggatattaaaaacatacttgttagttattctagatcctggtaaaatatattccattaataactgggttggatccatagatcatcagtccttcatggtgaagaattagcaacttatccaggaaagatcccatccagcatggtccttatccgaaagacatgaaatcatgtaaccgaaagaaacctctagcgagtatctagaagcccaacatagtttcctattttttgccaaatcgcgcgagatcagagattgccttccaatattctcggatagaagatcatatctctcaaattaaggaaagatgataattggcaatcaagtaattaacatgtcat

SEQ ID NO: 333134 - DNA, 820 bp, Cannabis indica
aaagaagaaggtttagaagagggctagaactgctgatgctactcttcctgcttaagactttggtagggagaggtctaacactgctggtgctgatgaaagatctctgattgacctttttctagatgaaattaaacatggtactccaaactcgagttcagattttttggagcaatggggtgagcaaagctctcggattcttgctcatagtgatatcttaatttgtgccaaggctgagagcatcccgttccagtggttagttagttccaagcctctgcacatcattgcccaaaggtgcttcaccgacatcttcggggtaactattttgtcttgtctccttatagcttaactttcttttattttatcatcacctgacacttttttcatgtcttcaggcttgggttaattatgcctacactatggataacgaacacaagaaaatggttaagcttgttgagcaggtaggggtcacaaaagactgtactgtcgctacgaatgaccaagtgactgctttgaaggagaagattgattctcttaagagtgaaatgtctaaactctaagaagtggctagtggtgccaagacccgagagagtaatttgaagaagaacttggcgactgctcaaaagaagacttatgatcatgaagagtattctcgtaatgcactagatgagaaaacggttgtggctaatgatctgagagaccaagtcaatgtcttaaagaaaagagtaactaccctcggggatcaggctcttcttgatgttaccttctacaatggcttgtgttttgatgccatatatgctgcttgggctaccaatggtggagc

SEQ ID NO: 333135 - DNA, 1738 bp, Cannabis indica
actcattgaagctgaaggccggtacccactaatagtaaagctcacttattccctaatcctagcaacaagaaggctaaggccttacttctaggctcatcctgttcaagtgtacaccgaccaaccactacatcaagtattgcaaaaaacctgatgcctctggacggttgcttaaatgggcggtggagttgggctagtatgaaatcatatttcagccccaaacaacgattaaggggcagactttagcaaattttgtagttaagtgtacgggcaaagaagagagcaatttaaaaaaaaaacctggagccaatacaggaacctcagctgagcaacagcaaagacgaaccaacctggaaactccatgtagatgggtcggctacagatcaactgtttggcgtagggattgcccttgtcatacctagggggcaacatctgcacggagcagtcaaattcgggtttaaagcatccaacaatgaagccaaatatgaagtccttattgccggcctaaaacttgctcgggaattgcacgccgaacacattaagatctgtagtgactcacagttagtggtaaatcatgtgtctggggagtacgaggctcgggggaaaaatgatagcctatctaagcaaaatacacgatctgctcatacaattcaaaagctatgctctcaagaaaattctaagggaagaaaacacaactgcagatgcactagcccgacttgcgagcagcaacataaatgataaggctaatatccccatccaattccttaaaaaacctagtatcggtggcacggaggagattgaaatgattgacacatccccaaactggatgatgccaatagcagcctacctcaatactggggagctcccaaatgatagaaacgaagctcgaaaaatgaggagaaaggccatacggtacatcattgtagagggagttatgtatagaggaggattctccatgccactactcaaatgtgttacacaagaagaagcggcatgacttctgtccgaggtacatgatggattctgcggcaaccatgcggctgggcagagtttatccaagaaaattctaagccaaggttatttctgaccgaccaggattgaagactccaaggcctacgttaagaaatgtgataaattctagagattttcaaagataccttgtgcaccacccaacaaactaactcaaatgcaaagtccttggcctttcgacatttggggaatcgacttgatcggacagttgcccaagggcaaaggcggagtatagtgcacagtggttgcagttgattactttaccaaatggatggaagctgagttgttgtccaccattacctctaagaaagtgcaagacttcattatgaaaatcataatttttcgattcgaattaccgtgcaagatagtctcggacaatggcaaatagtttgatagtcggtccttcactaatttttgtgcaaaatcatgggatcataaaaagtttctctgcagtggcacatccccaagcaaatggtcaagtcaaagcagtcaaaaagacactcaaagatactctaaagaaacgacttgaagatgctaaaggaaactggtcaaaggaactccctaaagtattatgttcgtaccgcacaattgataaaacagcgaccggacagactccatttgccattgcatatggttatgaagctatgctgcccgtagaactggaacctctgtcccacagaagattgacatataaccaagaggttaatcatgc

SEQ ID NO: 333136 - DNA, 637 bp, Cannabis indica
gggaagatgtctgtggccgagtatactctggagtttgatcggttgtcaaaatttgttgtattcagtatgttcgaggactgaatgctacaattagtcgggacttgaaaattaccacatcacatgacactctgtataagagagtggcagacttggccttaattgctgaggaggctgagcagcaagtaatgaaagagcagactgcaaaggatgccgtcacgacatcaaatcctcctgccaatggtaatatcagtaaggggaccgacagtggcaaccctgagaacaaacggaaggctgaggcttctggaggatcagggggaaatagaaagttttggggaaacagaggtggccgtcaaggtcgcgggtcctcattccgatcatatcctgagtgtcctaaatgcaagaaacaccatcctggtgagtgtcgagctaaggcatgtttccaatgtggcgtggtgggccactttattagggatttccctcaggccaagaaagaggagcctaagaagaatactgcatagaaccctgggtgacttttcaccatgactcaggctgacgctgatgctagtccgtctgttgtgagaggtcagttgtctattaatggttgttcttatactgtgttgtttgattcaggagctac

SEQ ID NO: 333137 - DNA, 706 bp, Cannabis indica
tgacaggtggtgaaaaattatcaaggtatggtagtgaccctgttgttgatccccatcagtataggagtattgtaggtgctctacaatatgctgtaataactagacccgagatagcatatgccgtaaacaaagtctctcaattcatgcacaaccccttggaatctcatttgaaagttgtcaaaaagattcttaggtaggaactttggattatggtttgcacatcaggccttgctccaatctcactcttactggtttttgtgatgcggattgggcatctgatcctgatgatcgcagatccacctctggtttctgcttatttcttggttctaatcttgtatcatggagttccaagaaacaaaaggctgtctccaggtctagtacagaagccgaatacaggagcttagcaaatgccactgctgaactcgtatggctgcaatcactgctagctgaaattggtatttctaagctcccaactcctacgatatggtgtgataaccaaagtacggttctaatgtctacaaatcccgtacttaattcttgtacaaagcacatagagttggatttgtattttgtgcgtgaaaggattatcaatcgacaactctttgtcaaacacacaccagctcaacatcaaatagccgacattctaacaaaagcattatctacaccaagattacactgttgagagataaactgagcttggcttcat

SEQ ID NO: 333138 - DNA, 572 bp, Cannabis indica
accctctgattcttgattctccttcgtctcttcttcaggtttagaatccgatgaagaaacaaaaggggaattttctgtgagacttttagcctttgaagatgaagccaccatcttttttcctttggaggctcctttgggtagaaccacttcggggttctttggtgtggataccttggacctggttcgagaactcaccgtgggcaagggcaatattgctttctcgacatttggagcaccattcaaagaagaagacttcgacaatgagtgattagattaatgagattcatcatgatcaccaagcccaggctttggggtagcaatcagagagacaatgatcagaggagaactgagattgtaagtcgactttcgagcttgggattttgacttctcgacagtttttgtaggagcagacgaagacccaagaattccggtcactagaacaggtggcgcaggtggggtgatcggagaagcagaggcagaaccatgagaaggcctcttggaaggttgagcattttttgtcttggccatttttctttgaaaccctagaaagcaaacacactctcaaacttgaa

SEQ ID NO: 333139 - DNA, 869 bp, Cannabis indica
gtaaaataaatttccaacacaagtttggttccaggatcgaatttggggcctaggtcccccttctaggttcggatcctaggtcccggtccaggtccaagtttaggtttgggtttggatcccgagtttgggtccaagtctaggtcactgtatgggttcaggttttagtctggttccaggtcctggtctgagtcctagttccttctcgagtttgagtctggattgttctcttggttctaatcaaattctaggtcccagaggaggttttggtgtgggttccggtccgagtttaggtcctgagtctaggtctaggatttagggttttgggtttagtgtttagggatttaggggtatgtgtaaaaatttaaggatttagggtttaaggtttagggtttagggtttaagggaccgcttcaagtctcggcttcaatttcgggtcacatggtatgatttaaggtttgggtgttggtctggtcaaagtccttgtctgggtctaggtccgtgtttgggttcaggtccgggtcttggtcacaaatccaaactccaatctcatgtttagtctagtttgacttcttgtatggattcgggttctggtccgggtctgggtcttggtccaggtccgattccttgatttaggcaccgattatgggttaagcctcgggtcttgggtcctgggtcccaagtccaaatgcagatccttgtctagttctagctcatgtcttgggtcatggtttgggtgtcaggtggatgtttgcgtctaggtttgggtcttgggtcctgagtcatggatccaagtcccaaatttaggcaggatcttaagtctcggtccgtgttcagtactggtccttgtcttgggtcttggcttggtctag

SEQ ID NO: 333140 - DNA, 1018 bp, Cannabis indica
agaattaactttagcatctaatccaatccaattgtaattggattggatttgatcggttcaattagattggattgaatgttgcccacccctaattgggttggtttttgaagctgagacttctcctcaatactgtggaatctgattatttatatttggtctctgttttctaggcatttatctttttgcaatgacctagatttcttgttagaggatttttatagcttactctccagtttttttgaggtatccctatttatggcatctcatgaattagttgcgcattcacttggggtggatagtaaactagtttggctggattttttccaccatttgatgtattcaacttcaattattgtcaatataattgttctttgttcaaaaaaaaaaatctctgccttctcgaaatacctatttaaagacctcggacgacctttaggaagtgtgtctagaatgtttgaccggaccttgtaagtccacgaggtcggaagatattgtctccaacctttgtttagctcccagacgaggcgactgttctgtaagggtaatttgcagctaaactacatgaactttaagatttggtacgatcaacccctttacgatgttttgaattttaaagtgtatttgttgaagtaaagtaatgacatcttttgtaatattttaaaggggatccccaaacttaaacgattatgccaaaatattctatgtttcaaattaattagtaaaattttaattaaatcgcaaattttacttaaactgttattttattattataaactaatttacaaaagcacacacgtggcgaccctaagagtcagggtgttacattagattaatttagttaaattgtttattgaacacgtgaatatgataattttttgtaaaaagttatgtaaaaatattaatatatttaatctaaaaattctacaatgtaccttattaaaagggatatacgaatgtactcttctctttttttgtattcaaaataatctttagtcaattttttttttcatggtcatgt

SEQ ID NO: 333141 - DNA, 884 bp, Cannabis indica
gttcgggtcttctgggccggtaggagttggacgatctgttgttttaacgggagatacatcagcattttggccggaggtagaagtagttgccccggtttcaccataagccacttgggaagcgcagaattcaaggtacatgtccttagcatcacccaaatactcgaagttttcctgaggattagccttccaaaagtcgtagaagagctcaaggccgactgtctccaaggcatgaactttctctttcagcttcgtcacctcggccgtaagctcctcctccttagccttcttctcctcctccacccgatgaaggactgctcaaagagatgtcctctcatcttgaagactgttcacttctgcgaataaagtctggatggtatcctcaagtcgggcagaagcctcaagatccttagtcagctcagctattttcttctgggcagtaaaaaagcttcttgttggcttcacccaactccatccgaacagctctgagttcctccctgccgtcttcagcatccttcctggccatgtccacctctgccctcatggtattggaaaaagccgtgttcttggaagaagcagacttagcccgggagtaggtgtaggccagcttcaaaccggcctgcatagagtaaaaacttgaatatttgagccaagtaaagaggattaaaagaaatcgtcaagaaagacttacccttgtgaactccttcaagactcctctcgtgaactgctccagagaagagtcactgtcaacactggccagctactcactaacctcaggaaccaaccagttcatatagtgagcgagcatctccttgcctttctggcctccggaagctcagcaaaggtggagcagaggtccgcaccagcttagacccacctctcagttg

SEQ ID NO: 333142 - DNA, 665 bp, Cannabis indica
ttattgcctaatggtaggacaactcattcaagatttcatattcctttggatgttacaacatagtcaacttgtgaaattcgtcaaggtaccctattagctagacttcttatgaaaacttcattgatcatttgggatgaagcgcctatggcaaataaattctattttgaagctttagataagaccttaagagatattctaagaacaaggtttgaaagtagctctaaaaaaccttttggaggacttacaatagtatgcgatggtgattttcgacaaatattactagttgtttcaaaaggtacaagagctaacatcgttggtgcttctctcaactcatcatacttgtggccattttttaaaatatatgagcttaaccaaaatatgaggctatataatggaagtttaagtggatctgaggctgctaaaatagctacttttgataaatggttgttgcagataggagatggttcattatatgatgacattgacagagaattaattaaacttccttatatatgcaaaaatccatctcaagatccagtgaaatccatagttgaagttatttacccatcgcttttacaaaaatacaacgatcttgcatatttcaaaagaaagcaatattaacaccaaaaaatgaaatggtcaatgaattgaatgaaatgattatg

SEQ ID NO: 333143 - DNA, 504 bp, Cannabis indica
aggatcaagatgaccgaaagagcgtgtccgtgtaccaagagcccagggagagaggaaggggaaaccgaagataccctcctgttgacttgagacaccaaattaatgaaaagcatagtgatttgcggggtcacctcgacaaaaagaaacatataccaacggtctccgcggggacactaaatgaaggaattttagcagagttggcgacactgtgcaaagacatagctcgggtctcccggaggcgaaaaggggatgactcagactccgactgcgaggaccgagagccatgtgcccggcacatattagaggcagagattcccaaaaactttaagatgcttgaaatggcagcatacactggagactcataccccagcgaccacttgtctcgtttcaatcgggtaatgacgatcatgagggtcagtaatgacgccaaatgtttatgctttccactaacattgagcggctccgcagaggaatggttcaaaaaattggaaccaggatccgtgg

SEQ ID NO: 333144 - DNA, 777 bp, Cannabis indica
tcgagttctacgggtagcatagcgacatatccatatgtcatggcaaatggagtctatctggtcgttgctttcttagttgtgcggtatgaccatagaacttcaggatgttcttccaactagtttcctttagcatcttcaagtttcttctttagggtttccttgagtgtcttgttgactacttcaacttgactatttgcttggggatgcgccactgcggagacactttttatgatcccatggttcgcacaaaaatcagtgaaggattgactgtcaaattgtttggttgccacaaaatccgtcatgtacttctgacaaaagtcatgcagcttcttcctgtgtaacacacctgagtagtggcatggagaatcctcttctatacataactccctctatagtgatgtaccgtgcagcctttctcctcattttctgaacttcatttctgttatctgcgagttccctagtgttgaggtaggctgctattggtgtcatccagtttggggatgtatcaatcatttcaacctcttccgtgccgatgatactaggttttttgagaaataggataagaatcagatttgctttatcatttacgttgttgctcgcaagtcgagctaatgcatcagcagttgtgttttcttcccttggcatttgcttgagagcatagcttttgaattgtgcaagcagatcgtgtattttgcttagatttgctatcatctactccccccaaccctcgtactctccggatacatgatttaccaccaactgtgaatcactacagat

SEQ ID NO: 333145 - DNA, 511 bp, Cannabis indica
cttttgtatccacctgaatttgcatagtttgaaatttaatggcataccaaattacgacattcgacttaaggaaggcgttccaaaaatgctccttagaaatttaaatcaaacagaaggattatgcaatggcacaagattgattgttacacatcttgggaactggtcaattagagctgacattatttctggaacaaatatcggtaaaaatatcacaatcccaagaattatcatgtctcccaacgaatcaaaatggccattcaagcttactagatgacaactttctttagcatcatgttctatgacataaataaaagtcaaggacaatctcttaagcatgttcaattatatctctttaaacaagtctttacacatggtcaattatatgctgctgtctctcgagtcattacaagagaaagattgatcatactgaacgacgatgatgaaatggaagatagaaccttcataaatgtttacaaagaagtatttcaaaatattatttaaattatatttt

SEQ ID NO: 333146 - DNA, 366 bp, Cannabis indica
agggcataaaacccaacagacgttcctccacgacgcatcactttcgatcccgttcgtgaaactgtccaagaaccgattcacgttaccaacgtcacctctgtaggttcttctccgatcgcagcttcagttgatccttcagatcttcctccgatcatctctgagcaagctccggctcctccgcctgtcgctccaccggtcagaccagcccctccgactgttactgcaacagtgaacgttggtggtgtttctcttggaaatcttgctcactctctagatcatacgtttccttcttcttcaaccacttttggaggtccatcaatgaatcttgctgctcatcctcctcgtacttgttgggttttatgccct

SEQ ID NO: 333147 - DNA, 969 bp, Cannabis indica
agatcctggtaaaataatatccaacagagctaagtatgcggtggtagcagtcgacttcttccgtaaatggacggaggccgagccccttatatccataacctgcaagaaagtccttgacttcttcgtcaagaacattatctgtaggtttggaattcccatgaagatagtatccgataatggaacccaatttgatggcgacatgttcactaaatattgcgagaggaataaaattatcaaaagcttcttgtcagtatcccgacctcaggcaaatggacaagtggaagccgttaataaaaccctaaagaatactattaagaagaagttagacgctgccaaaggtagatgggtttttagctacggtattgcttgctaggcgggcaagtgcatttggtgtggcattctgttctctggggatctgcttgatcatgtagcctttgagcttacttaacaagtctttgatttttctcaagtagaacaccattttatcacctcaagctgtgtattcacccaggacttgattaacaactagttgagaatcgctaaatatgtctaggttatcagcttgtacttcatgtgctatcttgaggctagctatcaaggcttcatattcaatctcgttgttcgaggccttgaagctaaatttgattgctttgcgtagttattgccccaagtgttataagggcaatgcctgcacgaaataattggtcagtgcagcttccatcaatatggagtttccatgttaaatcttcaggatttttgtaatatcccagaaaataaatgatacttaaatagaaatattttattaaatatgtaattattttagtaatgaagtaagattatgatcttacttagggtaattaataagggttcattgaatgatcataaagcgtaatttattaattacggagattatattgtgatatgtgtgtattgagaataccattttttttaaaataaaaatattttctt

SEQ ID NO: 333148 - DNA, 771 bp, Cannabis indica
actgatgaatcatggacattacttttcaatcacaattaccttccactgtattgacatcactgtaattgtaaatgactatatgttctgattttaacagaaattgtatatttcaccattaacatgaaaactacatgtaaacataaatgacttctaatcttctatttataacaaataagattacattaaaatgagttttatttaaggcataaaatatcaatagtaatttctaggggtgttcatcaaactgctcaaactgttcgcaccgcaccacactgaaaaaaatgcggtttgaaattttttgcggtgaggttgcagtttgaatttttcctaaaccgcgcagttcgatgcagtttgcggttttgaattgttaatatacagttcaaaccgcactgcaccgcacattttagaaataccaatttttatatttatttaggtccaatatgtgaatgtccaactcaaaccccactaattattgtattgttgaaacttttttttttcatatttattttcaagccttatgtatttttgacaagtgtttctcaagctttgttgtatttgtgataattcaattatttagtgatgattttaactgtaaaaaccgcaccgcaccattttttgcggtgcaatttatgcggttttttatttttgcagtgtgggtgcagtttgaaaaattagaaaaatcgtatctgtgtgttaatttaaaaaaaaaaatagtcaaaaaccacaccacctgcaccgcgaacactcctaaaatttctaaaaaaaaaaaaa

SEQ ID NO: 333149 - DNA, 628 bp, Cannabis indica
gagtttcagcactaaagaaggaaagaaagagatcccggttcagatattgataatgctctgctacagaaaggattcaagggctagatatctgaacggaagcagtcacaatattccgctgcacgcaatgtaaggtttctcatactttatatgtgtttatttcataatcgttttagaagtacatatttagggtgttaatcaacttacttgtgagtagatctaagatcctggtaaaataatttccaacagagatcccctccaacggagaagaagacgatgggccaaagaagaaaacgccgctgaagacatcgctggagaagaaggaagacccgctattagtgtttagcgtcggaggaggaagacccgctggtggtgtcgttggggtgggtttcatcaccagtgccgaggtcgatcccgttgctggcggtgacggagtcaaaccaacagtggaggtcgtcgtcggagacgaaggaggaggagacgtggctgttggtggagtatccagattcctaaccctttcttacaattttttattcaggatttggttctttccaaagtggtctcttttttggggttttgggtggggaaattctttttcttttcttgtagttaagtaatgtactctttctca

SEQ ID NO: 333150 - DNA, 1063 bp, Cannabis indica
tgatgacgatccattaacctataaataggcaatggtgagtccagaatagaaacaatggtcagtgcacatggatttagaaaaagattccatgaagaaaaacaaagtctaggaatttgtagatacacctgatgattatcatccatttggatgtaaatgggtctacaagaagaaaagaggtgttggtggaaaagtcgaagcttttaaagctagacttgtagcaaagggttatgcccaaagaggaggtgtggactatgaggatacttttagtccagttgccatactcaaatctattagaatacttctctccatagcaggcatttttgattatgaaatttggaaaatgaatgtcaaaacaactttccttaatagaattcttgacgagataatctatatgaaacaaccaaaatgttataaacttccaagacaagaagagaaagtttacaagctgaataggtccatttatggacttaagcaagcttctcgctcttgaaacaaaaagtttgatgaaataatcaaagcctacgactttcaccaaaatgaagatgaagcttgtgtttaccaacttaaggataatcaagtgatagtattcttggtcctttatgttgatgatattttgatcattggaaacaatatcaataaaatgactgacataaaggaatggctagacacttaattcgaaatgaaagacttgggtgaagctaattatgttctcgaaattcaaattataattagaaactggaaaaatagatcacttgctctctcgcaagcagcttacattgataaggtgctagagtttctcaatgagcagtaccaaaggggttgttatgacttctagacatggtttgcggctatctaaggaatagtgtcccactgatcctcaagagatagaagatatgagaaaatttatttatgcttcaacaattagaagtctaatgtatgatatgctatgcactagaccagacatttgctatgcagtgggaattatgagtaggtatcagtcaaacctaggaaaggaacgttggacaacagttaagcatattctgaaatacttaaagaggataag

SEQ ID NO: 333151 - DNA, 1253 bp, Cannabis indica
gagtctgggccaccaacatctgagtccaaactcgtcaggaggattcctgagaaggtgcaggcaccaactccacccatgcccgtgctgcctgaggccaagaagggcaaggagttgatggctcacaacatgaaccggctggttcctgaggtcggtgagcaattggttggtgctgacgactcatctctggatgtgttggtgggcggagttttgaaggagcttaccagggttaatcttttcttttcgacacttcccttttcgcttttcatactttagctccatatgctgacttttcctttatgcaggccggtttgaagttggcttacacctactcctgggctaaatctgtaacttccaagagtgcagctctgtccgacaccatgagggcagaggcggacttggccaagaaggaagcttaggaggccagggtggagactgcagctgttcgtcatgagttgggtgaggccaacaagaagctatttgccactgagaagaagatcaccgtgctaaccaaggacctcgaggctgctgatcgctttgaggaaaccatcgagaccttatctgctgaagttcatcgtcttcaggatgagaggacttctctacagcaggtgcttcttcggctgaaggaagataaggacgctcaggtggtcgaggtggaccacttgaaggagaaggtcaatgctttgaagactgccggcctcgagctcttctttgatttttggaaggctaatccccaggccaacttcgactacttgggcgacgccaaggacatgtacctcgagtactgcgcggcccaagttgcctatggtgggaaagaggtggctgcttcaactttcggcaaagcttttgaccaggctgttgatgcttctcctgctcgaacaacagatctacctgctccagtcgcctcagaagaaccaaatccagagcctgggactccagtcatttgaacattgatctttttatctctcatgtttatatatatatattatatatggccttaaggactttaagacatcatgaccggccaagcggtcttcaaacttggaattatttttcattttttggacaacgggctgatcgggcaacttttaatcccggtgctttatgctcttgttatccttaatgaatttcattctctgtttataattacagtgcaattgtaattgttttatgtttaccaaatgctttgtacaggtataagtgccccccaagtgactgagcagacgtatgactcttggtcacttgtctttcgcaaa

SEQ ID NO: 333152 - DNA, 678 bp, Cannabis indica
aagaagtatgaagggcctaatgggggacaaccagtggaagaagagattcaggatcaacctgtgccatcatcaacagaaaagaagactactaaaagtcctacaccagaacaagagactccacaaattactatacatcatcatgtgaaaataccatacccacagagactccgaaagaccaatctagacaagcagttctcaaaatttctagaggtctttaaaaggtttcacatcaacatcccttttgctgaagccttggaacaaatgcccagttatttgaagttcatgatcttgtcaaagaagaggaaaatggaggactatgaaacagtggcattgactgaaagctgtagcgccatactgcaaaagaaacttcctcctaaactcatagatcctggaagtttcaccattccttgcatattgggggaatagaagggataaatgtattgtgtgatttgggggctagcattaacttgatgcctctgtcagtttttagaagattgcagttgggggaagcaaagccaaccacggtaaccttgcaattggctgatcgatctctagcttatcccacaagagtcatcgaagatgtgttagtaaaagttgataagtttattattcagctgattttattgttttgaatatggaagaagacagcaatgtcccaattatattggggagaccatt

SEQ ID NO: 333153 - DNA, 1080 bp, Cannabis indica
agggttgtagaggtgtgtgatttgcttcctttaatttgttctattttattataccttgtttttgttattatttaatattttcgtgttgttacgggtttgttttagtagtgcttttgttatttttttaggattgggaatccaagtacactcgatctcaatactaccattctagagtagtgacatttggttattacgctgtcattgaagatatcaagaaaattctaactaaaccccaactacaacttttttcaaaaactgtatttggatattttctccagattccaaaaagtacattatccattaccaacttcttcattgtttattgttgagggaggttcaacggcctaatgaattggagttttgggtttgtgtgcaaggaaaatatcttagatttagtatagaggagttttccttagttacttggttagattgtcacattaattctgatctttatcagtttaagcaagatgataatactattgttaaacattgcttaaagggttacaaaaaaattaccaagggtgctattcaaactgcctttattgttgacaatctcaagggtaatgacgatcttgcagtcaagttggctgtgttatattatgttcagtgttatttgttgggtggtcctctgggtaaagctgcttcgatagaggaaataaatgttgttgatagtggtcggtacaatgaatttgggtgtggtaagcactgttttggtatgactattcaatcattgaagggtaagattaattctggtcttaggaaggttgttcggagtgatgaggatggtgggtactatagattattgggttttcctttggcgacacaattttgatttttcgcgtgttgtccttacattattgagaaactttctttgtactcaaatattaacattccaaggcttctgaattggcctaaattaccaaaggataaagattctcagatgaagatgggtgtcatgaacaacctcttgttcaattggtcattgaaagaggtacatgttttgtttttttacactttctctattcttgttttactgttatttttatacatggctattatatttcatgttttcattttttt

SEQ ID NO: 333154 - DNA, 658 bp, Cannabis indica
tccactgtgctgacgacacaataaataagaatatataaatgtgataagggtttggatgaatttataaatcaaataaacaaataaatgataacatgaaccaaatgacacacaaataggtgatgaaaatacttctgtttctttattgatatttaaaagataaagattacattgaaatgaagttttatttaggacataaaacccaacagatgcagcattttttatgagttttataaaaaaataataatattaaaattttataaaagacttaattattattaagtaaaatatataatttattttatataaataatttatatattttcaaacatgccaacggaagttattattcttttttttttttgtgataaatgctattatgttaaaataagagttataatacaatagacataagtagaggtgaaagttcctccaactataaacaatcagcatctaccgaaagagtatacttagctagcctatggacaacagtattcgcagatctattgacatgagatatctgcactccaggaaaattggacactaacagtgaaatgtttgataacaaacaataaaaatcagagacagagttttaatgtgattgcagtcctttaacaactacaagaggagcatgtttggtattgttttctattttttattt

SEQ ID NO: 333155 - DNA, 744 bp, Cannabis indica
atgtgaaagctttatattggtggtcgggtataaagagtgatattgttgaatatgtgtcaagatgcttaacctgtcagcaagtcaaggcagaacatcagaggtcggtaggtttgcttcagcctctaaagattttcgagtggaaataggaagacatcaccatggattttattgtggggttgccaagaacagtagggtattatgactttatttgggtgattgtggatcgatatacgaagtctgcacactttttaccagtacggacaacgtatacagtggatcagtatgctgatttatacattaaggagatagttcagcttcatggtgccctaaaatcaatagtttcggatcgagatccaaaatttacatccaagttctaggaaagtttacagcgagcaatgggtaccaagttaaagttcagtacaacttttcatcctcaaactgacggtcaatctgagaggactattcagatacttgaggatatgctgagagtgcgtgtaatggattttgaaggttcttggaacaagtatctacctcttattgagttttcttatagcaatagttatcagagtaccatttccatggctccatatgagatgttttatggaaggaagtgtcattcactcattcactgggataaagtcgatgaacgcaggtatcttggacctgaagctgtccaaagaacaagtgaggctattgaaaagatttgagctcgtatgcttgtttcacagagtagacagaaaagct

SEQ ID NO: 333156 - DNA, 751 bp, Cannabis indica
ggttgggttaggttacgttaacgtaaaggttttaaaacgttttaaaaccaaccctttaaccctttaagtaacgtaaacctaaactaattaagtttaccgtttccctttcctttttacttttactttaacgttaaagtttaactttttacgttagttagtttcgtttcccttaacctaagtttcgttttcctttcccttccgttaggttaaatttaacttcgtagtaaccttaacccttacctacttaactttacccctacccctacctaaccaaaccacaacggtagggttcgttcggttcggttaacggtaacggactaactaaaaacgaaaacgctaattacttcctacgaaccgtacccttcctacctacgtttggttagttaagtttaaagttaacttttcttctacgggcttttatcttttctggaatagttgagacttttccttagataaataaaatctatgtctaagaagttgtgaagcttctatagattgccattggaaagaaaatgcttcagcatcttactaaagtaagttgcttgcattagagtaagtaattaccaggtataccacaagccataggtttagataaactcaaacctataatactaggaacaggaagttttgttaagtccattgaatagacttattaacgaaaatttcctttcatgtccttgtaatagaaaactttaggttactccatgtgaatggatcaaaccatagttctattggctttcttcttagtttc

SEQ ID NO: 333157 - DNA, 1092 bp, Cannabis indica
gtatctccaacacttttcatagtccccttcccaaggtaagtggagagtaccttcagtaacagctcttttgcgctgctcaccttcaaatcaagccggaagacctcatctttcaactcacacacagctttgtatattgcgtcatttgtgggttgcccaactgcagcggattcaaaacttggcagtaacacatacgtgttagtcaacttcacctgcttagtacaccaaaaaaactagttagcatatctctcaaataaaattctaacgcattagaaaattgaagtactaaatgtacctttccacttgtgtgaccaccctggtctcgaatccacttgtacactgacttgcagtgttttgtggtccaaaagtcaattggagccacagttcggtccacgtgagtagcagtccagtctacgtgcgtcaaatatacaagctgccaccaaacaaaagtgcatacatatattaccacagcagtacacgagagaataaaattactaccatcacaataattcgaaaacttacctgtaaaaatatcgtgcaaccggagacatttttggtgttcttcgtcttgtaccggtgtagagagctcattagatatcgatatccggcagtcgcccaattcttcttcttaattgaccttatgtcaactaaagaatgcatgtagctagtgctgacctcggtaccattcttcggcagcaacacagttccaatacagacaaggagaaacttaatgagaaacaggtagtcactgtcgctggtttccctgagctcattctccagcaaagtcagggaatacctatagtccttggccttgaagaggacgtcaaactcaaccaggtcacgctcactttcggttgccacgggttctccgccatcccggattcccatgacatcctcaaacagcttggcggatagttggattgttcttccaaatatctccagccgagaagtggttggatccacgtgatcgatcagccaactaactatcttagcgtctatgtacggggcatcctcccttaaaaatgttgagaaaccggcatttctcaccatttctttttgagcctcgttgagcagtgggactattctccccaaacg

SEQ ID NO: 333158 - DNA, 714 bp, Cannabis indica
atttaattaatcaattaaataaatacgaaataataaacatggaattaaaatagttattttgtaactatagaacacaacactgtatgtgagaataaaactagaaaacaaatagtataaaaaaaaaatacaagcttacggggccatgcccagagataagatacgttatataggtctcaaaaatacaaattaattaacttatgcataaataaactctctcttattgtatgcctcaagcttgatgtatttcacattctaactgaatcttattaaaacttcaagtgctcgaactcccttcaatctccttgaagaatgcttgcttcctccaaaggcaagacttgaaaagttatcttctgaaagtttgtagaacattctcgtgaaggtagcattattgttctacttcttttgtagacttgattacagactcaagacaatacaaaatacataaacacagaggaagagatgaacaccctctcctctacacaacaaagactctctttcttacaaaatatgagtgaaatacaaagatgtgaaagagatactaaattaaactgttataacatgtatttattatcaatatacacgttatagacaacgcattaacggtctgaacaagaccacaactcacaaactttcctgaaaagatcttcaatcaacctagctaggaatttttacttatgtacctacaaaattatgagcagtaagtgcaactttttt

SEQ ID NO: 333159 - DNA, 1012 bp, Cannabis indica
tgggatactagaagtatcaatgttttggagtcattggtcggtgaattttccatctcagttttaattgaagcagagggtcgaagaccgtggtggttctctggagtatatggtccatgttcgtataaagacagggtagcattttgggatgagttggctgggctaagtattatttgtggcgatatgtggtgtctaggaggggattttaatgtggttaggagggtgcaagagaaactaaatagtaactcttggactaagagtatgaagatgtttgatcaattggtgcgagaattgaagttaatggacccaaaactggataatggaaaatttacttggtcgaactttcgaaataagcctatttgctgcaaactggacagatttttcttcaccaacaattggagtaatgcgttcacttttgtgaggcaagagatgttagtcaggattgtttcggatcacagtccagttgtacttgattcgaatcccccatcctggggacctagtccttttcgtttcgataaccaatggttggagcacaccacattctccaagagttttgagagttggtggcagaaggctgaaggcgccggttgggagggtactaagtttatgagtaaattgaaggaagttaaaggaaacattacggaatggagtaaaaagacatatggcaataagcacgtgatcaaaattgcaatggaaagaaggttgatgcttttggatagtttggaagcatccaatgagtggaaccaatcattaatggaggagagaagggcaatcaaaaaagaatggcagcaattggtatttgaagaagaaagaggtgtctggatgaaatcaaaatgtaaatgggcgaaggaaggcgatgcaaattcaagattcttccacaatttgttgaatgcaaggaaatctaggaacacaatttccagaattgaaagagaagatggttcatttcttgaggagaaggaagaaatagtcaaggagataatttcttttttctcaagtttgtatacttctgaaagaa

SEQ ID NO: 333160 - DNA, 1086 bp, Cannabis indica
gattttatcttgatttatgcttgaatagaaagaacaaaattaaaaattcaacaccaaattttacaagcttcacctgccatagaaactcattctaggccgctagagcttaggttccccaaaccagggtaataactttcactatattcaaagatgtatcttacaaataccaacaatattgtaaacaatacactcttttacaaaatacagtgaatctatacccataccaaccaagacccttgattagagacacaagatccccttgtgtgaatgatgagctctcttcaacacttttcttcaatctgaactcccttcagatctggtgatgaagatgatactcaaatcccttcagatcttcaaactttgatctacaacattggattcataccaccaagctcaaagatcactttccatggaacataaagaagaagcaagaagaaagaaacgtaatttctaatctccgataaaaaaggtttacaacataatacctagaagttgtatttatacccaactaaaccaagaaacccgaaatagacaactgttaccatctgaacaattaaaacccaaaatatctttgctgacgtcgactaacactaacagtacaaactccagacaagacattacgaatctcagacgcaactggacataatttgtcactacagaaaatactggttcttatacaatctcccccttgacaaatattggtcaatgacaacaatactagtgcaaaacaaagcaaccatcaaaatataacagagtctaaacaaacagaaaaacaaacactttgaagaaccaaacaacaaacgtaccactttacacaaaggataagtatttctcccccttcattgagcataatccatgtaaaaaataatattgtactaaaccaaagaagtttatcaaagagctccccctgaatggcgacagaaaatgcaacatagactcctcattgcaaagaaattccaaagtatctagtacaacatcaaagaagaaagtcaaaccatctcacaacatgacctaaaacatatggatattagatataagcaaatgagagattgaccaagcaaagcaatcagatcaccacaatattac

SEQ ID NO: 333161 - DNA, 801 bp, Cannabis indica
tgtaaaaataaaaaagttcctttatttatttatataattttatgcttagaaattaatatatgataattaataaataatttttttaattaaataaatatgataagatatataataataaatgatggtagtttgagaataataaagtcttaaatgcattgagtactaaaatgagtagtttttacaaagggaaaatgctcatttagtacttgtgttttcatgaaaaacatatttggtactttctgttttcaataatttttaattggtactttatgtttttaaattgtgtatatttgataccttaaaataaaatttaatcaatacaattttattaatttaactaaatagttctcaattatatgtaatcaaataattatatataaattcagaattcacaaaattttagactattgattgtattgataaaattttatcaaaaaaagaaagttgaatttagggaaccaaatatttataattttaaaatacatggtactaaataagcattattaaaaacatagggtacaaaacttgtatttacataaaacacaaggcaccaaatatgtagacatccttttacaaatatataagggtatctacatatttgatacttgtgtttatctaaatacaagttaggtaccctgtattttcaataatgcttatttagtactctgtattttaaaatcatacatatttggttcctaaattcaatttttttttcttataaaatgttatcaatataatcaaactgtgtaaaattttataaaatctgaattcaaatttaattatttgattacatataactga

SEQ ID NO: 333162 - DNA, 876 bp, Cannabis indica
gaaatggcaggtttgcattatacaatgtatttctagatgaattacggttaatcattgttatagtgagatttctctcacctagaaactcgagaccagactcctgtttagaggacacgtgtactcagatttccaatgaaagctgagacgtccatgagagactcctcgaagttttaaacctcgctcaagatagaatcagcgagatacagcgagtatgaccaaagtctgatcgcatgattataactcgcattatgcaggacaagagaatggatccaactcgcatatatcaggatatgtgcgagtatcctctctacattccagcgtaaacatagagatcgattctctataatgcgggttggtcccgatgacccaacagccttgataaatcgatatagactcgcatgtctaggttctatcaactcgtcatacgatgtccaaagaggcgactatataagaacgcagacatcctaacttaattaagtgttgggcccgcgagtttaacattagaatatgaacagtcaactcgcatgttaaaagggcgcatacgttgctgaatttagtaactgttattcatttattgatgttaacgttatttagtttggttattgtaattcaatgtgtaaaaacggattgacaatgaatgcaatccttgtataactaattggacacctgctttgtatataaaggggtgaccaccgtgaaatgagacctacgaaactcttgctacagtggactaagcagaccgtgatctgactgaaccactataatcctctgtcttatttttatttccagtcttctgttaagcatttcccattcccagttcgagtactcgccactctaggttgaatactcgcaattgttcttcatataattttcttc

SEQ ID NO: 333163 - DNA, 578 bp, Cannabis indica
gcaaagaagaaagcatttcaaaaggtagcccagggccaatacaagaacctcagccgagcaccaatgaagataaacctacctggaagcgtagatgggtcggctacaaatcaactgttcagtgcaggaattgcccttgtcacgcttgggggggcaacacctgcatggggctgtcaaatttgggtctggagcctccaacaatgaagtagagtatgaagccctcactaccggtctaaaacttgctcgggagctacatgcttaacacatcaagatctgtattgactcgtagtttgtagtaaatcacgtgtcaaaggagcacgaggcccaggggaaaatgatagcctatctaagaaaaatacatgatttgtttgcactattcaagagttatgtcctcaagcaaattccaagagaagaaaatacaactgctgatgccttagcctgacctgcaagcagcaatataactgataaggttaatctaatcccaattcaatttcttgaagaacccaacatcacctgtgcagagaaaattgagatgattgatgtaacgccctgtccaacagggacgccacgtgtgtgcaatt

SEQ ID NO: 333164 - DNA, 930 bp, Cannabis indica
ggaatgccattccaatactttaaaatgcaaccaaacaaagaaatggaataaaaattgtttcttttccattcctttccatttcattacctctaaccaaacgccaccttaatattagcatgtgtgtttaattgatttttttattttttatttacttatttaactgttatgggttgtaaattgataaggtttattttttaactttttatttccttattaacagctgtatttttttttaaaaaaatatatgattatgatatagtgacacacaatgtgtgttggtacacatttactgagtcacgcttagcgtgtcactataggccagcattttttaaattaataaaaataaaaaaaaaaattagggttttactttttagtgacactccatatatatagtgacatgcattaaaggagattaacgttagacatttagagtttgattgtgcatgtcactaaaagttactcctactctttagtgacgcgcatttttgtcgagtcacgaaatagtgtcactaaaaggctaaattgtagtagtgtaagataattggttaaagatcttgcgaactgatacggatggaaatatttggatgtgcagtttaaagatcattaagttgaactttgaattgtattcaaacttacctccccaaaaatttgatttgcatattgatgatagtataaggtctatgattagttactagcaatttcctaagtccttctagggatataccctagtgatagaaaaatttcagaatgatagaatggttgtgtacttagtgtagaccattactagattcatggatgtcctgatcgcgaacttaagaaaagctagaactgttaactaagatttgcgtgtttgatagaaattctaagtgattaggggtggaccatcccatggtcattaagataagaaagtgtttgtttcaacaaatacta

SEQ ID NO: 333165 - DNA, 738 bp, Cannabis indica
aacaaattaatatgttctggactaaaatagaattcacacattatttaaataatcatggggcacaaaacccaacagttacaactgtggcaagccaggacatttcaagagagattgctattttctaaacaaaggcaaaccaaataaatataaagtacaaggagaaaattctaaccctagttctaattttcctaaaaataaccaagccaactatggtgatgttatggaagtgctgataatggtgaagtatatcttgttgcatcatcttttaaagatgattgaattttagattcaggttgcacctttcatatgactaatgacaaaagttatatgtttgattttagggaatctaaaggtggaaaagtggtccaagagaacaatcagaccagtgagattaaagggtcgggatcaattagattcaaaatgtatgatgggataataagaaccctaacatcagtaacatatgtgcctaatctttctagaaacctaatttctattagtgtccttgatgatttgggtgttgtgagtaaggtagaggcaggtcaaatgaagcttagtaggggagcactaacaatcatgaaaggcataaaaaatggtggactataatacctacgaggctctcctatttctagctgtaacatcacaactcacaacgacaaagaagatgaaatttctaccctatggcacaaaagattagtgcatataagtgagcgaggcttacaactcatgagtgagcaacaa

SEQ ID NO: 333166 - DNA, 740 bp, Cannabis indica
cacaatgctgccgagactgcttcccatgtgctcctaaattgttcctttgctttcaactgctgggagcgttgtgggttcaccatccaatccgattcttcatcaactattggttattggcttgattctacattcgaattgtatggtgatgatacatcttgccgtgccatcatgctttgttgggcactttggaagtcccgaaacaaacttgtttgggataagaaagcttcatctccaactcaagttcttaatttagcatggactacacttgaccactggcgtactgctcaagataaatctaacttattatcattgtctctcttacaacatgataataacattgagcgttggactaaacccgatttaaatacagtcaagttaaatgttgatggagctttgtttgagagagaaaatgcttatggctttggcattgtagctcgcgattcgttgtgccactttgttgatctccgagcaagatatcagggaggaagctacccagccgaggtggttgaagctcttggtatcaaagaagcactaagttggttgaaagacaaggaatggaacaaagtcgacatagagactgatagcatggtaacggtacaagcaatttagtaatcaaattatgtcttctacttttggtttgattgttagtgattgtaagagcttattgtcagttttaaataatgtaagtattcgttttattagacgatcagcaaatcgagttgcccactttgttgctaggc

SEQ ID NO: 333167 - DNA, 1712 bp, Cannabis indica
aaaatatcactattataaaaaaaatccttttaatgtccttttttatgtctagtaaaattattattggacataaaaaagttttagggagttttctagtctagtattgttggactagaaaaaaaactcatatgtccaataatgtttgactctaaaataagtagtggacataataaatatatatatttttttatttttctttaaacttgtctattttcacgtccaacattgttagactagaaaattattgaggagagttatctaatccaacataatcagacataaacctaattatataaaattaaaataaaaatatatattattaaggatttacaaagataaactttactgccatatataattcttaattttttattttgaaataattccatatataaataaaacatattaactttttgttggaaaggaataaaacatattaactaaaagacctagaatctctcccttgaaaaaagcctaaactttctctatacgttctctctctctttctgattaaatgaatatcattatttttgttaaagtctctctctctatacaatgcaagcagtagcgtttaatcttcatctttctttctctcgacggctgctgtagtccattcttactccggcaacgaacgattaaaatattcactaaggttcactcactttcttctaatattgatcagtcacagttagagatctacgacccgctgccagagaatgagcgaatggaggtcctcccttcttcgtcgacgtgcggtacaagaggcaacgagtttgaggtcctcgatcttcgtcgacaatgtccatggcagatcaagatgaaatagtgtccatcacagttttcaaaatttaatttttagggtctaatctagtatagcatttctttttcttctcatatcggcattgcattttatccccagtgtccttgcaaaccccaagcccaaccccattcatgtcactggaaacgatgaagcccatccatctaaaaacaacgagccagtgcagctgccttttgttgccaagatcccctagccgagccgccacccaagccaatagaaaggagtccttagggtttaaatttaattatttaattatagatttattgttaattatatattttcttagataaatattgatgtatatatttaataatgtataagatataatatgttgtgtaataataatttttaaatgtattattataattctctcaaaaaatatattattataattctactcaaaaaaaaaattattaaatatatataataatatatatttaaattatttattaatttttttatatatagtagagatacaagtccaataaaattggacttaaaatctaatatttttgtaagtcttattttcaagtctagtaatgttggactagaaatttttttctagtccaatattgttggacatgaaaaatacactttttatgtcctccaatattatgtccaacacaaaaaaggactacaaaaacttatctagtccaactttaatggacataaaagggattttttgtagtagtgtaacctggcgcccatacacccgatcataaccctaatccccgtgtcccacatggtactgagtctaaaacgttcataagacaatactatcgaccatgatgtcagcctatactcaatatgctagtcatactctagccatattgatgttacaacatcaatcagtattttagccaacatacattta

SEQ ID NO: 333168 - DNA, 662 bp, Cannabis indica
aaaaaaaaaaaaaagaatattttaaggaagagaaatgctaaagagcactattggacactctttctatgtgttaatatcgctattggtccaactaagtatcgagtcttatataatttaatataataatttttaaagaacatcgctagctaatcacaacatgttgagaaggtactaaacactactgatgcctagtagcaatcctccctaaaaaataaacaccgattgaagtacatgaaaagcaacaattactctcaagtcaattgggtgtatatgcgagagagagagagagagagagtttacaagtccattaactgtgtccttgaagatgccgtcatttggaggtatttttcaaaataaaaatcaattgctttattttggagactacaactctctatcttcacgcccatttcttatgaaagaattttccaaattggaatatttttgtgatggaaacagtgaagaaatattatcccaaattttagattagaaatactaaaaaatattagtggttcttaatatttttcaaagtattaatattgttatttgtaaaatttgtattggatcttatataatttaatataataattttgatgaacttatcactaactagtaactaatcacaaaacattatctttaggttgtgctaggtgtaaaataacaat

SEQ ID NO: 333169 - DNA, 428 bp, Cannabis indica
taactattttataagtataaataataaattatatattcgatgaaaaatgtaagatattaaaaataaaaagtaaataaaaacttatagggtaagaaattaattaaccacttataaaaatactattggataaatctatatgacataataaaaataatatttataaattatatgaataatacctacataatttataataatgtaggacatttaattctatatttgaagatgaaattttatgcatagttttgtttgtatgtagttatgttttaaataaatagaaaaaattaaaaaaaaaattaaatatagaatgaaaaaaggaataatacataaaatactaatttttgtaaattttttataattttgcgttcaaagtttttttttatattttacggtattttataaaaatacaaaaaaaaaaaaaacaacaa

SEQ ID NO: 333170 - DNA, 796 bp, Cannabis indica
ctagtaaaataaattccaacagagattaccctgatgactagtccttagccctttgcggtctggggaatagatcttattgggtccctaccaacaggaaagggaggggtaaagtatgcaatagtagcagtagactacttcacaaagtggacggaggctgagtcaatgaagactataattgctaaaaaagcactagactttgttatcaaaaacatagtatgtcgatacggcttgcctcacaaaatagtctcagacaatggaaagcagtttgaatgtgaagaattcaccgacttctgcaaccagcacggagtcgttaaaagcttctccgtagtggcaaggccacaaacaaacgaacaagcagaagcggtcaacaaaatcctaaaggtcacgctaaagaaaaagttgttggcctgcaaaaacaattggcccgaagaattgccaagagtgttatgggcctaccggacaaccccaagaaccacaaccggtcactcgccattttcaatggcatacggttgttaggcaatggtcccggtagaaacgttattcccatcccaaaggaggacaacttatgatccaacaacaaacaaggctttattacaagaagcgttggatcagattgaggaactccaggatgagtctcaaatacgaacgggggcttatcaaaacaaggtgactaagtactttaactctaaggttaaaagtagaaaattcacttttgttgatatggtctaaagaagagtcttcccagccactcaagaacccgaagtgggggtacttgggccaaattgggaaggaccat

SEQ ID NO: 333171 - DNA, 574 bp, Cannabis indica
ttatgcacttattaagtctatctatatatatgatccctaacatcttctccttcaaccatttttaattcatatagctgcttcttcaaatataatctatttgttaggaattttgacatataaagtttttctaactttttccataactcaaacagacatatttcgttcaatacactatactttaatttagaagccaaacataaacaaatagtgcttaccgctttcgccagcaactccttccaatcttcatcagtcatactctcaagcttctttccttgcagtacctttaagagctcttgttgtacccaaacatctttcaccatgctctgccataaactaaaattatttttctcatcaaaaagctcgatctcaaattttatggaagacactatctttgacatattcgttgtagatttaaactttggctttgataccacttttttggaaaaacgataaacttcaagcaccacgaaataaaaaaaaaatttactcaatttggtaaaactaccaaacccactaagagagatatattgcacttatcacttcaaaattacatatgctctctatcttaatctct

SEQ ID NO: 333172 - DNA, 2258 bp, Cannabis indica
cgtcaatccagaaggacaaggatcgaatccacctagtggatactataaggtctcccgaaggtagcagggtaccaaaacccgaagcataaatatcacatggtttatggaaactttcaattactctactcgacacataagaatgagtagctcccgagtcaaacaatagagtataagaacagccatttatagagaactgacttgtcaccactgacggactagtaacagagtcaacccgagtcatggcaaaaagtcgtcccgggttctgagtagtattcctcttaggctcctctttcttggcccgaggacaatctctgatgaagtggcccaccatgccacactagaaaaaagtcttggcctgacattcaccctgatggtgtttcttgcatttaggacactcaggataagatcgaaatgaagaaccgcggccttgacgacaacatttatttccctgaaactttctattaccccatgatgttctggaagcatcagctctttcgtttgtgatcggcgttaccactgtcggtccccttactgatattaccactagcaggagggttcgatgccgtgacagaagcctttgtagtctgctctttcactacatgttgctcagcctcctcagcaattaaggctagctccaccactttcttgtacaaagtatcatgtgaagtggtaattttcaagtcccgactgattgtggcattcagtcctctcacatatttctgtttcctggtgaaatctgtgggcaccagataaccaacaaacttagacaaccgatcaaactccagagtgtattcggccatagacattttcccttgaattaatttcacaaagtcctccatgtgtgaagtcctcacagggatgttatagaatttctcttcaaacagactcttgaactcttcctaggtcattacactgacatctcgggtttgtctcacaatatcccaccagacgcggacatgatcttgcagcatgaaagctgcacaattcactctctcagttcccgtcattcccatattatcaaggatacgtgtgattgtattcatccactgcttagccttaattatgtcagtacctcccaaaaaagttggaggttgcagcttcacaaaccgttcaaacacagaatctctatgcggcatcatgaacccctggttacccaccactggcacaggtgttggtggtaacacttgctcaataggggaagctggtgccagttgccttaatcgacgcaactcttcttcttgacaaagtatgatacctcgcatttcttgaaacatctgctgccagttagcaagcggattagcattgccaacccccgaattatcccccagattctacagaggtgcaacagtgtcggtggattggtttggtcaacccaggctctacttgctcgccctgttttctagatgattgcggagggtccattttacaagtaccactgtaatcaacaacgccatcaagttaagcaccaataccacacttatgcacttattgccttaaaccctaactcaactatttactccatataaataaacactgaacatatagcattttaagcatggcatcatatatcacataaacactctctagatgctcgcatattgcctaaaatggaaagcagtaaataaatgatcacataagcagtaaagtatttactctcaacacttacttcaccatgagtcgagcttgtctctgacgatgaatgtacatgctcagccggtatattgtaacgccctagcatttagacacgctacccaagatgattaagaaaccctaatcccctatacagaattactaataaaataagcgcgaaaattaaactttaaacgaaaatggaattaaaataaacttgtaataattttaactttacaaaccaacaaaagttacatgtctctggatcccaaaaatatcttacaaaatattattacaagtctttttccacaagctgacctaagcagcaaaacagagttacagaaatcatcattgatagaccccaacacacttggtcttgtgtggtccgaacaagtacatacaccgtccagcttctgcactcatggctgatcagagacagatttaccctttcctgcacagtagagcactcgtgagcgaagcccagcaagatagtacaatatatcaataattataattaactcatcactagtaataatgccatttcatatttgtctgtatgacacagacctgcgtattatgctcatatgcctatttatgtctatgtggcatagacctacgtgttacgctca

SEQ ID NO: 333173 - DNA, 929 bp, Cannabis indica
gagcaggaaagaccgctcaaaaggagaaaaaacttccgaccgggcacaggcccatcgaacatatgattcagatcagggagcccagtctacctgctcggccatccactcctgtagtaggaaaggggaaagctgtcctggaggagcaagaagactcgtcggatgacgatgccccatcaggtcttgctcgggcagatgcttctgccaaagtgcatgatactccatcttgcatttaaccttcttgattattataatttcatatttctcatgctttttcctaaccatgttgctttcatttcgtgcagacatgcctctgaaaatgctcgaacctctgaagaagagagtgggaggaagctcgggcttatctcctctggctaagaagtccaagggcggtgagacaaccccgtctagagagaaggcaccaactgaaatggtcattgacctctccgaggaacaaactgttgtggatcctcctgttccaaaaatgactaagtccaaggattctcggggaggcagctcggacaagccagagcagtcgaagggcgaatccgagctaatcaaggcctctgccccacctccaatactgcacctagagaccaagagaggcaaagaaatgctcacccactacgtgactcggttggtccttgaggtgaatgagcagctggctggggcagacaatgacctttctctagagttggtgatgggaggagttctgaaggagtttacaaggataagtctttcctgacagtttccttttttccttcttcacttagttcagattttaatattatttctctatgcagaccggtttaaagatggcttatgcttactctcgagctaagtcagctgcctctaagaatggcgccatttccaacatcatgcgggcagaagtagacttggctaggaaggatgccgatgaagccagggttcag

SEQ ID NO: 333174 - DNA, 508 bp, Cannabis indica
gaaggcagttacacagagctacttctcttaaggcaaaatgctactgatgatgaagctgagatcgcagcccaaaaagaacaaaacaaaaagatgtaataggtgatggttgccatgcaaaacgccatgaagacagtagggatccacatacaccctaaggccatccctggaggactcaaggaaacgccggaagaatcctcaccaagcacttagaagcataagtctagggaacctagccccatacggtatccctctgatggaaactaacggaaaaaccctacttccatcccaaggaaaaagaaaaagatacaggatccacgaaaggtccgctgagatttctcgaaagggaaaggtttgcagagggaaaaactccaaaaagggagtcttggccctcaggatcgagaggaccgaaagagcgtttctgtgcaccaggaacctggggaaaaaggacgagggaaccgaagatacccgtcccgttgatctaagacatcagatcaacgagaaacacggt

SEQ ID NO: 333175 - DNA, 737 bp, Cannabis indica
cctttcacaaatataaatttgtgcatactactcatccaataagctacaaaatatcccaaaaaaaaaaaaaattctcccaaatcttaaaaaacataaaattagaatcaaataataaatacataaagcattgagattattattataaattacatctatataatcatataaataaatgcatacacatatataacataaatataatattgaaaaatattaactttttaaaattttttagtcgtacatatatatacacacttaatcaaaccatgtatattttaaagattcatactaaaaataatcaaatatataactattttattaaaaaaaattataagttttaaggaaaaaagagatgaaaaaactgacctactaaaaaatatgcatcagtcgtgcacttttggtttcagccaatagtggttgagatagtagagaccttaacaatattaaaaaaaattataaaaatatttatagaattaaagatatatttttatatatataaataataaatgttaaaataaaaaacttgcagttaaaaaaacttgcactggtggtagatcattaagggtggtggtgttgctccgggcagaggggtttagggtggacggagggaggcggggaagggctgaggaaggtgggtgtagaggaggaatttttgagagagaagagaaagaaaatgaaggaagcagaggtataaatgaatctgatagcattttttatatacgatattattagcggcg

SEQ ID NO: 333176 - DNA, 547 bp, Cannabis indica
ctctctcgattttactcaatccattttttctcccaagcttgaagatgagtcccaaacatgcttccatcggagtacaaattcgttgaggttgttcgagctttaatggtggccgaggaggaggttaacagagagaacgagaacgagagagaggagagggtctgagagcgagagagaagaaaggagagggtctgaaagcgagagagaagagaggagagggtctaagagcgagagagaagaattttaatggtggcctaggtcgcgtgagaacgagagagaggagagggtctgagagcgagagagagaagagaggagagggtctgaaagtgagagagaagagaggagagagtctgaaagagagagagaagagatgagagggtctaagagcgagagagaagagttttaatggtggcctaggtcgcgcgagaaacgagagagaggagagggtctgagagcgagagagaagagaggagagggattgagagcgagagagaagaaaggagagggggaggcggctgatagaagagggggggaggcggctgatggaaga

SEQ ID NO: 333177 - DNA, 1026 bp, Cannabis indica
catttatagggttgaaagtgaaaaaagtggtatttgtgaaaaatagataaaatagttgagaaaagtgacaaaaaccaaactagtgtaggacccactatgtggtcggccactagatggctttttcactctatttttatcaattttttattcctaataattcaaccctaaccctattggaaaatagtataaaaggaaggctatggtctcaatatccaactaatgcctccaaagctaaaaacctagttttctctctaggtttgatgagacctcttccttcttcttcctcttcaatttttgaagtactataccctatcttcacaaataaaattcaagccttagtgattgagtgcatgcccacacatatcaagcaagtcctcaatcatggtctgtaagactgtgaagaatccaaagacaaggaaggagtttcgggctcagatcttggtgatactctgccacagaaaggatacacgggttagagatctgagcagaaggagtcatttaattccgctggaacaactctaaggtttctcataccttttatgtatttattttatattgttttagaagttcatgtttaggatgttaaaaacatacttgttagtaaatctagatcctggtaaaatatattccaacactgagtgctttaatatagtatatgaatttcaaagggtatgattcggtgttaccaacactagtatagttaagtacgtagtgcatgtggtacaacactcagtaatactctgggtacggttccgtcctaccaacagtagtacattagcggtacttagtgcatgtggtacagaggtcgtacttgtattaagaacgttctaaatcatctattaagccttgtggataagtgtaagggtgcctaagtacaagttagtaatatattatgtgttgtatgcttttcttactaagtatgtcaactcacagatattgtttgcatttgtatgtaaaagaaaggctatggctaagcaacaatgtgtccagagctcggggatgattgtacatgtcaagatggtacga

SEQ ID NO: 333178 - DNA, 430 bp, Cannabis indica
cataaaacccaacagaagccatatgtttgaacttttgcaaatcattaatgacccttaaacaatccgactcaacaacaatctgggaccatccattcactttactccaagagggagcttccttgataccaatggcttcgacaatatgaggttgcaaagagccctctctagataaacttctggcccccaagaccaaccccacagcagaccttgcaatcaagcccaatccatactgcccttgggcagaaaaaagtgcaccatccacattaattttgacaaaagaaaaatcgggagttgtccattgctccacgggtaacatcgtcatccaggataagcttgcatttgtgacattaactttttgagcattaaccactcaacataatttaacttttgccatttgccactaccctcacttgcatcagggtgcttgaag

SEQ ID NO: 333179 - DNA, 837 bp, Cannabis indica
aatcttgaaccgtatcagagtggacatggtcactatctgtataggtgcggatcggataggatcgcttgcccgcaagagatatggctctgataccatgttgagaatcatggggttccatctcaaaaccaattggcaatgagtggagtagcccatgttctttatatatggctcaattctctaccatttattctatgtgggacaatgtccacaacagtaattaactatttggtacactgtatttttttttaaaatacaaatttagtaccttatatttctaataatgatcacttggtaccctttatttataattcctacacatttagtaccatcactttaaatttagtagacttaaatttctaatatgactacattaatactcatttaaataatttatatgatttaataaataaaaaaccaaataaaatttcacttgattcaacttccacttttgtcaatctaaaaaaactttcatttatatcttctttgttctttccagttcagatatacaatagtcaggcaaagactaatatattttatataaataaatacatgacttaaaatcaaacaaagagaacactgtaaatatatcatctaaattatcacatgttaccttcttatatataaatatattagctccaaatcataaggctactatgcagtagctattatgctgcgaacaaaatacatgaacaaaaaaaaaaaacgaacaaagaaagtaaagacaaaccttcaaatttagacatggaaaatataattttactagagatagaaaaggaatcatataagtttacttaaaaataaaataatattaactcgtatatataaattaaaattaat

SEQ ID NO: 333180 - DNA, 1151 bp, Cannabis indica
actcagtaagaaaagcataaatactaacatagcaataacccagattataattaggtgcccatacacccaaccataaccctatcctcatgtataactcgatgttaagtcaagaacgatcgcccgaccataatacaaaccataatatcagcctatactcggtacgctagtcatactctagtcgtaccgatgtgatactatcaggtagtatagtactatcgaccataatatcagcctatactcggtacgctagtcatactccagtcataccgatatgatattgtcgagtagcacttaagccaacatatagatatcgatactataatgtaatctaaaaggcttaactaatatgcacgctgaacatgtaaacatgtatgcatattattatactaatcttaccttgttttcaaattcaggtgtgccggccaacctgagtgaaacaactacttcatgaattataggcccctaaatcccattatttgtaaaactggtgagtgacacgctaaatcaaattccggggacttaaacttaaaactaaaagtttccttatcgatggatagcatggcaatacactaaatattgtaaaaacagaaaaaactagggttcccaaaaattccccaacctgtagaccagctccccaaccagaattccaattctatggggtttcgtggggaccaaacggtcgaccggttcagtcacgaaacactcaaaaattcactacaccctcaatttgaccccaaaccttaccaaaccttctagacctgcttaatataccacaatagacatatttcatgcaacaaaacaacttaacatgctcagaatcaaaaatcaccattaaagaccaaagtttgagttctaaatcacaaactttgtctaacaaccaaatcaagccacaaactaactccaattcagctcaattaacctaattttaacctcagagtatagtctcaaataacatgaatcactacagcacccaactatagaaaaatcataaaacacctaacttgaaacttaagaaaataataatagatgagctagaacattaccttgagtttaaaatcactaaaagtaaatccttgaattgagcaaaaaaattcccaaccctagctggttctaaagagagagagagagagagagagagagagagtagttag

SEQ ID NO: 333181 - DNA, 576 bp, Cannabis indica
gaataactcccaattctcataagaggcggcacaacctttagtccatataggtggaaattagtatctcacaacttttctttagacacatcattccattaaaaaactttttggtttcaaccctctaaatttcaccattagtactctttcatagatggaacaaattgagtactatattgacttgttattaaaattaaacttaagactagatttttactagtgttaagataggttaccatcaatgagtaaaactctaagagagtttaggtcccatccctcaaaatttcatgctttaattttgtatggagattaagcgatttattataaccatacacttttcgattccaagaaaatcttgctagcaaaaattagtgtccattattacatggtcacttttctccttttgtatacttagctttgaaaacttaatcataggagattaattttcacacttacttaattgctcattaattttgatactaagcatatcaaaattaaacactaatttagacaccaaacatgtctaagggcccatttgtttggtcttaatagacctcttgatctgattcggtcagatct

SEQ ID NO: 333182 - DNA, 836 bp, Cannabis indica
ctcgcattcgacgaacaaaggcgtatgttcgctgaatggatagataaagagatggaggcattaagggctcaccatgcagagattgaagatcgtagttggcaagccaccgtgttgatacaaagagcctaccaaactgtaggtcagaaattgccaaacgtcattcccttgggagaaacagaagaggacccaacgatgaatacttcccagactaataatggtcagctgcccaatccgcagtcacgagttccgctcgtgggcccagtggtaggcgagcaaaccttgtccagtaattcatcaggaggagtcatacctgacgcctccaaccagactaatggtgccattccacccgtcaaccaagcgaatcaatcgctaaggcaatcaggctcttctgtgttcgaaaggttgggagcaacccatgacctaaggaacgatctaaacagaagaaggggaacaaatgaacagaatactacaacaatcgtgcagccaggagcccgtactgaaatcaccactcataaagattatgacgtactccaaatcaaccagaatgcggagcaggtcagcccagccgtacaggcttatcttgaggaattgaaaaatatgtttcatggcatggctggacaacgtaataatgatcttgagttagaccgagcatgcaaaactcccttctcaccagagatcaatctcctgccactacctcacaagttcaaaatgccgacgtggaagatgtatactgggagagaagatcatatttcccatctcaagtactttgagatgcaaatggatttgcaaggagcacgaggggatgtatgctgtagaatcttccccaccactctgtc

SEQ ID NO: 333183 - DNA, 1039 bp, Cannabis indica
aatttagaaccaattttaaaaactttgctattatctatggggtctataggtacctcgatagtgtcttccgcggcttggactgctacagcatgatcaaggagccttggatccagatctggtccatccgtgtgcggcacctcttcgatccggaggaccacctggcgaggaggtggtgcctccaataaatagataacatttattgactttttctccgcgagcttaactgctgcattgtagcattcttgtgagtctgacttgactcctcgcgcagagcctactccagcgggagtagggaacttcattgtgagatgatagatcgaggttacgatcttcatctccttcaatattggtcgaccaatcacggcattgtatgccgaatactggtcaattactgcaaagtcagccattgacttggctgttactcgggcggttcccaaggtaatcgagagtttaaccatccctttcagtgcgatgaagtcgccggtaaaaccgtatatactcgacatcacaagtcgcaagtccttctcatgcaaccccatttgtttaaaagcttggaaattcaagagattcactgaacttccgttgtccacgagtatatggtggacattatctccgccaatattggcgacgatgactaatgcgtcagaatgcgggtgctggacccatctcgcatcactctccatgacggtgaggtcatcgcattctcttttaaacaatttttctggccgttcaccgagattgtttacattagtgagcgacttctctttagcttctttggcatatcgctcttgagatttgcgggagtctcctgcgatatggggtcctctaatgatcgttaatatattgcgaggtgttctcgaaccactcgcgttctgattttcttctttgtcatccgctcagggatgacctccctcgttctttttgtatttgtcgaactttcctcttcgaattagctcctcaatttcatcctgcaagacccaacattccaaagtagtgtgaccaatatctttatggtacatacagaactttttggggtctc

SEQ ID NO: 333184 - DNA, 999 bp, Cannabis indica
gcggtgtgggattgcacagcttacccagtgtttccccttatggatcacgggactactgactgtcacaactaaaatattacaagtaaataaatatcaattaaaatgtccttatatctaggcaaatatcccacaaatattggacaattggttattttcgattgaggatgcaccaatttgaaatggagtgctgaacacatgtgttttggactgccgatgctatcacacgatgccacataggctgtggcggtgtgctccaccaaccctcgcttagccgcattttcccattctcgagtaaaatgcattagatttccttgcaagctaattttggacccgatatcttcaaaattgagtcatacctgtgagacacactttggtccgtatcaaaattatcttttcaacgcaagttgaaccatatcatttggataaaaattgagagagttatgcctattttactgaaggaagtttattctatcttgtacaaattgcgagcactgccatgaccaaatggcagaggttggaaatgcatgttctctgaccccttaggtagtgttttgaatttttttattggaaaatcatattttggaggtctcgtgactaaaaaacctcatttcgacgtctgagaccttaaaaggtgaccactgccaccagttggggccaaatgatggcacaggtcacccaggtgtctctcacttatatttggtacatggatgttgaaaatataatttggtcaataaattcctcttcctgatgtggtaaccgacctgtgccatttcactatggcatttgtctccaatttggacagcattgccattctcttatggcactaggtcacccaaggcgactcctaagccgaaaatgactttcctcacttgtttcttactccttgatgtcgtgagaacccactccgacaattttcctcccatagtttgtgaggagtgacctgcgccattctaccatggcagaggtctacaaaactggagagcactgccatttccttat

SEQ ID NO: 333185 - DNA, 933 bp, Cannabis indica
gagtggacagaggaatgttaaaaagcttttcaggagctaaaaatgcaacttgcaaagcctctcgtactctcgaaacctctggacggagaagagcttgggatatacttggctgtcagggagcatgttgtgagtgtcgtgctaatcaaagagaaaacaacatacaacacccggtctattacattagtaaaagactcattgaggccgaaggccgatacccattgatagagaaactcgcttactgcctgattctagcaacaagaaagttaaggccctattttcaagcgcttcctgttcgggtgtacactgaacaaccattacgccaaatattgcaaaagccagacgcttctggacgtttactcaagtgggcgttggatctgggtcagtatgaaattaccttccaaccccgaaaacaaatcaaaggacaggccctagcagactttgtggtagaatacataggcaaagaagaaagcatatcgaaagacaaccccgagccagtgtaaataccttagccaagtaatagtgaagacaagccgacttggaaattacatgtggacaaatgggctacagatcaattatctggtgcaggaatcgcccttgtcacacctggggggcaacacctgcacactgcagttaagtttggattcaaagcatccaataacaaagttgaatatgaagctttgatcgctggcctaagactatcccgagagatgaaagccgaacacatcgaaatctgtagtgattaacagctagtggtaaatcacgttgttgacttcgcttttagccaacgacaatgagtcttttaataagcgataaacgatatgtcgtaatatgaatacgtaataaagcaaataataataataagaagacacaaaaattttatagaggttcagccccgagcagttcggtaatagcctaatcctcgttagttgtatt

SEQ ID NO: 333186 - DNA, 587 bp, Cannabis indica
taataatatgttatgtgttatatatttgtaatattattttatctttttaataaatttatgtatttttaggtgttatttcgaatttcttaaaatttcgcaagatgtgttaaataagggtaaatattattttagattgtgttttgcaaaagttactgattggatcttctgtttcgttaaatgacaaaattgaccctgtatttttcaaaatagtataaataggacctgagtttaatttttgataattttttttaatataacaacttgaagacaattcataatacgaatggatatagaaaatgtaaacagttttgtcataacacctttagatcggattagggtcttatttgtaccattttagaaaatacaagatctattttatcatttaacaaaacagagagtgcaattggtaacttttgcaaaacacagggttcaagattgtatttatctgttaaataaagggattatttcacaaaaaaaaaaaaaaaaaaaaaaaattacaaaaaaacggtttcacggaattttaaacattttacgatttttttattttatttatagaaaatacggtttatgttgtaatcttgttaatt

SEQ ID NO: 333187 - DNA, 772 bp, Cannabis indica
accttttgcttcttgggtcgccctactggttgcttctcagcaagcactccaactgtcatgttctatatgtcatcaggcaatttccaatcatcctcgtcactaactagcataattatgccttcatatgtgctcctccaatattttgttgtgtaatatggcgagcatagcgcgtacatgctaatactttattgttgagcttcaacacatgcatgaagacaagaaaacttcatgatttggaataaaccgcaagtgcaagtctattcctgcaggtccactacgccaccagtctcaattttttctccagggtgaacctgcaacgtgtaaggtccacatgtgtcaacgttcaaatactgagatttttcaaaatgcaatgccaaatcctcctctatttctggtgctagggtttttgtccacttgtcagctttttcttttcacgtagcaaatcactgttggacttttgacctcgggaatgctacaacagcagtgatcaaaaagcctcttgcgttcttagttgtgttgttgaagctctcagcccaggtactcgtcattacattgtaatgtacccctagaaagtacgaccgaacccatttatcaaatctaatttcctcaagatattgtgcaattgcaacattcattgctcgaatgttctcaaattatctgtgaaactctgattttgaatacttgtaggcacttgtgtaaatataattcgtcaagacatcagtcttgtacttgtggttgacgttcataataatgtggtggtagcatgcaccgt

SEQ ID NO: 333188 - DNA, 557 bp, Cannabis indica
agggtcgaaagattttacttgagagatattatctaagaattcatattctgagatatttttgtaagagctataagaaaaagaacctttctccttgttcttgagttaatacaaataacgaggattaggctattaccgaactgctcggggctaacctctataaaattcttatgtccttatattgctttattatatttcaatcgttttaaactacttgtagcttactaaattagactcattgtcgttggctaaaagcgaggtcaacattttggtgctttcattgagagaagtatcaataattactcttcactctaaatttaacgacaagtacgatggtggtacatactcgtaggggcctggttgatctagcaaatccacaggcggtggatcctgcattgcaaaatccaggatatacaagggttctgccagctgttaatccctagcaaccgtcaaacgcgggccatggtgtgaggactcctgtggatgaaatcacgcctggtgtgcaagagactgcgaataccagttcagcacccagcgagggcattcataacacagacgtt

SEQ ID NO: 333189 - DNA, 1259 bp, Cannabis indica
tctgaatcacattaggacattcctgagaagacttcaataatcaatgttggaacctcttcaaaccagcataactcattgtctagcttaagggcatgtttagccaattgattgaccgtagtgttacctttgcgggacacatgggacaaaactgccctcagaaatttagacaataaagctatgacatcctctaatagcacacccatctcattaacgaaaaccttcccgttattgatggccataactacggagagagaatcagatttaaccgcttctaggggaattccacacaaatgagcccaatttagtccagtcagcgaggcaaaagtttcagcttgaaaaacagtaatactacctgtaaagaatcaaacaatagacaaacaaaacaacattattataggcaggaaaacctactattcacaaattagagaaaaatagtaacaatactaaacactcaaataaaaccctttaacaccgatctaaaattacagtaaaacaaaaaagaaaaataaaactaaacaccccttaataaccaaagtgtaaagtcctacactttggttagtaactaacaaagttataattcgtgtacaaactgagcaaatagacacacataatccatactcctctactaagaatcctttggttagtactagtccttaatgcagtgtaattaaattgtcaaaatcctcaaacttttagaaatactattgttcactatatgaaataaaaaccttaaaattaatctacagtactaatctcgtaatggtttgtttaatgcaaccattactgtatgatttgctgacataataatggcttccacaccaaataacttagattcttttaagacagttgcatctaccagcgaagtggatccattgattgtgaaaggatccctttgagaaggagagtagttagaaaccccctcctcactcatagccaaaattttctttactagctccttcgttaaatcaacagagtcacagaaacttgagatccaactaattatttgcttagggtgtttttgaggatcaccatgagtcattttatttctctccttccatattgcccatgaaataataattaatctttcaaatgaatttttctccataatctcagaagcatatcttattaattaaaagataaatcttccttcgcctcgtgaaggaaaaggtaatctaataaagtctaaattccttgagcccatggacaccaaaaaattagggaaatttacaaaaatactagaatttggggtaacttttaca

SEQ ID NO: 333190 - DNA, 526 bp, Cannabis indica
taggaatacatttaatcacataatcttgattactttgcactgtgttgacatcacaataaacaagaatattaatgtgataaggattttaatgaatttataaatcaaacaagtgatctcatgaaccaaataacacattaaataagtaatgaaataaatctgtttctttattgatgtttactgagtttttcgacaactaaatatttctagagcttaagaaggtaataattgagtaaatagtgaaataacaaacaatagattttgacgtggttcaggcattaattatccttatccacaagtctattttattaggctccttggttgccaactgtttatacaaataaaggtacaatggactaagactccttcccgtcgtgttcctcttaataaagaagaagcttagtcggaatattctacagttaatagtagggttacagacatatgtttgtttggaatcatgaagaatgggtcttcgatccaaaaagaaaggtcctcctctcttgtgctttgtttggggtatttataggcc

SEQ ID NO: 333191 - DNA, 810 bp, Cannabis indica
atagcgatctggataataattccatcggtagaaatacaactgaaaggggagtaagtcatttcctgctatcacaaggggcccgaaactctataacaaatcttgttgttttttttttttaattcttatttgtgcaaacatgtggcaagcatcagatctatatgaccccattgtcggttgatcactttttgagctcaacaatttggtgctttcattgagtgcgtgaatatcatgatcctatcaaacgccatggtgaacgcaagaagaactcctattgcaccatctacatctttgagtctccctcatgacccacaaatcgtagatccgggcattcacgttccagtcacaactggaatctccatgaatactatagaagcgatgaatcccgtcaccacaacaagcgctacaagcctagccaccatagctggccaagttgacaagatcaccccagtggataaaagtggcaggcacatgcctctaggaatagacccaccattggcgcctcccactgaaggaatgacacaggggcgacaacccctagaacaataactggacctcaactccagttctatgctagagaaataagcttgggagtgggtgaccagcaattggccagcctcactttgacctaggagaagacattgagttggcaagtctcagggaacctataggtcatgcaggcctaactgaggaaccacgtgctgctgattgcgatgtttttgctcagtagagacacaaattcctgagatggatggatgaccaggagtacatcctgttgggttttatgccctaaataatactcatttcaatata

SEQ ID NO: 333192 - DNA, 1119 bp, Cannabis indica
aaaaaattcctaaaaattattagaaaatatttatttatttttgtataaagtaatttgcgacgtaaatacctaaggtgacgtttagtttactaaaatgtaattgtaatggtaataggaatagtaataaaatgtaatacgattaccatgtttggcttattttataatggacattgtaattagtttttttatttggtttagtataaaactaaaattgaataattaatgtattgactaaaatgtcctcattttatttattgttaactacatttggtaaagagataagagagagagaagggtatacaagtctttttgtaatatattggtaattgtaatcctcattcatgagttatatctatgtaatgagaattcatgcaactcgtgtaatgctcattataatgtaaagagattacaaaagttaaaaggctcaaccaaacattctaattgtaatctctattacattccaatcttgattacaccaaagcaaacatgttataagtttaactcgcaaacgagtcaggtcattctctaaagaatggttgcctatttgccttgattgcatttagaaccaatgattccccgtcgtgacaacacatcaatgtcctctctcttacaaaaatttttggttgcaaataaatacttaagtttaatttttacagtaataatactcaagttatattttagaacttttgtatgtatgcaactattaagtctcaagttattatccacgtattattttcttatttaatttttaaataaaaaaataaatatttaatgatttggactaattagggattgttacgtggctattgacttgacacttaatggttaggtacctatgaacgtttcgaaaaatataacttaagtattttaacagttaaaaaataaacttaagtattgatgccacaaattattttttttatatatattttatttatgcttaattatgtaaaagttgagttatactattatgctccattgcattattttaaatcttgatgtaaaatttaaaatgttatttaatgaaaaatcaacacaaaaggttaataaaaagtaacaaataagtaaccaaaagagtttgaagatttttgttttggaaataaatattaaaagaaaacaaat

SEQ ID NO: 333193 - DNA, 1196 bp, Cannabis indica
gatgatttcaaaaaaaaaatttgtgatagttcaaaccgcataaaccgcaccgcaccgcaccgcatcatttttagcggtgccgtttttgcggttttttagtatcgcggtgcgggtgcggtttggaaaattggaaaaaccacatgtgcgggttggtttgaaaaaatggttgaaaaccgcaccacccgtaccgcgaacacccgtacttctacccttgtagcccccacgaccttttccaaccttagtcctacaattagggtttcgtactcggcttcgttgttagaagctggaaatgcgaagcacagggtagcctggacccgaagtccgtcaggagatatcattgctatcccgacgccggatccactttcatttgatgccccatcaacgaacaccttccacgccggcgtctgtgtggctggtatacttgagctggcctccgcctcattgcatttcattatgaagtttgtcagggcttgtccctttatggaaatgcgtgggatgtaatgtatgtcgatgctcaattccatggcccatttaaggtgtcttcccgagtcttctggcttttgcaagacttcccgaatcggatgaattgtaagtaccttaatgggatgggcctgaaagtagggtctcaatttcctcgaagccatcaggaaaaaaactaatttctcgattaaaggatgtcgtgtcttagctcttatcatgcgcttgctaacatagtacaccagatgttggaccttgtcctcttcccagactagggtcgcgttgacagcgttctcagaaacggcaaactataataataagtcctctccgtgaactggttttgacagtaccggtggtttggcatgtgctcttttatttttttgaatgcctcctcccattcttcactccactcaaatttttgacatttcttcaaaatattgaagaacgggatgcacttgtcagttgaccaggaaattaatcgactcaaggcggcaacctttgcacatccttgtgtttcttggggagggcatgtttagtaacgcctgaatttttttggggtttgcctctattcctcgttggttgacgataaatcccagaaactttcccgatttgacgccaaaggtacccttctttggattaagcttcatcccatatcttcggaccacttcgaagcattatgtgaggtcctctgcatgctctatgtgttggaaatattttac

SEQ ID NO: 333194 - DNA, 618 bp, Cannabis indica
ctttacaatctatctgccccttccaagcagcacacttttaattacaaactttccaaccaatctttatctccatgtactatttttttttattccaagctttgaattctatgtttggtttctttctttatacactgtataactgtgtctactggtgctgttgtttgattctagaacagttgattcttgcatctccatatgtggtatatcgttgctaggggtattcatcaaaccgttcaaaccgcctgcaccatactgcaccgccaaaaaatgtggtttgaaattctttgcggtgcggtcgcggtttgaatttttcttaaaccgcgaggtgcgatgcggtttgcggttttaaattattaatatgcggttcaaaccgcaccgcaccgcacattataaaaataccaatttttatatttagctaggtccaatatgtgaatgtccaacccaaagcccactaattattgtattattgaaatttattttttttttttttcattatttattttcaaaccttaaagtatttttgacaagtcttgctcaagctttgttgtatttgtgatagtttaattattggtgatagtccaaactgcaaaaaccgcaccgcaccgcatcatttttttg

SEQ ID NO: 333195 - DNA, 684 bp, Cannabis indica
  modified_base (55)..(55): a, c, t, g, unknown or other
cttgcagggttgttggaattggtaaggtggctataaggaaattcaatggtgaagngaagattttgcataatgtgaggcacattctagaattgaggaggaatctaatatcacttagaacctagaaagatgaaggttatgtctataagtcgttgaatgagagcctaaggatcacaaacggttcaatgcttatgatgaaaggaaagagagtacatggattgtatgtactcaagggtgaaactgtacctgtggctaaggcaaataaaataaaagatttataaagtgatatgcagctatggcatcaaaggcttggatatatgagtgaacaagacatgagggaattgcacaagaagagtcattgaaaagcttcagacatgtgctattaccattctgtagagacttgtgtctatggcaagaaacaaaagatcaagtttatagcagctactcacaacacaaaggcagtcctagagtatgtgcatgctgacctttgggggctaagtagaatcccaacacattcaggtaaacactacttcctatctattattgatgatttcagtagatgtgtttggacctatttatttaagaccaaagatgagtctctagaacaatttcagatatggaaagcttaagtggaaaacaaagcaaatttaaaggttaagacacttagaaccgataatggtctagaat

SEQ ID NO: 333196 - DNA, 822 bp, Cannabis indica
acaaaattaaaaaataaaaattatataattttttttaaaaaaaagatatatacatgatttagaaaaaattataaaaatgaaatcaaaataagtattgaaattaacataaaataatatgatcttgtatctttgtggtgattttgggtaatgatcttccaagaaaataagacttaaggttttctaattttttctcttgataagggaagatgagaatagaatggctcttgcttattgagaccactgccactatataacctaataggtcattaattatagtatttttaattttgcccaaaacatagaaatatcttttaaagtatctacacatttagctcatgacactttaatacataatgacccacaattactaaaatgatcactttatttgggtcaaactttatatagcaatacacacaaatacatacgagcccacattagagattttaattcaacaatgcacttaggctacatatattttcttatagtgtataaccttattagcgcttaaactttgctatcataattataggtatttcaaaataatctcgtgtattgattatactaacataggattaaaggtatttttctcaatcatttatttatttttcacaaataccactttttgtaattttaattctataaataccaaaattatttatttaataattaaaactaattatcaaataaaattgtcatttatattatttattaattagactcaataaagtctctcaattaataactaaaccctaaaattctatttcttcacaatcaagccatatcttagtgaaaaattcataacctagacatagtctaatttta

SEQ ID NO: 333197 - DNA, 784 bp, Cannabis indica
atatataatatatatatataggagataaaaaaagaagtgttcaaacagctggagtcctaagctctgggttcggttcttctgagccaactggagcaggaggatctgttgttcgagcaggagaagcatcagcggcctggtcagaagcttggccgaaagttgaagcaaccacctctttcccaccacaggcaacttatgccgcacggtactcgaggtacatgtccttagcgtcgcccaagtagtcgaagtttgcctggggattagccttccaaaaatcaaagaagagctcgaggccggcagtctccaaagcattgaccttctccttcaaacggtccgcctcggccacttgagggtccttatcctcctttagccgaagaaggacttgctgtagggaactcctctcatcctaaagacgatcaacttcagtagataaggtctcgatggtttccttaaagcgatcagcagcctcgaggtcctttgttagcacggtgatcttcttctcggcggcaaacagcttcttgttggccaactcatggcgaacagctccagtctccgccctaactgcctcagcttccttgttggcgaagtccgcctccgcccttaaggtgtcgaatagagccgcactcttagaagtagcagatttagcccgggagtaggtgtaagccaacttcaaaccggcttgcataaaggaaaaagtcagcatatggagctaagtgtgaaaagttaaaagggaagtatcaaaaaagactaaccctggtaagctcctccaagactccgcccaccaaca

SEQ ID NO: 333198 - DNA, 1082 bp, Cannabis indica
gatgccacgtcagagtgcaaaaattgggataacatttataattataattaatgatcaaataaaatttccatttaacttatttattaattagacctttcaaaggctcttaattaacaaacaaaccttaaaatctattttcttctctaataagcccttgcttagtgaaaaactaataaataagactgtattcatgagaattctaatagattaattaaatcaataactgagtctacaagataatattatctcaactagtatgaggaccatgggcctatataactaagctcccaataagtagttcgagaatttactcatcttattaattcctcctgactcaactatagatttagaattgcactcctgataatatagaatgctctataccaagtacagatacgctataaattatttattttttcagtccaaataattaatgatcctcattgatgatctacaccgagtagggataaatttaccgttctacccttcaatttattttatccttaaaatactcagctacttataaatgatattccagtgaactaatataattactgaaatgagtattccaccttttaaacttgtttagccaagctcaaatgaaatcatcattttacttctatgtatctataagttagaaaagatattacggtaagtttatgatatctttttcatttaacaatacatccaatacatgcttactttactaatgccttggaaaaggcattctacatacaagtgtaagtaaaccaaattgttgattatcatattagtgtaaactctgtatactgataaatcatgtaacaaataaatttaatcagacaatcttaattattttccactgtgtagacaccacaataatcatgatgaatactaatgtaataaggatttaatagaatttatatatcaaacatgatcatgaaataaacatgtgagctaactattatatttgttatctatatttttactaagatgacacgtggatactaattaaagaaagttgaagtgtaacgtccccgcttcaagcctccattgggtccttatacccacagaatgaatggctcttatacacgagtacgtca

SEQ ID NO: 333199 - DNA, 2033 bp, Cannabis indica
taatctggattacattgaaacagagttttatttagggcataaaacccaacagattgatcatggtacaccatgtcagagtgtgggggcatggagaaggccatgaagagtcttagggacttggaggtacacaggaaatctatccgggaggaagcccagtagaaggaggcccttatggagcggagccactaggaggcgctgaaggcaaaggtcgatgagctgaaggcgaaggatgatgtgttgaaggtgagggatgcggctgtggccaccacgagacgagagcttcaagatgctaaggagacagtgcaaaaactgaccgccaagctgaagtctctagaagagctacatcaagctgacctgcaaacgatagccaacttgactgtagaagtaaaagggctttgtgaattcaaggagcaggcttagaaggaggcagctaaggcgaagagaaatggcctcctggccccaatcacctgccaacactataagaagaattttgacgatacagtcttcatggcctggcagaccaattgccagaatcttaacctctgtttttaccccaagcctgaagaggtccttattttattctgggagaagaagaaaaggctacatgcagtgttggagtagcgcaggggccctcgtcttccacctcgggctgattgaaccactcgttccaacactattatcattatcttccctttttttagctacatattccatctttccccctgtttctaagacaattcataatttttttttcttaagggagacattttatggcccgtccccaggcctttttcttttttaaagtgtttctttggaatctaaacgacttacattatgtttgaatatatatagcttttaacctccttaaatttggtctgtttacatttgtccatgtgatatgccttactacccctttagtgacatgaaaatcaatttttaagtcactcagtcttataaaattaaattagaggttgcatatatttgtccagcacaaatgtactttaccgaacataaactttatttttcaactattggtaatactttcggaggtgatcggcattccaggccctaggcaccaaggttctgtccattctttttagcttgtaggtcccagagccaatttcgtcctaaatttcatatggtccttcccaatttggcctaggtaccccactccgggttcctgagtggctgggaagacccttcttaataatagatcaccaatagtaaatttcctgtttttgaccttggagttgaaatgtttagccaccttcttttgataagctaccattcgtatttgagactcatcccgaagttcgtcgatttgatccagtgcttcttgtaataaagccttgtttgttatcggatcgtaagtcgtactcctgttggatgggaacaaagtttccaccgggaccattgcctcacaaccgtatgctattgagaatggcgagtggctggttgtggttcttggggtggtctggtaggcccataacactcttggaaattcctcgagccaattgtttttgtaggcaagtagcttcttcttcagggtgacctttaagattttattgacggcttctgcttgtccatttgtttgtggccttgcgaacgcagacaaacttttaatgactccgtgttggttgctgaagtcgctgaattcttcgctgtcaaactgctttccattgtctgagactatcttatgaggcaagccatatcgacacactatgtttttgataacaaagtctagtgcttttttaacagttatagtcttcattggctcggcctctgtccactttgtgaagtagtctacggctactatggcatactttacccctccctttcctgttggtaatgacccaatgagatctatcccgcataccgcgtagggccaggagctagtcatcagtgtgatctcattgggtgggggggctcttggtatgttcgtgaacctttggcacgaatcacatttaaggacatagtctatacaatattttttcattgttggccaaaagtatccttgtctcagtattttcttt

SEQ ID NO: 333200 - DNA, 531 bp, Cannabis indica
aattatctgcaataatatgaaattgggaataaacatcccatactaataattgaaactaaattatttaataactaaaataattaattcaaaaattaaagaagataacgagcttcatcttcaacttggacaatctccacccctctgtccaaccatccgtctcaactcgctaggataacaatccaagtttaagcagctggagctgaaataaaaagaaaataaacatggttaatatatctagaattaataactaaaggggataatgattctcaaaaacacatgaactcacaataaagttggaaataccttgtttctttgccaaaaacttaggacaccgggattttcagtgcccattttgttgctatagaagcattttccttttttcctttgctttttggtattagtagcctttttacccttacttagctatgttaacaactttaagaggcttcttgctattcttccatttcttcttcttaggtttcaaaagtagaggcaatgttgcctcaggctttgtcgtatcagcagcagcag

SEQ ID NO: 333201 - DNA, 595 bp, Cannabis indica
ttaaagaccgcttggccggtcatgatgtcttataaaaggccctgaggccgaataagatacataaaaataaagagataaaaggagatatgtttaaacagctggagtcccaggctcttggttcggttcttcttggccaattggagctggaggatctgttgtttgaacagtaggtacatcagcagtctgaccgaaggttgaagtagccacctcaatttcgccatagaccacttgggacgtgcagaaatcaaggtacatgtccttagcatcacccaagtagtcaatgttggcctgaggattagtcttccaaaagtcaaagaagagctcaagaccggttgtctccaaggcattgaccttctctttcagctttgtcagcttggccgtaagctcctcctccttagcttccttctcctccttcacccgatgaagaactgttcgaagagaagtcctctcattctgaagattgttcacttcagcaaataaggtctcgatggtctcctcaagacggtcagaaacctcgagatccttagttagctcaattatcttcttctaggcagcaaacaacttcttgttggcttcacctaactccaaccgaaca

SEQ ID NO: 333202 - DNA, 794 bp, Cannabis indica
agaattcgggaaatgggtatttttcagtttagttatgggtacctggtataagcaatgttgcctctatcgtgtaggttacatcaattcactttataacggtagttaactgtaattgatcgggaaattttaaagttgtgacagttcaagagaaattgatagaaattaagataagtaaaaatgaacaagattcaagttgataaaaagatgagaaatcctcaagtttaagtgaacagaaccgatgagaaattgtaagagatgaatgaagggagtgatggtacttgatttttttttacgaaagaatgaaagcaagaaatacaattaggaacgacaaagaagcatctactttttgataacctaccatgagcttaccttggagttaagcatacttaacttgagtaatcttaagataggaaatctttcagggagtcatctcgaaaggcatatgctagaaagatacatattaggatgcataatcgatagtcgatccagagatttctaagaggaaagaatgtgttaacaagtaaagatttaccaggtatcaagatgagttaatgttagtgggtggaaataagaaatgcactgattgaatacctataagaaatgaatacttaacttattattaacctaagtcagtaggtcagcttaggacgtcccatataaggaatggaaagacataattatgaattgttgtgggatcttataatttcgactggatagtaatggttggacataccaagttaatatgttgtttatcaatatagataatttatacaataaataaggatatggaattc

SEQ ID NO: 333203 - DNA, 449 bp, Cannabis indica
gcgttatcggctgttcatgacgtatttcactttttgatgttgaggaaatacgtgtcagacccgactcatatcttgaattatgaagcccttgaactacaatcaaacttgtcttatgaagagcaacctgtatagattctggataagaaaggaaaagttctttggaataagactattgctccggttaaggtgctctagaggaacagtaagatggaagtagccacctgggagttagagttgtatatgaggactcaacatccagagctattcagattagatttcgacgacgaaatccttttaacggggggataattgtaatgacctaatttggatcaataaaggcaattagcactaatttttattattttattattatttgtgaattaatttaattgtggacccccaatatttagaaataaatattagagttataatttctcaattccggagat

SEQ ID NO: 333204 - DNA, 512 bp, Cannabis indica
aaaaataaatattattaatttaaaaaatgatatttaagtttaaatatatcaacaataacattttattttaattttagggtttgaaaattgcaaaaaatcccacaaaaatcaaatttttggggaaaaccacttggttgcgtagcaagaggctgcatgcagcctccttacgtgcgtggagaggggagatgcagggttccgtgtgcggcattctttggcccctacaggctgggacacaggcgaaagtgcagcgtctgggcgggcgagtcgtgtctgaagcctggcgtgccgtgtctgaagacacggaatgtctgagtgagcgcgcgcgtggtgttccttgtccgaaactcttggtgcttgcgaggaccaagcttcgacaccatgttaacctggttttcaaaatttcataactttctcaatttttattggaatcgagttccgtaaaaaacaaattaatttttcacaaggaatccaaataaaatattttcagtaagaaaaaaaatatttttcatgga

SEQ ID NO: 333205 - DNA, 580 bp, Cannabis indica
agtgaaaacacccttataaaaatgcatagcttagctctaacttatattccatatggtagagctcgtcacaagctttaaaatgatattaaaaacgtccaaaataaacatctgagtgaaaagtaatagccataatacaaaaaatagtctcctcggtaaagtcccatttcgaaagctcccccattatggaagctctcccatttcggaagctctcccattatggaagctttcccatcacggaagctctcccatcacggaagctttcccattacagaagctttcccatcatggaagctctcccatcatgaaagctctcccattccggaagctctcccatcatggaagctttcccattccaaaagctctcccatgaagctctcccatcatggaagttctcccatgctagaagctcctattgggcaataagggctcgaaaattcccaatttttaggcccccaaaagtagctcccaacttaaccaaaaggtaccaaacttttcaaaatagaaatttggggtaatctaaacataatccacaactcaaaagcatctaaaacaacatgcaatgaaattcaccatggatgag

SEQ ID NO: 333206 - DNA, 875 bp, Cannabis indica
atttttctaattttcaattttgtataaaaataggctgatccccagacgggggaacttcccagtgttgtggatacttttgcaaagttccactacaagaacaacaaatgtagcaatgagcacacacaacaactgcatgtaagtaattttatatttttaataaattagttttatatttgaatttctatttaactctaatagtttcatgaaattttttgcaagccaaaatggttcagattcgtgaaactcaaccagtgccaactaatatcccgtgctagtacaatgttgacccacccaatttcctgtagatatgcatgttatgacacatgtgttgggtgagcgatcatgctacttgagaggatcgggccagttgccaagacttaagacgggggtaaaaagagcaactcccagggcaggtcctttcgggcagcccactgtcactcaagaggaatataaggcagtgaagcgaatggtggaagagcaagaagcacggaacgagtggcaacaacagatgatgatcactgagaatcaaattatgagtacgttctaacaaaaaatgatccaattggccaacgtcgttccaggatttaacatgttcgagatgcctctaattccaccgatttcacaattttagcctcccggtcatgctactgggtcctcctcacagactgcccatcccggtgatgacgacgatgacgacaatgatgacaatgctgatgccgatttgtattttttttagtctgtagtgtacataatattactgtataggaactaaaaatactttgatttagtttatgacatttaatgtagttttgtaattacaatataaatttcggttttataatatatttgatgttatttttattttaaatttaatt

SEQ ID NO: 333207 - DNA, 463 bp, Cannabis indica
agatcaaaaaatcttaatcctgatatggttaggttcgatctcaagagtgttacttattcgttaaagcttaccaatcagttcgagccaatacttacatcttgggaatgtgatagtataattgagtgggagcgctaatcatagatacagaatctgtagtttctatctagacatagaagtgaaatgataatttccttcgagtttggcttaatatagataaatggaagagctcttatttcagtaattatattagtttattgaaatattatttataaattggtttgatatttaaaaatagtgttttccaaaagagtgttttggaaacaaaaatttgaattttgtatgtgaaaaattgtttctaaaaatgtgattggttgtagtgtaattttgtgtttttgagttttaaaagttggatttgtgattggttgagaatctcaaaataaaaaagtaagagggtatttgaaga

SEQ ID NO: 333208 - DNA, 742 bp, Cannabis indica
ggaagagtcaattttccatgttttggttcaatgcccatttactcattcatgttggctccgatctgcgttaggtgttggccattccacagcaaacaatttttttgactggtttttggaagtgttggcagtgggcaatatggggttggtggaagaagccgtcatggttggttgggcaatttggaaggctcggaatggtagaagttgtagtgctaccgatgttattttgttggctcgtaccacgcttcgacaatggacgagtgctgagtctaagcggctgagctgggtgtctttggcttccaatcgcactgacacaagagattaatggtccaaaccggctgctggtcagtaaaaaattaatgtggatggggcgatttttgaagccacaaatgagataggcacgagttttgtagcacgcgactgtgatggccgagtgatggaggcgttttcaactatttcttctatcagctgccgacccgaaattgcagaagttctcagtatcaaagaagcacttagttggataaagaggaataacaggtcaaatgtcattttagagacagactgccttttagttgttcaagctattcttagttcagtatctatgccttctatttttggtttatttgttaaagactgtcaaattattttatcttctttaagtaatgtttttattagtcatgttaaacgatctgctaacaaagccgcgcactgtatgacacgtagtacttgttattggtcaggtcgt

SEQ ID NO: 333209 - DNA, 654 bp, Cannabis indica
aggcaagctcaaacacttattttctatactaaaataccaagtatatggcaagctctcaatagtgctcaattatttttacccattagtacatcgcagatacagccaacacctcgcttaggcaccaccccgattcaatccagcagcacaaactccaagaggtttgctggcgtaacatctcagaaatatgaaagagtcaaaccccattgaaaatgtttgggtcgtgaattatttaccaacgacagaagattgtttgtctcattttaaggcccaatggtccacttggtaaataccatcctcttatatattggatatataaaaataaagaggcacattagaagaacgagaaggaatcaatcaatgcttggacactatatgtgcagatagcccaacacctacagattaccaggtgcactttttcttttattttaatcaagtccaacactttggtcaaataatcattttatatttgatacattagaatccgttaacttctgtggcgaatagaaatacatttgaatgcatgataaagctatatttttacatgtgctcattttatttgcaaaatggagtgaaacatgacacttatttcttgtataattatttatgagcgtattgcaatacctattttttcataatcgcaaattggcgagccca

SEQ ID NO: 333210 - DNA, 642 bp, Cannabis indica
agggccggcaaaacgggtcagacacaatgacacgactcgaaactcgcacgagagttagcgggtttgggtttgccttaaatgggttcgggtcatgttcgggttgactcgtctaacccgtttaataaacaggtcgtgttcgggttgacacggctaacacgaaattgacccgttaatgacctatttaaagttattttagtactttaacgtgtcataaatgggttacaaacgtgttgaatatttcataaacgtgttattaattgacatgtttgaacaaaatatacttataaacgggttacacaggtcgggtctgtcaacccgcttataaacgtgtcgtgttcatttttttgacacgattattaaacgggtcgtgttcgggtcgagcatgcacctgttatacatgagtctcaacacgacacgaacaagacttgcgaacacgaattgctacccctagctgtgcaggttaacggaagaagagagaggtcgtccacagtcatcgatggtccaggcggatccaagaattttttgtatatatttcggtgtaatttttagttcaattttggttgattttgtttgataattgtttgtatttagcacctatatttttgagatttgtttttccattgagtttaatgtatgtatttt

SEQ ID NO: 333211 - DNA, 773 bp, Cannabis indica
taatagcctaatcctcgttacctatattgacttaagctcaaggggaaagattccttttcttatagctcttacaacagtatctctgaatgtataattcctagataatatatttagggtatagtcttagctcaactgtttttcgaccgatcccttgcccagtgaatatgcatcactatttatacgactagtaagcttggggaggaagagtttcccctctcgttacaatgcgtataaatagaaagattgtgggatcaatgctgaatgcaaggatcgtgggattgaggctgaatacactgatagtgggatcgtatgtatgccatatccacgtaaattgatccatgaattatagggattgtgctgatgactcacgatgcgaaagctgaattcgctaagtgttggttgctctatgcggattgctgaatactttgccctgggcaggccagcgaggcatcctgctcagactatgcttcccgagcaggtgttccaagtggattccatgtgtcaccattcatgtgatgccacgtgagagtgcaaaaattggcataacatttgcagtggctcgtctctcttcgatttcatcaagttattcagctacgaataggtgattggtatcttgattgtacatcaatcttgtgtgggatggtggctcgagttctatagccagcatagattcataaccgtatgccataacaaatggtgtctgtccaagccgttttctcagttttctgatatgaccattgaactttaggaagttcttctagccaatttccttt

SEQ ID NO: 333212 - DNA, 697 bp, Cannabis indica
cacatcatttcaaaacatctagaatttttattttattttatattgaattaatcaagagaaatataaaatatattatatttttactaaagtactctgttaaaattaaactaatacctaaaaataattttaatattgaatattaaattaattatttttaagaaaatataatgtttttcaattttatgaatatgttgaaagttttttaacaaagaaaatcaagaaaggatttctccatccaaagcatattaaaataatagcatataaatagtttcataacacattgtcaaaaatttaaaaaattaactcattgatgaagattattcaaataaaaatagagtcaccattactatagccctcatcaccgttagagtacattgccaacatttgatatttatttggattcttcatgtaaattcaaatttgatgaaacttgaaaatacaaacacttagggcccgtttggttgatggtaatgggccagaaaagaatgaaatgaaatactaataggcctgattattttgtttggttgaaaaataataattttgtaaaagaattccatagtaatggtattctcccaaactaatggaattgctattccattttttattcggtggaattataattgcattccaatctctcttctactctagccatgggccaagcccaacaaaccctcaccctagctgaagattaacctgc

SEQ ID NO: 333213 - DNA, 566 bp, Cannabis indica
actataccgcgctaacctgtcagaacacacctgaaaagacagcacatgtatactatataataatatagttccattaagcacgtaatcaattaatttcataattttacccttctcgggtcataattactaaaatgcccctggctcaccaacagggtcttaacataataaaattcatataatttcacatatattaaattatataataatataatttcctcaattatacataattatctagttagggttttgctaatccatttcttaattccaggtattacattttttcttcacgtttttctcaacgaacaatcttcaaatcataaaacctaataagaagatataactgttagacatttatatgtataaactgaaacatatgtatgtgtattgtatataacatgcggaataaacaaatatatacactatataaattaatgatcgaaatacctccagccattgattcttgagcttcaaacccacataagctttgatctgcaaaggaaactggttggtgtggataatcgggcttccttgctctctcaactctctttagatggaatttgctg

SEQ ID NO: 333214 - DNA, 683 bp, Cannabis indica
attccaatatacgaaaaataaactaataggtttattggtgtatatcattatgtttgattatcgtttactttgtattgaaaactataaaatattgttccaacaaatggaaactagtaggtttattgacatatataatggtaagctatataaaacgaaatgaattgttgttccaatatatgaaaagaaaaatgtaaatttgtttcaatatgtcaaaataaaccaatagttttattagaatatacgatggtaggctatacgaaaaatgtaaacaaaaaatgaaaaattgtttcaatatgccaaaataaactaataagtttatttggcatatatgagtataggaatatctgactataggatatttggtctgatcctcatctttttattttaaaattgatgattttatcaaaagtaaccaattggaaacttatcgaaatcataactaattggtccaaaaaaatatgtcttgtaataatttaaaaattgtttataacttcattctttatttaactaatcaaaaagcatatattaatatacatttaaaacatatgggtaacttaaacatttatgatatatattttttaaaaatatattttactaaaatggtagcttattggatgacaactcattatttttgaaaataaacttcaaaattagtcaaatgtattaatataacctaaaaaatt

SEQ ID NO: 333215 - DNA, 806 bp, Cannabis indica
aaaatggcagctgccatcatcttgaagaagaagcttgtacttagtcttctttttggttgttgggtaaatagggtacaaaataccctaaaaatagaagtccaattctttccaaccttggcccactaggtttagtcttcttcctccacaatagtcagctggcttaattttgagtaactgacacgctcatgctgatgtggacaactaaaattcatttttccaactctttcctcattactacccagaatgctgaattcgttgtagcattgcttcagcaatttagcccagtttcagcttttgttcccactttggccttgcatcctaggaatttaattcttctttttcaacaaccaacaaacaacatttaattaaataaacacaactaaaattaataatttttacaagacttccaagctaacttactatttagaaaatgaagctagaaactaattaaagttaaataacaaacacactttcactactcttttcacaatgattacagtttaaaggcactaaaaataactctataccatagagttatcccactccaaacttagagtattgctcgtcctcgagtaatgaagaacagaaaaaacaaaacaacaaaaacaaaaacaaaaaatgacagcaacaataaaatacttgcaacagagaagatattgctcattcaaacttggtttagtgaagaaaatgctcttagagttagatgggatggaagtgtagtgacggtagtgaatatgccttaaacttgtgtgtttcaatcgagttttgcatgctatctatgtccttaatacttaccaagaataatt

SEQ ID NO: 333216 - DNA, 1507 bp, Cannabis indica
gtccaccacatcctcctgcatatgtggacaatagtacccatgcttcaaaagggcatgtgtcctatgccacccttgaatgacccgcccacaacgtgtcatgacactcactcagcagcgtcctcctcagatcgcctaccttcggaacaaacaaacgcccacctttggtccacaagagatcatcctctacccaaaactgagttgtctttccttttcttgcgagagccatgatgttctttgcaactaggtccttctccaggttctccttgatgcgctccttgattggtgtacccacttggctagctgacatacccgctaacacctttagagccgccaactctactttacgactaagggcatcagctgcctgatagagacgtcatgccttgtgctcaatgtaaaagtcgaattctgccaagaattcctgccatcgggcctactttggagtcagctttggctgcgtgaggaaatgactaacagtagtattgtctgtcttcaccacaaacttcgaccccaacaactaatgcctccacatccgtaaacaatgaataactgccaggagctctttctcctgcgcagtatatcgcttttttgcttcagaaagcttgcggttctcaaatgccacggggtggccctcctgtataagtacccctcccaaagcataatctgacgcatccgtttgtactttaaagggcttgcatacatctagcaaggataatacaggatcttcaatcttggcttctttcagacttcaaaaagcttcttcgcacttctcagaccacgtccatataacacccttcttcaacaactctgtcaagggttctgctcttctcaaatagccctccacgaatcgtctatagtaattggctagaccgagaaacaagcgtagttgtttcacattggctggggtcatccactcttggatcgctcgcaccttttccaaatccataaggatcttcccgtgttccacaacatgacccagaaacttgatactttcttgagaaaacgagcacttctctcgcttcacatatagctgctctttcctcaacttccaaaacaccgtagccaagtgttcacgatgctcttctaaaggggcattgtagaccacgatatcatctaggtacaccaccacgaacttgtctaaatcttcatggaagacttcattcatgagtgtacagaatgtggctggcgcatttatcaacccaaacggcatgacgcaaaactcgaaagccccataccgagtaacacaagtagtctttggttcatccccttctgcgatagtagcctgacctcaagtccaacttcatgaagtatttttctccacttagctggtcaaatagatcagcgatcaagggaatggggtatttgttgcgcacaatcaccttgttaaggggtgcggtagtctatgcacagtctcaaggtcccgtccttcttcttttagaataacacgggggcaccaaatggtgcctttgatgatttgatgaatcctgcctccaacatcttcgttagc

SEQ ID NO: 333217 - DNA, 619 bp, Cannabis indica
gattacattgaaacagagttttattaagggcataaaacctaacagaccttgcctgggaattcatcaggaggagccatacctgacggatccaaccaaaataatggtgttattccacctttcaaccaagcgaattaatcgctaaggcaaccaggctcttttgtgttcgataggttgggaacaactcatgacctaaggaatgatctaaatagaagaaggggaacagacgagcagaatattccaacgatcgtgctgcccacagcccatacttaaatccccgctcagaaagacactaacataatccaagttgaccagaatgccgagcaagtcagctaagccgtacatatcgtttatcgcttataaaaagattcattatcgttggctaaaagcaaagtcagcagttagttaagcctactttttagtcagggtgatacgtaaattttgggaaccttatagtgcaattgagtgggagcgctaaacatagatatggaatctatagcttctatcaggacatagaagtgaaacaatgatttctttcgagcttggtgtaatagagataaatggaagagctcttgtttaagggattatattagctcactgaaatatcatttataggaagcta

SEQ ID NO: 333218 - DNA, 1664 bp, Cannabis indica
tcatagtatgtaagactgtgaagaatccaaacacaaggaacaaggaaggagtttcgggctcagatcttactgatactctactatagaaaggataaaagggttagagatttgagcggaaggagtcatttaattccgctgcacccactgtaaggtttcttaaactttatatgtatttattttcattgttttagaaattcatattaggatgttaaataacatacatggtagtaaatctagatcctggtaaaataattccaagtttcattcaattcagtatacactgaataaattggtacatacttctcatgcttcttttctttctttttaagagattcatcctttctcttagtatttgatacgtttggattttccacctttattgtcacggtgcttgatgttacagtactagtgctaggtttatctcccgagtcagtctttaatagcttcatttcattttgtgcttcttctttatgcacaaaaatttgtgctcttttattaaaatcattgatatttctcataagacgaccttgcaaatcatcctataattcaccccctctagtagataaatcagttgtaattctagcctaaagggttgttagctgaatgctatcattcaagtttctgacttttgcagcagctatactggttgttgcttgatgttagtcaaagatgacacctctggtcgatgatctcttaaagtttgaaactgctttttgaaatccctcaacaactgttcccaagatgttatagaatggttggtgaatttatcaaaccaactactcgcagctcctatcaaggaagttggaaataatatgcaacacaagttgtttaaaacattgcttgctcgcattatagagttaaaattgtttaaatgggaatcagtggttccatcatattgcgagacatgtggattcttaaatcctggaggaattgcaaatttaaaatgttagggtggaatggcttagtttcttcatttgagtcatatcttggcagttttccatattctctatctttatatttcctacatttttcctctaattgtataacttgcagttgaatgggatccacaggttgttgattcgcgttttgattaagttggtcacgcaaatcagttgcattttaattcaagtgcttgcgaaggtctggttgccttcgatttaatctctcacagaggtcaggttcacgatgcctttgcacataattactcacggacctagtccctgagtaaattttagattggtgactgcaaaagttacttatactttcttggtcagtaaaataacgtcgtgatatgctcccatctcgcgtttgtctatttattctatttgacctactatgcacgtaggatcgcgattctcctatacttgaacttgcttcacgcatctcatcttgcattggtcttcttcttcaaaagagattagacacacatcccctactcaggtaagtacgcatattttctctattcgtgctagaaggcctctatggatgcctagggagacgaccaccagacctaggttggtttccaagatttcttccatcattacgagggatttcttggtttcctggatacggttgtctcgcctttcattcatgcgagatgattctggtatgtcactctattcattcccttagttcgtaaatccatgggaagttcttggaacatc

SEQ ID NO: 333219 - DNA, 759 bp, Cannabis indica
aagttgatgcatactctcaacttcttgtagggtttaggcaccaatacttggttggatacccactcagggtagaatgcctctgttatgaagtcattggctctcagccttttaacctcacctttgagcgcttcagcatgctccttgtctaacaactgtcttttttgttgaacaggctggatgcttggatcaacgttgagtgcatgggtcatcatgtaggagtcaattctaaccgtgtatccatgtgaccatgcgaaaaggtccaggtttgcccttagaaattctaccattattgattcgatttctagagccaaaccttttccaatctttagtcttattcttcaaaacaatagaggaaacagcagggacacaaataagaaagattctatgcactaagcaaattcaatcaagattatttcctagacattcaacaatcaacccagatatcccaaacatgctatacaaacaaacaatgatacaagtataaagtttcctgaaaacttacatgaagcttgagaactggaggtcgatgttgatcgtcggtacaatgaggattggcagcgacgaaggaaaagtaataagtaatctatggtgtctggaatttttcttctctctatgaaggctctgagaaaatttggtaagatagcaaaagtaaacaaaatgaaaatgggaaggttggcttttattgttggaaattattttaccaggatcttagatctactcacaagtatgtttagtaacatcctaaataagaactttcta

SEQ ID NO: 333220 - DNA, 529 bp, Cannabis indica
catgtaatactttttacatatggaagtaactaagatatatattacgatgttaaaacccttttgctaagtatgaaagatgatattatgaagtatgaattagatgaccaatttgttagcaagtcaaggaacagtaagtttctatgattctatctgggtacgtggaacaaatgtacaaagtcagtacagttttctttgtttgagcgggatatgattaaaatggattcatgtgctaagttatttgttgaggaaataggttaaccctgcgatacttcaatggtaaatatctcggattgagatttaaagtttacatctaaattctgaggaagtctgtgataagtatgtgggatatattttgagaattcttggattaaacaccatctgctgaatgagtcttcatataatgacagttattagagtactgttaatgtgacactgatgcgatttaaagattcagattcgtatgttgctttatttaaaggatgaaaaaaaaatagaagctatactaaatgtagagacattaaatttcaag

SEQ ID NO: 333221 - DNA, 1141 bp, Cannabis indica
ctaaccaactcgagaacaacattgcatcaggcgccacaacagtaattggaaccttgctccagcaacttctagcaaaagagcaccgcaccagcacatgcagaatcgtctcaggagcagcaaggcagaacggacacgttgcagcaattggaacatgttttgtggaaagattaaaccgagttgggagactgttggtagaagctctccacagaaaattagaacctttggagggagctgcaactgccataatagccgccaaattccagagttatctggactatctctgctgggtttcattgattgaagcagagaatatgcactcctaacagtgaaaactcctgacgcatcatgtaaccagtaccacaaatcagtactcaaatgactactgagcggaatcttccacaccaaagctcgatctctagcagtgagcagatcagctaatacttccccatcccattcaacctgctcgactttcattaaagagtcgactgacttccccacaagacctggatggacagattcaatgaaagggttcatctcatcaggaagccaaggctcagacaaaatattgacggtagaaccatcacccaccaaccgccgaaccccagcccgaactaactccttagcctcaaacacacttctccaaatataactcgggttactccccaaggtcgatgtaagaaaagaccctgacgaaaagtatctagctttgtaaatttgccccatcaagctatccccacaagtcaaaagcctccatccttgcttagctaacagagctaagttgaagtcccttaaatctcgaaatcccataccaccattgctcttatgtttcgtgagcttgtcccagctgagccagtgtatgcatttattcttattcaacctccaccaaaacttggtaatagcacgctcaatgtcctgacaaatccccacaggaatgagaaacacattcattgtataggccggaagagattgaacaactgatttaataagaacttcctttcctgcacgagaaagaaatttattgtcccaagactggatccgcttctgaactttgtcccgcaaatagccaaagatgacatttttattcctgccaatagcactcgggagccccaactacatactgttctcagtcgcttcctgaatg

SEQ ID NO: 333222 - DNA, 1219 bp, Cannabis indica
caatgaacacgataacaaacttatctaggtactccttgaacaccttattcatcatatccatgaaggttccctggacaatagttagtccgaaagacattaccaaaaaaaattcatagtgtccatatcatggtctgcattccatcttgggtatgcctttccttttagaccatcaacttgttatacccagatctcaaatttattttcaaagatcacaatagagccttgcaactaataattgttctttatggtcacctcattgagcgcttagtattccgtgcatatctttatacttccgtccttcctcttaatgaaggtgactaacttgatgttatgattcttttgtctaggtgctcttgtagctatactttgagtttctatcactcgttaatgaccattttgtatggagccttcaaaattgaagcactcttggagctaacttgatgatgaactccacatcactatctgagggtatccccggtagatcttttagaaagaccttttggaaatcacagactatgtgcatatttttcattgttaattgtgtctccagtgcttggtgcactacattaactaacaatgcttgacatcataccttccttagccgactattctttaaaatgagattaaagaagttcataaggctatcttaactcttgtaaaagtaaattggtctctagcctttgttgccaaaagcagccaaatacttttagcaattgatgaatggatagccaatccatatcgagtgcagcatcatgatccttcatttctagctctatctagtcattcgttagttgtctattattgagttccctatatcccaatatgggtgctacaatccttggccactactcgcaaaaacgagcgtaaacttaactcaacttattcatgttatgtcttacgcaggtgcctcttccataacagtacaactcgttagccttgtcctccagcatgactaacttagcctcgtagttcgtcccttcttaaacttcttgaagttgttaaagctcctccttcttgataatttctattgagccaacttgatcgtctaagcaacactgcctcttaatatttagttctaattcttctaaaataaatttattctaaaaaaaccaacctaactatttgaatattttataatattcctagtagataaaatcaactaattatttttctcaaaaaaaaaaaaaaaactctctattaacatagcatgatagttcac

SEQ ID NO: 333223 - DNA, 966 bp, Cannabis indica
aggaacttacctcaagattctagattggcttgggggttaagttcagctctgaaatgggaggtttgctgaagaaaagaagtcccctagtggctggttcaagcttgcacgagagagagaaggagaggagttgaaaatgatgaagttacttagcttccaagtaacttaaataataaaaattctcttctttttctttcttttcttttctattttttttaaatcacagccccaaaataataataataaaaggaataaaaaaatatttatgtaaagaataattaaattaccctcaaaaataaataatctctaaaataacctaagggcattttggtaattttactaatctatgaaaccgacattctaaaattctaaactagtccagaatatccccaaattaattcttccatcaatgtcgtgacatttctaacccaaatcgctgggcccgatattttcttttttaaaaaaaaataatggtatcctcgatacccacatatcccaacataatctccgtaattgataaattgcgctttataggtcagtagataaactctcggtagttaccctaagtaagatcataatcttacttcgttaccaaaataattacatatttaataaaatatgtctattcaaatattatttatttttccgggatattacaactatcccccccttataggaatttcgtcctcgaaatttacctgaaaagctcgggatacaattcctgcatttgcgactctaactcccaagtcgcttcttcaactttgctattccgccatagcactttaagtagcagaatagtcttgtttcgcagcaccttttctttcctgtctaaaatctgcaccggttgttcttcatatgacaggtcggtctgaagctcaatgtcttcataacttaggacatgagttgcatcagatacatatttccgaagcattgagacatgaaacacgttatgaaccccagataaagcag

SEQ ID NO: 333224 - DNA, 600 bp, Cannabis indica
tgttgacctcagatttggctaattgacagtagagccgtatttaatacttatgcttgtcacatgttacacaataagaataataaagtaaaatagacactagatttatagaggttcaccccattagttagagggtaaggacctactctccttttagttgtattgatacaagagataataccactcagatcacaataacaatgagatctagagtggctctcttaagattaaaatgtgagtatcgaaggttgcaaatctctagtgagaaggattcttgggcacgtgagagagaggtgaagagagaagtgagttttagacttagagtttagagcttagagagctaaagacttagagtctataggcttaggactttagacttagacaactaaggttagactaatgctctttatatagtaaagcttacatgaatattaaccactaatatcccttgaaaataggaagataaagccttatttacataattaaataataaataggataattatccttaaaaaataaggaagttgctaatattttccccctatttatgtgggttgtcaaggtcgaactcgccacttagcttgctatccactgatgaaggct

SEQ ID NO: 333225 - DNA, 542 bp, Cannabis indica
atagacctaatccaccttttggagataactagctctccgccaggtaatacggttccaaaccctgattcataagtctatccaatttactaaagattttggctgtcacataagaatgagtggcccttgagtcaaacagcacagagaaataagagttattgaccgagagctgacttgttactactgaaaggctggcttctgcatcaacttgagttatggcgaacacccttgctggagtgggtttcgctgcagtctttggtcctttgattctgagttggggacaatccctcttgtaatgccctggcaggacacactggaagcaccccctgccctttacactcccccagatggtgccttttacaattggcgcactctggataaatgtatcgggtttcagtaccactctggcgattgtctcgaccctatttcccgcggaatctcttgttctgacctgggccactggttgcagtggatgcctctcttttctgatccatggtcgaaccactacctcccctgctaaaacctgatgcaggaggtgtaggagc

SEQ ID NO: 333226 - DNA, 673 bp, Cannabis indica
tctacattttctaccatataacagttcatagggagccatccctatcgtactctaataactattattgtaggagaattctatcaacggtaggtacctactccaggagccttcgaaatccataacacaagctcgtaacatatcttctagtatctgaatcgtccttctggactgttcatcagtttaaggatggaaagacgtattgaatttcagtttggtacccacgacccgttgtaaactctgctaaaattttgaagtgaacttcggatccttatctgaaactatggactttggcacaccatgcaatcttaatatctctttaacatacaagtccgcgtactgatccaccgaaaaggttgttttaacaggtagaaaatgagcagacttcataaaccggtctaccacaacccaaattgaatcaaataaacccgtggttctaggtaacccaaccacaaagtccattgtgatgtctattaacttccactaaggtagggttaaaggcttcaacaaccctactggtctctgatgttcagccttgatattttgacaagttaggcatctcgatacgaattctaccacattcttcttcattccactccaccagaagtagggtttaaaatcttgatacatcttggtggtgccgggatgcaggtaatatggagtggtatgagcctct

SEQ ID NO: 333227 - DNA, 937 bp, Cannabis indica
cattcactaactttttgttattaattaattatgaatgtatacttagtggagtttgaatatcttaaatatttatctgtaatgaagtaaactctgcgatatattatactacaatcgggtgggtgtaataatgtgcatgttagttgagtttaaatattttatatattcaaccatagtgatgtaggttctgcgaatacatgtattgcgatcagatgggtggctaaattttgtattgttatgttattttgtttgttttgtattgttttatttattttgtttgttattttaggtatgcttaaaatttttagaaacctccaattaaagttgttatgctgtcaaaatttcagtagaattaggataaatttttttaaaaaatgcataaatattaaatgaaatgtgcataacacaaataattagttaattactaactagtttcaagaaactaggtgacataacacaaataattgtatacacacttgtataatttaatcatcacatcttttatatataattatttatgtctaactttaaaacctcaaattagtaaaactctaatagtaaaatattctttgttggaatttattttatcaggatctaaatttactaacatgtatgtttcattaacaccccaaatatgaattctctaatatgatgaaattaaacacataagagtttagaaaatcttacattaatggcagcggaataatatgactccttctgctcagatctctaaccattgttcctttctgtcgcagagtaataacaagatctgagcatggatctctttctctccttcaggttgattaccaccatcttccgcactatgattgagtacttaacttactatgtgtgtgcatggtactatattactatggctcgaattggtgaagacaatgaataaggtgcgaaatcactatagaaaagagtctctcatctacta

SEQ ID NO: 333228 - DNA, 617 bp, Cannabis indica
aatataccttaaaccaatatacatatatcacaaatttaaactaacatactattaaatgaattattttccacaatatacagtagcatacaaaaacttataccacaatcataagcagatataccatagtcaaaaattaatataccaccagcatagtgaaaaaaaaattatacaaaaaacttaatttaatattccacaagttttttttttcttgttctttccttcatgaaataccaatgaacataaaatcaatatacctcagtcaaatataactatacctcatacttaaattaatatttaatagtttttttttcctttctatccttcacgatatacatatcacatacaaacgatataccttagaccaatataaatataccataaacttaaactaatatactattaaatgatttttttttcacaatatacaatagcatataaaaactatattctgcaatcataagcataactattatagtgaaaaattaatataccaccagtatagtaaaaaatatatatataccaaaaacttaatttaatattccacattttttttctttttcttttcctttctatgatatactaatgaacataaagataatatttcctagtgaaatata

SEQ ID NO: 333229 - DNA, 543 bp, Cannabis indica
cactttttctttttttagttttttggtcttttattggatttcattcctctgtttttgtttttttgaatttttttcatttttgttttctttattgggtcctttgtcatatattggacacactttctcttttcttctctctctgggatagagagagagaagctttgttgattagtagctttaatgaatagtgagacagttttttgtgttgaaaatcttggccttacaatgtatatgtcataaccccttttctgctttttgtatttattttctcttttttcttggattttgcagaaatgtgcagacaaagaaagaaataagccagctgttgttctatttcttatatgagagaaaaaggttaaagcttaaaccatctttgtgtgtgtgaatatatacataataattatttaacgtactaaaaatatgatttaagataatttattgtattcatatgtttctaaggtgtgaaataaattatttgaataataatttttgtattataaatattattataaatttttcataacattttgcatgataattttt

SEQ ID NO: 333230 - DNA, 623 bp, Cannabis indica
aatggtttataaatcatctgcttgtgataccactctaatttctcttatgaaattgaatggcgcggatgaatataatcccgtcattctatcccgaaatgatataaatcctcgatcttagaaatttcctacttgtatatgtttactttaggcaaattagacttagagttaaattattagtggtggtccaagagagaataatcactcattgtatatttggtataaatttaagtctttgactttaaattttagatttcaaataaaaatttaatatttccgtttcctagaatacattatacattactgtatgacttttacaggtttttaatatccattttctatcaatggattcaaactgtatgtttatgtatggaatatgagtttagtattctgtgacgaggatccacttggactattctaagaactctttattgtaactagacctaagtcatcaaaagattacaaccacattttaatatctatggcatttgtatcttgttcatagtggttttgacaagatcattttctgcaaagagtcaatatgcctatatccactgaaagtaggatcatctatatttgaatatggatgtacattcaggggtggatatgagttttcgttatattct

SEQ ID NO: 333231 - DNA, 515 bp, Cannabis indica
gttttacccttctcgtgtcaaaattacgaaaatatccatggctcaccaacggggtcttaatatgtcatttatcagtataattcatacatattaaatcatataataatataattccatattaatacacatttaactagttagggtttgctaatccaattcattaatcttagggtattacaactatcccctccttatagaaatttcgtctcgaaatttacctgaacaacttcggatatttttgctacatatatgtctggagttccaaggttacttcttctactttattgttcctccataatatttttatcagcgcaattgtcttgtttctcaagactttttctcttctgtccagtatttgcactggttgttcctcgtaagaaaaatttggctgaagttccaatgcttcataacttagaatacgggacgggtctgagacatactttcaaagcatcgaaacgtggaacacatcgtgtacagctgccaacgctggtggcatagccaacctgtacgctact

SEQ ID NO: 333232 - DNA, 1305 bp, Cannabis indica
gtccgcctccgccctcaaggtgtcggacagagccgcactcttggaagtaacagatttagcccgggagtaggtgtaagccaacttcaaaccggcctgcataaaggaaaaagtcagcatatggagctaagtgtgaaaagttaaaagggaagtatcaaaaaaaactaaaccctggtgagctccttcaagactccgcccaccaacacatccagagatgagtcgttgtcagcaccagccagttgctcactgacctcaggaaccagccggttcatgtagtgagccagcacctccttgcccttcttggcctcaggcagcacgggcacgggtggagttggtgcctgcacccgctcagggatcctcctgaccagttcggacccagttgttggtggcccagactccttagacttggcagatttgggagtggaaggattcgcagcagtcagctcctcgaaaaggtcaataacctctccagaaggcctcttctttaaagaccctctccgcccttagacttcttggtcggaggggaggcgctagagcttccgcccatcctcttccttagagcatcaatcatctgccgagacatgtctgcacagaacaaaaacactgtggttagcgaaaactagcagaaaatataaagcatgaaaatcaagaagctgaaaaagaagtaaaacgcaaagtgactgcccacccagaaagtcagaagtccatcatcacctgctatctcagacataacagccttccctttttcagcatagggatgagagggccgaacaagtgaaatgggaacccttatgagaatggcatgttcaacaggcctaggcgtgcccgggagtttcttcttcctcttcaaaggagtcacctgctcagcctcagcctcagcctcggcttcatcttcaggattcataagctcctgagcatactgctttgcccgggcacctcccttcaacttagcttcacgcttaagttgaatgagctcatcctccttattagctcgttcgggccgggcagcatcagatttcccatttttccccgtcacggacttaggagaaaagtcctctgggtaaagcccgtactgcaccagattctcgtcggaggtcaactggatgatatccccgtcttccgccagcaactgggaaagtttttgagctctatccctaagagcaagagtgaggggaggacgatgatatgtcgggatctgctgaaaccgagtcggggtgatgctcggatccttcaccatgaagtactcatcaacaaaacgccctattttgctgatggccttatggtccgtctgttggaaattattttacc

SEQ ID NO: 333233 - DNA, 677 bp, Cannabis indica
tgtcaccaccggttgtttcatccgatgtaagcaacttaatgatctcttctttctcatgatctcttccataaatatcagattcttctagcgatggagcacataccctctctggaagcttatgatttttcacacgttccagaccaagatctttgttgtctagaagaaccttcaatttctcaagtgtatcttgtatctcgggttttatggccttatcaaaagaagttaaaggagttgagatgaatttcatgagtacctgacaagtattatgcaatagagaaagagtgagagattgttttaaattctcatatattgaaaaagattcatacaataactaatactatagggtgtacaaaaaagtttacaaacagccaaatcaaaataaaccacctaaatcaaagcgaaaaatgcaactcaatggagatctaaatcacccaacgtaacccgaaataggcatgtcaaaaagatccatttagttggaacgggttggagctccgattcgacggatcacctctgatccgaaacattcggatatttattggatcttggatcagatctacttcgccccgcttaatttttttctagatcgaatctgatccgacccaatttcaatttatttaaaaaaaaaaaacttaattcaagactcggatcccttgggacctggacccggacctagaccc

SEQ ID NO: 333234 - DNA, 813 bp, Cannabis indica
tagtgtagattgttgatgtatatataagtgtagatgttgcattttatttttttcacccgactttctaatatttattattaaaatatataaaacaataactaataataaaagtaaaattatttctcttcttttcttatctcttgaacctgacctatcatctttttcgttcttctttccttcttaccatttttttctaccatttttacattttgaagagcatgtcaagtatgtttatcttttgtaatttcaatctagttatgagcttctaatctttttttaaaattattaagatgatgatgaagcaaaatgtaactagatagtgtttatgtttgtatgttgatttcccatttgtgctataaagttcatggatttttttataaaaaaatatgtcttttttcatcttcaatatcatgtatttttgattgttaaagcatattttcacatagttcttcattatgtaaaaatgtaatactctttgattaaatgtctttcattaaattgtttacatctaattcttagaatataagtgttatattttgcatgaacatagtttctttgattttgtgtagttttattaaattgtaacaccttagaaattatacattttataagtgaagaaaaatcttacctttttaaaaataacttgtacgtaaatggaaaatatatttttgaaaatatagtgtgatttatttcaactatatctaaaacttaggaatcaatatactaagaaataatattgaacttgcattttgtggattctaatatcttaataatcttattttacacatcttatttgaaaatcattttcatact

SEQ ID NO: 333235 - DNA, 597 bp, Cannabis indica
catagacctaatccaccttttggagataactaattctccgccaggtaatatggttccaaaccctgattcgtaactatcacacggtctatccaatttactaaagattctggctgccacataagaatgtgtagccccaaatcaaacaaaactgagtcaaaagagttgttaactgagagctgacctgtcaccactgaagggctggcctctgcatcggcctgcgtgatggcgaacaccctagatggagcgggtctcgctggagcccttggtgcctctgctctgagctggggacaatccctcttgtaatgtctgggcatgccacactgaaagcatccctgacctttgcactcacccggatgatgcctcttacaaatgggacactccgggtaggaataacgggtctcagcactaccctgacgaccgcctcgattctggttccctcagaacctcttgttctgccccgagccaccggatgcagtggatgatttcctcttctggtccatggacgaaccactacctcccctgctgaaacctgatgcaggaggggtaggagccccgccactcactggagtcctaactgactccgacatacatccaact

SEQ ID NO: 333236 - DNA, 1200 bp, Cannabis indica
gcccggggggagaggaaggaggggccagagatgtcctcccattgatctgaggaatcagattaacgggaaccacggtgacctctgggatcacctggaccaaaagaaatacggacccgtagtctccacgggaacgttaaacgaaggaattatggcagagcttgccatactccgaaaagacattgcccgagtctcccgacgacaaaaaggcgatgactccgattctgactgtgaagaccgggagccttgtgccaagcacatcctggaagcggagctccccaaaaattttaagatgcccgaaatggcagcttataccgggaactcagataagcgatcacctgtcacggttcaaccgagtcatgacagtcatgagagtcagcaacgacgccaagtgtttgtgcttcccgcttactctaagcggatccgcggaagagtggttcaagaaactggaaccaggatccgtggattgctggaataagttgcaaaccagcttccggagacagtttgtcgccgcaaggaaagttaatctggaggtcagcgccttgactaacatcaagcagctgcccacggagacattgaagaatttcataaagaggttcaaggaagaagcctcaaaaaccaagaaagtcgatgacggacaacagctcgcacttcttcaagcgggcatccgtacagggactccattctggaacgagttacaacaagaaggagcttccaaccttcaagatttccagaagagagtccaaaaatatatcaacctggaagaggcccaaatagtggcctatgggggatactatcccaccgggatagcaggatatgtacccggagctcagctcccaggcaccttgccagcagccgctccaccgatgagcggcatacaattttccgctactcccggatatagtcaaggccaggccttggcccctgcatcttctcactttggaaatccctcagggatgaatggacaagccccgtcgcactccgctccggccacaagtttagccggtccttctcaaggctctcggagcaaaaggtcctcaaaaggcagcaaccggacggaggataagcgacagaaaagggggtatactccccaatatacccagtacacggagctaacggactcccaagaacgtgtgtattttgctaccaggcaaaatacgcactaccggagaccgcctcctctgtacaaggatagctcccgga

SEQ ID NO: 333237 - DNA, 926 bp, Cannabis indica
atattataatgtgtgagatcataattatagcattcttaaaatgtgttatattattggagtagtttttaaaaataaaacgtgtacaaaaaataatgtggaagaaagataaaataaatattatatttttagataatgtgaagatataacaacctttaaaaatgctaccatttattcacctaatagtctagattctaagtggagtgataatttgtaatggctaattaggattttttgccatctgaactttgacatttaccaaatcatgccccttgagcttttaagatcattaaaaatacccactgaactattgagattattggatttttaaaggtatttttttttctttaattttagttaaaaagaaaagttcaggagacataatttagtatatgtcaaagttccaatggcatgatttggtagacattaaagtctggggaacatggtttagtacataaacaataactgaaatagtaaaattgaatgaaattagacaaaagtccttaaattcaacaatctcaatagttcagggggtaattttaacgaccttaaaagttcaggaggcatgatttggtacatgtcaaagttcaggggacaaaaatcctaattagcctattatttttagaacatctccaatatagtatcaaatcaataaatcaatatttaagcttagtataaagtaaatcttttctaataatatgttttaaaagtagtgtcaaatttaatatttgttaaaaaaatgtataaaatatagatttttttttttttatgaatataaaatgtagaattttaatatctaataaatgactaaaaatttgtcacgtgtacaattgtgtacacgtggacagtccactgtgacacttaactgtgatttttggacatgaggtgtacagagaaaaacggaaccagggtttaggtagtttagccgc

SEQ ID NO: 333238 - DNA, 728 bp, Cannabis indica
agaaagaaaatttggatgttgttgacttgacgttgccgtattctcgacattatatgtgtgaagatcaatatgactgggattattacttacactaatcggattgatcttcaatgctttttgtttagcatatcgctctctttgttttctacatatttctttctttttttcgattggaaaatctttatatggaatcctctttgaaggtttaggtattttgtgtatgacatcttaccatatatcattatgctaatgtagaaaatatatgtttcaattgtaagaatccaatctatacaagtaaagaaagatggtgtaataaagtaattgcagacattaaatttaaataataataatgagatcaatatacacagttaaaaaaaatacattagctatttaaaataaattaaatgtaacatactaatatatataaatgggaaattatattagacatacatatttgttactttattgattggaccatggcccaaaatactttcaatattggtattgcattaaaaaatttaatcaacatttattgcttttaatatttggtaggtcatcgtatcctgcaacaaaatttcaaaagtaaaaggtgaaaactatgtgtttaaaaaaagtgatagtattctataacaaaaataatataattttttcgaacttcaattataccattccaaaacttatgacatattcaagaacttttttcagaattttcgaaactcattccaaaa

SEQ ID NO: 333239 - DNA, 1337 bp, Cannabis indica
ttccacgccagaagggactttgacaatgcatttggtgaaagatagtttgctcaatgaagaggccagaaggaaagcacgagatgaatctttcttgtgggtttcttgttactgaaaagcatgacatgtggggacgaagtcagactaaaaatcagcatggttttagaagaagatccaagtctcaaaaagatatcaagtgttatcattgtaacaagtggtgagtgcacatttgtacactcattcttagtcaattattagatgaattagtatttatttttatatagatctgatgtgttttctccaagtgtgtaggtttgtgctgaaaagaaattttgttatggagtgagatctttgagcccatttttgataatgttcacatcattttcttgaagagcttatgaaacccaaaatgatagagctcgttcccaactttccaaaatatgttaaatcatctcagttggagtctggacgcaaaagttatgcatgatttactgatcaaggttgaagcagaaaaaaattggtgctaggccctataacgcatggggtaggcgctatagcgcctgactggaaaaaagattttgcatggaggaaaaaaagataatttcagcacgtggttattttggaattttttttctcttaggcgctatagcgcagggtataggcgctatagcgcaacacttatcattttttttaaaataaatcctaattctaagaggattgatctatctttgttggcctatataaagaaggatgtaaatcttattgagggacaactggagagacagaaacaagtaactttgagattagaaaacacattgaagagcgagagagaagagattcaaagcaatcatcatcaagtatcatcattagagttcttttcttcttcttctctattctttgtttagttatttaattatgaacatgattattgtggttataatgtttgtgagtatgaactaaacactcattctagagtgttgatggaactattttagattatgaatttaagtttttagattattcccatatttgttcttgttatttctttatgcaattttgtgctaattatcatcttcttaatgcttgatcaccattaattagtatagagattttaggttttacacttgagagatgtaatctaaaatcgaacttagaattgtatgacataagaaaagtgtgagattgagagattccaccaattctatgtttcatttaaagagaatcatattgctttatgagtgcttatttgattaacattgaatagagatatcgtgttagttattctaagttaaatttatcatcgctcgagagagtttaataggttacattaggattcttga

SEQ ID NO: 333240 - DNA, 1391 bp, Cannabis indica
aaaaatttataaattaaggcttttacaaaacataatttgaattttttatgaattagtgatgattttttgaatttggataaaaatatctgaaaccgagcaacacacatggctcgcggacaagggcttgacgcggcttcagacaagaccatgtctgagtttactcagacaagggctgtcctaagcccctcctgaccaaaatttgccccccaagtaggttctagtagcctttccctcgcccatatgaaatcttgtttttgtgatatcttttgattcaaaaattatttttcattaaaacaaaattcaaattttggtaaaattttgtgtagaatctaaattttcaattaaaaatctaattatctgaataaaattaattgttattaattttttcattaattaagattaattttagatattagtagcctttgaatttagaaatttgaatttttcacaaactaaccttatggttaattttgaaatttttaatttattttttattttatttattttaattatcagatcagatattactcattttgttattaattttgaaatgatcttattttgatattaaaatattaataaaattaagaaataatcgagttaaagtttcaaatttgctaaccatatcagattttcaagaattgttttttttttttgaaattatattttattaaattaaattataagattagaaaaatgtagttttacattttatcttattagtatatttatttaaattaaaattttatttttaggtcaaaaataacaagaaatttttgaaaaaattttgttaattttaggtttgaatagaaattttagggtttctaaccataaaattttcaaacttaggatattttttttaaaaataaaattgataatatcctaaccataaaatatcttattttttttcaaattgtttatttttgtaatatttaatttattaaattataagattaagaatataatattaggaatatctaaatttttaaaattcaagatattatattatattatcttattagatatttaattaatttaaattatttaaataaacttgaaaatttgaaaattggttagatatttgaatttaagttagaatttaggatatttaggagatttgttagtttttgaattttttcaaatattctctaacaacctaaattttaaattctagttaagatattttttaaaaaaatttaaattttaaaatagaaatatcttaacctactttccagttatctgttacatatttgtttgtaatgtttgattatttatttattcaattttttctacaaacctattatttatttgatctaaattgctatgattaacttgttgatagatccaatgatctgattttaatcatagtccaattgtcaatagataaataa

SEQ ID NO: 333241 - DNA, 629 bp, Cannabis indica
agaaaccaacagcagttacctaggaaaatgggaaggcgtgacaagtgcaatgaatacatggataaaggatatcaagaagtgaatgttagacaaaaaagtggtcgaaatggatcattaaaatatttatatatagaagacttttttttaagagcttacatgtttatttccaagtgtcatggaacaagtgtctatcgatgagtgagtaacatctatgaaattgaaagaatgacactgtagccttacagtagaaaatcaagtagagaagtaagatttttatacgtaataacatttaactaaagagtgggaatgattaaagagaagtttgcataaggtcttctaccctactccttgtgtttattattttgtattgtataatgtgttctcaagtgacatgtaaggatgttcatttagagaataaatagttttactcttaatggcatgtaaggatgctcatagaagaataaatagtttcactcttaatgtcatgtaaggatggtcataagagaagaattttttttataatattacgagcatgctattgcaaaacttatgtatttaaagcatgtatatgtaatttattatgatagagtacgttttgatatttaagtaatgtatagagaaataataat

SEQ ID NO: 333242 - DNA, 710 bp, Cannabis indica
atcggttattttggatttagttactttttaatattgaattacttaaaaaatttaattccttttcacgtaactaacaacaaaataaaataaattattggttttttttttatctttgttatacccatatttcgtggtgttgacacgtgtaaagaaatcaggtcgtgttataaaacaattaatgtattcaataaactcgcctcacaaaatacatgtagtagaaatgttcaaactcatccttttaaagataagggcgagttatgaataataactaccgattgataagattgtcgagatgaacgatcaacttagaaggttcatctcaagaaatataaaatacacaacagaatggcaattcttggaaatggtagataatgaattatttacagaacttacagctcactgacttacatattcgcgagtatgctaagagactaagggtcacattcccagcatgattcatctcggaattttcatactgtgatagtgtcttgtgtttgcttcacccaatactaatggaaggacgcgagaagtattacttaaagtatactcaagctttgtcaactctgttcagaataaagtatcttgagaagattatttgtattatgaaatttcaaaaaaagaaaaattatataagagttttcccatattaacaagttcaattaatatattatcataaaaatttaaatcatttaattaattaaaattaatct

SEQ ID NO: 333243 - DNA, 1110 bp, Cannabis indica
attattaacatgcttaacttcagcatcgatattcgccccgtgcttaagtagctccttcatgaccgagatgtgacccccctccgcggctaggtggagaggggtgatccctttggatttggtgttgcatgcaacaacatttacgtcgattattgtttggtcgtgatcatcgttaaggagacgttttacctcttttaaatcccctttacgagcatttatatgaagcaaactcaaaccattttcatgattttgattgtcctttgatcgagatttgcttagcctagtccttagataaacttctactacgcttagtagcaccaaccatcatcatggtaattagtagtaaaaaataataataatgatgattattattaagcgattgtgtaagtagttaattgagtttcttcttactttgtatatttataggttggtatgacggtattttaatggaagtttaaatttttgaattataaatctaatccgcgtagacatatatatgataattgataaaatatcattaattaaataataataatctccgataaattatgaaatatcttttttctcaaaagaaaaaaatcaagtataaaatatctttaaatttagtttgacatttttttttttgaacatgaatttagtttgacattttattttaagaaacaaataaaatttatggccagagcaaaaaatgcgtccttctgttataagaccttattaactacttttattagaatcattatttggcaatttttagagtattatttagacttaggtgataggtcgcatgtaaaaattaaaatttcaggaattactttatatattatttttaatttcttttttatttttacaatttgaatttgctcacatatgtgaatttaggttgcgatttaaattactcttgctatgtgagttgttatgtaaatttttataaaaatataaaaagaaaaaatctataataaagtgtaaaattaaaataaccccttaaaattatggataaatactattttggaccctgtgttttgtaaaaattacagattggatcctgtgttttgttaaatgacaaaatggactctgtattttctaaaatagtaaaaataggaccctgagcttaat

SEQ ID NO: 333244 - DNA, 412 bp, Cannabis indica
ttttttttttttttttacttatttttaaaacaatattttttttttttttatatttttacggaattctacattgaaactcctattgcaattagcgctgcaacttaaatcacaacaaaaaattgtttagaaacccgaaatactggagaaaccactttagaaacccaaactgtaaattaaaaaaaaattaaaaaacagtatatgtggatatttttttttttgtacacataggcacatggttattattaaatatatatataatgtcgacattatagttggacatatatacatcatttagtaattattgatgaatcgtacaagactataagaatatacgttgttattttgtgaatatagaatagttaccattaattcatgcatgtttctttttaatatatagttaccattaattcat

SEQ ID NO: 333245 - DNA, 1239 bp, Cannabis indica
tctaagtacaaagtgcgagtacccctgcaccgcataaaaaaaaaactaaaaagaaatagagtttaacacaagcaaatattagaggaaaagtcaagcattgggagcagcaggaacagatccatccgcgactttgctgaccgcctcattctcaacttcctccacctccgcgacctcagtctcctcgagaagattccccccaccaccttgagttggcgtgggcgacatggcacgaaaagcctcggccatttcagcggcttctgctccaaggattgaaaagtcgaagtctggaatcttggagagagtggtgtagatgtagtccgagaccgcctggtcatactgcttttttccattctccttctcagtttccaagtcacgagacatctcctcgatcttcgtctgagcattcttggccttgagctcgacttgctccttggccttgcagagttcctcaagctacttgtccttagaagacgcgtcttgcttcaacttcttattgtcttcttgaagctgagcaatgcgtctcttcgcgaattcaacctccttggacccggtagcaaaagccttcgagaacatggcaataaactgcgaagctaactccacggagcgaggcattagttcctcagcaggagtcttgtcaatcttcgactggaactcgtcgctgacaaatctctcctgaagggacaacacgtggcgagctcgaaccgctgggtcgatcacgactttcttccctttctcttgaatgcccttagcaggcctcttggaagaatctgtgacaggagtaaccaccacatcgcttttcctcttttgaggagcgataggggaagttgctgctgttccatgtttcagcttgcggttaagagtaggagcggacttcaagaaagtcatttctgcagttacagcaaaaaataaggattaatactaataaggatgaaattctaacgccctagtttatgtatgcgataaactacctgatgatggtcgagaagtttgcttggaaagacgtttatcaattcgctcttgttgcttttcagaaggttccttatacaccggctctctccagagacttgcgttctcagggatcagtttgtgttctcgcagcttagcagtcgtacacaataatcgccagtcgcgatcttgtacaggaaggctcccgagaacttcagctgtctctctgcgagtcgcgtcgagtgcagggcgagctggtctatctgcgaaaacaaaaaagagcgagttagctta

SEQ ID NO: 333246 - DNA, 587 bp, Cannabis indica
aacttggcagcaaatctagtgagtgtgattggttgtgggattaacccctctttgacctctttcatagcagaatatactccaattggcatgagatttaatgaagctctgcaaaattgtatatggcatggttttcaatgtgtaatcgatattcatccaacatgcctttgacacatcttcaccagatccttttcagccatggtctcagcacaatcaagagctttttccctaaacttttgaacgtaattaacgagtctttcaccaaagttttgtctttctcctgataagtcagctatgctccatttatcttcaatcataaagaactttgcacaaaattgagagaccatgtcgtcccaactccttatactccctgatggcaaacttgcgtaccaagagtatgctcgatcagtgagagactttgaaaattctcggattcttaattcaaaatcatgggcataaatacccaaatcatctatgaattgaatgatatgttctttggcattgccaaatttcccattgtattttcgaaataccggactcatgtaaccgcgggggtaaggtttgactgccacttccacagggtagggtgg

SEQ ID NO: 333247 - DNA, 1694 bp, Cannabis indica
cttttatactaaatattaaacttcataacttcacaaaatcatttacaagtactgggatcccgattttaaaattttatacaaaatacacaaaatacataactaggtcgcacaacgactacaaaataataaccccagatgtctcaagaccgaacactccaggtcgcaccgccatgacatgtacaacctcatctcagcccagcccaggctcactcctgttctgctttcgcctttcctttacccacacatagaagcataactatgagtcgacagacttagtaagaaaatcatataacatatcatataataccgacttgtatctaagcgcccatacacctatttacaaggcttaatagatgagtaagaacgttctaactaagatacgaccatgtaccactgtaccacatgcactcaatactaccatcgtactagtgtaggtagggtatgaaccacaccttgagtactgctaagtgttgtaccacatacaccttgtacctttccgtactagtgctggtaacaccgtgatgtactcttcaggcatcatacactttatcaatgcactctgtactgctaccgtacaagtattggtagtgtatgaatcacaacaagcatgcatataccttaacacatacatacatttgcatatccatatcacacattatattcgattcctacctcctttctaaattcaagtgagttggccgacctgaacggaaagtctcgtgctggatggatgccctaatcacatattaaaaccgggtaaatcatatgtccgaaaccttaattcgggaaactagagtctacaactcaaggctctgttatactctctagggattatattaacctaggaaacagggaaacacccaactaaggcactaaaaaggacgagaattgagaaaaaaccggtttctcagtttgcaggtactggtaaaccggataattggtttctgccagttctccccaaaaaacctccaatattctcaaaagttgtccaaatgcctccaaactttcaagagtacctaaacaatgtatacacaacatattccaaccagaaaatcccagaaaaagtcactgaatcaaattatgccattagagatcaaagcttaggtttcaaagcacaaacttgtgaaatcataacaccatacactcaaaccagcaaccaacacctagaatcaacttaaattgaacataaaaactgaaccctaaccctaacagccaccaaaacacaaaatcactacttgaaaccaattaaaaccttgagaaacacatagctagagagtatctagggtttaccttgattgaatcctcctctaatcgttgctgaaaacacaaagtttcagcaatcaatccctttgatcttggcgggttcgaagagagagaagagaaaaaaagggttctccttcaattttgatctttttcttatttcctttattttcctaaaatgacactaaggttaatcacattaatcttggctgaatgtggaggttcggtgtcaacacctaaggcagctaccactcactccccataaaccaaattactaaaatgccctcacttcataacaagcatttttaagaataggggtaaaatggtcaaaaaccataaccctgctcaaccccgataatttatttcttcaaaaatacatcccactaagaaataaggttctagacttacccatgtgatccaactagccatccatc

SEQ ID NO: 333248 - DNA, 766 bp, Cannabis indica
tagaaggaccagtatcagcctcaacctgagtcagggcaaacactcgagcaggagcgggtgtatcatccttctcttgctctagtcgtagtagttgtggacaatttctcttcatgtgacccaccaccccacagtggaaacaggtcctggcctaacactcgccctggtggcgccttttacacctcagacatttaggaaaagtctgccagttttcgttcccaccaggacggaaaccttgggtaccgtggaaccttttatttgggcatgtagctgataattcactaggtcttttgttgcggtcaccgggatctgtacccctactagaaccaacacctgatgtttgcttccatgaatcccttttggcaatatttttcttttgtatctgagcttctgcaccctcagaaactagggccagttcaactatctgagcataagttcgagcaacccccggttgtttagaagcaacaatcacatctcgtgcgatatgttcatccgaccctcgaatgaactttgctttcctagcagcttcagtagccacctcatctgaagcaaactttgccaatcgatcaaatttagtggcatactctatcacagtcatgctgccctgagtcaaacgtataaactcttccgactttgccgcccgaatagacttattataatacttctcataaaacaaggcccggaaggcttcccaggtcatgttattcagatcatgaccctgcgatacaatctcccaccaaacacgagcatcatctcgcaacatatagat

SEQ ID NO: 333249 - DNA, 513 bp, Cannabis indica
atagtggacaggtttacaaagtccgcacacttttttcctgttcgaacgaacttctccattgatcaggatgctgagttatatgttagagaaattgttcgtcttcatggtgtcccaaagtccattatttcagatagagatcccaaattcacattaagattttgggcgattctgcatcgagctatgggaactcagttaaagtttagcactgcatttcatcctcagaaggatggaaaatctgagagaactattcaaatcttagaagacatatactgcgggcatgtgtgcttgactttgaaggatcatgggtaaagtaccttcccctgatcgagttttcgtataataacagctatcaggcaacaatcgggatggccccttatgagctttcatatggaaggaaatgtagatcatctattcattgggatgaagtgggtgaaagaaagttcttggatcccgaggctgttcaaaaaacaagtgaagcagttgataaaatcagagcgctaatgctcgcgactc

SEQ ID NO: 333250 - DNA, 589 bp, Cannabis indica
cgctaagtttggctatggaagaagcaaaagattttagaaagatgaaggtagaggagttgatgtggtccttacatacctttgagttgaatcaacaaatcaagcaaaaagacaaaccaaagtccacagttgatagaggtaaaggtattgcttctaatgttgctaaaaaagaaattttaaatgatgaagaagatgatgagattggtgttttaactaaacacttaaaaaaatacgtgaaaaagataagtggcaaaaataatttttcaaaattctctaaagataatacttttttaaaactttcagctaacaatcaaaagagaattccatgcagggaatgtgaggttttggtcacattcaatctgaaagtgcaaacactttgaaaagaaacaaaaaggtttataatattatttggagtgatgatgattcagaaagtagtgaggatgatttaaaaaatgtttctttaacttctgttgttcctaacatcttttgtgattcacatgtgaaagaaagaatgatatgtttgaataattccattaaggaagaatctaattctgatgatctgaaatttgtgaggagtccctggctgagtctt

SEQ ID NO: 333251 - DNA, 1079 bp, Cannabis indica
ctgtcatgccatccaactcgcgccctcaactcgcacgtgccttttccaccatttcagcataggtggttttgtcataagtagtaatcattagatcatgtctaattttcgcatttaatccatctagatatttctcctttttactgaaatcggttggcacaattcccgaggccaaccttgctaaatgatcaaactgtgtcgtatactctgtaacactcatattttctttctgagtcaggtgggtgaatgcttttctcttggcacttctgattgcctcattataatacttggcattgaaaagttcctggaacttttcccaggtcatcgtagtaacatcatgtatcatggacaccatgtcccaccacactaacgcatcttcttgaaactgaaaaagtggcacagaccactatataatttccagtgacgcccatgaaattcaaaatttttgtaatcactgtttgccactactcggctttcataacatctggacctcccagaaaaatcagaggtgcttgcttgcggaacctttcatacagaggttccatccgattcactacaaccactagttctgcctggacagcaggggcagctgccactggaatttctggagcaggcaccgcaggagcaccctgctgtctcaatcgctggatttcattgtcttgttcctcgattctggcttgcatttctgcaaacctattttcttaattatgagcttcctgagtagcttgggcagcctgtggcatgttagcatcaccccgaccacgtgccctgcccctgggacctctacctcggccccgagcatttgggggaaactgagttccctgaccctcatttgacccgaccgagttgccctgactcctggtaattcgcctggcgtccatctagtctgaacagcttgcgtaaccaagagctagcaaggtcagatcatgattaacgagagcttactaatgccgcttatttggaaattaaaaacatgcgcctattctactatcaggctactaacatgcttcttaacagacttttcttaaatcatactactaaaataaactactaaaacaataaaagcttactgaaccgtagaa

SEQ ID NO: 333252 - DNA, 530 bp, Cannabis indica
gtataatccaaaaaaaaattacaacaatacaatagtaaaatgtttatcctggtgtatattcatctaaatctctaatggtgaatttgttcatattaaatcacgaagagacatgtaaataaagttacgcatgtggaaatattgttctgatttttaatgtttcataacagttgcataaatattttactacgagtaccagttatttctccacatattactattaaggtataagtaattatcgatcagtgacaaaaatactgataaataatttcttacatatatacattcacattttttaatttcaattaagtacgttagttggctcgcaacagatataactgttgcattacagtttcaacagctacccacaatccatgcttcctgggattgaaactgtgacagtcagtagtcccgtgatccgtaaggggaaataccgggtaagctgtgcaatcccacatcgcttggggaaggtcaagtgggatgattctgagactgtgtaggtatgggactacacagttgaagagagcttaaat

SEQ ID NO: 333253 - DNA, 599 bp, Cannabis indica
atccaaaaacatgaaaatgacttacatttgggcgcttacctttcaagattttataggacatttttgaggtacctagacgaatgaacactctgtttattatatagcaagctgtgttaatagcatctccccacaatcgctttgtcagcttcttgctatttaacatcactcttgccatctcttgcaatgttcgattgttcctctcaacaactccatttggctgaggagttttgggcgcagagaattcatgagttatacctgtagacttacaaaagtcatcataaacggagctctcaaactcattaccatgatcactccgaattcaaaaaaattcccaatattacatcctttttcaactcttaatctctaacaaagagttttaaaagcatcaaaagtttcatacttttctcttaaaaaatatacccaagtaaaatgagagaaatcatcaacacacacaaaaatttatcgtttaccatttagactttcaacttgaattggacccataagatccatgtgaagcaactccaatactttgagatattgatatcacacacacttttgtgagtgattttaaattgtttaccaagttgacaaggttcaca

SEQ ID NO: 333254 - DNA, 961 bp, Cannabis indica
tgggccaactagagcaggaggatttttgttttgaacaggagaagcatcaacagcctgaccagaggttgaagcagcttggccagacgttgaagcagccgcctcgttcctaccataagccatttgggccgcgcagtactcaaggtacatgtccttagcgtcgcccaagtagtcaaagtgtgcccgaggattagccttcaaaaaatcgaagaagagctcgagaccgactgtctccaaggcattgacctgctccttcaacttgtccacctcggctgaaagctccccctccttggcgtccttctcctccttcatccgaagaagaactgctcccagagaagtcctctcatcctgaagactgtttaccttagcagataagatctcgatggtctcctaaaaatggtcagcagcctcgagatccttagtcagcacagaaatcttcttctcagcagcgaacagcttcttgttggcctcacccaactccaactgaacagctccggcttctgccctggcttcctcagtttccttcttggccaagtctgcccccgccttcaaggtgtcagacagagctgcgttcttggaagcaacagacttagcccgggagtaagtgtaaggcaacttcagaccggcctgtaacaaaaaaaaaactttagcatattgagctaagtgtggaaatttaaagggaagtatcaaaaaagacttaccctagtgaactccttaaggacttcgcccaccaacacatccaaagatgagtcattatcagcaccagccggttgctcactgaccttaggaactagccagttcatgtaatgagccagcatctccttgccctttatggcctctagaagcactgacgaaggtggagttggtgcctgcacctgctcaagatcactcctgaccacttcagacccagccgttggtggtccagactccttggacttgggagactttggggtagaggggtttg

SEQ ID NO: 333255 - DNA, 435 bp, Cannabis indica
cacacgtggcgtccctatagattagggtgttacaatagatttggtcaaagatagtttgcttaatgaagaggccaaaaggaaagcacaaggtgaatcttcttcttcctctggggttcttgttactgaaaagcatgacatgtggggacgaagtcagactaaaaatcagcatggttctagaagaagatccaagtctcgagaagatatcaagtgttatcattgtaacaagccaggtcacttaataagggattgcagaatattgaaaagagagtagaaacaagaaaagaaacatgagaaagtgactaatacagtttccactgaaggtgatgttgtcattgtatgtgatggtgggtgtgttagtcttgctacccaagattgtagttgggtgattgattatggctcttcattccatgttactgctcgtagtgatttcttcac

SEQ ID NO: 333256 - DNA, 576 bp, Cannabis indica
tgttcaagatgggttaaaggagtatgacgaaagtataagcaagattagagatgttgtgagatatgtgaaatcttcaactgctagaatgcaaaagttgaaagagtgtgctgagcaggctaaaatcacatgtaagaaatcagtttccttagatgttccaactcgttggaattctacttacttgatgttagaggcagctgaaaagtatcaaaaggcatttgaaaggatggagatgcatgatgtaggatatgtgaaggagttttgtacttctgaggagaaagcatgtcctaatgagagtgattgggatagtgctagattattcataaagttcttaaagatcttttatgattccaccttaagattctctgggtctaattatgtaacatcaaaccactttctagatcgagtttcttttattcatagtcggttggcattttggtgtgggaataagaataattataaactgaatattatggctgaatcaatgaagataaaatttgacaagtattggggggaaatagagaaattgaaccctttattacttgtggctgttttacttgatcctcgttataaggagcc

SEQ ID NO: 333257 - DNA, 710 bp, Cannabis indica
ctgatgttgcacctgctgctcctttcccaacttctacatctgcagcaccatcagttgatccctggaaagcaccacctcaaggtacctacaaactgaatacagatgcagcctttgacaaaactaataaaattattggaataggagctgtgttgcgagactcctcaggttttattaaagcagccttttccaagtccattcacgggtcttacaaagctgaagaaatggaggctactgcacttgtttatgctctacaatggcttcaaagcattggtttatctactgattacattgaaaccgattctttgttggtagttcaaggattaaaagttgcttctcattttaattctgcttttcattctgtattaaatgatgttaactatcttgtatcctatttcccacgagcacaggtctctcatgtcaggagatctgctaatacttatgcccatgttttggctaagtttgctcttacggtggatactgattgttcttggttggaggaatttccatctccacttatgactattatgtaattttaccataaattaatataatagtccttttctcaaaaaaaaaaaaaaccatagattggcggcagatctccaaattttcgtaatatttgcattgtaacaaattgtgtggcttgatttttgctggttcgtcaacaatggcaatgagtcgaagaagtgctttttttagaaatgtcgattgag

SEQ ID NO: 333258 - DNA, 890 bp, Cannabis indica
catctcaattttagtgtacagtgaagacaagtgcaccaaataatctcctttgtgcataagccgagcagtattccaatcatgagtaatatcaagatgtcgccaaactgatcgagcatacttacaactgaaaagtgcgtgcccagtagtttcccaagcttgttgaaagatggaacaagttgaatctgtgataatcatgcgccttacaagggctgttgcaacatggagagcatcgttgaaggcccgccaaatgaaaatcttaatcttttgtggcaaggatagtgacaataagaagttccaccatgaagcagatgctgaagaacttgagctgtcatcggtttctgcaagagaagcagctaggtgataggctgtttggaccgaatatattccagaggagcaggggttccaagcaagggtatcttcataacggaaaaaactcagcggaatagttaagatacgatctacatcaagagaggaaaaccattggtttagaagtgctaaatcccattgcctttcttctgtaattaagtttgagacagtcgtatcaggtggtctggagaagtggtatggtcgaaaagtggaatgtcctggaatccacgggtcatcagcacaatttatcctacatccttctccaattttccaacgtaaaccagcaataagaaggcttctaccccaatggatgccttgccaagttaaagagggggagtgaccaatgttagcttgaaggaaatcgttattcgggtagtatctactcttcagcacctttgcaagtaaggagtctggttgtttaaggagtctccaagcttgctttgcaagcattgcttgattaaaatgcatgaaagagcgaaaccccataccgccactgtctttcttttacacaaaagcttccaaga

SEQ ID NO: 333259 - DNA, 615 bp, Cannabis indica
aactaggttttagttttcttattattatctcatactattcatagaataggttgaagagaagctttgaacaagtgtggatcttcgggagaagacttttctagtctcattttaggaggaagtgagcatatatcttcggagaagatttgtttaagccttacttcaagcgcgagttcactacttggtgtgtttcagagatcagattagcaatgtggattacaaagggttgcgacaaaacactagagggagtctaaatttgtttaagtcaattgcttttgtaatctttgatactttactaattgatttcattctctgagcgtggccccatggactagtagtgtttgaaagaacactaataccacgtacaattctcttgtgtcaactttttaaattatgcaatgttattcttttttttttctttttatagttattaaagaaaattattggcatttgcaaaaacacaatttttcagaagggactccatcaagtgagctaaaatagctcaaaatttcaaattatatatagtgcttctctacatgtagaaaaacactattattcaaacattattttaataatttctctctttttttattcgttttcatttaatatttttaaaat

SEQ ID NO: 333260 - DNA, 699 bp, Cannabis indica
tattaaaccttctagccatagctgaacataaagaaaggcaagaacaaaacagagagaaagaaaccagagaaaagagagagccaaagatagaagaaagagtcactttattgaatgggtaatgaaaaagtatttatacaatgaacaaacaatagacacgtgactaaagagttataacaactcataacaaccaatcatagttagttaagtaactaacatgacagctcacaataacagtaacaaactaactatcaatatcagtaactaactaactgtccaaccatcagctctaacacctcccctcaaactcttaattgaagcatctttaatgttgagtttgtttctgaacatagaaaatctttgactcgaaattgccttagtcaagccatcagcaatttgatcatatgcaggaacgtgcttaatctgaaccatcttgttgagaactttctcacgaacaaaatacaaatcaagttcgatgtgcttcgttctagcatgaagaacagggttctgtgtgaacaatatcgtgcttaagttgtcacaccaaattgtgggaggttgaggcagttggattttcaattcagaaaatagatagtgcagccaggatagttctgcagtaacatttgtcacacttctatattctgcttctgtactagaacgtgagagtgttggttgctttttactcttccatgtgattaagtttga

SEQ ID NO: 333261 - DNA, 1008 bp, Cannabis indica
tattttttagtatcaatgtatgtccctaacataaagtgatgaaatgtagaagtttgcaatgccgactcttaatattgctgattcgagagtgggcatcgagcggtgagtcaaacctggtttcacaaagattaaagtcaatgttttcggggctattttttctgaagaagatgaattcgggatcggctaggtgaccagtgatgtgttggttcttcaattgcaacggttcagaggtgtaaggtgggggtttaccaatcggctatggtggatgctcttggtttgaaggaggttttgagttgacaaaggatagttgaggtaaaatcttattgtttcagtttagtccaagatgttcttagatcaatccatatggtatcaccttatggtaatgttgttaagaactgtaaagttttaattgctcaacttaataatgtatttgaattttataaatgatatgcgaacaaactaatttatgcacttcgagactctgatcataatgttgattgtgcttatagtgggataactgttctgttaattttgcattcttgttttcggatttgatttattgaagttgtattttcatttaaggaaaagaagaagaagaaggttatgctaccttaacctagtacatccacatctcatattttccacattaccacaggttggaaatataatacaaacttgacttctgttaaatgttaatattaatagtacatggtaaccctaaaacttaattatattgctacatactctgttctatagtagcaaggtgctcggaccactagtataatacaaattcagtagaatttctatctaattatactttattcaaaaataacttctaatttattatatataaaaacaattaagatttaatttaagtcacttataaataaaaattacctcaaaattataattagttatatatttttaggcttttttcagttttaaccaaaaaaataacaatattacaaaaatatttccagctggccaaataaacaaatatacaactca

SEQ ID NO: 333262 - DNA, 728 bp, Cannabis indica
aattgtgaagaaaagaggtttggagtttatttgttaattaagagactttgttaggtctaattactaaataaaataaatggcaattttatttgataatcaattataattattaaataaatagttttgacatttataggattgaaattggaaaatgtggtattattgaaagaagaataaatagttgaaataaagtggtaaaattgtaactagtgaagcccatgcccatgtatggccgaccactttgtgttgatttttgtccattattttatttttttaatccatataatttaatcctaaaccctagttgaaaaactataaaaggaacatgatgctctcatctcatccaactgacaacttcaacctaccaaacttagttttcattctctgacaactagtagatgagagacaccttctatagtgatttcgaacctccttcattattcttcatcaattcgagccatagtgatagtgtgtcatgcccacacatagcaagtcaagtactcaatcatattgcgttaaacggtggtaaccaattcgaatgagagaaagagatccatactcagatcttgttattactttgcgatagaaaggaacaaggattagaaatctgagtggaatgagtcacattattccggtggaatcaatgtaaggttttctaaactcttatgtgtttaatttcatcgtattagaaaattcatatttaggatgttaatgaaacatacttgtta

SEQ ID NO: 333263 - DNA, 918 bp, Cannabis indica
atgtaaggttttctaaactcttatgtgtttaatttcatcgtattagaaaattcatatttaggatgttaatgaaacatacttgttagtaaatctagattttggtaaaataaatcccaacagagaccccatcttccacaagtgagcaggcttccgcagtaatactgttcaccgagtacaaatttgtccacctccaccttcgacactgatacatccttgaggcgagccattaatttctagacagttaatctcctaaacaagcatgaaggtttaatagccccaagtagagagcctaaaggcgcattagaggccagaaagcttgatgggcgaaggagccaccgatgagagcactaggagtaacaccatcattctcgaccctaaaagctgtcacgtgcttctcacgaaaggacgaaacaccaccctagagcttggaatcagcccctgaaaagttaacatcaattttaatcgacttcccttcataagaatcaaacttcctcttcttcagaggtgctggaagtgtacaaactaggagagcttctttccttttcctagaaggatcgtgaatgataggttggcccacaataagcttatttagattctcacgagtatttggctgatccatgttaatatcatgtaattatttcaaataggcctcgagtcaaaataatatattatattttttacaagctatcaaatgtattcttaattataaataagtttttatgtattcctaatataatataattatataaagtatagggtgattctacaatgcacccctataaaaggggtgtactgatacacccttaacttgtttcggcatccagaaaaattttttagtctaatttttttttcatattcatgtaagttatatctatttaagatatcctacaaaatttttgagaaattcaaaataattta

SEQ ID NO: 333264 - DNA, 761 bp, Cannabis indica
ggtcctttaatattagttgttttttcctactgggctttataatctcaccccctattttctctccttccaagagctcagtttgatgctagtgaatgaggatggtaccgttgaggaagaaaatcattatctgttttatctcattctacttattaaactttcaatgaaattgattttgtatttaagctggagtagatgacctggatgacttacattagctatgtactagtgagaaatgagaaatgatggatgctagatattattttagtattttattgactaattaaatctatctattcggtgactacatgactgtgagaatattattattcttttatattaatgattggtcctgattttgttacaatttttttttttatcaatataggagttagtccattatttttaaataagtaatttgtgatatagattaaatgatcagttataagcgttatcttcttacaagggtcaaagtgtgacctttgaccactcaagttatggatattatatatttgccacggcctagacctcgggtcgtgacagaaaaatagtatcaaagaaccgggtttaattacctcggtgcgtgtcaccaaattgtttagaattatttaaataataatggtaataagtaccttgatactcatatgtataagacatatttatattattagcatccgattctcactaactaattagcctgtagttctcagacctaagaaaatgcttctaaaaggaaagaagacaaggagaacagttggagaaga

SEQ ID NO: 333265 - DNA, 508 bp, Cannabis indica
tctcagacctaagaaaatgcttctaaaaggaaagaagacaaggagaacagttggagaagatgcccctcaagttgatgtccaacctccacaagctgaattccctatgaacactcttctcaaagccttaagagtagttcccactcaacagatggatcctgccactcgacagagtcatcagttttagatctatcatcgaatctaagtgcttgagtttaagggtggacaagatcccatggtacctgaaaggtggttgaggcagataaagaaaaatttcaacacaataggaacacgtgaggaattccaagttacttttgttatgtccaagttagagggtggtgcagcatattggtgggagaccttgtctaggataatggaaactgttgggatgacttggcgagactttgagagagtttttatggagaaatattttagtccatctcacaggagggctctgattagagtatttgatggtttaagacaagggcatatgattgtgaatgagttttac

SEQ ID NO: 333266 - DNA, 757 bp, Cannabis indica
tggttggaaaccaaccaaaggtccattgggcggatgttgtttggaatagactcaatgtaccgaagcatagttttattctatggttatcggtgctaaatcgtctccaaacgaggactagactgaaaaagtttaatgtggtgatggatacaaaatatgtaatatgtgagaagcatgaggaatcaattgaacacttattttttgagtgtacttttagcttgaaatgtctaatagaaatcaaaaattgactagcatagagtacaagagcaggtagcatttcacatctcttcaggtggctggcccgatcaaagctttcaaaaagtcgaaggagggtgatggctgctaccatcacagcattgatttaccaactatgtcaaaaccgaaatgaaagctagtggaattcaaagtgttatacagttgatacaattgtaaaaagaatgaaaatgatgtcaaatatagaagtagattattttttgacaaaaaaaaaaagttagtaaggaggataagaggtggattgaattgttgtaggtagattgattttttaaaactaaagatggataggttgtaaagatatttgacgcaatacaaaacttctctgatttatcaaaaaaaaaaaacttaaattagtaaattttcaagactttattttatttattttatctatatgtttcgagatatatataattttatatattggattttcgaaatatattaaatataattatagaaaattaaaattaaattaaaaattaattttttt

SEQ ID NO: 333267 - DNA, 741 bp, Cannabis indica
tcttagtatttttttttatataatatatattttttctaagtttatgatattttatttattttttatatgaggaaaactggttttataatttttgttaggattttgtatgagtcacaagttttttttaatggttttagaggttttgttatgacttctcatagattcaaaattagtttcacaaggttaacaagttcgaaacttggtttcacatgttttgagagttttgtaatgaattgctccattttatgatgttattgtatatttttttaaaatttctttttattattttgtttctaggtttgaaacttattttcacacctatattttatttttagattattgttgtgtattgtgtattgctttgattatatttatgatccgtattttttatttttgtatttgtgtgtgtattttttttctcatttagtttctgatgaaattggtttcaattaactttcattgttcatcatttatgttttgttatgattttttataggatcgaaactagtttcacatgttttacaaattcaaaactagtttcacatggtttacaaattcaaaattagtttcacaaattttaagggttatgtaatggagttgttccatttttttgatgttattgtattttttttattttaagtttctttttataattttatttctaggttcaaaactagttttcacacttatattttgtttttagaatattgttgtgcattgtatgatgttttaattatattt

SEQ ID NO: 333268 - DNA, 865 bp, Cannabis indica
atcagtatgaataagctctaacacatctgcgcatatgtcttacttactctttctaaccttgacagtcaacttccttttatacaatcaacacaggaagtgaaatcagagaagtcaagatcctaaagcacaccatctttcaccaatctctccattatatctctagaaatatggcccaaacgtttgtgccaaagcatgggagatttcaaatctgatcttgcacatttagagccaacaacagcattaagagaagaagaagaagaaggacaagagggagaagtgacaggaacaacatcaagtaaatcaagcttatataagtttccacacaaagtttcatttccaataaacatagagtcacgaaacaaagtcagttttccaattccgaaatgaagactataacctagtctatccaatatagatatagagatcaaattcctcctaatagagggtaataagcaacatcatgcaactccaaaaaaatgcccaatattcagctgtagtttaacactcccaaaaaattctactctaactttagtatcatctcccatgtatacatactcctccaacctactcggccttctttgacttgtcactgcctacaaagaattcgtaacatgaattgtagtaccagtatctaaccaccaagtgtttgagggcacatcaattatattggattttaaacaaaccatcacaagacaattacctctctcctctaagtgagctttgagctttcagcaatcatctttcttatgcctgaagcattgacaaaagttgcacttccttaaaaaactcattcttatgaccacttgaagagagcttgcttatccatttcccttacgattggtggctttcttcttatgaaaccttt

SEQ ID NO: 333269 - DNA, 786 bp, Cannabis indica
atctcacagatgacttgcgcgtaaaagaaaaagaaagaggaagggcagaaaatcgagagagacaaagtcttctctatgcccttgaaggccatcacacgaagagtgtatggtcctttacaaaatataacaacagtgcgtaagaagagtaaccctaacaccagaaaagggaaatctagacctattacttgaaaactcaagggaatgcattcccagaaacttcaaataccaaacccagaaaaacaaacagacagtaaagcatgccacaaacacaaacaataaagcgagggatgcgagaaacttacatgaagtgttggaactgggggttgcttttgatcaacgaagaaacaaagaatgacagtaacgagcaaaggttagcgaagaaatctgtaaagtgtttgaaggttttctggtctgaggacttctttctctctggaaaactcgaagaaagttggcaaaaaaaaaggaaagtaaccaaatgaaggaaaggtggtggcttttataggccaaagtgcatgagaaacaggcgcaatcacctcccaatcgaacggctggggaggcgcacgattcgaattcccaagaatcaacggtcagattgattcgtaattaaggcgatggaaacgtttgagtatccgtctgacaccattaatgcgccgtatcaatcaaggggcatgaaacgaatcaacgcctgcaaaaagtgaatcgctgcattaatggcgatcattaaatgcaccttcacgtgcccaaagcacgtgctaggaaaccgaggagtcaaccgaaggcacttga

SEQ ID NO: 333270 - DNA, 1274 bp, Cannabis indica
tagcctgagatagatcgtacctttgattactcagcctcgaaggtgacgctgggatcttaaggagttttggacgtaagttgtttgggaggcataatctccaaatctaagtcacctggttcaaaagcaactgtgactttgggtagaaacaaaggctttgccacaggaagaaaggacacgctgggtggttctggctaggctgcttctcgtaagaaccggcatctgccttcggatatttcttgcaagaagcgcttgtggtgactagaaatatcttcctgttgggttctcactgtgtgttccctagccctagcatcatttagctctaatttggaggtgggttttgagggattgtctttatatgggagtgccaattctgtaggaaactcaaactctaaagtttctggatgataaactcttgaactagagtgggacattgctaccagcaaaaagcagtcccaatccctggagagaattttctcaaaccagaaggtaatgagttggaggtcttaaaacaacctacatattgcctgaaccctagtatgaacatttttaaccctaaaaaactaccaaaaccagataagatcataacgatacaagagaatcaagcatttgatccacgttatgtaataaacatgaggaagaagaaaataacttactatctgaagttagggcttggggcaacacctgggaaatctgtctgtaaaccttcgaataaagcaaggatcgccttgaaaaaatgaaatcggaggaaactcataggaaaaaggtcaaagacaagtatggcatgaaaatcttcagacgagtttaatggtgatccttaacgaagaagttaagggtatttctcaaactttctgaaatggtgcaaaggtggttccttttccttattttatactcatgataatgatttcaagaaagatttgatccaatggacatgattcgaagtggaagtagaaaagatggtaatttaattctgatgtacctcgaaaccgcacaatggccaaaatcaaagggaatgcgtcttttcaaaaatagaggagcatgacgaaaatacccttggtaatcattaaaaagctctttttaattaaaaagaactttttaaggggcaatcgttatacccgaagttcggtaagcacatcagaggaggacacgtgttgagttgggaagaactcaaacacacaaacaacaagtacgcttagcatcgaacaactcgttggaaatataattcgcagggtaggtttataactcggctggctgaatagccttctgggagacagaaa

SEQ ID NO: 333271 - DNA, 813 bp, Cannabis indica
aagtttatcaaggtcaaaaacacgacaagagcattgtctttgaccaaaatcaactatgacatcgttgcctttaccagtaacctcgtactcaaatcgattaagctgcttgacattcatttccaatgctttcttgaatcttttccgaatgatattctctgtaattggagttaaaggtgtacatgatgtattgatagatgccataacattgtgacggttgttgaaccattcagagacttttgcttgcatagcctccaacaatgcaattataggatactctcttggctccttcattactgcattaatagattcagcaccgttcgtagtcataatattgtagcgacatcttgtaaagtgagatcttgcccacttgctaagtggtacatttgactcttcaagataattcacagctctatgatatttattcttcaattaatcataaagttggttgaacttggaaattttaaaggcaatagcagtttcttcgaataattttacgacacctttaactctaacacatgctttaatattttgagataaatgccacctacagttcctatgttgtgacttcttataaatatttgacaacccattgatgatgcttttgatgcctatctgaaatgaagaccaattcactctcattcggtataatgtcagtaactttgtgagaaaccatgaccacgaagcatcattctctgaatcaaccatgccccaagcaataggatattgatgaaaattatcatcttgtgccgttacaatgagcattacacctttgtacctactctttaaccaagttccatccaccgcaataacttt

SEQ ID NO: 333272 - DNA, 563 bp, Cannabis indica
tttaaaaactcaaaacttgactaatcctccaaacagccactaaaacaagtataactcaacctatttcaacataagaaaactccagaaaacacctttaaaagcagcaacaactacagcaacaaacttcatcactttgctttgaaaaccatagctttagtaccaaaaattcacaaacttaaacaggggtaacaagcatgcattacaacctatctaatccattcaattcaagcattttaaatatagaaacaacaacaacaactaacagctgcaacaacatcaaaaaccatacttgcattactcatttttcatcattttcaacaaacttaaaaaagaaatgattagaagctaacctagcttgattagaacaccaaaaagatttgaatttacaaggaaaaaatccaagaacccttgctgcaagaagaggccgaaagagagagagaggctagagaggaaatggctttgattttgttttctaaacttttttctaactttggaaataaaagaaaataggcataaatcacatatattcagccaacataacatcaattaacatttattttcca

SEQ ID NO: 333273 - DNA, 980 bp, Cannabis indica
aagcattctatagctgtctttccttgttgttgcttgtatttgagtcctagtttagttgtcccaattaagtaccttagtagccacttcatagcaagccaatgtgtctttccaggatttgtcatgaatctgctaagtacactaatggcataagcaaggtcaggtcttgtgcttaccattaggtacataacagatccaatggcattagcataaggtatattactcatctactccttttctgccttactttctggacattgtttcttagacaaagtgtactgagtagttataggttggctagcaattttagagcctttcattgagaatttctcaataatcttgtgtatgtaatcttcctgagttagactgagtgtttcttctgatctatttctcttgattgtaattcccagtatcttagttgcttcccctaggtccttcatttcaaactcagtcttgagtaggcccttcatggtgtttactcttgctctttctttactgattataagcatatcatctacatatagaagtagatgtatgactttattaatatcagtccccttgtagtacaaacaatgatcataatagctcctagaaaaacccagttttagcataaatccatcaaaccttttattccattgtctagttgattgtttcaacccatagagtgactttactagcttgcagacatagttttcctttcccttttctgtatatcctttaggttccctcatgtaggtctcctcttcaagttcccagtgtagaaaagttgtagtaacatccatttggtctatttctatgttaaactgagtagctagacttagcatgatccttatagtcttgtattttgcaactggtgcaactacttcattaaaatcaaccccttccttctgtgtaaatcctttggccactaatctggccttgtaccttatagattcttctttagttctgccttctttttctttaaatagccatttgcaatcaac

SEQ ID NO: 333274 - DNA, 732 bp, Cannabis indica
tttttttattttattttatatgttattaacgtgttctctttttgaaacagaatatgttgttgaatattgtgattttctatttgttttcgtttaaaggttttggcatttttattttctgggaaatcttttatggacttgtattggcttttggaagatcaatgttgtctttcgtatgatgttttgcatgatatacaagaataaaaatctaaattaagcagctaaactacatgtaaataatgttatgtatatatatttataacaaggatctgaaagaaggtgttactattttttttaatttgtcagaaatattggctgcaatgggtgatattagaattgagtgacattgttactttggagtttggactgatgaaggattctatgatattcataatttatgcactcttgtttatctaacatgtattatcttatgttataattcagaatggatttatgttggacttatgttacaattaggttggatttatgttgtgttgcaatatttgtataatatattagctgttttggtgaaaaatcaggttttactcttggattggattggatagatccaatcaatccaattaatattggattaaaaatattggatggatccaatccggtctaaaaaatattggatcaaaagtattggatggatccgatccaatacagggattcatccattggatggaaccgatccaatccaatgctttatggtatcggttggttcggttgagc

SEQ ID NO: 333275 - DNA, 859 bp, Cannabis indica
ttttagttgcttgacagttttatgtttgttttgcaactgttctttttcttgattttcaatttgtttttttcaggtcccaaaaccaaatccaagtcttgctgttgaaaagacagctgtcattccttatgatgaagaagctgagatactcctcttatggataagagaaagcgtgcaccgacattgaaatcaccttttgttgattttgggtcggctgatgtgaggagcactccaatggaggtaatgtcatcaggttctcaatcaggaggagatgagagggattttaagatggttacttatgtgaagggcctttacgctcttaacgatttttttaccgatctcgtctctcctgaaattgaggtaaagtttgatgcttgggttgatgaaggtttgctgaaacatcctaggtgactattttattctttatgtttttgtattatgtttttgtttcaattttatttttattttttgcatatatttgattttaatatttttttttttgttgtttgtttgttgttttaggcatttcaattgttatgttaatggtgcgaagaagttttccccagggtttagattaggtgtttattatgttgaagataaaacctagttttatcacttggctacctgtgacatgtttatcaatgactcgataaagtttctattttctcttaaaatttatgatagttggttttcagttgttttatcattgtttttaagtttagttattgtattcaagttttttaaatagtttttagtttttgtttttgtgtttctgtattgttttgtttcagcatatgaacactatattctattaccttaggaaaaaaggtaaatattcatctgctgttacattgaattttgc

SEQ ID NO: 333276 - DNA, 520 bp, Cannabis indica
gtatttatttacaactaagagttaaacttaggttttatgccgcaaattactctaaattaatcatagttttttataatgaaatgctaagggcatttatagtgcctattaccctttatgaagtgtcataagctattagtacaatttaatatcgaatcccacttactttacttttaataatgattatagaaaaccaataactatttatagagcgtcacctcatgatgtactaaaagatcatggtgattaataacactgcttattcttatattattagactcatttggtacgccgtataagggtcgtattatattaaagaataataacattatgtttggataaggtaatgtattgtattacttactacgaccaaattttttaagataatgtaagttgtattatttaatacataacaaattattcgtattagcttgttttataatatttacaaaggatcccactcaaccccaatcactgacccagtccccgactggacttgggactgggacccgaactttgacct

SEQ ID NO: 333277 - DNA, 654 bp, Cannabis indica
tacctaatttcagttatgacttaccaacgtccaacgtcctacgtcccacgtcccggtactaacgtttaaggttttggttccaatttttgctcacaaggtacgggttcgggtccactctgggtttgggactgggtttaggtccgggtgtgggttcgggtcgtctttagggttcgggtccagggctgcgtcccaaatccagacaaaaattacgggttttgtccaagccctaggtccagatctggatcccaatctcgggtcctagtgtggttccatttcttgtgacggatcacgagctgggtcctaggttcaagttcgggtctgggtcaggttctaggtcttggtcctagttttgtttcgcaggtccctatcctaattgtgggtctaggtcccggttattgtgtgggtttggttcccggtctaggttcgggttcgactcctagtctcatttccgatttaggtctcagtctaggttttgatctaggattgagtttgggtttagatcctgggcctggtcctagtcctagtttggttatatttccatttgcaattgtttgggttcgagttcggatcggagttcgagtcctggtttgagttttggttcgggtctggatttcagtctaggtccagatcaggctcctggtgtgggttcacgtc

SEQ ID NO: 333278 - DNA, 615 bp, Cannabis indica
agtcgatggcacagctgacactgaattcttgatggtggtgcagaaaatcgtcctcctctactggtgaaattgttaccacgattgttctgacttggttgataggattgatttcctgcatcacgagtgttgttcccagtgtatcctcctctcgaattgttgaagttgtttctgtttggcatgggatatcgcatgttgcgattgaactgagctatgttagcttcaaaactcagatctgaatcaaaggtgtgatcaacttctgtttttgcaagattcacactcatctcatgttcttgatcgattttctcaattctggactcggaggcaagtaacaatgcttcaatttcagcaacggtgtatccttcaattctggtgttggtggagattatgaacgtatcatactcagcaggaaggcctttgaaaattgcagaaatgtgatctcgatcgtttagagtttctccaacacttgctagtagatctacagtttgcttcactttgagtaaatactcattcaaggtcatcgatcctttgcgaaggttctgaagtctggtgcggaattccagaatcttggaagagactcgaagagtaaaatacttttcgagtgcattccagatttgc

SEQ ID NO: 333279 - DNA, 654 bp, Cannabis indica
tcctcttccaagaatcgatcagctcgtagacgcaatagcagggcacgaaatattaagcttcagggatgcttattcaagctacaatcaaatcaaaatgcatcgaccagaccaagaacatacaagtttccaaacagatatgggtctctattgctacaaagtcatgtcgtttgctctaaaaaacgctggagctacgtaccaaagattggcaaacaaaatgtttaaagaccagatcgggcgaaatatggaagtgtacgtggatgacatgctcgtcaaatccagaaaggtcagggggcacatagaggacttggacgaatgcttccaagtcctcagaaaatacaacatgaaactaaattccttaaagtattcctttggagtccgctcgagaaagtttctaggcttcatcgtcaatgcccgaggaattgaagccaatccaaaaaagattcaacccctccaggatacgaactcaccaacaaaaaccaaagaagtgcaaagcttaactggacggatcgccgcactcagcagattcgtgtcaaaatcaacagacaaatgttggaattattttacaacgatcttagatctactcacaagtatgttgattaacagcctaaatatgaaattctaaaacgataaaaggaaaacacatataaagttaag

SEQ ID NO: 333280 - DNA, 1667 bp, Cannabis indica
aattcccaaaaagatataaataactctattttcatagagttatcagttatcaatcaaacccaggtttggaacactggattgctgtaaattacattctcaagtatcttccaagaacgagagatatcatgcttgtattttttggaagagagttaaaatatactggatatattgattctgattttcaatcagacaaatatagtcaaaagttgaaatctgagtcagttttcactcttagtggaggagttgtagtctgaagaagcattaagcaaactagtattgcagactcaaccatggaacctgaatacatagcagcttgtgaagtagctaaggaagcggtttgattgaagaaattctacacggctctggaagtagttctggaagtaaaaaaccactagtgctctactgtgacaacagtggagcggtggctaactccaaagaaccaaggagccagaagagaggcaagaattttgagagaaagtaccatctactaaggaatatagtggagagaggtgatgtcatggtcttaaagatcatttcggaacataacctggcagatccattcataaagatgctaccagcaaaatcttttatgggatcatattgctaatatggactaaaggagatgcccaatttacttttagggaaagtgggagattgttagggtttatgccctgaaaagcctataaagacattttttttattaaataaagagttaaatatctgatatatgtgtgactgttaaattattaatatttaattgaataatttacattaaatatcaaaaaattctttattcatatatgaggttgtggcttgtagatgtttagagaactaagaccacttagctatgaataaaacagtcatcaacatattaaagttacggaatctttagtttatggttgctagtacggtttactgatgtccgttcttcggtgcaagtaatcttggttcggattacgaatgtagtgagacattaaagtgaagatactgtatataatagagattacatatgacaaggaccaatatgaataagttatctttattaacatgtcgtttattataaagacctaattcatatcataaaaatgatcaataatagatcagtctaaatcttgagttatcatgaactcttgttcatgttgttagtttctttgattcactcgttaaatgttcttagggaagatgattctcacaacttctgtttcaggaatctaataacatggatggctgggaacatgaggtacaattatggaatcctaactttcctaactggtcgaatgttggttccctttaaatgttaattctggaactagaatgttgtgcacaaatttagatgggatcttgaattagacttccactagtgaattaatagaactaaagataaggaagtaattagaaagataaaacggtattttgaccaaaagtaattacaaaccagcacatggaggactgatcactagaattgattatatcaatggattggacactccagttaaactcagtaaatatagttctataattactaagagtgcaacatatttatagttgagtaatcatggaattaataaacaagggattatttggttgatgagtctcaataaataatctagtttattggaccttagaattataggtctatgatccccgaatttccaccttgaaacact

SEQ ID NO: 333281 - DNA, 658 bp, Cannabis indica
cctcattgagcataatgaaacaccccccatcatggaaactccctttaggaagagggctctgcaggagggataaaaatagaacaacatcaagatgctccccctagacctgatcatacctgttaacactcaaataggaagactctccctagataccaatagggaactggagaagaagcagatggaaataccaaaatggtgaaactccccttgaattgaaaaaaaacaaaataacacttggcccatttaaaaataacccaagcccattaacacaaccaaaaaccaagtgcaacaacactctttcagatcataataaagacacgataaaaaaataacacaaataacagaatctaaccatgtaaaaacacacataattcttaagatgacggatttgacaagaaaaatttacaaacaatataagacagcaaacactaaagctcaactagatctaaacctcccaggttattacactgtcatcccgggtctgacccacaatatcccaccaaacgcgggcatgatcttgtagcacgaaggctgcatagtttactctctcagttctcgtcacccccatattatcgagaatacgggtaatagtactcatccactactcggcctttaatatatcagtacctcccagaaaattcagaggttgcagcttcac

SEQ ID NO: 333282 - DNA, 508 bp, Cannabis indica
tccccataaaatatcagtgcccaataccctacaaaatataagtttctttatttgcaagtcacttcaaccaaactcttgactttaggtaacatttattcttttaaatattttatttaataattttgagtctaagtatgttactttatagtatttctacacatattatactgaaataaaaataatttaattaaacagtatactattaaaataataaaaatattataaaattaatctaaaaattataaatattagatctccatattcttttagatattctatagtaaaaaaaaggacatcaatggagttgaaaatatagatttacttaaatataagagctaaggaacacactccctagtaaacgtttgagttgctaacaaaaaacataatttttttttggaaatcgtatataaatatagaataataatatgttaagatcaagttattttatctataaaaaaaattaaatatagaatggttagaacaataataaaaatgatgtggttcataa

SEQ ID NO: 333283 - DNA, 502 bp, Cannabis indica
agttgaacagattagtgttggataagttgggcattgagtgagttgcacagaggaagttatcatggccaagtactacatggaatgtgtgtaatgtgtcaaaacctgacttagtgtggtgtgatcaaagaggtgtgacttttgaacaagattgggttagggacagtgaagtacattgtaagagttcttattgtgttgaggggcagcagtgagtaagaaagcaaagaagaaattcattgtgttggggtagtgtgcaagtgaaaagaaaagaaaatgcccaaagttaagaagaccgccaacaagaataaaaagaaatcactgcatgaaattcctaagtttcattgcccggcagctgagacaaagtatcacgagaaggtggacaatcgggaattttatatggagcgtggattagtagccgatattgaggatattgatgagttgcccgaatgggtcagtgcaacgattcataagcgagattggggactttttgtccaacaaagagagc

SEQ ID NO: 333284 - DNA, 537 bp, Cannabis indica
aatcacgtaatacgcctatgctagttagggtgttacatccatcctcccctactcaagtagaagataatcccactcccttagttgaaccgacacaagttgttacaattgaaatctacaacaaatgttcctgttccaaaggtcattgctcctcatcgtagtgggagggtttctacaaaaccagctcgttatgacttggatggtgaaatcaatatggtcgttggtgacggtattgatgacaatccattaacctataaaaaggcaatggcaagtcccgaacagaaacaatggttagccagcatggatttagaaatggattccatgaaaaagaacaaagtctgggaatacgtagatgcacctgatgattatcgtccaattggatgtaagtgggtctatgtaatgaccgctctagtaatttagattagtaagggcaattagcactaatttttattattttattattatatgtgactttatttaattttggaccccaataattagaaataaatattagagttataatttctcaattccggagat

SEQ ID NO: 333285 - DNA, 873 bp, Cannabis indica
ttgtttattatccatatggagtcaaaatcacattggattcatgctcattcaaatgttgagaaaaggcgtttgtacatgtacaactctttgtcgatagctatgaaagatagtgttgttaccaaagcttgtcggccattttcggtgctattgccgtattttttttctttgtttgatgagtttaaaaaggataacaaattggtttctttggagccttttaatgttgttaaggttgatgcttcacctcaataatcactgaagttatttaaagttttttttgttagtgttgttttgttattttttaggtattttccgttatgtgatttttttgatgttgttttccagtaactacggttgttttgtggtatcgtttgctgaatacttcattgatataaaacttattccttcgatatttgatgctgaaaaacaccgtgataggctagttgtgttattcttcaagtattcgcatgaaaaaaaatagattttgttgatagtgatgatgaggctcctccaaggatccaaagaagaatttgatttagttatgtctttgttgttttcaactaacggacaaattgttttgttattttttttttaaatcaaattatattgacaatcatagacgaattgtaattaaattttattctttagtcgatatatactttataaccaaaaaaaaacatcataaaaacaacctaattacaacttattttttaatgaaacaaataattgttgttaacgtaaattttcgttaactatattaaagcctaaatcgtgatgaatttgcacaaaaaataatagcagtaaagaaaaataaagaacacaaagtttttttacgtggttttgcagttaaaattctgcatagtccacgagtaaatc

SEQ ID NO: 333286 - DNA, 1063 bp, Cannabis indica
catccccaaaataacatcaaaatcatcctgattcaattctattagatcaactaataactcccttccttctacaaatactagaagggatcgaacccacctgctggagataaccaactccccagtaggcagcaaagttccgaaacctctagaaagtacatcactaggtctattcaacttctcaataattctacttgacatataagaattcgttgcacgagaatcaattagaacagtcaataaattactagcaacagaaagctgacctatcacagtggaaggactagcatcagcctcagcctgagtcagggcaaacactcgggcaggagcaagtgtatcatccttcttttgctctagccataatagctgtgggaaattcctcttcatatgacccactatcccacagtggaaataggccctggcctgacactcgcactgatggcgccttttacatctcgggcatttagggaaagtccaccaattttcgttcccaccacgacgaaagccttggttaccctggaaccttttgtttgggcctgcaactgatgattcactaggccttttcttacggtcaccgagatcagtacccctaacaaaaccaacacctgatgttttcttccacgaatctcttctggcaatatttttctttcgtatctcatcttctgcaccctcagtactcctacttgtatatgtttactttaggaaaattagacatagagttagattagtagtggtggtccaagctggaattattactcatttaatatttggtgtaaatttaaatctttgactttaaattttagattttaaatagaaattttatatttttgtttccagaatataatgcagttcaactttcacaagttattaatatccatttcctgtcaatggatctaacaatatgttaatgtatggaatttgagtttagtattctgtgaccaggatccacttagagtattctaagaactctttattgtaactaaacctaagtcatcaaaagacgcaaccgcattttagtatcaatggcatttgtatcttattcatagtggttttgacaagatcattc

SEQ ID NO: 333287 - DNA, 871 bp, Cannabis indica
atgccatcatgcattttcatgtttactgagccaataccctgaatcttacatgccttgttgttccttaaaagaactgtaccagctgcattttcttcaaaatcagagaacaaattcttgtttggggtcatatggaaggagcagcccgagtctagaatccattcaccaccagaatcttcactagatgcaacaagaacatctgcagaatcatatcaactagatgcaacatcagcttcacctctttctttgctcttgtctctcttaagcttgttctttaacaagtaacaataatctctgaaatggccttcctttttgcaatagtaacatttctttccaacagcatttctgttcttggaattggacttgtgtccattctttgatttcttgaaatctctcctttctggtcttcctcgagcaaacagaccttccccaccagtttcagttctgtcatcaactttcttctgtatttcttttgagttaagggcagctttaacctcagacatggtaagagtatccttaccataaagtataatgtccacaaaatgctcatagttcttaggcaaggagctgagtagaagaatggcttggtcttcctcatcaatcttgactccaatgttgttcaagtccaagattagtttgttgaaatcatcaagatgcctccttagttcttttgtttcctccatcttcatggtgtaaagccttttctttaagtacagcttgttagccaaagactttttcatataaattgcaacaagtttattccataaaccaagagctgactcctcttcagcaacttctcgaagcacctcatcacccaaactgagcaagattgcactgtgtgccttcatctcgatttcttgggagactttcttta

SEQ ID NO: 333288 - DNA, 747 bp, Cannabis indica
tattttgaaaaaaaaatcagtacaggatcctatttgtataattttagaaaatacatgatccaattagtaacttttgacaaaacacatgatctaaaatgatatttacccttaaattaattgacgtgatcaaatttaaattggtttaacaacactattttaacatatataccgacaacactgtaagtaattcgataaccatttttatgaatctaaaaatttagatggcgcaataacacttaaaacataagggaaatttgaaaaaatatgcataaaataccttaaaattttatgcctaaactaatacatttcaaaattttaaaaatatgaccactttataataaacccaaaaatactcctctcattttcaaacctcaactctctctcttcctatatctctctcggttctctctcaacatctcaccctcaccaaaaccgaacctacccctcaccgcctacacagacgaccaacgtgagacccgactacctctgaaatgttgaagggtcgaaaatagccagatgtgagttttgggcaataaattgattttttttgtcaggcccgatggtggtccgatagtggcccgatgccttcctgctgttaaaatgagtaaaggttgaagacgaaggttcgatggtggtcagatggtcacctgatgctacttttttttagtgcaaaaacattaaaaaaaaattggtagtctgatggggtccgatggtcacctgatgctactttttttatgtacaaaaaca

SEQ ID NO: 333289 - DNA, 1450 bp, Cannabis indica
cttttgatttcccatattcgcatttggggggaaccgagtcgtctgaggttctttatgaaatgattaccccttttcgttgtttgcctataaataccagtgagcatttgtccacaaactcattttcaccaaccttccttgctaagtaagttcagagagaaaagaaaggtttttggcgtcaagtttgctgaagtgctttcatcaaaactactcgtttggcttggcataacttgaatccagacgtttgatccttgagtaagttctcgatttcttttatgttcactttgcacatttactttctgaatgcacttttgactttgctgtagaagatatgtaggaaaccctaagtttagaaactctgcgattttcctttgttacggttcatgtgatttcatcgttcgcaatgcttgctattgaactccataatgtctatctttcatcttgcttattctaagcttcatgaaattttttgccctaactcgcgaaaatttcgaacttcctgagttttaacttttcgttgaatattcttattctttaatttgttgagtactcctagtcggcatatttgcctattttaacgttcgatatcccgaccaaacactcatctagtgtgttgtcttttatagatgaacccaggtgagttttggggaagcgaacaccaaatcgaccaggatctgcttctactcttgcacgaggatcatcctcgccttcgttctagtccaacttcttctagtgacaggcattctagcttaactcctctattcagcaataggatgatggctcacacaaaaaaagaccatgtgtagagtcgacgcatctgaccgtcaagtggcccggcatgccaccttaccaagcgctgagggcggagatggacttggccaggaaggatgctgatgacgccagggtggagctcggagctatctgaatggagctgggtgaggtcaacaagtagcttttcactgctgagaagaaaatagactaaggacctcgaggccttcgacaaacatgaagctaccatcggcaccctgtcggtagaagtgaatagcctacaagaggaaaggggagttctttggactatcttccgccggctcaaagaagagaagaagactaaggaggaggagcttactgttgaggtcgagaagcatagatcggtggtggcaaggctagaagagaaagtacatgccttagagacagccggtctcaagactttttatgacatttggaaggctaaccctcaggcaaattttgtttacctaggcgaggccaaagacatgtatctcaagtactgtaattcccgaattgcttatggcaaacccgaggcgactaattctacttctggccagaatgttgatgtattttccgctcagacaacagatcctccagctcctaccggcccagaagacccgaaccgagagcttgggactccagctgtttaaatacttctctttttatc

SEQ ID NO: 333290 - DNA, 1023 bp, Cannabis indica
ttagccatgtgctctgttagttttttgaattcctcctcgcactcgtttgaccattcgaatttctgacatttcttcaagatgttgaagaagggaatgcatttgtctgtggatcgggagataaaacagctcacggcagcaacctttccatttaagctctgaacatctttgtgtttcttgggggaaggcatgctcaggagagcttggattttctctagatttgcctcaattccccgctgactaacaatgaagcccagaaactttcccgacttaaccccaagagtgcacttcttcggttaagtttcattctgtatctccggaccacttcaaaccattcatctaggtcatcctcgtggctagcgtatctctttgaatttacaagcatgtcgtccacgtatacctccatatttcgccccagaaggcctttaaacatccggttcaccattctttggtaagttgcaccagcattctttagtccgaaaggcatgaccaggtagcagtatacccccttatcggtcctgaagctagtgcactcttgatccgcgatgggcatcttgatttggttgtagccagcgtatgcgtccatgaaggacaatagcttgaattcggaggtggcatccaccatctggtcgattcttggcaagggaaataatcttttgggcaggctttgtttagatcggtaaaatctatacaaacccgccaagtcccgttgggctttggtaccagcaccggattagccagccattctgggtaatacacgtcccagatcatgccactggttagcaatttgtccacctctttctctggggcttcgaccttcaccgagtcgagggggcgtcttttctgttgaaccggtggcatgtctgggttgacgttaaggacgtgggttatgacgtgggggcgttatgccgctcatgtcctcttgacaccacgcaaaaacatccgtggcagcccttagagtctttaataatttttcgtttttcctccggttctagacactttcctaaaccggtacggaccgttggt

SEQ ID NO: 333291 - DNA, 445 bp, Cannabis indica
ttccgcctggaaccaacacccagacgaccatcgcagatgccactgagttacaaaatctttgtgacgctctcggactcatgctgtaaagaccgcttatggttaatggttaataccttgaattatttcataattaaggtttatgtatgagaataattaataattatgaaatgtatattttggaaatatatttaatatcatttatgttattatgctatttaatgtaaattacccaatttctgtgtttgtgtttggaagtggtggaatgcggcgttgggcctttagagagtcatattttgtatttctagaatattagtggggtgttatggttaaattttggagacgttagaattttcggggtttgttatttgaccaatttacccttgggagtttttatttgttttaacttagtcaaaggttaaataggtctttttgttggaaattattt

SEQ ID NO: 333292 - DNA, 1825 bp, Cannabis indica
tactacggtaacaaatacacttttcgatcaataaattaataaagatagttatttcaaaattcaaattgagtcgaaataatcagcatgtttctaatttaccatccagtgcgtacaaaaggtttggtcaaacccaagacactgaacaagatacttgtaaaagacaagtgaccaagagtcatacgtctgctcggtcacttgggggcacctatacctgtacaaagcatttggtaaaaataaaacaatcacaattgcacgatgattataaacagagaatgaaattcattaaagataacaaaggcacgtaatatcggcattaaaagtttccaagtcagcctattgtctgaaaaatgaaaaataatttcaagtttaaagaccgcttggccggtcatgatgtcttagaaaaggccctgaggccgaattagatatataaaaataaaaaggtaaaagaagaagtgtttaaacaattagagtcccaggctcttggttcgggtcttctgggccggcaggagctggaggatctgttgtctgaacgggaggtacatcagcattttggctagaggtagaagcagccgcctcagtttcaccataagccacttgggaagcgcagaactcaaggtacatgtccttagcttctcccaagtagtcaaagtttacctcaggattactcttccaaaagtcgtaaaagagctcaagactggttgtctccaaggcattaaccttctctttcagcttcgtcacctcggtcgtaagctccttctccttagcttccttctcttcctttacccgacaaaggactgctgaagagatgacctctcatcttgaagactgttcacttcagcagataaagtcccgattgtctcctcaagttggatagagtcctcaagatcctttgtcagctcaattatgttcttctaggcggtgaaaagcttcttgttggcttcacccaactccaaccgaacagctccgagttctgccctagcgtcttcagcatccttcctggccaagtccacctccgccctcatggtgttggacaaagtcgtgttcttggaagaagcagacttagcccaggagtaagtataggccaacttcagaccggcctgcatagagaaaaaacttgagtatttaagccaagtaaagaaacttaaagaagagtatcaaggaagacttacccttgtgaactccttcaagactccttccaccagcagctccagagaagagtcattatcggcaccggccaactgctcactaacctcagaaactaaccggttgacatagtgagcgagcatctccttgccatttttggcctccgaaaacaccgacaaaggtggagtagaggtccgcaccagttcagacccacctctcagttggtcagacctatccgaactccctccttgagactctgtcggctgagcaacttttggagtggaggggtttgcaaccatcagctcctcggaaaggtcgatgacttccccgacaggcgtcttttccttggaagaagttccctcaccggctttaggcttcttggccgggggtgatgcgctggagcttctgccaatcctcttcctcagagcatcgagcatcttctgagacatgtctgcacggaacaaaaagtaacatggttagagaaaacaaacatcagaaacatgaggcataataatcaagaagcttaaaaacaagatgcagtagtgtgcaaagtgattgtctgaacaagcctcaaaagtccatcatcacctgacatgcctcttatttcggacatgatggctttccctttttcgagtacgggaggagttggtcgagcaggagaaatgggctccctgatgcgaat

SEQ ID NO: 333293 - DNA, 589 bp, Cannabis indica
gaattctcggagcgggaaagcttaaggtaaagtttaaccattaagtttaaaacaattggtttcgtaaaggggttttgcgaattagaatagttatgaaggttctgaccttgtaggattgttctcgggtagtcatgggactagcagctggtttagggttgttgggtgatggatgctcaagtttgagtttgaaaactcaagcttggttcatccatggcatgttttgattatgtatgttttttttatttttgtttattgggatatattgtggaagggtattgtaggtgttctggaaaatttggttgcatttggacatgttttgagcaggtttggaattgtttggggaaacctggtgcaaatcggttaacctatttgcaaggacctgtaaaatcagttaatcaattttggcagattccccgaacaattaattttcctcgattcatgtccatttcgaaaccttggttgggtgatttcctgtttcctagggtattgtagttctaattagtaatagcagaaccttaggttggaggtttgggtttcccagattagggttttggtgtgttatttatccagttttattatgtgattaggg

SEQ ID NO: 333294 - DNA, 785 bp, Cannabis indica
cccatattagttatatcacccataaaagatttcaccaggagcatctttgtgaatggatctgccaggttatgttctgacgcaatcttcaagaccctcacatcatctctctctactatatttcttagtagatggtacttcttctcaatgtacttgcctctcttatggcttctaggttccttggagttggccaccgctcaactgttatcacagtagagcaccactggtttttcttattctagtaatacttctatatcaatgtataatttcttcaaacaaaccgcttccttaatagttttgcaagctactatatattcgacttccacagttgaatctgcaatacttctttgcatgttgcttctccagactacaactcctccaccaagagtaaatattgatccaaattaatgtcgactttcgacaatctttgtctgattgaaaattagaattagtagatgtagtagaatttaactctccactagaatatacaagcattagatctcacactctttgaagatacttgacaatgttcttcacaactatctagtgtgccaaaccagcactactagaaaaatgggttttagtgacacacattgagtaactctaaatctgtttagtgacacttcaacgcgcgtcactaatgaggatgactggaaagatagtttttagtgacacttcacacgtgtcactgaacctttttacattcactttttgcgcgtcacacgtttctatgctttttatatataaaaaaattaatattctttttttaaaattcagattatatatta

SEQ ID NO: 333295 - DNA, 1393 bp, Cannabis indica
tgctgccttttgaggacctcttgctctgaggcacttgagagggacctgctaagcttgcggctggagcggagtgcgacgagacttatcctctcatccctgaaggattcccaaagtgagaagacgcaggggctaaagcctggccctgactatatccgggggtagcagaaaattgtatgccgctcatcggcggggcggctgccggtaaggttcctgggaggtgagctccgggtacatatcccgctatcccagtagggtagtatcctccataggccactatctaggcctcttctaggttgatgtatttttggactcttttctggaagtcttgaaggttggaggctccttcttgttgtaactcgttccagaacggagtccctgtacggatgcctgcttgaagaagagcaatctgttgtccgtcatcgactttcttggtttttgaagcttcttccttaaacctctttatgaaattcttcattgtctccataggcagctgcttgatgttagtcaaggcgctgacctccagattgactttccttgcagcgacaagctgtctccgaaagctggtttgctgcttagtccagcagtccacagatcctggctccagtttcttgaatcattcttccgcggacccacttaaattaagcgggaagcatagacacttggcatcattgatgactctcatgactgtcatgactcggttaaatcgtgacagatgatcgctagggtccgagttcccggtataagctgccatttcgggcatcttgaaatttttggggagctcagcttccaagatgtgcctgtcacaaggctcccggtcttcagagtcagagtcattgcctttttgtctccgggagactcgagcaatgtcctttcagagtatggcaagctcagccatgattccttcgtttagtgttcccgtggagactgcgggtacgtgtttcttttggtctaggtgatcccggaggtcaccgtgtttcccattaatctgatatctcagatcgacaagagggcatttttggcaccttcttcctctccctccggtttcttagtgcagagaaacgctctttcggtctactcgatcctaagggccaagactccctttttgaagtttgcccctctgcggacctttcgcagatcctgcacctttttctttttcgcaagggtggaagtagggtttttgtgctggttcccttcagagggataccttatagggctaggttccctagatttctatttttgggcacttggcgaggattctcttggtgtctctccaagtccaacagggatggctttatgatgcacgtggattcctgctgcctccatgcctttttgcatggccagcattacctcttgcatctttcagttttgttctttttgggctgtgattttagct

SEQ ID NO: 333296 - DNA, 524 bp, Cannabis indica
aataataatattaggtgtatcaatacaaagatatcatatgtataagagtgtacacataagcaatatatagtagctctaatcgaatgacaccataaatttagtaacagtttagtaattttaaagattttactgccaaatactctttgttttaagatacattttattagtttttttttttaataattctacggtgtagttatttatatagttacacttgtaaacttttaaaaaatattgaaatagtttataatgtttaaaataaggttaaattattgtgttgcatgtgttactatttttttttcttataagcaatttttgaactttatttttgttactgtctatttcgatttttctaaaaatttacatatattcctaagtatacacaattctagaaaaataaaataaaataaattagctaacctctatgccaaaacagataaaagacctataaaatacatctttagatagcactacgatttttttttttttgatttaagcatttatatattacaaccatgttttac

SEQ ID NO: 333297 - DNA, 663 bp, Cannabis indica
caattcacttgcacatggtaaagagaatctcactatgaagcaatctattttgaagatagctgctattgatggtagtactgtcgtagatgcaccctgttctattaccttggtactagcactggattcaagttgtagtcatagcgtgccaacttgtaagttttgagttcaagtgctttagtgacggcatatggcccttcccaggtaggcctaactactcttgttgatggatctttcgtgttaaagaatactcgttgtaacaccatgtctccaggcttaaatttcctatttttaaccttagagctgtagtgttttgtgaccctttgctgatacactgcctttttaagtttagacctatctctgatctcttcaattccatctaaagattcgaccaatagttgatggttggtttactagttgcatgtcattcttcgatgggatggaggtgtgagctctacaggtatctgttggaattattttaccaggatcttagatctactcacaagtatgttgattaacaacctaaaaatgaacttctaaaaccataataggtaaacacatataaagtatgagaaaccttacagtgggtgcaacgaaataatatgtctccttccactcagatctctaacccttgattcctttctgttgcagagtattatcaagatc

SEQ ID NO: 333298 - DNA, 674 bp, Cannabis indica
cagctggagggcgaagatccatttgtgtatgttggatctgttcaggggtctcaaatcctgattatttcagtcttacgggctagagatttactacacagtagatgtgtaggatttttagtagttgtgattgactccagtagatctaaaacatttggaccagaagtagttagggttgttaaagaatttcccgatgtatttcctgaggggttgttgggactaccgccataacgagaaatatattttgtgatttatttggcacctggagtagaacctgttttgaaagcaccatatagaatggctccagcggaactcaaggagctaaaaatacaacttcaggggatgcttgatttagggtttatctgacccagtgtatcgccttggggagcttcagttctatttgtgaaaaagagcaacggttccctcagaatgtgtattgattatcgagaattgaacaagttggcaatcaagaacaagtatccgttgcccagaattgatgatttatttgatcaacttcagggaaagactgtgttttcaaagattgacctacgatcggttatcatcaactcaaaatttgggaagaggatataccaaaggctgcgtttcgaaccagatatgggcactatgagtttttggtaatgtcatccggattgacaaatgctccagcgacctttatg

SEQ ID NO: 333299 - DNA, 945 bp, Cannabis indica
ttttaaaaaatcaaataaattttttaacagttttatagcaaaaattattttcggggctaatgttaacgtcaattaataagatttttgtcctctaaactttgacatataccaaattatgtctcatgatattttaagactgttaaaatttttcctaaattattgaaattcctaaattttaatttttttttatctaattttataatttaattagcctaaatacatatatttaagaaaaaaaaattgaaagacctctttaggccctaggtaacgaccccaaccaccctactctaaagaaaatcttgaattcaatagagtatgaatttgaaaattcaccaaaaatataattttacctttaggattatatatatggatatatacatttgatttaatgaattttattttaaattttacataaccgatatttggtaaaagtgatcatttcattaagaattaatcaccattagtttgtcctttttgtataaatacatgcatttatatatacacttgttaattttttatttgtagtggtgtggaattataacttcacactttgaacatttatatttgtcactacaaacaattgttactttttgtaaaaaaaatttagtcacaacataaatttatttttaactaaatgtgacttttagtcacaacaaaaatttacttgtaactaaaacataatatttatctacaaattgttactaatatagttttaatcacaataaatattgtgacgaaaaatacatttaatcgcaacaaattgtaatttttatgactaatacttttaatcacgaatcttttaatcacaaaataaaaataataatttataattaattaaaatttcttttataaattttgttgtgattaaaactaaacattttttcatcaaaaaaaaaaaaacaaaactttttgttagtgcgtatacatatgtatgtattataacta

SEQ ID NO: 333300 - DNA, 699 bp, Cannabis indica
ggcgaacaggtccaggagggaccggatcaagttttgtaagtttctcaaagacatgtgtcacaccaacaacaaatgccttcacctcaagtccgagatcgatggattccaaaaactaggaaccccatgagaggatagttaatgaaaagtacaccccacccaagagttgacgccaaagtatacctgagtgaaacctttggcaactaatcttgccttaaaccttactggctcatcctctattacaccttctttaatctttagaatccacttgcatgaaatcaccttcttgtcctcaggtcttgaaaccaatacccatgtcttgttcttgctaagcgagcttaattcatcatccacagtccgagaccactccttcttgtacttttcatttaaagcctcttctatactcaatggttttggtatgtcacatgaatgatctattgacaaaacataggcaatcagattagcttctacaaagcttgctggtatatggatttctcttctggttctatctctagcaagctggtagtcagacagatttggttgttccttagtctcacttggatctgtgtctgtgctgtcattgttctgacttggttcaaatcctttaagctattgatttcaaactctaccaaatcttccctcttgctagatgaatttgcatcaggtaactgttgggttttatgcactaaataaaactcattt

SEQ ID NO: 333301 - DNA, 533 bp, Cannabis indica
tattttcccgagtttcattaagccctgtataaatagtataaactggtagatacttgtcgtgcttcttttgtttcttcttgtctttggaagaccccttagagtggtctttcctctttgagccagaggcctctgagttatcaattctagttgagacagtggtttttgaaacattgctgggtttacttcccgagctagtttttaacaagttcatctcttttcgagcttcctcctttcgaacaaacacctgagccctctcgttgaactcattgatattcttcattggacgatcctataagtcatcccataattcactcctagttgtggatagatcggtagtgatccctgcctgaagggcagtaagttgtgtactatcatccagatttcttactcttgcaatagccatgctaaaacgactcaaatatgccttaagtgttttgccaggttgttgctttatgttggttagcaaggaagcctcaggtcgcttatcccttgcgacctgcaactactttttaaagtccttggacagctgttcc

SEQ ID NO: 333302 - DNA, 566 bp, Cannabis indica
cagtaacactcatattttctttggttaggtgggtgaactcttttctcttggcacttctaacggcctcagtatagtacttggcattgaaaagttcctggaacttttcctaggtcatcgtagtaacatcatgtatcatggacacaatgtcccatcacactaacgcatcttcttgaaactgaaaagtggcacagaccactctatcattcccggtgacgcccatgaaattcaatatctctgtaatcactgttagccactgctcggctttcataacgtccggacctcccagaaaaactggaggtgcttgcttgcggaacctttcatacagaggttccatcctattcactgccatcaatggttcggcctggataacaggggcaggtgccactggaatttctggaacaggcactgcaagagcaccctgctgtctcaatcgctggatttcattatgttgttcctcgattctagcttgcatttctgcaaacctgttttcccaattctgggcttcctgagcaacatgggcagcctgggcagccgatggcgggttagcatcaccccgaccacgtgcc

SEQ ID NO: 333303 - DNA, 507 bp, Cannabis indica
agatcctggtaaaataattcccaacactagatttattgccatgtatgttatttaacatcctaaatatgaatttctaaaacaatgtaattaaacacatataaagtttgagaaaccttacattggatgcagcagaattaaatgactccttctgctcagatctctaacccttgtatcctttctgtagaatagtatcaccaagatctgagcccggttctccttctcttgaattggattcttcacagccttacacattatgattgagtaccacttgatgtgtgtgggcacttactctatcactatagggttcgaaatattgaagatagaaagagagatgaagtattcgaatggcataaagaagatggctcaaatttttgactgaaggcaagtgttttcatcatcttttaatttgaggccatcactacatatttataggaatccaactatgtttaggtttgaattatttggcattaaaaaatgataaaataaatggtaaaataagccataagt

SEQ ID NO: 333304 - DNA, 1003 bp, Cannabis indica
aaaagttaccgattggaccctttgtttttctaaatgacaaaatagattttgtattttccaaaatggtaaaaataggaccctgaactgattttttgtcaaaataaaatttaataataatccgatctaaaagtgttatgacaaaactgtttacatattctatatctgttcgtattttcaagttggttatattaaaaaaaagttgtcaaaaattaagttaaggtcctatttgtatcattttagaaaatacaaggtccattttgtcatttaacaaaacagaggatccaattggtaatttttgtaaaatacagggtccaaaatggtatttactcgtaaaattttaaggctttatggaggtaaaaaaatgtgaactacaatcatgagagaaggaacaaagaagaaccgtgatttaataattctgcatttgactttataacaaagagttccaagttaattacagctcttcctatgtcttttggtgacgtttaaagactttacagtacgcctccaataataatagaatgattttcttctcattcatgttttttttcttacactttgccacgagattagttaaagttgttcaaacgtcaaaccaattatgtaccatcaaactgaaaactctagtctctatctgtcacccaaaatagcattaaatactacactacatattttatcattagaataataatgaaattatattcttctgattcatgttttcttggtgcaacttatcttatcaacaggatgtgccacctaggattctgaagtttaaaactccaatgcaaacattccaagaatattttccaaagtctcatttggttttacaaattcctctcaaagtcttttgatgcatttgcatttgttcatattcatagcataaatcgatgtaaactgatacaagagcaacaaaattcatctttgttggatactcatccaacaagaagggatacaaatgttattgtcctacttaggggtgtgcagaaagtcatccaatccaattcca

SEQ ID NO: 333305 - DNA, 1490 bp, Cannabis indica
aaatttgttgaaccaactgcttgttgctccaagtactgaggtaggaaacaaaatacaacgtaagttgtttgtaacattacttgctcacattatagtgctgaaattattcaaatgcaagaccagatcgatagttccatcatgcgacgagacgtgagggtttttaaatccatgggaaaaaggagtattcatgatatttggatggtatggcttgagttcctcatctaaatcatatccagattgtttttcgaactcccccacttgatatcttctgaacttatcctccaacttgtctattcacaattagatagaatcctcttgctttggactgagttgttggcgaagatcaggttttttttttttggttcaagtgctctcgtacatccgattggttttttttttttggttcaagtgctctcgtacatccgattggttatagttacttgctctactcacagactgcgtcctacttatggaccttgtctttcacatagatcttgtcctactcatggacctcatccttgagtgacttatagtcttactggttctcgtactttcttgatcattatagcgacaagtacattctcctcctcgagttgatcgactgtgggtccttgagcgccctgaggtcacactcacttattcacaccccgttctaccccctgggcgtggttcgttgtgttttccccactaggatttgtacgagcccttccctacaggtctgagaagaatgctggtggttccttcattccttaggttgtgtcccaggattttcctcgtttccacgatgaatttcctgttccttggtttctggttgcctcccattctcagttctatgaggtggttctggctcatcatttggatttttagggggaacctcattttccccaggttgttcttcctgagaagtttgagggtcctcttgagcagtttcttgtctcctggttcgtgatccacgaggcctggcttgtggtcttctcactccagggtcaagttgatttggagtattgttccccggtgctgccctggctgcggctgccccacgctccaattccacattccgccagtttgcctcctccaggcggcgcctgatatggtaattttccaatttgacgataggtatgtatctcgtaaggtcataagcaccctcatccatgggccaagcgccctcaagattgggtccttcatccctcactccaagattttggcaatttccatgctgagtcctccacgaacatgttgttcgtgtgctggggccaccctcaggttgggtcctcctagaacgagtggttcgagtgttggggccaccctcaggttggatcctcctagaacgagtggtccgtttagactatgagttggaaggcctcctgaagcctactggctcttttcaaggacgatgaggagtttcttcatgtggtgtgtcaacgttctttgtgttgtcagccatgaagaaaattatttttcgtatgtaaggagggtttttttgagctttt

SEQ ID NO: 333306 - DNA, 837 bp, Cannabis indica
aagataagaacaaaaagcagttacgcagctattaaatattatcctacatacaattaaatgaaatgtggggattgtacatgtttcatgaacatttacattttaaattgatcccaaataaataactgcaacctatattcttataaatatgggcaaattcaacaaaaaaaggagcggagaatttgagagaaaaaagattatcaattatatactgtatcttgtattcagaaaatatcataattagatagattcgtggagtatgcagatttaactgcaaaaccacataaaaatatctggagttatttaatcgtttattattatttctatgatatatttattacgtaaaggctcattctgtttagttaacaaaaatttacgttaacaactttcatcatcaagcacataataatgtttactatcaaaagagacaatatacccttgatcacaaatctgactaatgcttagtaaattttcccatagtccctcaacaagaatcatatttttttaaccttggtaacccttcacaattgagagttcccataccaatgaaattctttgctaaaccattgcaaaatgtgacctcaccacattgcattagtttgatattcaccaaaaaatccttgtcacctgtcatatatctagaacaaccactatcaaaatatcacattcgagaagcaacacttttatcaaaaaatctagcaagatattttcctttgtgtaggagcattttgtttcttttgaaaatttttcaaaatactaaaatattttgatttgaacatattttgcatggtgaaatatttaggtcaatatgccccttaatgccacaaaacgtgacaaatt

SEQ ID NO: 333307 - DNA, 580 bp, Cannabis indica
ctgattttacttcgagcaacaaaccctttccaatttttagctttctcgccgggatagctggatcgatctcgatctcttctaactcttccataggtccaacattgctgcttgggtcgccaagtcaaggatccatgtctttatcctcgccttgggaagtttcctacttgggaatgtttattcccttgtctgggctctggctggaggatatttccttcttagccttggccactgcaagagtgtaacattcccgagcagattgctgattccctctaagacaccctgcccgacttttagttgggaacttcaggcacgagtgaaatattgatgtgataactttgaagtcatactaggctagtcggcctagcattacgttaaaggctgaaggaacatccaatatcaggaattgtgccatgatatttatgctcgtcagagcttgtccaactgtgagtggtagccagatttgtcctagaggtgcaactccttgaccggagaaaccatagacaggctggaggcatggagttagatccttgagctggagccccatcttctcgtaagcagtcttgaacaaaatgtttgaaga

SEQ ID NO: 333308 - DNA, 896 bp, Cannabis indica
tgttgcctataaaattatctcgaggtcttagccaacagattgaaggtagttttaccgtgtgtgatttccgaaaatcaaagtgcctttgtgaaggggcgtttgatctctgataatgtgatgatatcctttgagataatgcactacctgaagaggaaaacattgggtaagtcgggtactatggcactaaagttggacatgagtaaagcctatgatagagtggaatggattttccttgaaaagatgatgcttcgaatgggcttttctagccgttgggtttctttggtaatgtattgtgtgtcatctgtatcttacaagatcactcacgggggccatgttctagggccgattgttccaagcagaggtattcgtcagggagacccgttgtcgccttatttgttcttaatctgtgctgaaggcttctcttcacttgtcaatttatttgtgcgtcggcaatggcttacggggtgtcgtgtggctaggaatgcccctattgtttctcacatgttgttcgctgatgatagttacattttctgcaaagcaactgatatggaaggggctggtgttcttcgcctcttggatatttatgagaaagcttcgggacaaaaaattaactttgctaagtcatcagtcttttttagcaaaaatgttgatgagcatgttcgggctcagctttgtgggcttcttgggatggcacctgcttctgaaaatagcacttatctgggcttgccttgtaccatggggcgcagtaagaatgcgatcttggggtatctgaaagagaaaatgattaagaagatgcaaagttgggagactagattcctttcaaaagctgggaaagaagtgttgataaaatctgtggcccaatcccttcctagttatgcaatgagcgtgtttcttct

SEQ ID NO: 333309 - DNA, 947 bp, Cannabis indica
cctcggaaggtgcttagacacaaaatatgaaaaagcaaagagtaagcatgtgaggtcacatggtaatgacctcagaaaccactcgagcgacaagggtactgtggtaaggatactcccggacaacgacacaaaataattagaagagaaaatagccgccttaacaagttggtccgaaagtagagcagggtcttaacaagttgcccttacctacacatggaaatagcaattgtgagtcaacagactcagtaaaagaagcataacataaaacataataatatcccaggttataatcaggcgcccatacacctaaccataaccctatccccgtgtcccacacgatactgagtctagaatgttcatacgacaatactatcgaccataatgtcagcctatactcaatatgctagtcatactctaccatattgatgtgacaacatcgatcagtattttagccaacatacatttatcagtaatcagtacaattgtatactattactgctatcaatgtactctcacaggcataaacaacatgtatgctaaatatgtaattacatatgcataacattatactaatcttactttgtttccgaattcaggtgtgccggccaacctgagtggaaaacttgctcgacgaactacaggcccctaaatcacatcgttcataacatggttaagtgacacgctaaatcacaaccggggacttaggttttaaaccaaaactctttatattgaaagttaacatggaaataccctaaactaatagggaattaaccaaccaaagctctgaaactaacaagaatcgacaacacgaaaagttcggggaacccagcagtaaatccggttaaccagtaaaatcggttaaccagtttacaccagaaaaccccaaaaattcgaaaactaccaaaccttccagacctgcatattataccccaataaacatatttcaa

SEQ ID NO: 333310 - DNA, 559 bp, Cannabis indica
aaaccccaaaaattcgaaaactaccaaaccttccagacctgcatattataccccaataaacatatttcaagtaacagaacaacaaatacatgctcaatataaaaaaaatcatcattaaagagccaagcttgagttcaaaaactcaaagcttgctcaatcaacactacagccaccaaaaccaactcaaaacaacatttctaaccatagttaatcctcaaaaacacaattcaaacatcaacagcaactacagtagcaaaactcacaacccatgcataaatctctaacttaaaacccaagaaactaaagagagaggtgctaggagcttatcttgaacttgaatctacttagaacttgctggaaatcacaagatttgatgaagaaaacaagaaccctagctggttctaatgggttcgaaaaagagagagtttggagagagaaagttctttctttatttctaaatttgatttttttgtaaaatgaggtaaataaaatgagttttattagattaataccagcttaaatatcagcgtattaatcccactaaagtccactaaaggac

SEQ ID NO: 333311 - DNA, 886 bp, Cannabis indica
atgtacaatctttatctgctcatactcattgctattcaaccttagctttgcctttacctacatatatgaacaaaacctgtgagtcaacagactcagtaagaaaggcataaacataacatatcatgaactagattataattaggcacccatacacccgattgtaaacagatctcacgtcccacatatattgagtctagaatgtttgtacgacaaagcctagcatatatctattggtatctcagtgcaactctatctacacctcactgataccctaatatgctaatctaatggctacttttatgcctaacatatatctgttgatatctcagtgcaactctatatacacctcaccgataccctgatatgttattctgctggcaactgacatgcatgcatgctaaacatgtatttataaatgtatttattatactaatcttaccttgattctaaatttaggtgtgtggtcatcctgagtggaaaatgttgctcgatggtttacaggcccctaagtcacaaaatatgtaaaacagttggtccacgtattttggacaaaattaggggcaacatttacccccaagccttgtttggtggaaaagtaaacaaggcttgcttagatgcctccggttgccttatcagcttcctagcacgtgctttgggcgcgtggtgagatattaatgaccatcattactgcagttatttgctttttgcagacaacgattcgttttctgtccatttattgatgcggcgcattaaatgggtgtcagacgggtactcaaacgttttctaccgccttgatgagtgtttattccaactgttggatctgtagaatttgaatcgattgccctcctgaccgtacgatgatggttgttcacagctatctcacacc

SEQ ID NO: 333312 - DNA, 765 bp, Cannabis indica
ttttgagattatgtaggcgtgggactatctatgttagcaagaagcatcttgttttggtagctcaccatgagggaactccatggttgagtgtctttgacttggggtgatttcatttaggaaattttcccatgaagcgtgtgagttggagcaaagcatgttggaaacacttagattggtccgtgggacaaatcgtcagtgcaggacacagctagagtgatgcactcatgtataagagccatcattctgtgaacgtaagggcccaatggagacttgaagcagggatgttactagggtaatgtataaaagaacgtcaggaagaatagtggtatcactaaagtaaagaagattacctaaattacttaaggtgacacgataatgatggagagtactttataaatgactggatagtcaatgtgatttataaggagaccattgaaattctaggaaaggattactttattaagcaattattgaaagacatacccacgcagaatgggaaaaaacttatgaattgagatgtaatttaatggacatgtatttgagtgattggtgaatattggatcacaaagtatgttgtttattaaacaaaaagctatataattgagtgtacaataagtattaaagtggttaaccaagtatgaagatagtgatgattgcaaggaagcagtggtatcgtatgaactagggagtgaaaactttagtggtaatgatggaaaagagcattaaaagtctcagatattgaatgaaatcagcatcatcaatggg

SEQ ID NO: 333313 - DNA, 701 bp, Cannabis indica
ccctgattccatactcataaaacatattcatggtattgaaaactcagataatcacatagagctcggagcgagctttccaacgatatatagaactcccaaatcggagttcggatcacgtagatatgcattttcaaagtttacactcaaacttcccaaaaattcgagggcgggccgcggcatgcaaaagccatgtcgcggcacctgggacaaatctcaggttccaccaaaaggggcgggctgcggcatgctcagaccttgccgcggcacttgggttccaaacccagaaaccagccaccttcatcacaaaaattcatcacaaacacaatgaaactcattccaattcagaaccaaaacttccaaattataaactagagttgctagcaaacattagaaacttaaaacacataattatgcatcaaaattcaacataaatccccaatttcagattgcatataaatcacataaaccccaatttcaagctctagaacaagagcttcaaacccaattcactcaatccattttccagcagcaaaatacctttaaaacacatggattcaagctagaaaacatcccccaatactccatctaaagcttaaccaaatccaaaacatcatacaatcaaagattcatgcttaaatcaactaaagcccactaacatgcaacacaacttcatcatcttcaacaaactcatgcttttcaac

SEQ ID NO: 333314 - DNA, 651 bp, Cannabis indica
gctgccattagagtgagaagaagaagaagagagcttgaagaaacccattaactaagtgcggctgtagaggaagaaaagagaagataaatcttagaaaccctaaccctagaatattatttgtgttgctgccatttttgtgttaaggagagaaaatagtttgaaagaatttgaatatgttagagggaaaaatggaggctgccgtgtgtttcatttagggttagaaaatacattaccttatatatattaggttaaggcttgctagggtttgctttgcatttagttgggctggttctctccttgttgggccgaatatattgaagaaaagaatgagtcttgtttgactcatttcttcacctttgaccgagtgattggagagagagagtaagagtcattgaatcttgtttgaattgatcttttctttgggctggtttttgcttgtgtgggccgagacttttggtgagaataaagagttggtgtaactcttttaatgttgacttgattggttgttgggctcttcactttgggcctggaacaaatattggtaaattgtattagttataaattgacactattattttgtggatacataaaataataaattttagaaaaataccaatttgcatataacattaattttgcttcttaaagtgt

SEQ ID NO: 333315 - DNA, 1358 bp, Cannabis indica
agtctgaaatacttctttaccaagagagatctaaatatgagacaaagatgctggctagagttggtgaaggattatgattgtgagatcctttttcaccctggtatagccaacgtggttgttgattccttgagcagaaagggacagagtcagataaatacggtgaaacaaatctcccagcaactagcaaatgagatgacccaagctatgattgagtttgttgtaggggagttagctaatattaccctgcaatctactcttttagagcgaattaaagaagtgcaaatgcaagatccagaattggtaaaaacccgagatagggtttcggctggaaagactagtgattttttagtggatgaaacgggaatgttgcggttcgaaaatcgtgtttgtgtgcctacggatgatggtatcgaaagaaagataatgaatgagtctcatactactccttattcagttcatccagggtcaacgaagatgtatcaagacgtgaaagccatgttttggtggcccggcatgaagaatgacattgctgaatatgttcctaagtgtcttatctgtcagcaagtaaaggttggcatcagaggcctgcatagttgctgcagccactgaacataccatagtggaaatggaaagacattgctatggacttcgtggtgggtttacctagaaccacgggacagtttgacctggtttgggtcatagtggacaggtttacaaagtcagcgcactttttacctgttcgaacgaatttctccattgaccagtatgctaagttatatgtcagagaaattgtacgtcttcatggtgttccaacgtccattatttcggatagagatacgaagtttacatcgagattgtgggagagtctgcatcgagctatgggtattcagttaaagttcagcacaacttttcatcctcaaatggatgggcaacccgagaggacgatatagattctagaagacatggtacgggcatgtgtgcttgactttgagggatcatgggtaaagtaccttcccctgatcgagttctcttataacaacagctataaggccacaatcgggatggccccttatgaacttttatatggaagaaagtgtagatctcctattcactgggatgaagtgggtgaaagaaagttctttggtcccgaggctcttcagagaacaagtgaggcggttgacaagattagagcgcgaatactggcggcttagagtagaaagaatagttatgctgatccaaagcgtctagatattaattttaaaatcagggacaaggtgtttctacgaatatcaccgacgaaaggcattaaacgctttgggaagaaagggaagcttagcccatggtgttgggttttatgc

SEQ ID NO: 333316 - DNA, 897 bp, Cannabis indica
tcacaaggtacgggtccaggtctgggtcagggtttaggttcgagtccgagttagggtttaagtccgggtatgggtcccagatccaaacatcgactatgggtcaggtccaagacacgggtccagatcaggatcccggtctcgggtcccaatctagttccacttcgggtcccaggtgctggtccgggtcctagttcagggtccgggtctagggtcacgtctttggtctcgatgccagttctgaagcccaggtcccaggtccaagtccccatctaggtctgagtcctaggtcccggttggggtgcaagtcctagtccgagtttgggttcgagttttcgatcccggtccgggtccagatctgggttcgagtaccgagtttgagtccagatccaagttcgggtcagagtctcgggtttcgatccgggtctgggttctgaggcccaggtccaggtcccccatccaagtttgggtcctaggtcttagtccgggtccatgtttgggtttgggtcctagtccagttcttatttcgattctgtgttttggttcgggttcgggtcctggtctgggtcggggtctgagtcctggtccaagtccagggtcaggtctcggtccaagtctgcatcccggtctgggtctgggttttggtctagctccaagtcaaagtcttgggtacaagtccaggtttgggtctaggtttcggtctgaatccaggtcccaagtttcaatcccggtctggcatgggttttggttcgagtctaggtcagtatccagatccatgtctaggtcagagtctgggtctaagatcgtctcccatgttaaagtccgacctgatcccggacacggaactagaatcagatccagacatggactagaacccagacatgggaccataacaggacc

SEQ ID NO: 333317 - DNA, 1464 bp, Cannabis indica
ttgagtgacacacctgagcaatggcatcgagaatcctcttctgtacatgactccctctactatgatataccgtgctgccttccttctcattttccgagcttcatttcggttatctgggagttcactagagttgaggtaggctgctattgacatcatccaatttggggatgtatcaatcattttgatttcttccgtgccagtgatgctaggattttcgaggaactggataggaacgatgttcgccttgtcacttacattgttgtttgccaatcaagctaacgtgtctgcagttgtattttcttctcttcgaattggtcttagaccgtagcttttgaattgtgcgagcaggtcgtgtattttgctcagatatgctatcatcttttctccccgagcctcatattctccggatacatgatttaccaccatttgtgaatcactgcagatttcaatgtgttcggtcttcatctcccgggctagttttagtccagcgataagagctttgtactcggcttcgttgttagatgctttgaatctgaacttcactgaagcgtgtaggtgttgccccccaggcgtgacgagggcaatccctgcaccagatagttgatctgtagccgacccatccacatgtagtttccaggtcggtttgtcttcattgttatttggctaaggtggtggctcagggttggtttctagtatgctttctttttcgcctatgtattctaccacaaagtcggccaaggcttggcctttgattgctatttggggttggaaagtgatttcgtactgacccaactctaccgtccacttgagtaaccatccagaagcatctggcttttgcagtatttgtcgtagtggctggaaggtatataccggaacaggataagcttggaaataaggcctcaacttccttgttgctagaatgaggcaataggtgagtttttctatcaacagatatcggccctcggcctcaatgagtgttttactaatgtaatagactgggtgttgtacgctgttctcttctctgataagcacggcactcacagcatgttctgtaatagctaagtatattcccagctcctcgccgcccaggggttttgaaagtacaggaggttttgcaagttgtgcctttagctcttggaaagctcttgcacattcttctgtccactcgaactgtttgtttcctcgcaggatattgaagaatgggacacatttgtccgttgattttgacacgaatctgctgagttcggcgatccgaccagttaagctttgtacttctttggttttttttggcgagttcatatccaaaagggcttgaatcttttctagattggcttcaattcctcgggcattgacgatgaagcctagaaactttcccgagctgactccgaaggaacactttaagggatttggcttcatattgtattttttgaggactttgaagcattcttccaggtcatctatgtg

SEQ ID NO: 333318 - DNA, 481 bp, Cannabis indica
aaaaaaaataaaataataatactattaaataataaaatgaaacaaaacatgataataaaaataaatatagaaaagtgtaaagaaagtgaatggtgattttataaataaagggtagtaataagaggcaactaaattaaaagaacacggacattacttttgaaatccaaacttaaaaaaatcccacttaatcaaatgatgaaatctaagtctaatatcctataatcacgttgatcatgacgatgatgatgacattgttctttttactaggtagggggaaaggaacagtgttaaccaccaatagaattacgatacaacatatagtattaacattgatatatatatatatatatatatttgactacgaaataatgacaattcaaaagggaaatttgacattttatgcttaaaaatgtgtaatggtgttaaattataccatcatcctaagaatttggtaactatgccaatcttttaatggtaaccc

SEQ ID NO: 333319 - DNA, 615 bp, Cannabis indica
ttttgggtttgggactaggttcaggtccgggtgtgggttcgggtccttgtcagggttcgggtccagggcgtgctcccaaatccagacaccgactacaggatttgtccaaaccctgtgtcctgaataggatcccaatctcgggtccctatctggttccatttttggtgctggatcacgagctcagtcttagattaaagttcgggtctaggtcgggtacgaggtcccggtcctagttctgtttcccacgtccctatcctaattctgtgtccatgtcccagttattgtgtgggtttggctcccggtctaggttcgggttcgagtcctagtcgcagttcgaccttaggtctctctctaggttttgatctgggttcgggtttgggtttaggtcatgaacctggtcctagtactagttcggttctagttccatttgcgactctgagtttgagctttggtttgagttttggtcggagttcgagtcctggtctgagtttgggttcagacccagatatcagtctaggtccagatcaggcttcgggtatgggttcgtgtcttgggtcttggtctaggttgggtccgagtcccatattccaatcctgattttagtctggattcagt

SEQ ID NO: 333320 - DNA, 974 bp, Cannabis indica
accttctctgcaatctccaacaatggattcatgttagtgcttccgctcatcttttatcatcttcttctttaatttagcaaaggttttataaatttgtgatttagggttttctatattaaagcacttttaggaatatgtttagatctgtgatatatatatttcttgagtgttttataaatcctaacaagtgacacataaactatttgtgccggttagggtaactgacgtaataaccagagacgcacatagtcatattttttgcttcagtttagaaccgatgccaaatatttttttgattcagttatgaaccgaagcaaaaaaaaaagagtttttactttggttcataactgaagcaatcagtagtgcatcgacgctaattagttttttacttcgattataatttgaagcaaaaaaataataataaaaaaattgaacagccaccacaccaccaccaccatttttatacaagaaatcaattttttttacaaaaaactacaacctcgaatgacaataataccaactgaatatatctatttcaaatccaaaatctattataataatataaatacaaatatattttagaaattatatcatattatatataaattttacatatacaaattagtataaacatatatatataagggagttgatatagatctgaggatgataggaccaccgaaaagaaaaaaccttgtaaaaaaatgagagacggacaccgacgcgagagagaagcagtcggcgagaagaaaaaaaacaaaaagaaacagagagagttacttgcaataatcgtcgataacgtaacttagttttgacttttctctctgctatatcgtcgttaggctgtgcgactggcagtgcagtctctcctcttgtgttaggctataactaaggcatggcttggctttgtcgagaaagagagcagagaaagagatgccatggtgcgactagctagtgtagagagagagagagag

SEQ ID NO: 333321 - DNA, 1022 bp, Cannabis indica
acacgagtttgcacgctatgacttctctccagtcggtttgggaagtggaaaaaatctcatggaaataagaaactataagatcatccaaacaactctccctgtcaacccatgcacccgaatgagctttaagtattgcaacaaaattattccttcgtctcgtagttgcataagcattaaaatacttgctattattatctccctcttgcaaccacagttgcttcaatctttgatgccagaaaacttcctgttgcacataaaattctaccaagttcttatttgcttgtttataattggctacagagacctcatcccaacccaatttccacttctgcacttcgtttttacactttttcaacctctctttaaaattgccagtaacctccttaccacaatcccccagcttatccctacaaaacttaattttatgcataatatcattagactcacaaatctcccagctaccctttacaatttgataacaaagaggttcactcaaccacgcattttcaaaccaaaaccgcttaacagaactgtgacctgcagcaggaaccatgaccagaagaattggagcatggtctaaagttgaaatttcaaaattatggagcttagtagaagtgaacatgttcaaccaagcaagattagcaagccccctatccaaacgtacttctatccaatgactagtaccccgcccacgctcccaagtaaacggataaccacataactccatgtcttgaagtccactgtcaaccaaagactgttgaaaaccttggatcaaaaagtcaggatactagggatgtacattttccccatggggatggtaccccgcggggactcgcccctaatggggtggggattccacgtctaaatggggaacggggcggggacggggatcaaatttgtccctgaatgttaaacggggcggggacccatttaatttattaattattttttattaatattttataaatgcgtttgtattttttttagtatattaatatcatttttacaaattttgaagttgt

SEQ ID NO: 333322 - DNA, 1059 bp, Cannabis indica
aaataatttccaacaacaacatcatccctgtcaatttttaaaaaatttcgaataatttacaatgcccacaatatgtttgaagttttttgaacgcccgtggtaaactggaatatgaggaactttgttttcggtactgtcaattattcgaaatttttcaacaatttaaagggttgatactataactataacgaataccgctatgaatttttttttgaaaaaaagttgtaattaagttgttattagcatttctcacatttaaaatctacgtaacggtacaggtgtcaactaatatccaaacttataatacagtaatgaagttagttctcagacacgaagtccttaatggttgtgtagttgtagggtatcggtgtcactagtatcctaaagaaattattattccgtaccaaattagggttgcattcagtagttctcacacacgaagtccttaatggttgtgtagttgttgggtattggtgtcattagtatcctaacaaaatcagtaccgacactaacactgtatgtggttagtggttttggtaattaaggtagttgtagggtatcggtgtcactagtatcctaacaaaataagtaccgacactaacactgtatgtgtttagtggttttggtaatgaaggtagttatagggtatcggtgtcactagtatcctaacaaaatcagtaccgacactaacactgtacgtgtttagtggtttcggtaattaagttagttgtagggtatcggtttcattagtagcctaacaaaatcattatccgctaccgataggggtgttcatcaaattgcccaaaccgctcaaaccgcccgcactgcaccacaccgcagaaaaaaaattggtttgaaattctttgcagtgcggttgcggtttgaatttttcctaaactgcgtggtgcggtgcggtttgcagttttgaattgttaatatgcagttcaaaccgcaccacactgcatattataaagttactaatttttatatttatttaggtcaaatatgtgaatgttcaacttaaagtctactattctttaaaaaaaaacttaaagtcta

SEQ ID NO: 333323 - DNA, 603 bp, Cannabis indica
acccggaggaaaaagaaaaaataataaagacactgaagggtgccgtttacattttcgcatggtgccaagaagacatgactggcataagtccccaggtcatcacccatgtcctcaatgtcaacctggacatgccgccagtccagcaaaaacaatgccccctcgactcagtgaaggctgaagccttagagaaagaggtggacaaattattaacgagcggcatgattcgggatgtatactaaccagaatggcttgctaatctggtgctggtgccgaagcctaattggacctggcgagtgtgtatagacttcactgatccaaacaaagcttgcccaagggactgcttccctctgcctaggatcgaccagatggtagacacatcctccgaattcaaactactgtctttcatggacgcatacgccggttataaccaaataaaaatgcacatagtagatcaagagtgcactagcttcaagacctataagggggtatactgctacctagtcataccttttggacttaaaaatgctggcgcaacttatcaaagaatggttaaccggatgttcaaaggactcctggggcgaaactgttggatatattttacca

SEQ ID NO: 333324 - DNA, 490 bp, Cannabis indica
gttttctgcattttttttctagtttttcacgatgtcgcgaaacatcgctagatgccgtgaaacattgcaaaattatgaaacatctataaatgtctccaattcacaacaacacttattttttgcatttttttttctgatttttgacgatgtcgcgaaacatcgcgaaatcgtgaaaacatcaatagatgtctccaattcaccacatcgcgaaacacatcacaaatatcatcactaaatatcgctaaatatcactaaatatcacaaatcatcactaaacttcatccctggcctcagatttgttctatcattgcaaatacatcgttaaatatcgcaaaaaactagtaaaccagaagaaaaaatacaaaaaacgagagaagttcttttgaaatgtaaggcgaccgaacaacactagctccggtaatgggtcgtccgactggtagagtgtgtgtgagtgtgtgtggtgtgagtatcctagagagagagagagaga

SEQ ID NO: 333325 - DNA, 1274 bp, Cannabis indica
ccattaattgatacaagggcattaaatgggtgtcagacggatactcaaacttgtccaccgccttaattacaaatcaatctagccgttggatcttgggaattcgaatcgtgcgcctccctagccgttcgattggtaggtgattgcgcctgttccacatgcaccttggcctataaaagccaccatccttccttcatttggttactttcatcctttcaccaaatttcttcgaattttccagagagaaagaaaaccctcaaaccagaaaaccttcaaacactataggtttcttactaaccttcattcgttactgtcagtcaacatttcttcgtcgatcaacaacaactcccagttctaacactttatgtaagtttttcgcatcccttactctatcgtttgtgttcatggcatgctttactgttcatctgtttgttttctgggtttaatgttcaaagcttctgggaatttttcgccttgagtttctgtgtaacacgtttagatttctctcttctggtgtttgagtcactcttattttccacattatgtttttccaaaggcccatctgttctttacgtgatgaccttcaagggtacagagaagactttgtctttctcgatttttaccctttctctttcttttcctttctttgcttatgtgtaatgttactatctgtaagattcttgcacccgacttttatccaggaaaaccttctaaggctttcttgttgacatccgtccggagggggcctctttccagcggttaggggacccccattaccttttttgatttagggtttggtatggggcctgactgctggaattttaactctttttcagaaccacaatgtctacatctggttccaaatcttccaagaaaggaggaaaaagcctggccaccctggaagaggtgatggtgggtcccgtcgcccaggaggggtataggcctcgtgccacgggatgggaagcggtcgagcttcactctaccttaacttgccctcaccagctggagcacatcgtggtggtggccggcatcaagcctgcgacttccgggacgtaccaccggccgccccgtgacgcggagacgcccaatcacaattacggaggcttcggagcttggagccagacgcatttgatgaccggggctatgcttccccttcaggattatttcattaatttccttgtatttgtcggccttgcgccataccaacttattccacaagcttaccgcctgctttcaggcttatttattttttactctgcccggggatggggctctcc

SEQ ID NO: 333326 - DNA, 691 bp, Cannabis indica
aatgctcctcctgctgcttcaactgtgtctcctgctgctgcaaaaataggagattcatcgcttcctcagcgtgaatctcagcctgtgaagcccaaacaaattcctaaacaagtggttcgaaaatctgtgcgcccatacaaaacatggacctcgtcgtcttcatcttcaaagggatctcctccacctgctgcaatttctcctcctgctgcatcagtaaaagaagttgctgcttctactccaactggtccttccattcgcactcgtgcacaacaaaccagttcctcctgccaagaaacaaaaggtaaatcccccttcgatttccttaagttctgaaaaagaagaacccatggaggatccctctgttgattcctcggacaaatccgtgtctctccattctgagaaggagattccagaagacattagagtttcctcagacagtgaggaaactgaacatgaaccagagccacctctgaccaaatctgctccaactcctgctcgatcctccagcagccaaggcttctgttgctgccaaaggcaagcagccaatgaaggaatcatcttctggtaacattcctacatctctctcttattgtcctcgtttctactatcgtgataatgagtgtgattgtaatctatatgctacccgaaagtttgagagtgaaaggaattacgatttgcatgctcatagggt

SEQ ID NO: 333327 - DNA, 1030 bp, Cannabis indica
ttgtttgcaatccctgtggagacgatcttacttatcactttattacttgtttgactacgtatacttgcgtacataattttcacaacaatatttctagtttttttactaagtgcttacgttcccagttcgagtactcgtcgttttaggtcgaatactcgcaatcgttcctcatataatttcttcttattattattattattcatttttggtgttgcgaaatttgctcgacaacatttggcgccgtctgtgggaagaaagaagtacactcttactatatacaagaaagaaaatcatcatggctggaaaccaagcaaatggaggtgttaacaacgaatccatcaacatcggaatgatgaacgttctgttgtctgggggtagaacaccacttgtggatgtcatcaatcgcggagtaggtcaaggtaatgtcagacctctcaacctattccttaaaattgctggcccacaggtcggagaaacatctacaccagcagccacaacgaggcactttccacctttcactccgacggtggtgtcggagggtatcgtccaactaaccaccgattagtatactacaatccaggaccagctgtgcgccctgcatgacgaggtggatggacagaacagagcctaacgtcctcctcgagcacccactgctcgcacagaaaaccctcatgtaacccactctagatgtcgtaataaccgtattcgcagggaacgaaggaccaatctcaaaggaatcgacctgaatcaaccaacctcgagagaccaatctgcgaggcatcccaaccaggagacacagatcgaggaagaccccgaacgatgcaatcctcgcagcagaccttcgcgagacaatgacgtagaatctgcctcctcgtcttcacatggtcgcacacccagaaggtacacgaggtccggttctatggagacatcgtagggagggcgatatcaagttcataggggtgatctgcgtgatcaccttaacgtgttttcaaagcacgctcccacgcccctcgtgacgaggaagagcccc

SEQ ID NO: 333328 - DNA, 510 bp, Cannabis indica
gccctgctatcagggcttcatactcggcttcgttgtttgaagctgagaagtcgaaccgtagggctgcctggagtcgaagtccggtcgggagtatcatcgtaacccccactctggatccgttttcgttggaggctccgtccacgaataccgtccatggtggggaccgatggtatcggcgcgtttgcagttgccttgacttcattacattcagtgatgaagtccgccaacgcttgtccctttatagagatacggggtatgtagtgcaaatcgaattgacttaactccatcgcccatttgaggagccttccagacgccttttgacttttacaggacttgccggagtgggtgattggtcaacaccttgattgggtgcgcttagaagtatggccttaattttcttgaggccatttaaggaggaaaaaaacttaatttttcgtatgatcgcggtaccgtgtctccgctcctatcatacgcttgctaagtagtacacgggatgttgagttttctctt

SEQ ID NO: 333329 - DNA, 775 bp, Cannabis indica
tccaacagtgcccacacacagcaaacagtacatcaatcatagtttggaagactgtgaaggatccaaatccaagagaaggacattcagactcagatcttgattatactctgcaacagaaaggattcaagggttagagatctgagtggaaggagacatattattccgctgcacccaatgtaaggtttctcatactttatatgtgtttatttattatcgttttagaagttcatatttatgttggtaatcaacatacttgtgagtagatctaagatccttgtaaaataattccaacaatatgtgccatgtattttgatttagtattttgacttgctgtcgtatatagcttttttaaaacttctacaacagagatccccgaaacacagtttaagtgtcgttatgatgtccgttttcagtgttttattttggtgtagtttttaatattatcacagattttatgaattaattactttattagtactaaattagtttataaaattatacacgtggcgtccctatgagatatggcattacagtatttgtctttttggattaattaattatttaattaattcaattaggtaaatatctaatttgaaaagtgattatagatattttaaggttgttcaaatattctctcaagtggttgagagatttcctcattaatatcagtaaccgaatttagttatagatagtgaaggcttgaggaaatttacacttaaattttctattttttcttcagagaaaaacctgagccttctctctccctatctggccg

SEQ ID NO: 333330 - DNA, 685 bp, Cannabis indica
acactgaaaatatagagtctatttatgcgtgtcactaaaaatcattcctaactatttagtgacccgcacaaaagttagagtcactatatagtgtcactaaaagcctaaattgtagtagtgcttgcattccctagagtctgcagtgcgggatctgccaccagtggatccacctgatcgaccacacctctgcgagtttgtaccaccataatatttctaatcaatcttaaagcaaagagcaaacttggattgttgctctcaatgaaagcaccaaaatgttgacctcggttttagtcaacgacaataagtcaaatagtaagcgatagaaaatataatcaaagtgaagtatgaacaaataaataataaagaacggaaggttttaaagaggttcggccccgtcagttcggtaatagcctactccccttgatttgtattaactcaagaacaaagaatacagtgtttcctctcttgaagctctcacaatgaaatctctgagtatgctctcttagatttctctcaagtaattctcttgacccctataccagcgagaattgatcactatttatagggttaaatacttgagggaaggtttccatttttcttataatatctatggttggtaagaacatatattactgttgggctttgtgccctaaataaaactctatttcaatgtaatcttttctat

SEQ ID NO: 333331 - DNA, 697 bp, Cannabis indica
taaaattatgcaaatcatctgaactgtttttattgaaaataattagcactaatgtaatgatcaatggcctctctctttaactaatattaataataacatatttcaaccaaagtgtactagtaagagaatcttcttttttcctatatataagtatgtgtgtgttaaattgtgttcttccaattacatctgttttgccaaaagaagcattttatgggtatttcaaatacgtggaaacaactaactatatcgacaatatctagtctttcaagaatcttaaaaagtttttccatataactaataatatatatgtatatatataaacggtactatctctcaagttgtctataatatatgcagatagatatagaccgaatagatcaaaagttatatatgcttatgtcaactaagctagtgttagagtagtaatttttaattatatgcaggctgtttttctttctcgtttttttttcataaatttgacctttaattgataagaaaagcggagtatagtaaagtgaaatgaccttaatttttgagtatatgattagtggtgtatgccaactaaaaagggtagtgactggaattggctctagttttcatggaaattattttcatgtacgtgctatactgctagacaacatctcatatgttaaaattgttttttaagtactgtgaatgtcaggatagatcaagtgga

SEQ ID NO: 333332 - DNA, 619 bp, Cannabis indica
tccggtcgtttgttcacttcaactaagctctcctcgcaaagcaagcttggagacttcattctcaaccggattcactacttgctaagcttcttaagtgtcgttattattctaacaattctttcctagaggcctcgcttggacactccccatccttaacctggcagggtattcattggggtaagaagcttctatcttcgggtttacggtggaaagttggtgaagggtgtcgaattccttgtggcctagatcaatggatcccagggcactccactttccttcctttccattataaagggccagccaatggtgtagtctctagtcttatcaaagataatagagaatgggatcttgatcttcttcaacaatggttttctgatccagatgttcaacgaatactgactatccctttgagttttttcaggaaccgtgataccttaatatggcaccatcatacatctgggacttacacagtccaaacgggttatcacttagcttcctcacttgaagatgtggatgcttgttcgggttcatatgcaaacagcccctggtggaaatttttttgggcacttaagctgccacaaaaaattaaaatatttgcttggcgagtcttccacgacgc

SEQ ID NO: 333333 - DNA, 452 bp, Cannabis indica
ctttatttatgcatatataattaatataaattaagtattccatggttttaataatgaatttattttagttggaaatatttaatttattttaatttttgtgttatttttcagatttgagcaaaatgatataaatgaaatattggcattcttgaaaagtggtattcttgcaaaaagaaaaagaaaagatccaaatttagtggcccaagcaatagtcaaatggtgattgctttttcatcaatcaaggaaggagtgtggtcgtacaagtagcgcaagtgaagcatttcctttaatatatcgtgtcccactcacaagttcccaataaatattcatttcacaccatcccatattcagccgagaaccatcaaaagcacgccacatgtctcccaattttctactatgcatatggtacaagaagtgtcccattttcctcagctttttgtgccactaatcta

SEQ ID NO: 333334 - DNA, 758 bp, Cannabis indica
tcacacatgctatataaatctctgaaatttataaattatgcttatttactcatttgtagcaaaatttaaattttatgctgaaatagactagtaggatcataatcccacttattacatgattaacccataatataaatataaagcgtaattatttaccattaggcttatcgggatattacaattctatttactttcaataaagatcagaaatcataccatgacaaagtcataagctttgttcacatatttcacacatgattataagtttaatatataagtgttatactcgaaatttggctagcacatcaggagaggacatgtatcaaattcggatgaatacaaatcaacgaatgtaatgataattatatttgaatctagaataactcattaaatgtggaattgacagagtatatttataacttgctgaatgtaaggtcttacgcgagataaagatatacaaactgttgcctcgcacattaatgagaaaccatatgacgtcagatgtacaaggcaaggcatcaacctcactacatattaaaagacgagacatgatgtctggtaagacacttattgtataatacacactatacaaactaagtataacagttgagtaaatccaaatagccaatagtgactcatccacctctataggaaggtgtgctcatggcacctttattaatcagcgccaaacacctttcaatgggtttcacagctccgtcgtgtcagttctctcaaatagaagctgacatacaaatgat

SEQ ID NO: 333335 - DNA, 650 bp, Cannabis indica
aaaattttgaaaacttaaaaactgagaattcattagataaccaatagtacaatatatggttacaccccctatacatagaatattaataaaataaatgactaagtatatacatgcgagtactattgataataatatttttgatgtttcccattccaagctctattgagaactgagtcattgagatcggataactagtaagttgcgttgccaattttttcagcgatgaggtaagaccttcccaattgtcactgaatatgccatgcatagaattgcatgtattgggcatgaatttttacaataccagatctcctactcgcatgctcctttctttaacttttgagttgaaatagcgagctatgcgctgttgataggccacatttttttaattgggcatgatcgtgcctttcttctagaaaattgagttggatcaactaatttttttgtattagtctcgacgttgaaaacatctctcctgaatgacccagctccaacctcgactggtaccatggcttcacatccatataagagtgagaagagggtttcactagtcgttgagcgaggagttgtgttgtatgaccatagaacttgcggaagcttttctggccacacgccttttttctcttcaagtttaccttttatggtatgcttga

SEQ ID NO: 333336 - DNA, 1498 bp, Cannabis indica
attggagtaatgaagaacactgctgatttcccccccaaaaaaaaaaagtttatgatatcttatccaagataaatatcggtccaatccaatgtgtactccatacatccgataatggtatattttgtaaatgtcctgaaaaggacataacacttatccaaggttactaagtataccttatcgccgattatcatgtcagtctaaattcagtgtactgacaaatcatgagactcaaacttttgaacatataatcatgattatattccattttactgacaacactataatcatgaataaatatatgttttggacttaatagaatttatacattaagcatatcattatgaaataaataatgtgaaccatgcaacataaaatttctgatcttttattaattaggaataaaactaaaagtgcatttcatataatcttaacaccttcatatccaaatcaagtgtagtatgtagtattctctttgtaataggatttgacaagttgtattcagtacaaactttctccaccattacatccccttaatcatagaattcttgatatagtaaatttcctctctatatgtctactcctctagggatactggattctttacttttcggcaactacttttgtgttagttaggaagtatcactagcagttaattcattattggtacaatgccaaaaaaattgtatagaacttttcatagactgaataagtatcctttctgcaactttaacattcagtctcactggtagagttagagatttcagataggcttttacacttctccaaaatcactgctccacccctagagtaatcaccatctcatcagtagtctttctagcatcaaagcaagtcaagaaacctgatttggtgttgtctaagagtattaaaacaccacccttatcaactaacatatagttcctcttttgatcttaagatttacttgattgtcttctaatgttcattacctggattaatttgatacctactcattactcccactcaacagcaggtgtctggtcttatgcataccaaagcatatatgaaacctctcattgttgatcctaaggaattcctttcataacttttatcttttctggaatagttgaaatttttccttcgataaataaaatctatgtttaggaagtcttttggttcctagacatatactttatttatgtaaggaatggagaagcaagtaagtgaatagttaaagttgtctggtacgggtccgggtcaaggtttgggtccgggttcgggtcccggtctgggttcgggtcccggtttgggtcccgggtcctagtctgggtccgagtccgggccaaggtccgggtcccgagttagggtccgagttgcggtctcggtcctaggtcccgggtcagggtccaagtcttgagtcagggtttgggtcccagtcctaggtcccgagtcagggtcctgggtctgggtccgggtccaggtctcaagggatccgagtcttgaattaattttttttttttaa

SEQ ID NO: 333337 - DNA, 583 bp, Cannabis indica
gtcatatgctttgctcatatctaacttcatagccacataacatcgcctaccatctttcctcgcttttaggttgtgcaggcattcataagcaatgagaacactatcggtaatgagtcttccaggaacgaaggcactttggttcccacttataactaatggtaaaagaatcttgaacctattaattagcattttagcgattattttatatgaaacattacataaactaatcggtctaaaatcactaatcgaatcaggattcttgactttaggaataagagtaatcaaagaatcattaataagtgtcatatcagctactcccgataaacaatcaagaattgttttagatactaaaggtccaacaatgtcccaatgcttttggtaaaacattgcactcatcccatctggccccgggcttttatctgctggcatactaaacactgcttcttcaatttccttaagagaaaaaggctttaccaacgtttcattcatctcatctgtaactacttgtcccactgcttgcaccaaatcttcaatattctcaactgtaggcacaattgatgtaaagagggaagtatagtatctt

SEQ ID NO: 333338 - DNA, 569 bp, Cannabis indica
atgaagaagaataattacttgtgctgcttttttttggtggtgttatggccatcatcactagcagcagatcttactacgttaaaatcaccaaattgtgagaaaaaatgtggagatgttgaggtcccataccccttcggaatcgacgacgaaaactgcgccatcagtaaagatattgatgagcacttcttgctcaattgcaacacttcttctggttctcctaaattaatatatggaagaaacttagaagttaccaacattgatgtggaaaaagccaccatgagtgttgagtattactactcctacgactgttaccgtaagaatggtagcttaattcaacaaaacagaacatctataacattgagtaagtcgttcacgctctcagattctgacaacaagctctttactttcggttgcgacaccctggccttcatgaacgctacaaaaaataattttgggagtgggtgcatctccacctgcaacgaaaatgtaaacatgtcggcccaaacctcgtgttccggtttagggtgttgccagacctctgttcccaagcatctcaagtatttatcagt

SEQ ID NO: 333339 - DNA, 1152 bp, Cannabis indica
aaagtaagcttaaaaattaatcatacccacatagaaattcatatccattcaagcctcaaaagtctagctcatattcaagtaagaaagtaaatccaaagtaaaaaacattcattcatggttgttgccctttgtttacaattcaacaagttttaatatttaagtaaaagaaacaagaaaagagaaagagaaagaaaactattaagagagggtaaaagaaaaatcaaacactaaagcttggtccccttttcttcctcctctgctgtactttttctggacttaattcccttccgaaaattgcagctccttccttacatgatagaggtgatgatggtgtacttagctattttctttttttagttgttgggtcccaagggtacaaaatctcaccctaaaattagaagctcaatcctttttgcacgttggcccactaggtttagttccccctttacaaagcttccagctagtctcatttttagtgacaaatacactcctgctgatgtagacagctgaatctcgtgtttccacgtcactgccagaatgttgaatttgcttcagcattgcttcagcaatctgccccaattttaacttttgttcccacttcttccttccttccttttctttttcctatcaatttaattcttcctttttcaacaacaaacaagcacaattaattagaaaaacacacctaacaatatcaatttttacaagacttaaaaattagcttactaaatagaaaatgaaactaaaactaaagttaagcaaacaaacacattttcactactcttctcacaatacttttagtttaaaagcataaaaaataattgtataccatagagttatcacaccccaaacttagagtattgcccgtcctcgagtaatgaaaaacaaaaagaactaaacaataaaaacagaaaatgacaacgacactaacatgcttgaagcagagaaaatattgctttttcacacttggtttagcaacgaaaatgctctcagaattagatggaatggaagtgtaattggtggcagtgaatatgccttgaacttgtgtgtttcaatcgagttttacatgctatctatgtccttaacctaacaaaaagaaatcaatcaataaagtgtgcaaatacttcccaccaacaacttgaatttctataa

SEQ ID NO: 333340 - DNA, 1412 bp, Cannabis indica
acctctatataagaataattacatcttaatatatgttttgtaaatttatttacataaaactaataattttattccaaattgtaacatatgtattaccattatatttactctaaaataattttattataatatagtattaataattatttattgttattatggttagattgatattttttagtattttaatttttttttctagtataactctatttagttataacctctcaattaaaatataatttgcttggtccaaagtctattcttgaatagaggttctactgtattagtgtctagtaccttccttgatatcatataacataattatacaaactacaaactcataaatggatattggcggctaaaccacttaaattttaaattttttaatacttaaccataaaaattgattatttaagagcaaaactacataaactctcatttctttgcccacgtgtatacacgtgacaaatttttaatggccctaagtaatattaattttattaaataattataaatatttaaaaaaattaaaaaattagaaaaaaaaataatttaattttttttactttttttttcctttcttctttcttctttcttctttcttcttcttctattgaaccccctctcaggccctctctttctctctctcgtctcaccacccaagaagaagcacccaggccggagccgaagcacccaggccctcgtcggagctatttgccctctctttctctctccttatcttctccttcccaaaccctctctttctcgtctcttctctctctctttctcttcgtggtggtcgccgtggttggtcggagaaagccgacgttgagcaccgagagagagagtgtgtgagaggggggtcgggtgctttggtttgctagggttttttcaattaagaagaagaaaagaaaagatttaaggaaaaaaaaagaaagaaaaaataatttttgtattttataatttaattattattataattatttttaaattaatattacgtggcctaaaattgccacgtgtacaagtgtgtacacgtgggcagtctactgtgacacttaaccggatttttggacggaggagtacagagcaaaaaagaatgagagtttagataatttacccctaaaaattatttttgtggttatgttaaaaatttaaaattcagatgctttagccatcaatattccactcataaatgaagttaaaaacttatttgttatgtttggtatgatggaagagtgagagatgagtgatgataattctttatcatttgtttaaagttacaaaaaaatttaggttaaaattataaggtttttttttaggtaaaatattaattataaatttaatataataatttcataatatttaattgtttattcattacatcactttatttatcttacctaaac

SEQ ID NO: 333341 - DNA, 463 bp, Cannabis indica
cgagatcctgaccaagacccaaacttggacccgcactcgagatcccaatttggacctggaccggaacctagcaatgaaaatcatcaaagcattcacatctcaccaaatatcaagtatcagttcccattagtagcacaatatcaattcaatgtgattatttttgcaaatgttttaatttcaagttgttagtttcgcaaatttccctaaactaaaattaacataaatccatacaaacttaatattatgcaaaccctaaattcaatcaaccaagctaacaaaaaagccccaaataaacaaaattaatcaaatttcaaagaaaggtacctgagacgagctttggagagctcccaatagcaacgaccatagaaggtggaggagcctgttccttcttcggcgcctgccattgcaaatcaaaaacaaaacaaagaaaaatgaaatcataaacgccggtgtcttctcccat

SEQ ID NO: 333342 - DNA, 1617 bp, Cannabis indica
caaaataaaatccccagatgtcccgagaccgaacacttcaggtcgcgctgcatcgacatgtacaacctcatcccagctcaggttcactcctgttcagctttcacctttcctttacctacacatggaagtagaactgtgagtcgacaaactcagtaagaaaagtatataacatatcatataatttccaacttgtatttaggcgcccatacacctatttacaaggctcaatagatgagtaagaacgttcaatactagggtacagccactataccacatacactacgtaactcattgtacgagtgtttatagggttttgtaccctaagtaccactgagtgatataccacgcacactcagtactttcccgtacttgtgctggtatcactgtactgtactcctaatcaatactcaatataccaatgcactctgtaccagaactgtacaagtgttggtagtgcaattaacattttaagcatgcatatacacatatcgtatacaaacactcatatattaatatcacacattatacacagttcttaccttctttccagattcaattgtgttggccgacctgaacgaaaagtctcacgctagatggatgccctaatcacataatgaaaccgggtaaatcacattatcaaaaccctaatccgagaaacctgaacccacaaccctaggttctgttatattttctatggtttattttaactcacgaagtagggaatcacccaactgtggcacggaaatgacgagaattgaggaaatgggagactcgaggaaccctgccaaaaccggctaaccggtttgcaccagttcacccaagaaatctcatttcttgctcaaaactctaccaaatgttaccaaaccttccagagtacctaattagggtatacacaacatagtccagccaataaaccccagaaaaacgcactgaatcaaaacatgccattaaagatcaaagtttaggttttcaaacccaagcttgcataaatctaattccatacatcaaaaccagctgcaagaagcttaaaccaactcaaatgaaccataaaattcactccctaaacacttctaaacctaacagccaacacttcacaaaatcactactcaaaccaagtaaaaacttaaagaattccatgacaaaagtttctagggttaccttagcttcaagaatgatcaattccttagcttcaacccataaaaacaccaagctttgagggtgaatccctctggtttttgccccagccgaaagagagaaagagagagcttcaagggaaaaagtcttttttcctaaattttgattttttcttcaaatgggaaaggatttccctaattaatccttgctgaaaataaatggccaagtgtcacccacctaggcagccaccaaatcaccataataaatgactaaaatgccctttacgttataacttaggtattcccaaaactaggggtaaaatggtcaaattccttaatcccgcttaatttcgatatttaattttctctaaaatattttccactaagaaataaggttctaaacttacccatgtgatcaaactagcaatccatcacatttttcgttgtcgccgagcaaaaattacaaaattaacatatttcacat

SEQ ID NO: 333343 - DNA, 1961 bp, Cannabis indica
ataattgcatcacctaatcagatgagcccgtgccacaacttggcactaatatattgcatcgtctaattagacgagcctgtacctaagcctggtacttatcatatgtcattgactcccgtacctacacctgatacgtttccaggaagaaacccaataatggtttcgatttgtgccataaccagacattttcatatcactgacccccgtatctacacgtcggcaggaggaaaccctaaaacggtttcattctatgccataacctgacagttttcataacactgacgcccctatctacacatccccaggaggaaaccctttaacagtttcattctatgccataacttggtaattttcatatcactgacacccctatctacacgttcccaggaagaaaccctacaactgttttattctatgccataacctggcaattttcatattactgacgcccgtatctacatgtcgacaggcagaaaccatacaactatttcattctatgccataacctggcaatttttatatcactgacgcacatatctacacgtcaccaagaggatgacatcacctaatcaggtgagcccatacctacgctcggtactcatatgtcactgacgcccgtatctatccgtcgtcaagagtatcgcatcacctaatcaggtgagcccgtatatcacattcataatatcatcacattattattgcttagccaatcaatattttcattatataacaataataaccatatcttaatctcaatttcaatcaattagcaacaatactaattgtattatgatataacatgttatgcagtacaatgtacttttcttacctcaagtgtcggttcaggtatgttggctgacctacttggagtacgatcaatgatctcgggccttatgccataacaatgataaaccaataagtgtttatctcaaaacactgcttaacagttgcaaaggacaacctaggatttcttaccaaacaccgtagttcaaataaactaaaatgaaacatataccatatggtagagctcattgcaagcttcgaaacagtatatagaacgtccaaaatggacactcgagtgaaaagttatggcaaaattagattctcgagttcccgaggctgctaaaaacggtaaaccggttggccataaccagttgaccggttcccaaccggttgattggttggtcagggatgtgattttctaagtttacgcactcatcgaaatgctactagaacctgtccaaaccaccccaaacttcatagtgcacatagataccatacatactaccatacttatgtaatagaatctaaaatcgagcccttaattggaaaacgccactagtgttagttataaaaagtcccaaacaaaatttctaactcaaaatcaccttaatttcagtaagaaaatatcagaacaatcctataggttcagaacatccataactattcaaattcacaaaaccactatataaaaccaattgtattcgacttaaaacaaaagcaattcttaacttaagatctccttcttcaatgattttttatcctgctactaccggagcttagatcgctaggttccgagttaaaaatagaagaaaatagatataagggggagagaattttgacggaggatgagagtttcattttcattcgtaagtttagtttagaaacttataatatatatactatttttaatatataatatattaatatattaataataataatataataatatattattaataataataacaacaagtataataataatagtattattaataaaaactttttaattaatggttattttagattgtatttgggtattttgaaatttttatgtgtgtatataggatgtcaatggggagggtcggatctgatccgacctgatccagatcatgtacggatctgccccgccctgccccgctggatcagatactcggatcggatctgatccgacc

SEQ ID NO: 333344 - DNA, 1276 bp, Cannabis indica
attgtaaatgactatatgttctgtactaagattttgaatatattaaaccacaaacatgcaaactacatgtaaacataaatgacttctaatctttcattgataacaaatcagattagattgaaatgggttttatttagggcataaaatcccaacaaactcccatttgcactaacataaaacaagttgtgcatatcaatcaatctattttcttgatcttcagatcaagtgtagtatatttgactcaaccgaaaattttggaaccatgttcgtaaaacattatccaacattatttgctatatgcattactcatcaaggaatactgaattctttactgcttagaaagtgcatctgaataaacagaagacatatctcttattcttttcaagaatgaaatagagataacacagtgtaaaattttcttcagttgaataactttctggtaattttgaatttacaaagttatatatcttcactgatggaacttgaattattatagatatgtttttgcactcttctagaataaatcctccaccccaagagtaaccaccatctcagattctttatgagtttgtgtagatataaggatttctaacatatacatccctattatctaacatgtaggtcactttcataaatatttcttgactttctccttatgttccttgtttgattacatctctgatggctcccactcaatagtacgagtttggttaaattcatacatagaagtacatttaacctcttactattgttttttaggaatatcttgttgtgacatattattttagtctaaaaccgtaagtttttttctagactaagtcaacaaaataacaatctagtatcaacattaatgtaaaatacttgcttaagattaagtaatcattagagataccataaaattttatgaggattaggaattttcgcacaagtcattcgaatagactatgcaagaattctagtatcttattctcataatcttgataagttatttctatccatatgaatggttagatttactttctcactagtgttctaaagttcctatcacaagtgtcaatcaaataaagatgggttaataattttaaaattctcccacttaaataaggtagtgtgatacaatgtcaaagaactttattggtatcaatttcaattaccacagtaatatattagttggaacataaatcaagatcaagaatatattttgataatttgctaattcattatattacatccatgtttaaaaatattgatggaaattattctaccaggatcttag

SEQ ID NO: 333345 - DNA, 505 bp, Cannabis indica
tggtatttataaaaataattaatcattatcattttttttatctttgtctgttaaattatctcatgtatttccttctgtttcctcttctgttgtgctggcttaaaactcaggttctttgtcatattctattgttgaaacaattattatgttttgaccgtaattgtatgtttttctaagatgaaattgtaattaatatttttctaagacgaagaatctgcacaaatacgtaatgctttggggtaatagtaggtcattattctatttatataatcttatgcattaatatatattgagaatgaactaaaatgaacacacaaaacaaaaaattaactaaaatatttgaaaagatattgaacaagatcagcattaactttctcatattgtgcaggaattgtagtcatgagaaaaagtggactcagtatagaaataataatcttataccacacaacacaagcatttcaaaataaaataaaaacataaaatcttaacagaaatgactacaaat

SEQ ID NO: 333346 - DNA, 817 bp, Cannabis indica
tgagggtaggcgaatttgtcctagaggagccactccttggccggagaaaccatagacaggcaggagacatggggttagatccttgagctgtagtcccatcttttcataagcagttttgaacaagatattggaagaggccccgttatcaatcatggttctagccaccattttattggctatctggacttccacgaccagtgagtcgttgtgtggaaatttgattttgacagtgtcctcatcgttgaaggttatggtaggccctcctactcgtggaattttcagcttcctttcttctacgaccaggataacttcctcttgttcgtgttgtgttgttcgggcatacctctcccgagctttgcccgaatctccagcaatatgcgggcctccaatgatgacttgcagatgtccatctaccggtaggggtagtaactcttggttatattcattcctctgattctgatcggtcttgacatacttctacaggtgtgggttgtttttccttattaggaattcaatttcccgcttcaggttgttgcatttgttagtgtcgtggccgtagtctctgtggaaacgacaaaactttgtcatgtctttcttactgacatctttcttcatgggcctgggcttcttatatggggccagggactgagtagccatgtaaccactttctatgtcttcagtcaagatggtaaatccagtgtactttgcttgattctcctggggagcttgctcggatttgctggcgaaccttcccttctcccattccttgcctgttgttgtgttggaacgtttccatttgagcttgaattatttgggt

SEQ ID NO: 333347 - DNA, 1629 bp, Cannabis indica
caacaagaaggagaatcagcatcaaaggaaggagagaaagagatccaggttcagatcttggtgatgctctgctacagaaaggaatcaagggctagagatctgaacggaaggagtcattatattccgctgcacccaatgtaaggtttactaaactttatatgtgtttatttcattgttttagaattcatattaggatgttaatgaaacatacttgttagtaaatctagatcctggtaaaatatatccaacactttcaactaacgacattctttcgttatgtgccctatgtccttatgaaatcgacaaaaatttgttggatcccttttgtttctcgtatgtctcatgggctcaggtttgcaaaatgccaccttgtactcatttgcgagaaagatgttttcccgagtttcattaggcttggtataaacagtttgtaaatcggcacatactgatcgtgccttttctgtttcttcttatctttggctaattctctagagtcatcttttctcttggtgttagagccacttggattgtcagcctttgtcgagatggtgcttgctgagacagtgctaggtttacctccctagccaatctttaataatttcatcttattccttgcttcctcaatccgtatgaacacttgaactctttcattgaactcattgatgttcctcaccgagtgaccttgtaaatcatcccaaagctcgccttcaactattgagaggtcagtcgtaatccctgcttgaagagcagtaagttgaatactatcgttcaagtttctaactttagcagcagcagtactgaaatgacttaggtaagccttaagcaactcgcctggttgctgctttacgttagtaaaggaggatgcttcaggtagtctatctcttgctgcttgaaattgtttcttaaaatccttagacagttattcccaagaaatgattaaatgatgggtaaacttattaaaccagctactcgctaccccagtcatcgaggcagggaataaaatttagcgtaagttattcgagacattgttggctcacattatggtattaaaattgttgaggtgagtgactggttcgaagtcccattgtacaacgagaattgagggtttttaaattcctagggaaattcagagttcataatgttcggatggaaaggttcgtgttctttgtcaaagttataaccaggaagtttcccatattccccatcatggtatctcctaaatttatcttccaactcaatgattcacaattggattggatcctcttgctttcgattagcattgagttgttggcgtaaacaggtgaattatgatttaagcgctcgtataaattaggttgtctttgattcagatgttcatgaagatctggctatcttcgttcatggttgctcacagaccttgtatctgagtaactctcagattgacagctcctcgtattactcctactttctcaatcattattactgtgaggtgtatctcctcctcgcatatgcctttctgatcgactgtgctctcaggatcttgaatgtcctgagccagaacttgcctcatcctgcacatgccttctcttttgggaagggttagatacacgtccccgctggggtatgtgtatgttgggttttgtgtcctaa

SEQ ID NO: 333348 - DNA, 770 bp, Cannabis indica
aaaaaaatatagctccgtgaggaagctcgcttgttccttcaaatacgaaatcctatcgataatgtggtaattagtttgattaatcattgtgaattggttaaagaactaatggactacttggagtttttgtattctggcaaagacaacacatcttgcattgcgtatatgatgtttgcaaagccttttatcgtgcgggaaattaagatcagtctcttatgagttcctttatggcatttaaaaaaatatatgaagaacttaatgtatttttaccatctagtcctgatgtgaaggttcaacagcaccaacgagagaagatgactattatgagttttcttgcagaactctcatatgaatttgactctgcaaagtcacaagttctctttgattttgatgtctcctctttacaagatgtgtttactcgtgttctttgcatagaaactacctcttcagctctttgccttggtgattcgtaacaattctgcactgagaaaaaattctactccaagtggatacaaaagaggtaattcacaaggaattgataatcgaacaccaggttttgagagcatcatgtgtaactattgtaagaaactaggccacacaaagtttgagtgtaggaagttacagttcaaaaatcaacaaaaatattctgctaatattgcaagcactacctgtaaagaccgcttagtttaatttggaaattagcaattaattatgatttaattatgaaaattctttatagatatttaaataattatttatgttgttatatt

SEQ ID NO: 333349 - DNA, 616 bp, Cannabis indica
tttgcttaaggtagattataactgcaattgcaaggcagaattgacaaccgctcgaaaatcataaagtttggtagattactaactacttaaataagaagattacgagtaatggaaaaacccaaaagcactgtatatttaattaaatacaattgtattaagttcgaatgaaaacagtacaagacatttaagataagaaaaacctaagactggttataaacttgtctttacaaaaatgccaccattaagtcattctcccaaacaaatgatgagaggggaagccgatgaactcgagaaagaccgtcagcatatagcttgaaaaagaccgtctacacgtagctcagagaaagaacgactacacatagcttgagaaagaccgtctacacgtagagagccgtgatctctgcatagacctcatttccctcatcatcagaagatcccatttcctaaagccgagatctgtttcccagcctcaggaaatttctcaacactggagagaggttgacgcaaagatctcctggcacaggttagggtcttgggttggctggactctctgatagaaaccacgcaaacttgcttcacagatctacctggagccatgccaatcttcctctggaat

SEQ ID NO: 333350 - DNA, 504 bp, Cannabis indica
aaaagagtcatagatgggagtccatggacatttgaacggaagcaattaatatttgagagactcaaggtgggcgataatccgagaacaatcatactcaaccgactcgatctatgggttcaaatccataatcttcaacatggatttcgtacggaaaggacgctacagaagcttggcgattatatcggaaagttcgtggagtccgatgagaataacttctctggtgtatggagagaatactttaaagttcgcgttacgatcaatctcgatcaaccgctcaagcgccgaatgaagattcgccgattggatagttcggattggttttgggtaaactttaaatacgagcatgcccctacgttttgcttcatctgtggcctcattggccatgcggataaactttgcccacaactgttcgagacttcggaggagaacatcgtaaagtcgtatggtgtattcatgcgggctacgactcaaagacagaataagttgattggagggcagtggcta

SEQ ID NO: 333351 - DNA, 773 bp, Cannabis indica
  modified_base (495)..(495): a, c, t, g, unknown or other
gttataataatttgtaatattattttagtgtaaaaaatagaaagaatctatttatatatatctttatggatatgagattaaaacttttggaataaatattttgataatttttttaaaaaaaaattatttgttaatattataaataaatatttgatattttaattttaaatttaaacaacagattattcaacaattaatgaagatatttaattttttattatcaaaattattttttatttatttttattaactaatagattaaaaaatagaaaaaagaaaattatttagttaaggatatttatagattaaaaattaagtaattttatttagttggatatttttactttttattttgttaagctaataatacaaaactaataatagttaagcagcaaaacaaaataccatctactaataaaattataaaaatgtgtatccaagtcaataaatttaatatacgttgcatataataattatagatgatctctttttaanataacactatgatgacttcatagggttagaaaaaaaatagagtaaagaatattatgttttgaataaaaataaataattttagacttttaaacctcataatatatgtgttgaccgagatttttggcaactaattagatagagttgtttaatgattagaagagatttaatgtcaaatattttttacgtaatttgggcattaacgagccttagtccacgagtcatttctatttaatatagtactttttttcttactagaggatgttttacactattttttc

SEQ ID NO: 333352 - DNA, 939 bp, Cannabis indica
tatttatttgagtaatgcaagcttcatattccacttttatttttatgttcttcttccatctatactatctatgctattatatactaaaatatatatagacttagtcatgctctttctatatatttttatttagtgattatagtaatggtagtattgctcatttctatcttttatgttcatttttatttactttttgttaaatgatatataggtttagtcatgctctccctatgtgtctaaaaattaataaaagtaatattaatgttcatttccttcactatcaccaccattttcatatctatcttgttgcccctgattttgtccaaaatacgtggaccaaccggattgagacacgtagactgaagaggttaaactctgagataattcaactaagtctctttaatcaaagggatcaacatttaacatgcctcccggagaaggcatgtgggtttcacatgtctcggagagcaaagctacgacaaagcatctccaggaggtgtcgaatcctatctgaacagacacctcgcatttaatgccacattggagaaggcgtattgaagctgccatatgtcttaaagtttgacggtgtaaccccccttctctagctactatgctatgattaataagcctagtgacgacaactttatgagaaatcacatcagtcaagaaaggataaaggactacgtccattaaacccctaaaaagcctagggattagaccatgcatttcctatgaagtatccattgggaatgtgtgcctttactgaaatacagaaagacatgtacctcaattctagggatcaccccacaaaaacactataaatacccccaaactcattaaggcaggggtcgagaattctgggtttcataagaactagagaggaaaaccaccaagaacattctctgtaataaatactctcataaatacacagactcgtgg

SEQ ID NO: 333353 - DNA, 542 bp, Cannabis indica
taggatgttaatcaaacatacttggtagtaaatctaaatcctggtaaaatatttccaacaaagtctgctttgtgggatttggaggaattcttccaaagatatgtcaagtttaagaaggatgaagatctcgtggacaattcttctgactcggatggggccaataatgacgatggcgtcgacggtgcttgaggattaccttctctttccaaagagaaaattttattttgtcctgttatcattttctttttctcattttcttcttcttttttttttatttcgacaaggggcgcactatttaagacaattatatttttatggtttgtaaggatttttatttgaaatttttaaaccaaaaatacaaaatacacattttattacatatatataaaccaacatttatacacattaactttattttattacacttttaccacttgcacacacaatccatgcatgcagccacacacgtcattgtcattgattgatgacttatatcaatcacaccttacatcattcccttatctttttctcttcttcttctt

SEQ ID NO: 333354 - DNA, 806 bp, Cannabis indica
cgcctaaggtagttagggtgttacagcacctatacttgtacaaagcatttggtaaagataaaacaaacacagttgcacaatgattataaatagaggattaaattcattaaagataacaaaagcacgtaaaactgggattaaaagctgcccggtcaacctgttgtctgaaaaatgaaaaataattccaagttcaaagactgctgggccggtctcgttgtctaggccttatggctagacagatataaaaaaaagaaggataaaaagtgaagtgtttagacgggtggagtcccaggctccttgtacgggtcttctgggccggtatgagctggaggatctgttgtctaggtagggggcatgtcaacgttcagactggaagtaaaagtggttgcctcagactctccataggctgctcgggaagcacattactcgagatacatgtctttggcattgcctaggtaatcaaaatttgcctgagggttagccttccaaaagtcataaaaaatctcgagactggctatctctaaggcattcaccttccctttgagcctctctactttagcgctaaggtcctcctccttggacttcttctctacttccaacctgcggaaaatagttcgaagaacctctctttcttcctggaggtcggtcacttctttggataaggaggtcatagcagcctcaagttggtcagaagcctgtaaatccttggtcagctcagctaccttcttctcggcagcaggaagctttttgttgacttcacccagttccattcaaacggctctgagttgaaccttggcttcatcagc

SEQ ID NO: 333355 - DNA, 539 bp, Cannabis indica
acctataaaaaaacaaaacaacacttgaaaatataaactttaaacaacttacttcgaggtttgctgaggtaaaccatcaaccttaaccacatcgaaagggtctaaagaaaccgatttgttatcctttttgaactcatcaaacaaagcaaaaaagtggggcaacaacaccgaaaatggctgacaagctttcatagcagtcgacaaagagttgtacatatacatacgcctttcctcaatattcaaacgaccaagaatccaatgtgattcagactccatatggatgataaacaaaatataatcgcacaaatgccaaggtgcaccacacaaatttttttacctctgatataatcagcaatggcatcctgagcagttttcaaagaatgatcttttttctttgccgtaaatttttcatacaatgcattaatgattttgttgaataagcaatcagtggtagtgaacttaaccttcagttcatttgcatactttcattttttccgtagatagtaataaatgatatctaaatgctaaacaataaaaaa

SEQ ID NO: 333356 - DNA, 1151 bp, Cannabis indica
agaaaagagaagaagagtggcggctatagagaaagaataggatacgggtgattgtgaagtctaccactctcttatacagcctgctctttgcagcctgctctttcattacttgctgctcgtcctcctcagcaattaaggccaagtctaccactctcttatacagagtgtcatgtgatgtggtaatcttcaagtcccgactgatcgtagcattcagtcctcgaacatacttctgctttcttgtgaaatctgtaggcaccagatcaccaacaaatttagacaaccgatcgaactccagagtatactcggccaccgacattttcccttgagtcaacttcacaaaatcttcatgacgtgaagtccttacagcaacattataaaatttttcctctaaaagtttcttgaactcttcccatgtcatcacactaacatatcgggtctgacccactttttcccaccacacgcgggcatggtcttgaaacatgaaggccgcacaattcaccctttcagttcccgtcacccccatattatcgaggatacgggtgacagtgctcatccactggtcggtcttaataatatcaatacctccccaaaaagtaggaggttgcagcttcacaaaccgctcgaacacagagtctcggtgcgacataacatacccttggttacccaccactggcacaggagctggtggtaacccttgattaactggggcaacatgttgcttcaaacgttgcaaatcttcctcttgacgaagtatgacacttcgcatttcatgaaacatctattgccagtcagcaggaggattagcattaccagcccccgcattatcccccgggttctacagaggtggaggcggtgctggtacattaacatggcatggctatttatacacatatatcactagggttataaccctaggctattagaccgttcctattagggtaataaccctaatcccggttaccaaacattcatgcatatcattctcaatataagcgccactacgcatactctacgtgctgatcactgtcttacctattgtcccgcaatagtagagattcaaaatccccaggtgctcctgaccaggtgtcggtaatcctagtcacaataccggaatttacacaaatgggttaatccctaaattcacttccaca

SEQ ID NO: 333357 - DNA, 666 bp, Cannabis indica
cttccctttttataaattgggttgaaaaaagggaagctaaaggcttatattgtagtagtgagtagagaaagtataattgtataaatgtaaaaatttacttgtgaagtataaatgtaaaatttgaaaaaaaatattagtatttggagtaaattttattttttatagactttataattttgcggcgcataatgtgactaaataggccgaagcacacatgtagtgtgtcttctttagcttttctaattgagaaaattacacttactatgggattttaaaagttgttatgataaatatgtcacatttaagtttgaccaatttatatggtattatttttgtttttaggtctttttatggtatttgatatgccatatatatgtaattaggttttcaaatcccatatttaatgtttttatttgtttagaaagttttatttgttattgatgccggaaaattcaccagagtttgctaccagtgtcggaaagtcgtcggagtagcggtcggtgccagaaaagtcgtcggagttgttgtcggcgctggaaaattcgtcggaattggcattgtcgccggaaaaatcactaaaaaaatcaccaagaaaccggtttcttggtttctaagaaagttttcttggtgatttttccgttgacaatgtcaattctgacgactttt

SEQ ID NO: 333358 - DNA, 670 bp, Cannabis indica
cccaatatttatttttagcgacataagtacccaatgtttgtaaaactgtaatttttctctaatttcgttcgtacaaaccctgttattttcttaaacaggctacatataaggtctagattcttgatcattgggtctagacagaaacatgtagtatcaattacttccaaatgaacttttaataaatttaaaacagagtctgtactgacaaaactgaagaaaattacagtattacaaacattgggtacttgtgccgccaaaaataaacattgagtttatgccgtttacaaacttaaaattttgggtacttatgccgctatttacccttttaattataactagtttgaattatttgtttttattcattatgttatagaaccaaatctatttatatttatatctgagacatctatttctggtgacttttccagtgatggtgacttttctggtaactttttcagtgacaataactaagggtgttcatccaatccaatccgcactattttgctcatagtgcatccgatccccacttagtgtggatttcatattttagatccaatccaatccaatccgcaaagtgcagattggatcagttattttagactggttactttttaatattaaattatttaatatttatgaaaaaatacatttttttttcacataattagca

SEQ ID NO: 333359 - DNA, 1604 bp, Cannabis indica
gtttgggatcgggtcccaggtttaggtcctggtctgggtttgggtccaggtctcggtcccgttctggtacacgaatgtgtttcggcccgagtttttgtctcggtttgggtctggggctaggtctgagtttggttctaggtttcggttcgggcggaggttcaggtctgtatttcggtctcggttagggtatgaggttgggtaagtttttcggttctgatctgggtttgggtctggttatgtgtccgggtcttagtttgagttcgagtttgggttaggattctgttctaattcccagatccaaacactgactatgggccaagtccaagcatcgagtcccggatcctaggttctgaggtgggtcctaggtcatgatttgggcctgggtcgggtccttgatcctgatccaagttctgaggcccaagtttcggtcctagtttggggtccccatttcaggtttgggtcccccatctatgtccaggtcttaggtcccgatcgcagtcccagtcccatgtcccggtcccggtctcggtctcagtcccaggtctcgatcttggtcctaggtcccgagtctcggtcccattcccaatccgggttctagtcctagtcctggttcaggtcttggtcctagttcgggtataggtcccatacctgatatcggtctaggtccccgttctgggttcgagtccgagttcttgtaccagtccgagtatgggtctgggtccaagtttcagtccgtgtctgggtccgggtcttagtctgggtctaggtttgggtgtgcgtctgggttctggtaccagtctcggttctggacccagtcttgggtcacgggtcttgggttacgggatctgggtcgcaggtcctggcccaagtctgggtttgggttcgggtcttggtatgggtattgatccctggttgggtccggctcattgttcggttctgcgtctagatctggtttaggtccaggtctaattccgattccacgatccttattccagttcttattcttatttcgattctccgatccaagtttgggtttgggtcctagtttggaagtggttccaagttcgggtcttggtacgattccaagatctagacgcccactaggggttgggtccaagccctaggtcgtgggtaaagatccgtatcccaatcttaggtcccggtctcgtttcgattcggatcttgggtcccagtctgtgttcgggtccaggtctggtatgagtttgggttatggtttgggttcggttttggtctcaggtatgggtcctagtcagagttccagttctaattccgggttttggtttggttttgggtctgggtctgggtccaggttacggttggggtccgagtcttagtctgagtctgggtatgggtttttcgaatcccgatctgggtccaggttcgggtcctgggtctgggtcccaggttcgagtctgggtcgtaggatcgggtctggatctgcgtctaggacagggtccaggtcccgtgtttcgatcctggtctggatctgggtcttggtcggtattcgggtccaagtctaggttcgtgtccatgtcatgttctgaatcaaaatttaggttaggggattggtttgggtctgggat

SEQ ID NO: 333360 - DNA, 964 bp, Cannabis indica
ttttggttgttactattactttggtcatttttagtaccatgatcatgaatatgtttctttgtaagtaaagattgatctatggtttgtgaagctcctactgaccgaagagactctgaaatgtcaaagtctttttcacttcgttgactctgtgctaagatgtcaaatgctgtgaatttgtttgtgttggtagcattcacttcaactctagtatttgttaccaaaaacttaactgtctggttaataaaagataaaaaaaaattagtaatagccaactttgattagtgaaatgtataattttgtatcttccaaaatttttacacaatttattagcaggagatcttgaacttcagtgggcctaaagaaaaataatttttttgacccttatttaaaaaaatgtagtttttcaaaatgaataaataagttatgtgtatttttagaaggaataaaaatattttttttttgagttcctgagctagatgagccttaggcccaagcctaactcgccttagcttagggctgaccctgtagtaattagtggcagactcaaaaatttcattattgagagtggaaaattaaaaaaactattaaaagagggcttgctatcaaaatataggtactaaaatgtaaaatatagaaagataaataaatatcaaaatttgtataaaaaatgatgaacttaaaaaaacatatatttatatattaaactttcatgcacataaaaaatatacttataaacattgttccttttaagcattcaagattccattaagaatagtttttacttacctcaatttgtttataagtcaccgctaaatgcaaaattgtcataccataatcatctttggcatttacaaagtggtaatcaccatccatagcattcaccaaaagttttagagcttccaactgattatgcctcacacaaacatgcaaaatgttctcatttcgatccttcaaattgattcga

SEQ ID NO: 333361 - DNA, 876 bp, Cannabis indica
atgcacaattctcttcctcgcgttagctcccattgcatttgagagatttggtcgaagtaaagcaacgaccaggcgagccacttcgggcatacatcagcaaattcatgacgaaagcgaccaaggtttcgcgggtaaccgaggatggaaagttatccgcgatactggggggcattgaagtcctttgtgaactatggaaggatataaggaagaacgggccgatagactcaatgagtgatttccttgaccgagccgaaggcttcatcaagctcgaagaagtcattcaacgagttgaaggtgagcaaaagccgggcaaaacgaaggctccttccattggaccatccgcccaacttcccagctattctaacaattcaactggcaagcgctcaagcaacaaccacaagcaaggaaacaggaagaaaggaaagttcaccgataaatccggacagactccccatgatcatgccaaacacactgcattcactattctaactgaagatatagagagtgtgtatatggaaactcagtcgttaatcccgtacaagatgcccgggcccatgaagaaagataccaacaaaagggacatgacgaaattctatcggttgcacggagactacggccacgacaccaacgaatgttacaatctgaagtgggaaattaaatttctaataaagaaaaacaatccgcacctgcagaagtatgtcaagaccaaccaaggtcaaaacaaccacgatctgctacctccacccgtagatggacacttacaagtcattattggaggaccacacattgttggagattcgagaaaagctcggggagaggtatgcccggacagctcagcacgagtaagaagaagtcatcctggccgtggaagaaagg

SEQ ID NO: 333362 - DNA, 670 bp, Cannabis indica
aaaagatttttgggatcccaaaacttgtcacttttgattataaagtttaatgctattacaagtttactttcattatattttagtttaaagtttaaatttcttgtgcttttcatcctagtaatgccagtttagggaattagggtttcataattagttgtcgtgacgtgcctaattgttagggtgttacagtttggtatcaaagcgccaaggtttttaaactttctgtagaccggccgaacatgtacaatcatcgtcagagacaagctcgactcgtggtgcagtaagtgttgagagtaaatgctttactgcttatatgatcatttatttaccactttccatttaaggcagcatgcgagcatctagagtatttatgtgatatatgatgtcatacttaaaatgttatatgatcaatgtttatttaattggagtgaaatagttgagttagggttaaaggcaataaatgcataagtatggtattggtgcttaactcgctggggttgttgattataggggtacttgtaaaatggaccatccgcaatcatctagaccacatggagagcaagtagagcctggtgtagaccagaccaatccatcgacaccgcctgcgcctccgtagaatctggggaataatgcgggggttggcaatgctaatccgcctgctgactggcag

SEQ ID NO: 333363 - DNA, 786 bp, Cannabis indica
agtgttgtgcttacgacggatttgtcatttcttaccgttgtaataatggttctggacttttgcaatagccgcggtactatcgcaatggatcaacacagctggtatcggtttttcccataaagggatctcagctagcaggcttctaagccaacctgctttttcactagcagaggctagtgctatcatttcagactccatggtggactgtgctaaaatagtctgctatgctaaaaatatagccacttgtagctttggagtcatctgacaaagtgttccagtctgcatcactgtatccttcaaggacagctggaaacctttgatagtgcaatccaaggttcatggttctcttaaggtatctcattaccctctcaatagcatgccaatgctctatactaggcctattggtaaacctgcaaaataatcccacgacataggcaatgtcgggtctcgtacaatcagtggcatatcgaagactgccaatgatgctcgcatagtcagattgtctcacaccatcaccaatgttattgaatagttttacacttggatcatatggtgtgcaagcaggtttacagtcaaagtaattatatttctcgagaatcttcttaatgtaatgagattgatccaaagaaattcccttttcagacctagtaatcttaataccaagaattacatcagcttctccgaggtccttcatatcaaagttagcatataataatgatttcacagcattaacagaatggatatttgaaccaaatataagcaaatcatccacatataggcatataa

SEQ ID NO: 333364 - DNA, 782 bp, Cannabis indica
ttcaaatagagtccagtacctccctgaggtgccttagcatggccctggcctccgggagtatgtggatccttctcatatctaatggcaaagacacttctgttgccaaagacttagttgatttctttaagagttgagcctttcaactccacatgtcaatgttacattggtccacctattttgggcaaaatagagggcaacatttaccccccaagccttgtttggtgtagagtaaacgaggcttgtttggtgcctccggttgactcatcgatttctggcacgtgcttcaggcgcgtgggctgcatttatgatattcatcattaaaatttattgctttttgcaggcaacgatttgcttcccgtccattaatgatccagtgcatttaatcggtgtcagacaaatactcaagcgttttcagccaccctaatgagcctttatcccaaccgttggatctgcagaatgcgaatcgattgcggttcccaccgtacgatgacgcctgattacagctgctttgcacccgttctagcctataaaagccagcctttctccttcatttggttactttcaccacttcgccattttttcacaagaacacctctgagaaaaaatttcagaaaccatagatttcttgctgctattccttcgtcgctgtcaatccactttttaccgtcgatcaacgccgacccccagttcccaactttcatgtaagtttcctggatactttgtgcctttactgtttgtttgcatgcaagggtagaactctttggttaagtgttggatttctg

SEQ ID NO: 333365 - DNA, 634 bp, Cannabis indica
tttttaaaaaaaaaaaaatacctctgtctgatttcgaatgtgaaaactcaaaatatttagaacacgaaatctattatttacatgttttaccttttaaaccaaaatccacgatttttaaaacgatactcgaggagaacgatgaaaagattagggaacataacgataggctagattgagcagatgtctctgctcattacaagcattttatagatgagattattgagggcaagtttcgttgtttatgagatgcagcttgacccgagctgcattatctaattaaatacccttttgcaagaccttaatttttaccttctgttactattcttaaagctcataagtttaggttgcccctttgtggctgaattccccaaacccttcaatttaatttgtggctgaattttttgagttaaaagtcactttcattgcccctatgtatggccttttttaaccacgtgtgacactaaacaagaaaataacttcgtatgttgattcgtaaaatgcgacgagaaaaatttctttccccttgacttcttcaacataaaatttgaatgtagtacaactaattcttctcggagcttaaagtgtagaacatattcgagtctaggggtgttcatccgatccaatccgcactttt

SEQ ID NO: 333366 - DNA, 788 bp, Cannabis indica
taggtccgaattccactttcggtcaggggcctcgtctttgtttgggatcgagtcccgagttcatgttcaggttctggttcgagtcttagtcctagtctaggtctaggactgggtctgagcccgagttccggttctaggttcggtctatttctgggtccgggtcgaggtccaggtcacactcacggtcatgttccacggtcctgatcacgttcttgttcaagtttaggttttgggtcccacgtttgggcctgggtctaggtccttgtccaacttcgggtccttctccgagtccctaatcaagacatcgactatgggtcttgtccaagccccggttctctgatcacgggacaagatttgcatcccaatcacgggtcccagtcttgtttcaattcatgtcccaagtcagggtctaggtttaggtctaggtccaggatcaagactggggtccagttctgggtctcgatcccagttctgggtcccagtcatgttcaatgttctggtctgaattcaggtctgggttagggtcttgtgtcccggttcgggttcgggttttgatttagattttggaccgaatcccagggtgggtctttgaccgagtctgggtcttggtccggttacagttttgggtctaggttaatgtcctggtcatgtcttgttcttgggtcctgatccgcttctagtttcgattccagtttcaagtcacgggatacgggtttgggtcgagtttggatccgagtctgggttcgggtcatgatttgggtctgaggcaaggttcaggtccgggtttc

SEQ ID NO: 333367 - DNA, 1070 bp, Cannabis indica
catgtaattgagatttatatatctgagaagactataaattaccttagtaaacctgctattgcatagaaattaacattaggaaaataatcatattaggccataatcaatagaaacaattgaaatcgaagccctagtttttattaactgtcaattttctttaattatttgcttcttattagtttcttattttaaatttctttcttaatttttatttaatgaaatagaagtaaaagtttaattttaacgtacttaactacaatccctgcgggatcgacctcactcctgatgagtttactacttgtaacgatacgtacacttgcgtgtgtaaaatatcgcaacaaataataagcacctttttgatatatatatactataaaatatggtaattgaattatgtattgtattccatagaatagtatatatttatatacaaacttaggagactaaataggaaactactaaatacaaatagaaaactactaaatacaatttaccctaattcttacaactaatattctaacactccccctcaagatgaagcataaatgttgaccatgtctagtttattaccaagataatcaactcgcaccttattcaaagcctttgtaaaaatatctcctaattattctccaatcttcacatatattgtggagatcagaccttgttgaattttctcaaatgtactagttcgctcgtggaacacagaatttgaggcaatataaagaacaacttgattattacaccacaattttactggaatagaagtcttaaacctcaattcaatcaaaagttgataaattcatattacctcacacacagactatgttatagctctatattctgattcagcactggatctatacacaacattttattttttactcttccaagagatcatgttgcccccaacaaatacacaatattcttaagtagatcgtctatctaccttggagtctgccaatttgcattagagaaacactcaatttgggtatgtccatgatccttgtaaactatacctgatcttggtactcctttcaagtaacataaaatttgctctaatgctacccaat

SEQ ID NO: 333368 - DNA, 768 bp, Cannabis indica
accctggttcccttggaacctcttgtttttgacccaagccactggttgcagtggatgcctttcttttctgatctatggccgaaccagtacctcccttgctaaaacctcatgcaggaggggtaggagccccgccaacaaccggagtcccaccagactctatcgtgcatcccactgcgcccttagctcgtagtgccttatccaccatttcagcataggtggtttcgtcgtcagtagaaatcatcaagtaatgtcttatcttcgcatttaacccatccaggtatttttctttcttactgaagtcagttggcacaattcccaaggccaatctcgccaaacggtcaaattgtgttgtgtactcagtaacactcatattttctttctgagtcaaatgagtgaattcttttctcttagcacttctaactgcttcattgtaatacttagcattgaaaagttcctggaacttttcccaggtcattgtcgtgacatcatgaatcatagacaccatgtcccataagaccagtgcatcttcttgaaattgaaaggtggcacagaccaccctatcgttaccggtgatgcccataaagttcaagattctagtaatcaccgttagccattgctcgactttcatgacatccggacctcccaaaaaaactggaggtgcttgcttgcggaacctttcatacaggggttccatcccattcactgtcgccactggttcggcctggacagcaggggcaggtgccactggaatttctagagcaggcactg

SEQ ID NO: 333369 - DNA, 611 bp, Cannabis indica
ttttacatttttacggaattccatacaacaacccctataactactaaaagattaacctaaatcgctatagcaattcacataaaaatcaccggagaaactccaaccgtaaatttgaaaaaaagaaaggctaattaggatttttgccccctgaactttgacatgtaccaaatcatgccccctgaacttttacggtcgttaaaaatgccccttaaactattgagattgttggatttaaggacttttgtctaatttcattaaattttactattttagtgattgtttatgtactgaaccatgctccccggactttgatatctaccaaatcatgccactcgaattttgacatgtactaattatgccccttaaactttcatccatgttagacttttttcctaaatttggaaaaagtccttaaatccaataatttcaatagttcgggggacattttcaacgaccttaaaatttaagggagcatcatttggtacatatcaaagttcagagggcaaaaattctaattagccaaaaagaaattaaaatattgtatatgagataattctactcatttttaattatttttttaaaaaaaataaaattgagaggagagagaaaga

SEQ ID NO: 333370 - DNA, 915 bp, Cannabis indica
ggtacggctaaaaatacccaaacaaaaatttgacttttcaatcccttgaaaaacgtaatttcaacaaacccaaccccctattaactttccttggaagacgtaattcgaaccaacatgcatgctcggttttgttctggtttggttgactgtggtaaagaaaaattatgtatttaaataaggtaaatgttgttcccattgttcccatccgttaacaacaacaatggccacataaacttctcacatgtagcaacaaatatcctaatattatgtccaaataaacatgtgtggccaaatgaataagaaattaaattaggatgtttactaataatgaaaactcaatattttttttaatacgattttaatatttcattaaaatattattcgttggaataaatattgcaataatttttgtaagattacattaacgtattaatcgttggaatcaagattataataattttttgaatactatacaaatatagatatttaataacaaaacagtttaatgttatgaatacaatagtagtttgagacaaaaagtgactctagtaataaagtcaggagaatagtgaatccggtacgcttcatgatgaactgagtacatactcagcccaaacaacctaaattcatagtgcgacttctgccatactgcatcggtgtcactctatacaaccctaggtcgaactggattcggtgagttcgttaggagagtagtgactccggtaccccaaagctaacttgactacatactgtgtgtcaccgggcccgtaaacaccgcaagtcacagtgtcagtactacgaatggttgagtgtcactccgtacaaccctaggtcgaactggattcggtgagttcgttaggagagtagtactccggtaccccaaagctaacttgactacatactgtgtgtcaccgg

SEQ ID NO: 333371 - DNA, 1348 bp, Cannabis indica
ttttttttgctttcagttatgaactgaagcaaaaaaaaattttttttgcttcggttcataaccaaagtaaataatcaataagtgtcggttcataactgaagcaaaaaaaatcagcgttgggtataccaaaattcctaaaaaccgaagcaaaaaactttttttgtagtagtgaatcttttctctcaaacactatagaattgttcttgcgcatgtattgagaatccaattagaaccttatatacattttatcctactagcccacactagtccttgtgtgtggtggaatatatggaaaatcaaggtgtgagtttgacattactgttctaagaatacaatatacgaaagactcgaggatatcctgataggcttcgagaggtaaactatcttttcatctattttacttttagatttaatataaatacatatggtgatcttagggatatggtacgatgataatcagtaacatttattccactgcgtacctaatttagtaccataaaatcaacatagggttcatcttttaggaaaaaaatacttgtgataaatacgttgaaacttttctagctcaataatattaactcgtggactagagttcattaatactcaaaccacataaaatttattgtttattcttttttaattaatttctttcttaaacttatttattttataatcaatttctaaaaattttgataaacactaataataggacttacttttaatattacacaaataattcataatctactaattaattattaattaatcactaatcttcatgtttcattacgtggtcattatagtttccatctggtttttacagcaaaaactttgagttgatctctaacttccattacttgagcccattaccaattgttattttggtgggtcttataatttcaccaattttcttctttcaagtacactttatggattcacttaactcataaattgtcttttatatgtgctaagacccacacatgtttacctatagctgccacattccactgctcaatgcaccgaaagctctgtcttgatccttcggcttacatacatctttccaagccaataaatctaactttttgtactcagctgtgccactccataaaaaatctctacatattttatcaatagtttgcaaaacctttttggtataaatagtaaatatttgacttggaccatatacattgccaaatattaaatatagtgactagcaccacttaaaaggtgtaatattatcagggccgtcttaaatattttagaagccatgtttcaattttaaaaatttggcccttaatttttttatttattttttttaggtaaatcaagtttaaaaatttacttctag

SEQ ID NO: 333372 - DNA, 1185 bp, Cannabis indica
aatcaaatccaattactaattggcttggatcggttttttaattgaatatccaattacacacctaaattttaatattaacttaaaaatatgaagaaaaatatcacattttatttaagtttaatacttcataaacatactatcgttataagtgtaatgtagtcaaaatttttaaataaattgaaacaacaaaatttctaagtaagaaaatagaacaaaatattttaaaaataaatacacaaaacaaccaaatgttacaaattcaacacaaaaaaaatataattactatatattatatttttaatatttttattatataaataatttttaatatatatataaatataattgaattggatcgatttttaattagattttgagattgacatccaataaccgattcaatctaattagaatctaacttttagcttctaatccaatccaattgtaattagatatccaactttttgtaattggattacattaaatcagttcagttcaattggaatagattggatgatgctcacccctagttcaaacaatatatttcttatttcaatgtacaaggaaaaataatcacacatatattaattaaaatatttaaattttatgccgactgccctttgtgtaactctggtactgaaactattcaacatgcattggtggaatgctcgtttgcaaaggctacttgacatcgcagcatagtggacgttggggctggggctgtaacgttcaacaactggttgttgggaattttcaccagggggcacggaattggaatggaggaagcggtgatggtgtgttgggctatttggcgtgcgcagaatgactttgtttggtaaaagaagagttggcttccttcaaatattgtaacatcagctagaaacatgcttgatcaatacaaatttgcttaggaaaggaagggcctttcgttgtctcctttgaatgatggggacggaactgtgagcgttggattgcacccgtgttaaacaagattaaagttaatgttgatggtgctttatttgaacaataggggcggtttggagtgggctgtgtagctcgagatcattattgtaacgtccccgcttcaagcctccattgggcccttacacccacggactaatggctcttatacacgggtacgccactctggatgcttcttggattgatgactgaccctacagacca

SEQ ID NO: 333373 - DNA, 1047 bp, Cannabis indica
aaataagttcaatcaaaagcaaaaaaaaaaacaacaacttagtctcggtagagtttaaccaaagaagtcaattgcttggacatctcatgctgaagttcttccattgctgcaagacgattgttcacattctgaacttctgacttgacttccaggagttctgctgcagcagaacttgaacttgcagcagcagcagctccagcctttggccgtttttgaaacacaccatcaaagtattccgagggttggaatgtaggtccaatgataggggctcaagtgtttcatgtgattgggccacattcttctgagaagataaaaccttatagattagatttggaaatacaagtttaaaggttggctttttacctcttcggaaggaaacaatctggttcagaatgtgtgaggccaaatcaattgaagttccagaggtgatgcggtataagaatgatgccacatcttgagacactacggtcttgttggagttaggaacccaattgcttagagcaaaccgcataagagatgcatgagcaaaagtgagatgagtgattcgaagactctctcctggtttcaattctgatcgagcacccgtgagttcagagagcatcaactcacgatccatggacatcactgcattggagacattctcgggcaattgcaaagcttgagcaatgtccttttcagaaaaagagaaccaatgacccctaacataaactcttcgatatagtctagaattctcatcaagaaaatcatcagtgagattagcatagaaatccttaacaatgtttgcaatgaatccaatgaaaccagtgagagtgttttcccattgatgaaattgaataaactttacaatcccataaacccgatgagcatgcaaatcatagttcctctcactttcaaacttacggtttgcatataaattccagtcacgttcattatcacgataataaaaccgagggcagtgagaaagagatgaaggaacattaccagaagaaggctcttccatagactgcttgcctttggcagcaacagaagcctttgctgcagaagcag

SEQ ID NO: 333374 - DNA, 1490 bp, Cannabis indica
gagcgagatctccatgttagcataagtcatagtgcattcgggaataactatgagcttacgggatcacagaccaaagacacttcctgaagaagcttctggataggatagagccaactggagtcgactatctagaacttcctttccaggaggaataactagccaactaaaactccatcccgaagagaggctagctattcctgaagacccttctcggaaggacaagggagaaagatcaaagtttgagcttggggttttcttacaattttcggttgtattatgtttgttatggcttattttggtgttctagagagtttggtttgatttggggaagttttaagttagtttttaaattttttgggtttattgcaaagaaacggttaaccagtttccctggcagaacccaaagaatcggtttaccattttgggaatctggtttaccaattttagcaatttgagaaccctattttttcacattttatcgatatttaggataatgtcatcctatatatcaacacaaaaacttctatgtttcagtttaagtccccataaagtgatttagcatatcattatcagttttacgtatgttgtgacttaggagcctgtaaatcgtcgagcagcaatttctactctggttgaccgacgcacctaaattcaaaatcaaggtaagattagtataataatatcatacgtgattgcatgtttagcgtgcattttataaatgcctgttatataacatatcagtaatggcggtattagtgtacatagagtagcactgaatagcgatggatatatgtttggcatagtacagattgacattatcacatcggtacgactagagtgccaagtataggctaatattatggtcaatagtactatcatacgaatgttctagactcagtacacgtgggacgtgagataggggttatgaaattgggtgtatgggcacctatttataatatggtttatgtttatgtttttattatgtttttcttactgactgtgtcaactcacaaatattgtttacttgtgttggtaagggaaagacaaaggctgaacaacagtgagcttgagctaatgaagagtgtacataacaaggtggttagacctggagtattcaatcttcggggcaacaagctttattttgatagtcgttaggagacaacttttgtaattaagtattttgtaaaatggttgtaatttgaaaaagggatcccagttaatgtaaagtatttatacatccaagtttaaagtttaattatgaaaaatttaaataaatcactttttttaataaacacgttgattagcaacaaaatgtacagtaagtattaaaatgacaataacacacctaatctagtagggtgttacacataacctaggaaagctagctcccttaactgatttaggttccaatttgtcaatagattggtgtacatatgttgtatacccaaaggttcttaagtgtgttaggtttggggttctattgtaccaca

SEQ ID NO: 333375 - DNA, 534 bp, Cannabis indica
cactgatttatcacaaaaaaaatattcactaagtcgattgtaccacatgcttcttgattgttttaatccatacaatgatctttgtaatttaaatgaacatatttcttgattgcttgaattatatgcattaggtatcttaaatccttcaggaaacttcatgtaaatatcactatttagtgatccatataaataagctatgactatatcattaatcacatatcgagtaattttttactcacaaccaggctaataaaatatcttaatgtttttgcatccaccacaagaaaatatgtctcttcataatcaatacctggtctttaaaaaaaatcttgtgctacgagtcttgctttgtatcccataacttcatttttctcattttttttacgtacacatacccatttgcatccaacgggtttcacacctttaggtgtttggactataagtctaaatactttgtgtttagtaagtgaattcaattctgcttgaattgcttctttctattttggccaatcttttctattttgacattctttg

SEQ ID NO: 333376 - DNA, 592 bp, Cannabis indica
ttgtgattccaagttcgagtttgggttcgagttcgggtctggtccgagttcaaatcctagttaggtttcgagtctgagttcaggttccagcccccgttttgggtctaggtcggggtctcggtctgggtctaggtcccggtgttggtttaggtcacaagtcacaagtcccggtccgggtcctagtcctggtatgggtttttgtctgagtatgggtttaggtttgggtcttgttattgtctcgtgtctggttctagtccagacctggtctggttccaattcggggtccgagatcaggtttggatcacggtctgggtctgaatctgggtctggatctcagtctgggtctgggtccaggtatagttacggatccaggtccgagtcctagattcaaacactgactacgggttaggtcaaagccttaggtccaaattcggatctctgtcttggatgtcggtctttttccagtccaaatcctgggtcttcggcagggtccttaatttgggtttgggtctgggttaggagttgtgtccctgtagtcaggtcctcagtttaaggtccaaggtcaggtcccgtgtctcgagtctagggtcaa

SEQ ID NO: 333377 - DNA, 474 bp, Cannabis indica
aagctgagaactgggcgttgttgttgattggtggtaaaatgttgattgacaacggcgaaggaagatcagtaagaaatctatggtgtttgaaggttttctgttcgaagctttcttttctctcttgaaaacttgaaaattttttgtgaaagtctgaaagtaactaaatgaagagcgaatggtgccttttataggccaaaacgcatgtggaacaggcgtgatcatctaccaatcgaacggttaggaaggcacacgattcgaattcccaggatccaacgactgaattggtttgtcatcaaggcggtggaaacgcttgagtgtccgtctgacacccattaatgcgccgtatcaattaatggacaagaaacgaatcgacgcctgaaaaaagtgaattgctgcagtaatggtgatcattaaatacaccttcacgcgcccaaagcacgtgccaggaaaccgaggagccaaccggaggcatct

SEQ ID NO: 333378 - DNA, 2077 bp, Cannabis indica
aatatgtttcaaaacctgactcatatcttgagttatgaagtccttgaactacaatcagacttatcctacgaagaacaaccagttcaggtccttgataggatggaaaaagttcttcggaacaagacaattgttttggtcaaagtgctctggagaaatagtaaggtggaggaagccacctgggagttggagtctgacatgaggactcaatactcagagctattcaggttagagattttgaggacaaaattcttttaacgggaagataattgtaatgaccgcattagtaatttggattagtaaaggcaattagcactaatttctgatatttttatagttatttatgaatttaattatttatgggccccattattagaaatgggcactagagttataatttctcaattcagaagattttattaaactctaggaaaattatttgacttatatgtaaattatgcaatttttacaatttttgctcgacgacaacagaaaatgcgatggatggctagtttgatcacatgggtaagtttagaaccttatttattagtggaatatattttggagcaaataaaataccgaggttgtgcggggttatggtttttgaccattttacccctaggtttgaaataggcttaagttatgtatcaagggcattttagtcttttccaagggagtgagtggtggctgccttaggtgttgacacctagcctctacattcagccaaagttaatgtgattaaccttagtgtcattttaggaacataaaggaaataagaaaaagatcaaaattgaaggaaaaccctttctttcccttttctctcttcgaaccagccaagatcaaagggcttgattgctgaaatttgcattttcagcaaggattagaggaggattcaattaagataaaccctagatactctcttgctatgtgtttctcaaagttttaagtagtgattttatgttttggtggctacgagggttagaagtgcttagggttcattttttgtgttcaatttaagttgattctaggtgcttattgctggtttgagtgtatggtgtaatgatttcacaagtttgtgctttgaaacctaagctttgatctttaattgcataatttgattcagtgaccctttctgggattttctggttggaatatgttgtgtatacattgtttaggtactctcgaaagtttggaggcaattggacaagttttgagcaaattggaggtttttttgtggaggacgggcagaaattggttaatcggtttcccagtacctgtaaaactggttaatcggttttggcaagttccccgagaaaccgatttttctcaattcttgtccatttcagtttcttagttgggtgtttccctgtttcctaggttaatgtaatccctagagagtatagtagagccttgagttgtagactcgggtttcccggattagggttttggacatgtgatttacccagttttaatatgtgattaggacattcatcgagcacaagactttccgtacaggtcggccaactcacttgaatctggaaaggaggtaagaactgtatataatgtgtgatatgaatatgcgaatgtaggtatgtgttaatatagatgcatgcttgttgtgattcatacactaccaacacttgtacagtagcgatacagagtgcattggtaaagtgtatgatgtttgtaaagtacatcatgatgttaccagcactagtacatgaaggtacaaggtgtatgtggtacaacacttaacagtactcaaggtgtatgtggtagtactgagtgcatgtggtacattggtacatggtcgtatcttagtagaacgttcttactcatctgttaagccttgtaaataggtgtatgggcacctagatacaagtcggtattatatgatatgttatatgcttttcttactgagtttgtcgactcatagttctgcttctatgtgtaggtaaaggaaaggcgaaagctgaacaggagtgagcctaggctgagatgaggttgtacatgtcatggcggcgcgacctggagtattcggtctcgggacatctgggtttattattttgtagtcgttgtg

SEQ ID NO: 333379 - DNA, 1296 bp, Cannabis indica
atgttcaaaggcctcttagggcgaaacatggaggtgtacgtggacgatatgctcgtcaagtctaaagcatgcaatagccatgcagacgacttagaagagtgttttgaggtagtccggagatacgacatgaagctcaacccaaagaaatgcacctttggggtcaaatcaggaaagttcctgggcttcatcgtcagccagagggggattgaggcaaacccagaaaaaatccaagctctcctgagcatgccatcccccaagaagcataaagacgtgcagagcctaaccggaaaggttgctgccctgagccgttttatctcccggtctacagacaagtgcatccccttcttcaacatattgaagaagtgccaaaagttcgaatggtcggacgagtgcgaggaggcattcaaaaagttgaaagaacatatggccaagcctccgatcctatcaaaacccgttctcggagaggacctattcctatatttggccgtctccgagcacgcggtcagcgctgccctagtccgggaagaagagaaaactcagcatcccgtgtactatgtcagcaagcgcatgataggagcggagacacggtaccccatcatcgaaaaactggttttctgcctcctaatggcctcaagaaaattaaggccatatttccaagcacacccgatcaaggtactcactaatcacccactccggcaagtcatacaaaaaccagaagcgtccgaaaggctcctcaaatgggcaattgagttaagtcaatttgacttacactacatcccccgcatctccataaaaggccaagccttggcggacttcataaccgaatgcaatgaagccgaggcaaccgcgaatgcatcgatgccgtcgatccccacatggaaagtgtttgtggagggagcctctaataaaaatggatccggagcgggggtggcaatgatatccccgaccggacttcgactccaggcagccctacggttcgactactcagcttcaaacaacgaggccgaatatgaggctttgatagcaaggctaagactaccgaaggccgtaggggccaaaagagtagaagtctacagcgactcacaactggtcgtaaatcacctatcgggagagtaccaaacacgcggcgagcgaatggccgcatatgtaacaatagtccgggagctgctccacgagttcacggactacaaagtagaaagaatcccccgggaaaagaatgctcgcgcggactgtctggctaagttagcttcagatagtgaaatcgaaggactggggtagtaccagtggaacgcttgg

SEQ ID NO: 333380 - DNA, 640 bp, Cannabis indica
acacttatccaaggtgtaaatataccttatcaccgattatcatgtcagtctaaatccagtgaattgacaaatcatgggaatgaaacttttgaacatataatcatgattatatttcactgtgttgccgacactataatcatgaacaaatatatatatgttctggacttaatagaatttatacattaaacataatcatgtaataaatcacgtgaaccatgcaacattaaagcgatttttaatcttatattaattagtaaatctgattatattgaaataagttttatttagggtacaaaacccaacagatattgtgtcaacagaataataaggtggcattgaaaatatggtctgagtttgtgtcctattgtgataagtgctagtgcagtttctcaagttggatgtatcttgtttctgcatctagaagagtctttgaaatatagtagatgggtcgttgccttccttcatcttctctgattagaacaacgctgactgttgtttcagagactactatgtaaagtgcttttccatccttaggttttgctaagagtggaggtgaggcaagatattctttaagttgtctaagtgcatattcacattcctttgtccactcaaagtccttcatttttctcagtgttgagaa

SEQ ID NO: 333381 - DNA, 674 bp, Cannabis indica
actccacatcccattctccattctcgagtcgcaagtcaaccaccttgatatatatccagattaataagtggtttgaatcttaagggcctaggtagccacctatccttgacaatattaatattttccccgacccaactctccatctagaccccttcagaatgatctctctaccccaacgtaaagcctccacaccgaggaggcccttaaccctttcttagcatcaaggatggtttagtgcagaaaatagttgttctttaagaccttccccagtaacgagttagggttcctcaaaatgcaccacacttgttttgtcaaaatggctttgttaaacagcttaagatctttgagcgccaaacccccaactccttagggcactcaatttgtcctaagatccctagtgggttttctttttcttttttgacgacccccacaagaagtgagcagccataccatggagctaattaatcatttttttggagccaaaacacccccatagtgtagcaaggaattgcctgaataactgctttgattagcacttctttgtctgccaccgagaacagacttctcttccaccctctaaccttattccacactctcttttcaatagcatcgaaaagctcacactttctccttcctataaagattgggattccaagatacttgtcaaagtgctc

SEQ ID NO: 333382 - DNA, 627 bp, Cannabis indica
gggaaccatctttctttttcacaaacagaaccggagctccccagggcgatacagtgggtcgggtaaacccaatatcaagcatcccctaaagctgtaacttaagctccttgagttctgatggagccattctatatggagctttagaaaaaggttcggctccaagtgccaaatcaattacgaaatcaatttctcgttgcggtggcaatcccagcaattcttcgagaaacacgtcgagaaagtcttttacccctctgactacctcacgcccaaatgtatcgggtctgctggagttaattaccactgctaaaaatcctacacatccactgtgtagtagatctctagcccttagtacagaaataaccgagactcgagacccctaactgatctaacataaacaaatcgatcttcaccttctggctgaaaagtcaccattttccgtttacaatctatagtggccaaatacttgcacaaaaaatccatcgcaagtatgatgtcaaattcagttaattccagttttacaaggtcagcactcaactccctttcctcgatcctaactggcgtagacctaatgcgcctattacagataaccaactcccaactaggcattagggttccaaaccctctttc

SEQ ID NO: 333383 - DNA, 803 bp, Cannabis indica
gtcataggttcatgtccatgtctggggtcgggtactaggtttcggtcctagttccgttgcccaggtccctatcttgatgctaggtctaggtcccaattctggtctatgattgggtcccagtctaggtttgggttaaagtccttctcaattcgagtttgggtctttgtcttgattttatctgggtagggttcgggtttaggtcctagtcctagtcctagttcggttccagttctagttgcaattatgagtttgagtttggattcaagctcatgtcggggttcgagtcttggtctgagtttgggttcgggttcggatttcagtctaggtccggatcaagctctggttgtgggttcgggtccaggtccaggtctgcgtccgagtcccaagttccattctcgatttgagttgggttcagttctgggtctaagttctgggttccgatcctagtctgagtttgagttcaggtccgggtctaggtctaggtttggggttgattctaggtctgtgtctgagttcaggtcccgagtaagggtccaattttgggttttggtctgggttcgggtttgaacctggttcgtgtccaggttcctatcctcttgcgtccgaggtaggtttcgggtctgggttagggtctgactacagattctcgaacccaggtcaagtcctagtttgggttcgagtcccgaattccgatttgggtctgggttccggggcctaagtcccttgtttaggtcccccatctatgtccggttcctaggtcttggtccaggttcaggtttgggtcccgagtcttggttcgagtt

SEQ ID NO: 333384 - DNA, 566 bp, Cannabis indica
caaatcgaaggagagaagatccagattcagatcttgataatgctctgctatagacaagaattaagggctagagatctgaatggaatgagtcattatatttcgttgccatcaatgtaaggattcttaatgtcttatgtgtttattttattgttttaggaaattcatatttactagaccgagtacttcaccttggggtgcaccgattttgtttctaaagaagaagaacagaaccttacggatgtgtattgactactggaagttaaataaattgacggtaaagaataagtatcatttgccaagggtagatgatatgtttgatcaattgtagggaaagatcttcttctctaagatcaatctttgatctaattatcaccagttgaggattcgataggaggatattcccaagacaagtttttgttctcgggtatgaacactatgaattcttggtgatgtccttcattatcgagatatggaatataaatgattaaacaaaatacatattttaaataatgagctttaatcaagagaaattcgatctccattgttggttttacatagctattgtt

SEQ ID NO: 333385 - DNA, 776 bp, Cannabis indica
tggtttaaagtattgttacagttgtttcttcactgaatattcttaacatagaaaaaattattcatcagtgcaataaaaaattgttaaatctttttttttaacgtatgttcagtcgcattgttcatatatagttgcccctatgtgttaaattcgttgcataatagttgtgctacgaaaatattattgtataaaaaattagggctcaaaattgacaatacacgactcgtattgagaaatctccattgtggtaagttttttatattacatatttgttatttatatatgtgttaaagttctaaagtcgatgtctagcaacacatgcattacttttaaatgaattgttgcattttagtttctcatcagtttttgtatagttgacttaccataattgcattttgaaaatttcaggaaggggacccaattctattttttatattttacaatgggtagtttaatcgaggcttgaattctgtaaattacgaatctagtggcgaatttatctcaagtgatcgcaaatatgaacaactagtacataaattgaaacaagtgctggaatgcaaccaaaaaaattactcaactgtaactgaaataccaagtaaaacaaggttaccaactgttgaggataaaggacggtccaagccaattcttttacataaaactgaaattgaaaggacctgattttacaaggcatccattgtgtgtgatacagaagaccaaggaaaagaaaatttataggtgcatgggaaacaaaaaaatagaataggagcagcaaatgt

SEQ ID NO: 333386 - DNA, 709 bp, Cannabis indica
ccaccgcacatgaaaaacaaaaagaagaacaagatggaggactccatatgagcccatgtctgctggtgcgagagaaaatgagagaaagagagtgaatgaaaaagtgcggctgaaagttagagttaattagggtttctcttttttttttagtcagtctttgggcctatctcgacgggcccaacttggaccgccgcgattggtaccaatctcggcggtccaagttgggccgtcgagatagggtccaaaattcataattttttttttaaaaaaatatattcttgtgatcaattatggcggttctttaagagcccaccgagatagagaccaatctcggcacacacacgcgggcccgccgagatagagaccaatctcgacacacacacgcgggcctgccgagattggtgtgtcgaaattacctttttttcttgtagtgatgagtcaaaaaaattctcacttgtatacaatgtaatcatccatttgctcattggagatcacacccacaaaattaataatatataattacatattagaaatgtgggccaagtgttcatataaaaaaaatgtggccaagtttattaaaatagacataaataaggagaatttccataaatatgggaatgaaatgtatggtttactttttatagtataaataaataacactatagagttatgagtttttcttatttttttacatttatatgggattttt

SEQ ID NO: 333387 - DNA, 912 bp, Cannabis indica
atatattttttgttttgtatagtatatcatttatttaagatgatatttagtttctatttaattatatatgatgattgtatataaattttttggtatggtatgcatattttaataatggtatatatataattttattagcgtgatatatatatatatattagtattaatatattagttttagtattgttataattttttgtagtatataattttattactacagtatattaatctttaatgatacgatatattaaatattataatatatttattcatttttgttaccatatattaatatgcaatacttaaaaatttatataacttagtttaattattatataatatttttttaaaaaataatatgtattaaatatatttttataatttttattagctaatttattatattttactattttgctacatttaaaaaaaaataaacatttactcacttaggtgacatttggtaacatttttgttttttaaattttttaatcacaaaaataaaaataaaatttttgtttttaaaattttatttttgaaaaacaaaattgtattctataaccacttttattttttaatttttaaaaataaaaaacaaaaatagtgttttgtaaagtttatttttatttttcatttgttgattttatttaagtcgagtctaaagccaggtccgagatcgggacagggggtaggtctaagtctagggtcgggttcggtttttaaggtctaagttagggtcagaattcaaaatattgattaaaaagattgtttaaaataaaatttgaaagtgattttatttttaatttagattattaattaaaattacaaagtaaaaacaagtttatagacatgattttagaaaatatatttacttttctaattttaaaaacaaaaacttaattaaaaaag

SEQ ID NO: 333388 - DNA, 1115 bp, Cannabis indica
aacattttggtactttcattgagagcctctttgaaaaaagctcaaaaaaaaacccttcgttcttttgaagaaaaacaacctctttcacggctgaaaatccagaaaatgttaacaccccacatgaggaaaccaatcatcactctgggaaagagcccatgggctctagaagatctaccaacccgcactccagaaggataacccgttctaggagggctcaacctgagggttgccccagtgcacggaccacacgttctcggagaactccacccgacataggtcctagtacgcggacaacacgctcgaggagaactcaacgtgggaatggttagaaccccggggcgagagatgaagagctcaatcgtggaggtgcccaatctatgggagaaggagtttatgtaatggaaaactgccgcttgagacgctgtttgttagaggcgcagcgtcaaaatgttgagttagaatgtgatgcagcctcggcaagggtggtacaggggatgaattctcaatcaacttgaacctagagtgagaagacaacgaggaagacctcgtggctcacaaaccaggagacaggaaaaggctggggaagaacaactcggggaaaatgagacacccctgaaaatcagaacgaacagccagatgggagacaacgagaaactgttggacgagaaatccctcatgagaatgaggaaaatcttagtactcaaccgggagaacaaaggtcacctgctacaaattaccaacattcttcccaaacccatagggcgaggactcgtacaaaccttgatgggggaaatacgacaaactgctcctaggaggaaagaacagagcgtgaagaagcaagtgtgacttcgaggtcgtcaggaagccatagtcaatcaactcgaagaggagaaaatactcaacgagctaatgatcgagaaagtatgggaaccagtaaacctgcaagccactcaaagacaaagtctatgagtaggacgcgatctgtgagtaagacaaggtctgcgagcaattactctcaactggatctgtgagagcacttgaatcaaaagaaacttgaccttctccaacaacttggtccaaagcaagaggatccaatccaattacagataaacgag

SEQ ID NO: 333389 - DNA, 740 bp, Cannabis indica
ttttacagtttatttatagttatattatgtcacatgattttttttattattttatagttaattaatatttgtcgtggggttaatttcccttaaggctcctcctagtattgggccagtttccttggagaaactaagtgatgagaaccgtagcccctcctctccacggcccaatattgagcatgcatcttcaatgctccccaatgaagatagagccttggctcaatttttcaaagctcaagaagacttaatgaatgatctcaagcattttgggaagttggatttatatgagattcgaaagataggaggggatattggtgttccggcgtcatctgatgtcaatgaaaggacgactcctttcaaaaaaaggaaatttgaatcctcggcttctctttgctctagaccccacaaaattcatcgcaagtatcctggtgttgttcgtgactttccttgggactctagacgagaagggaatgaggcagaattggtagttgatgagccttctgaagatagttctaattcccctagccggtccggtatcttgaagaatcccctgattggttcctttgtgattgatgatactgcttcaagtggatctgcttactctcacacccctgtggaggagaatggtgaatctcctccacaggagccatgagaggcctagcatggaactgtagagggttagggcagacctctacagttcgggaactgaagtccctcatccggtcgcgctctcctgattt

SEQ ID NO: 333390 - DNA, 751 bp, Cannabis indica
atctaatatcaggaactgtgccataatagtcatgctcatcggagcttgtccaacagtgaggggtaggcgaatttttcctagaggttcgactccttgactggagaaaccatagacaggctgggggcatggggttagatccttgagttggaatcccatcttttcataagcagttttgaagaagatgttggaagaggcttcattatcgatcatggttttggctacaatcgtattggctatctggacttccacgaccagcgggtcgttgtgcggaaacctaattttgatagcatcttcatcgttgaaggctatggtcggctctcctgctcgtggaactttgggcttcctttcttccatggtcaggataacctcttcttacttgtgctgcacttttcgggcatacctctcccgagctttgcccgagtctccagcaatgtgtgggcctccaacaattacttgcaaatgcccatttaccggtggaggcagcaaatcttggttattgtcgtctttttgaccctgattggtcttaacctacttctacaggtgtggattgtttttccttattatgaattcaatttcccgcttcaagttgttgcattcgttagtgtcgtggtcgtagtctctgtggaaccgataaaactttgtcatgtccctcttgctggcatctttcttcatgggcccgtaattcttatacgggccaacaattgagttgccatgtacacactttctatatcttcaatcagaatagtgaatg

SEQ ID NO: 333391 - DNA, 681 bp, Cannabis indica
tttttttttttaaaagaagggaaaagagaaaatctttttgttgccagagtgggcgatttccttttgtgatcgtgggctggtggtcactcaaaattttgaaattggtttcctttttgctcaactctcccatgtttatttaaaccaattttttgtcatttattctcaccacctacccgattctttttctttgtctctcttccttgtttgctgttcattgtctcattcaaatcaccatggttagaacgaagaacctacggaatcccaaaaaggtggttgacaccgatgcaacccccgcaaatcctcctgctgctgcttcaattgtgcctcatgctgctgcaaaaataggagattcttcgcttcctcagcgtgaatctcagcccgagaagcccaaacgaattcctaatgaagtggctcgaaaatctgtgcgcccatacaaaacttcgacctcatcgtcttcatcttcaaagggatctcctccacctgctgcaatttctcctcctgctgcatcagtaaaagaagttgctgcttctactccaactggtccttccactcgcactcgtgcccagcaagcttctgtcgagaaggaacttcgatcatctcgaattcgtgacaagccagtgcctctagccaagaaacaaaaggtaaatcccccttcgatttctttgagttctgaagaagaag

SEQ ID NO: 333392 - DNA, 731 bp, Cannabis indica
tcttcttgtctgattagtacggcgcttatggcatgctccattactgtcaggcttatccccagttcctcactgtccagaggtttagagaggacgggaggttttgcaagctgtgcctttaggtcttgaaaagctctttcacattcttctgtccactcaaactttttgcttcctcgcatgatgttgaagaatgggacacatttatccgttgattttgacacgaatctgctaagtgcggcgattcgaccaattaggctttgtacctctttggttttttgttggcgagttcatatccaagagggcttggatttttttcggattggctttgattcctcgagcgttgacgatgaagactagaaactttctcgagctgactccgaagtagcattttaggggattcagtttcatgttgtattttctgaggactttgaaacattcgtccaggtcgtctatgtgccccccagcctttctggatttgacgagcatatcatccacgtacacttccatatttctgctgatctgatctttacgcattttgttgaccagtctttggtatgtagctccgacatttttaagaccaaatggcatgactttgtagcagtagagacccatatctgtccggaagtttgtatgttcttggtccggcagatgcatcttgatttgattgtagcccgaataagcatccatgaagcttaatattcgtgcactgcagttgcatcgacgagctgatcgat

SEQ ID NO: 333393 - DNA, 655 bp, Cannabis indica
gaggaatgcgactatatactccgcgaggtccatgatggtatctgcgggaatcatactggtggcaattctcttgccttaaaaatcatgcggcaagggtattactggcccacactgcgacaagacaccttcaacttcgcaaagaaatgccacaagtgtcagcgaatagccacatatgttaaccaacctccgagtaacttgcactctatcacgagcccttggccatttgcggtttggggcatcgacctgatagtggaattaccaaaaggaaaaggcggagtcaaatacgtcgtagtcgcgatcaactactttaccaaatgggccgaagcaaaggcactaacaaccatcatagcagccaaactgcacgagtttgtctataactccataatctgtcgatttggcatcccttacaagctcatctcagacaacggaaagcaatttgattgtaaggaaatgcgacaattgtgcgatgagttagggataaaaaaggcgttctcggcagtcgcctacacgcagagcaacgggcaaacagaagctgtcaacaagataatcaaacataccatcaaaggaaaacttgaagagcaatagggggtatggccagaagaactttcacaagttttatggtcatacaacagaactccccgatccacgactggtg

SEQ ID NO: 333394 - DNA, 526 bp, Cannabis indica
caaactcagccgcttcctccattcgtccagcatctcgactgagcttcaaaccttcgatcccaccaagaacccaactccaccgccttcatcatttcacagttccaccatcactcatctttccaccagcccttcttccacctccgttcaaccacgtcggactcagcagctgaccacgaagccaacccagccttcgatttcaccatcagccatccccttacatcgcacaccattcaaatcacccagctccaagcccattgaaccgcaccatcacactgcccgagccaagccccagtcgacctccacctgttcatcctcaccattttcaacccgacgccaccacccagccgcacccaaatcgactcaccataatctcgcacccagcatttcctcttcattcaaccaaacttccaccctcactcgatactcacccagtagccaaccaggtgcaccaactcaaacccactgcccctccgtgcacacaagtcgacccaacaacatcacgactccagcagctcgcacgaaccag

SEQ ID NO: 333395 - DNA, 717 bp, Cannabis indica
tttttggagacaattgggaaggagcatacctcatcatagaaaaaattggtaacgcaacatagcgacttgcagaaatcgatggaactgtaattcgaagagactggaatggcgaaagcttaaaattttattatcaatagtactcgcattgtatcgtttgtactcgctatgtatttctacttagtcaatttatctacataaatattctaagtatagggggtatataacccactcactttatactattgattaatctatttcttataaacagttatgaattttttcgagcttttaaaatttttctaccttagtatttattacaccaagctataattaaaccgaaatcgagatgataaaaaatgcgagtacccgtgtacttcgaagatattataacataagtaaatatcctcatatccccaaagggatatatgttgttcaaaaaggaaataaacatatatttgtctaagtacaaattgcgagtacccttgtatcgcttaagaaagtttggcaaaagtaatattaaagtaaaaagctaagcattgggagtagtaggggcagttggagtggtagattcatctgcgaatttgctggcagcctcgtccacaacttcctcagtgttcgcagcattagcatcctcgaggaaaagatttcctccacctccttgggtctgcgtgggtgacatggcttgaaaagccttagccatctcagccgcctctgccc

SEQ ID NO: 333396 - DNA, 1117 bp, Cannabis indica
ttgaacatgcaattcgcattagaaagcccatctctcctgctcggccgccttctcctgtgctcggaaaagggaaagctattatgtctgaaataagaggcatgtcagatgatgatggacttcgaggcctgcccgggcaatcatcttgcatactactccatcttgtttttaagcttcttgactattatgctttatgtttttggtgtctgttttctctaaccatgttgtttttgttccgtgcagacatgtctcagaagatgcatgatgctctgaagaagaggattggcggaagctccagcgcatctcctccagccaagaagtctaaaggcagtgaggggacctcttctaaggaaaagacacctgccggggaggtcatcgatctttctgaggatctaacggttgcaaacccctctactccaaaagttgccaagtctaaggagactcgaagagggagttcggacaggtctgaccaaccgagaggtgggtctgagctggtgcggacccctactccacctttgccagtgcttccaaaggccaagaaaggcaaggagatgctcgcccactatatgaaccggttggttcctgaggttagtgagcagttggccggtgcttacaatgactcttctcttgagctgttgatgggggggagtcttgaagaaattcacaagggtaagtctttcttgacgatttcatttaatcctctttactttgctcaaatacaaaagttttttctctgtgtaggccggtctgaagttggcctacacttactcccgggctaagtctgcttcttccaagaacatgactttgtcaaacaccatgagggcggaggtggacttggccaggaaggatgctgaagatgccaaggcggaactcggagctcttcggatggagttgggtgaagccaactagaaacttttttactgcccagaagaaaatagcttagctgactaaggatctcgaggcttctgaccgacttgaggagaccattgagactttatctgttgaagtgaacagccttcaagatgaaaggacatctcttcgagcggtccttcgtcgggtggaggaggagaagaagtctaaggaggaggagcttacggctgaggtgacgaggctgggagag

SEQ ID NO: 333397 - DNA, 577 bp, Cannabis indica
cggggttatggaatttgaccattttacccctagttttgagaaacacctaggttttaacttggagggcattttagtctttttaattaagagattaggttgctgagtttggtgttggcagctggccagtcaaagtattcagcttagattaatcctttcttgtttgaagaaaataaaaaattaagaaaaggaaacacatttctcttgaaactctctctctctaattctgctgaggcaaaattaggggaagggccatctttttctccctaattttctggaattaagctaaggattcaagtgttcttggagctaaggaaaccctagaaccttcggttgtgtgtttttaagcttttactttggtttcatgttgtgaaattgtgaattgggggctgttaaggttaggtgttgatgcaattcgaattctaggcttagtttgagttggttttaggtcctagcaactgattttgatgtttgatttaggttttgtgcaagtttgagcatagaaaccttaactttgatcactaatggcatgttttgattcactgagtttttctttggtttattggctggaatatgttgt

SEQ ID NO: 333398 - DNA, 710 bp, Cannabis indica
ttttgatcactgcattaagaagtagaaaagcaaggtcatggagatatggctctagtatgatgaagtctaaaataaagtgtttatgaaacattttctcatatatatatatatattattttgaacattttaagttgatgatgaacattaatgtatcgactttttttaatttcattaatttgacaagctcctctaatattcacacgtatcttttctgtgcctctaatatttataggtgtattgtttattcaaattgtaaactcaaataaaagatctaatatagctaatgacttcgcaaagcctaaataatttttgagtgtgattgggtaaactgtgcctaaaatacaataggctacggtttaaaatcgtggcctatactataggccacggtttaaaactgtgcttaaaacactataggcgacagtttaaactgtggcctatagtataggccacgttttaaaaccgtagcctatactataggccacggtttaaaaccgtcgcctatagtgaacattataggcgacggttttaaaccgtggcccatattattttcccgacagttttcgaccatcgtctattctacccagtatccgcgacgctcgtataggcgacagttttatgaactgtcgggaattctttgaccgaccgtatataaccgacgggaatttgagattttttagtagtgtatattccaggctataatcaaatcatga

SEQ ID NO: 333399 - DNA, 689 bp, Cannabis indica
ctcctcctgagttctgggggttttcctgagccgtctcctgcctcttggtttttgaacctcgaggcctagctcgcgaccttctcattctaggatcaggttggttctgtgtgttattttcttgtgtagccctggctgtggctacctccctttccaactcagcattttgttggtttgcctcagccagacattttcggagttggcaattttccaactcaactaacagtatgtacctagtgggatcataagcaccctcgctcataggtgtagaaccacccgcattagtgttggtttcctcattccctgtttctaggttttgatcattatcacgttggcttcttcttgaacgtgttgatcgtgttgaacacgtagttcttgaagtgggtggccttcatgagtccattggctcttttccaggatgacgattagtctcttcaggacgactgttgccattttccccataatcagccatggagaaaaaattctttcttctttggttaggagggattttctgagcttttatcacgcaagctctcaatgaaagcaccaaactgttaacgtagattttcgttaacgattatgagcctattttcgtaatatatttggtacaaaaattataagaaatttgggaaactgatacaaacaaaaaataacaccatgtttttatgtggttttgtagttaactctgcata

SEQ ID NO: 333400 - DNA, 1373 bp, Cannabis indica
ctcaaatttatcaccaaaaagtggtaaatttctaaatccatacaaaatggcacaaaatttcaaatgagctcaccaaaatcaatcttggaatattaaagaggttattcacctcacaaaatttcaaagagctctttaacctcacaaaaaatcttaagaaatggcaattttacctaaaaaattcaaaagtgcactaaaattgaagtccataaaaaaaaggcatcccaaaaagaggtgattcacctcttaattatcaaagcatcacaaaatatgcttggaactatgtttaacttgattcctgtaaaagaatacgtaggaaacttagttgctaagactaagtgcagtcgtcggtaccgcaaaatagtataaagcacaaatctcaaaattccataaaaggtcatccacctaggaatttttctaagttctcaaatagcaaagaatttctgaaagtggtcatctaccggaactcttatattcaaattcaaaaatatcgtattctgaactacaagtggcttgattcttcacaaagtaggtatgtaggcagctcagtattctgaactgctcacaaagaaggtatgtaggcacaaatctcaaaattccattaaaggtcatccacctaggaatttttctaagttctcaaaaagaagaatttctgaaaggggtcatctaccggaactcttatattcaaattcaaaaataccgtattctgaactacaagtggcttgatccttcacaaagaaggtatgtaggcagctcagtaaattaaattgactgagttcagctgcaattctaaatttcctccaatttttcccaaaatttacctcaaagttcaatatcatcgtaattggaatcaaaaggtgttgcctttaaacaaaaggattgtaattaaaagattattcttatgatcttggatgggtcaaacttaaaattaataaactcttatgatataaatttagcatatgtgaaattgtgttttgtatttatttttatattctaaatgtgaaatttttgcataacataatttttggcacgcccggtgagacccattctctatttcatctccaactatgatgactattatttaactttaactttatggtgctaatcatgtttaccattgtttcccctgatttcacccaatatacgtggaccaaccgaacagagacacgtggatcagataactaatgaatatttgctaagtctttgtatgccacaaggaaacaccttggacacaggtcccggaggaggcacccggagtacaaggtgctcccggaagctcgcatagcataaaacctctccgtgaggtgtcaggcttctcctgagcaatcaagtcgcatttaatgctgtatgggaggaagcgtgttgggactgcaaca

SEQ ID NO: 333401 - DNA, 1744 bp, Cannabis indica
attcaatcttgattgcaaaggtgatcatcgatcacaacaagtggtatcagagcaaggtgtttagctcaatcaagattgaaactcgaggacatcaagaaacttcaagaagatggctccagcaagatttgaaatcgacaagttcaatggagctaatgactttgggttatggaggatcaagatgaaggcattgcttgtccacaatggaatttcagaagcaattgatgaagagagtctcaaagaaattgaagatgagaagaagaagaatgagatagaaaccaaggcacatagtgccattcttctcagtctaggtgatgaagtcctaagggaggtatctagtgaagacaaggctgttggtttatggaacaaactcagttccatatacttgaagaagtccctggcaaataaactatatttgaagaagagaatgtacactcttagaatggatgaggggaaagatttgaggaatcacctagatgagttcaacaagatcactcttgatctctgcaacattggagtgaaacaggaagaggaggatctggcaattatactgttgagttctttgccaagatcctatgaacattttgttgatactatgctttatggtaaagaaactctaacaatgtccgaagtcaaggctgctttgaattccaaaagaaatccagaagaaaacagaggacaatcaaggtgaaaatggagagggtttgtttgctagaggaaagacacaaaagaaagacttcaagaaccagaaaggaggctacaagggaaaccagaaaaccaagtcaaaggatgactcgaggggaacaacagacaagaagtgcttttactgcaaaaaggaaggccattttcgagatgaatgcttggctttgaaggccaaactcaagaaagaaggcagaaagaacaaagagaaaggagaagctggtgttgtagcagatggctatgaatctgcagatgtgttggtggcctctaatgcagattctggtcatgaatgggttcttgattccggatgctcatttcacatgtgtccaatcaaggaattgttcaatgatcttgaagaaagaaagggaggaacagtttttcttggagacaacagggcttgtcagatacatggtactggatcaatcatgctcaaaatgcatgatggagtcaagaggaggattcagaatgtcaggtatgtaccagacctcaaaagaaacttattgtcaattggtgtactaactgaaactggttgtaaagttgaaattgatgacaagtttcttaaagtcatgaagaattccaaaacagttatcaaaggtgaatttagaaatgggctttttatcatgattggtgaaactgcttctggttgtgtcaacacagtttcatctaatcaagatattgaccaaactaaattatggcatctaaggcttggccatgtaagtcaaagaggtctattggaattagaaaagcaaggaattcttaagggtaaacttggtggtaagcttgatttttgtgaagaatgtgtttatggtaaatgttgcagacaaaaattcagcactggtaaacacaccactaaggaaccacttgggtacatacattcagatctgtggggtccatcaaaggtgacaagtttgggagggtcgagctattttctgagtattgtggatgattactcaagaaaggtttgggtgcacttgctcaaaaccaaagatgaggccttcaaaacttttaaggaatggaaaacattagttgaaaaccaatctggcaagaa

SEQ ID NO: 333402 - DNA, 678 bp, Cannabis indica
ggtcccctcaagtatttccttgggtttgaaattgctcgcgccaaaactggtctctttttatcccaacggaagtacacattacaacttctacatgacaccggttataccagcagcaagcctgctaaagcccctatggatccaagactaagattagatgacactgaaggagataccttagacaatccttcgcattatagacaactcattagtcgtcttctctacctaactctctcgcggccagatattacatttgctgtcaacacccttagtcagttcatgtcatgccctcggacaacacacttgacagcccttcatcatctccttcgttacttgaaaggttcacctggccaaggaattttctactccacagattcttcccttcatctctgcggcttctccgattctgattgggccacttgtcccaccactcggcgatccaccaccagtttttgcatctttataggcgattgcctcatctcatggaaaacaaagaagcaagcaacggtgtccaaaagctcagctgaggccgaataccgtgcactagccgccaccactagcgagatgacttggattcaatatcttctcaccaatcttcatattccccaaccaacaccagccttcatttactgtgacaatcactcggccatccatatagctaacaatcccacctttcacgaa

SEQ ID NO: 333403 - DNA, 916 bp, Cannabis indica
tgtacactgggaaagaagatccattatcccacctcaagtatttcaaaatgcaaatggagctgcaaggagcacgaggagatgtatgttgcagagtttttcctgccacactctcataggccgcccaacaatggtatttcaagttggcacccgaaaagttcaactcatggaaggcattctcctcggagttccatgcacaattctcctcttcttgccaacttctgttgcacttaggagatctggtcgaagtgaagtaaagaccacgagaacctatcagagcctatataagcacatttatgacggaggcaactaagtttgcacgggtgactaaagacggaaagttgtccgcgatacaggggggcattgaggttcttggtgaactttggaaggacatcaggaagaacgaaccgataaattcaatgagtgacttccttgaccgcgcagacggtttcattaagcttgaagaagccattcagcgagcagaagttgagcaaaaacctggccgggcaaaagcttcctctgctgagacatccgtccagctcccccaatacccaagcaattcaagctcaggcggtaaacagtccaacaacaataataggcaaaaaaataggaaaaagggaaagttcgctggaaaaaccgaacaagcccccaaggagaattccaccaagtttactgcattttctgtattgacagaggatatagaaagtatgtacatggctacttaatcattagccttgtacaagaagcccgcacccatgaagaaagatgtaagcaaaagagagatgactaagttttgtcgttttcatggggattacggccatgacactaatgatgcaacaatctgaagcgggaaattgaatttatgataagaaaaacaatctgcacgtacagaagtatgtcaaggccgatcaaaatcaga

SEQ ID NO: 333404 - DNA, 549 bp, Cannabis indica
atctttaaaagttttttaaaaaaagtttattctagcttattcaaaatccaaacgaaccaagcccaaataaatatttttttttttaagaaaaggatcatctcttttgaagtacaatagcttttacattcaattattttcttttttaagtaataataatttatttaattgtaaaaaaataaacaaatatatattagaaactttgaaaagattgcacaaaaaagaaaaactttgcatcatctcagctaaacgggttttgccatcacattattcaatggtgtaaacataaagtttccataaaacatagcatctttatttgcccatttaaacattttacaattttgtcaaaataaagttcataggtaataaatataacaaatgttcttattttatagggaacatgtcataatatcatgagtagttcagctcaatacttccaaataaaattggacagtgcaaattttacaagcgagataattaattaaaattgaaacgctattagtatttttttaattcttttacacaaaactgaatccttactgtatcagattt

SEQ ID NO: 333405 - DNA, 672 bp, Cannabis indica
gaagatttgggtttgatttgtgttgttgggggttggaattttggttcccagaccagaaccggaattccggttcctgggagcctgtgtcaaccggtcgaccggttggtcccaggaaccggacttccggttgggaaccggcctgccggttggggcatttttcccgaaccctagtttttcccgtttttaggtattttagggtattggcatccttttcatcgatagggttaagcttagtttgcattttaaatccccgataagtgttttagcgagtctctcatcggtttttgaatattatggtttagggccctgttatacgtcgagctgcacttccactcaggctgaccggcacacttgagcacggaacgaggtaagatagcgtaagaatatatatatgaatgtttatgcttgttttggatgttattataagtacggtgttaccaacacgagtacccagggtacgtcgtgttcgtggtacaacacttagtaattctcgggagtacaatcagggctctaccaacacaagtacggagttggtactttagtgcatttggtatagtagtcgtactacccttaagaacgttcttaatcatttggtgagcttcgttgttaagctcagggcagcttgatcataaagctggcaacgtgctacttttatatttcttgcatatctta

SEQ ID NO: 333406 - DNA, 647 bp, Cannabis indica
agatttttggtgacatttggcacatgaagaatgtcttgcaatactaaagaatgattgggaaaatgagtataaactgaaccagaaccaatttttctaatgggaattgaggagccattacctactactaccttagccttgcctttgtagtctgtagcagtaggaagttgatcagtatcattggtcatatgatgtgttgcacctgaatccaaataccaggctgtggagttgtcgaagttggtgtttgactcagaaagaagagcctggggtgtttcagtggtgggagggtttgaggaggagttgttggtgttgttgcctgtgtaagtaatgtcaaaacggtggtagcatttgacagcaatgtgcccagcacgaccacagagttgacaaacaggtcttgtgccacgaccacctctgtttgtgggattaaatcgtcctcctcgattggcacctctgaaaacacgattggaagatgaacctctggtgctggccatgttggcttgaacattgtgcaaagattcagtggtatgctgctggattcgcatttcttgactttgcaacataaattgcacttcttggagagacaaaggttcgattcttgatgttaaattgactaccacagcttcgtactcggatcctaaacccccaagaat

SEQ ID NO: 333407 - DNA, 695 bp, Cannabis indica
tgggccatcaactttaagtttgtagttgctcatctttcttcgatttcatcaagtgattctacaaggagtatgtgattcgtaccttgatcgtacattaatcttctgtgggaaggtggctcgagttcgacgggcagcataacttcataaccgtacgccattgcaaatggtgtctgaccggttgctgttttttccgttctacggtatgaccatagaacttcagggagctcttctggctagtttcctttggcatcttcgagtttcttctttagtgtatgcttcaaggttttgttgacttcttcaactagaccatttgcttgaggatgcgccactacaaagaaacttttgatgataccatggttcgcacagaaatcagtgaaggattgactgtcaaactgcttgccattgtctgagactattttgtacggtagtccgaaccggcatatgatgttcttcacaataaagtcttgaactttctttgatgtaatggttgcgagtggtttggcttcagtccacttagtaaactagtcaactgctaccactgcgtactgcactccgcctttacctttaggtaattgtcagacaaggtcaattctccaaatggcaaagggccacagactttgcatctgtgttagctcgttgggcggagctcttggtatctttgaaaatctctggcatttgtcacacttcttaacata

SEQ ID NO: 333408 - DNA, 663 bp, Cannabis indica
atggcctcctcaagcttgatgaagctatctgcacgatcgaggaggtcactcatggaatctactggtacgtctctcttgatgtccttccaaagatctcagagaacttcgatgccccctaatattgtggttaatttcccttcttcagctaaccatgccactttcatcgcctctgtaatgaatctgctgatataagctcggagaggttctcctagcctttgcttcacttcgaccagatcctctaaatgcaacgggagttggcaagattaagataattttgttggaatttcgaggagaaagccctccacgagttgaactttcttggtgtcaacttgaaacaccattgctgggcggcttttgagagtgtggcaggcaaaactctacaacatacatctcccagtatacatcttcctggtaggcatcttaaacttgtgaagcaactctagaacatttatctctagagaaaaaggagacccacgtgctcggtccaactctagatcgctgttcttctgatcggccaggccttagaacatattttttagtccatccaattgtgcctgcacggatagatgaacttgtttggcctcttggccgaccagggtcacatcaggatctctttaagccagattttgagcacgggccccaggctgagtggctggtgagaca

SEQ ID NO: 333409 - DNA, 750 bp, Cannabis indica
agaccacagggcgagcaagtagagcccggggctgcctgaaccgattcaccggcaccgcctccacctccgtagaatccgagggataatgcgggggttggcaatgctaatcctcctgctgactggcagcagatgttccaagaaatgcaaagtatcatactttgtctagaagaagagttgcaacgtttaaggcaaccggctaccctagttgatcaagggttaccaccagcacctgtgccagtggtgggtaaccagggatttattatgctgcaccgagattcagtgtttgagcggttagtgaagctgaaacctccgaattttctgggaggtattgacattataaaggttgagtagtggatgagcattcttacccgtatcctcgataatatgggggtgacgggaactgaaagagtgaattgtgcggccttcatgttagaagaccatgtccgtgtttggtgggacatagtgggtcagacccgagacgtcagtgtgatgacgtgggaagaattcaagaaactatttgaagaaaagctttataatgttgctgtaaggacttcacattaggaagattttgtgaagttgactcagggaaaaatgtctgtggccgagtatactttggaattcgatcggttatccaagtttgatggggatctcgtgcccacagatttcaccaaaaaggaaaagtatgtttgaggagtgaatgctacaattgtcgggacttgaaaattatcacatcacatgacactctgtata

SEQ ID NO: 333410 - DNA, 1084 bp, Cannabis indica
agaatggcctgtatttgtttgatgcttcccaactccagtttcattgttcaaaaccttctagtcaaccaagttcgaatctctctttttcacctactggtgtcacagctgaagtcaatacttgttccaattgttctcttaataatttctctcagtattctatttggcataacagacttggacacccatcttctagggttgtccaaactgtgctaagtcattgtaatgtgtccttgaataatgtagagagcaataagatttgtactgcctgttgtcttggaaaaatacacaagtttccatttcctaaattctctgaaactgagtatacacaaccacttcagcttgttgtatccgatttatggggtccctcccatactctctcatccaatggctataagtactacatccatttcatggatgtgtactcaagattcacttggttatatcttttgaaaaataaatctgatgcctttaaaatttttcaaaatttcaaagctgaaagtgaactacaattaggcaccaaattaaaggttttacaaacagattggggaggggaatatagaagtttcacaccatttctgaacaagcttggagtcattcatagacatccttgtcccacaacacatgaacaaaatggattagctgagagaaaacatagacatattgtggaaaatggtttaaccttgctagctcaagcatctatgcctcttaagttttgggatgaagcttttagagctgctgtctacattcataataggctacctactcctattttaaataacaagacacctttagaagttctctttaatcaaaaacctgactacctatctcttagaacttttgggtgtgcttgtttcccaaatataaggccctataataaacataaaatggagtttagatctgccccttgcacattcttgggctatagcctaaaccataaagggtataaatgccttgattcaagtggtagaatgtacatatccagggatgttatttttgatgaaaattccttcccttttcataaaatctctactgctactgccttaccaatcaattactctcctgagtttttcacttctggcattat

SEQ ID NO: 333411 - DNA, 1199 bp, Cannabis indica
tgaaaatttggagatgttatttatatggcctaaagtttgagttatactcagatcataagagcttgaagtatcttttcactcaaacggacttgaacttgaggcaaagaagatgggttaagtatatggaagactatgatttcactttgcagtaccaccccgggaaagctaatgtagtagttgatgcactaagtagaaagcctcatagtactttggcatgtttggctcttgaacaatgggtgattataacttgcaatgctatgaaggggaagaagtagcttgtatctctaacatagtggctacaccagtactacttcaacaagttagcaatgtcagtggcaagatgaaaagctaagacttatttggaaccgaatcatggatggtgaacaactagatgggtggacagttaatagtgaaggatacctataccatatgggaagactggttgttgcagatatccctgatcttaaggagtccattttaattgagccccatatatctaagtttgttgtacatcctggaagtacaaagatgtaccaagatttgaagagacaatattggtgggaaggtatgaaaagagacgtgtctagctttgtagctaagtgtatagtttgtcagaagttaaggctgagcatcatagaccttcaggtttacttcaacctttgcctatacccaaatggaagtgggacaagattacaatggactttgttaccggattgccattgacacctttgaagcatgacgttgtttgggtgaatgttgatcgtttgactaagtttgtccattttattccaatcagaaaggattataagcttaccaggctagctcgactttatgtagacaatatagttcgactacacggagtgccttcaagcattgtttgtgatagagatcctcgattcacatcaaggttttggaaggccttacgacaagccttaggaactatacttcacttgaaaactgtccatcatccgcagacagatggacagtctgagaggaccatacagactttagaagacatgctttgctcttgtgttctggattttggaggtagttggggagaacacttgtcactgctggaattcacatacaacaatagctaccaagctagtgtaggcatggctccttacgagaccttatatgggagaccatgcagatcacaattgtgttgggcagaaccagatgagcatgtcactattgga

SEQ ID NO: 333412 - DNA, 543 bp, Cannabis indica
tagtagaggacatggtcagatcaagcatcaagtttgttgtaggccaacttcataaattgacgctgcaatctgatctgtttgaacgaattaaagctgcccagttaactgatctagagttagtgaagatcagggaagaggtttcagctagtcaagtcagagattttacagtgttagatggtgggatgttgttgtttaagactagggtttgtgttctaagtagtgcgaaacttagaaaggagattcttgaagaggctcataccactccatactccttgcaccaccaaaatgtaccaagatcttaaaccctacttctgatggagcgggatgaagaagaatgtggtagaatttgtatctcgatgcttaacctgtcaacagatcaaattgaacattagaggccgacaggtttgttgcagcctttgacacttcctgagtgaaagtgggaggatatcaccatggactttgtggttggattacctagaaccacgagtttatttgattcaatttgggttgtggcagatcaattcacgaagtctacaaattttc

SEQ ID NO: 333413 - DNA, 814 bp, Cannabis indica
gttgttgcttggatcaaagcttagtttggtaatctttgtgcttgtgttgaggtagccattttaattggtttaatttaatttcagctgctgaaataagattgaaaaacatgctttatgtgtgaatatgttcatctttgcatgtttgttggattaaggggataatcttattgtttttggcatgtatgtgttgcaaagatatggaattgttcctaatgattttaaaggcatttgcttgagttatattgagaataaatttgtgtaaaaatgctgatttttatggtttggaagctcttgaattgggatttttgctctagttaaaccttgctgaaattgaagatcttgatgcatattttggtgttgttggagagtgaattaggtgtaattcttctctaattatttgatttatgataggtgaaagtttattatgattgtgggatggtttagcatgaaaattggtgtttttagatgcatttttcgtggctggaaactgggtttcctgggttttaaaacccagtagccgcgaccagtttttggcagcttattgtaattttttttcggatttttgttttgaccataacttttgactcgggactccgtttgggatgttatttatattgttggaaagctcgttccgagctatatgtgaatatctataatttaaatgccaattttataatttgtgaaaatggatttagggattaaccctatacttgtgtatcccgggtttgtgactaggattaccggtacttagtcaggagcacccggggatttggaatctccatattttgtgcgacgtcaggtaagacagtagtta

SEQ ID NO: 333414 - DNA, 584 bp, Cannabis indica
tagcctcagacccaaattgagactggaacttttggccggacacggtcgtgtacccagaccgaaactaagactcgaacttggacgtaaatctggaacccgatcccgaacacagacttggacatagatcgggatccggatacaaacctggactcagattaagacccagactgggatggaaatgctggacctagatctagaccgagatcctgaccgagacccaaagtttgactggcacttggggcccaaactcaaacccagacaaggattagagccaaggacttagacccacaactgaatccagacccagatctggattggaactttgtactcggacccaacgtagaccaagacgcaagacgcaaacccacacccgcagcctgatctggacctagactaaaattcaaacccgaacccaaactcagaccaagactcgaactccgaccgaaactcaaacccaaactcgaactcagaatcaaaaatggaactagaactgaactaggaataggaccaggaccaggacctaaacccaaagccgaacccagatcaaaacccaaatagagacctaaacccgaaccgagactagg

SEQ ID NO: 333415 - DNA, 775 bp, Cannabis indica
ttttctaccagttaaacctttacagtggattagtatggagatttgtacatcaaggagatagtaagattacatggtgtaccaaagtctatagtttcaaatagagatccgaagtttaattttgaattctagcagagtttacaacgggctatgggtaccaaactgaaattcagtacaactttccatcctcagactgatggacagtccgagtggataattcagatactagaagatatattacaagcctgtgctatggattttgaaggctcctggagtaagtatctaccactaatagagttctcatacaataacagttatcaaagtacaatggggatggctccctatgaattgttatatggcaaaaagtgtagatctcctgttcactgggatgaaacaggggagaagaagtatctgggtctggaatcagtgcaatagactaatgaagcaatagagaaaattaaagccacaatacttgcctctcaaagtaggaaaaagagttatgtagatccgaaatgtaaaaatgtggagtttcaagtaggagatcatgtgtttctacgggtgtctccaatgaaggggatcaagagtttcaagaaaagaggcaaattatgcactagatttataggacctttcgagattcttgagaaggttggacaagtggcatattgtttagctttacctccatctctttcagcaattcacaacgtattccatgtttccatgttacgaaagtacatttcagtccctactcatgtgctgagttatgaaaatcttggactgc

SEQ ID NO: 333416 - DNA, 502 bp, Cannabis indica
gaactcagccgagaaaactcggcgtgagcagggtgcatgtgcgggatttctcagcgccagcagccttcagacacggaatcaacagggtgctccgtgtcttcagacaggggtgatgtccaagctcacgcgcgcgcattccttgttgtccgagtgcctagtgcactcgatgcacccactcaacacccaattttcaaaagttcatatctttttcaatttttatcggaatcgagttccgtaaaaaccaaaattgcttaatttttcacaaggaatccaaataaaatattttcagaaacagaaaaaaaatatttttcatggaaaaattttgtacaacacatacattcatcaaataacacataaacaacatgaaaccatccaaatcaacacacatcatcgttttaaattatatttaatgaaagtaaatcattaccatggctctgaagctagttgttggaaatattttactaggatatagatttactaacaagtatgtttcattaacatc

SEQ ID NO: 333417 - DNA, 831 bp, Cannabis indica
tccaatcaaacaagttgttcatccacaagaaaagcgttctcagctacttcatgatacttaaaaatgtgcaatgttactcttaacctgattgatataaatttgaaaacacttttattgattaaacctcaagatttttgctttttggtattacattatatcttttgaatatggtttgagctttgagaagtacagaaattaatcactttagtcgaagctattttcacttcaagatcatataattaaggaggtaactttaggtctggtagatctaattttcttaaaggtttctaatttttaaaatttgacatattaatttaatattacgaataaatgtttgatttaataaaaaatacaacatgattattataatagaatgtcaaatgttataaataattatgcaccctactaattaatcatcaactaactaataatcactaacaaggttgttgggcacttaaaatgtgtaaaatgaataatttattatattaagattacgtaagagcatttctaatgaagagctataaatgtagtgtattactattttttagaacattttgctaaaagttaactttaatagtaatgtaaaatgtatgccaaatttgacccaagttaaatattgtgccaaatttggtacaaaaaatagcgtgtgccaaattttagtccacaataaatgccactttttttaattacctatttgccactcattaataaaaaaatattattttatatttataagttaataaaataatataaataaagtcaattgtttgtatattttcaatgagtattaatgatattattgattttttttattgcttctcttgattttat

SEQ ID NO: 333418 - DNA, 848 bp, Cannabis indica
gattttattaagctctagggatattatttgacttatatgtgaaatatattatttttgtaatttttgctcagcgacaacgaaaaatgcgatggatggctagtttgatcacatgggtaagtttagagccttatttcttagtgggaaatattttagacaaaataaatatcgaggttgtgcgggattatggaatttgaccattttacccctagtttgcgaaatacctaagtcgtaacttggagggcaatttagtaattttatatttaaggtgattaggtggatgcctaatagatgacacctagcattaattatttcagccaaggttaaggttttaacctttatttcatttacagaaattaatggaaaaatcaaataaaagataaaaaaaaaatagaaagagctctcttcctttccctctctctcttcgaatcagcccaggacaaggggaattgctgctggtttttgggtgtttcagcagggattaaaggatttcttagccaaggtaagccctatcttctctaccccttaattcttgaagttctacttggtttaaatatgtgatttgagtattagtggatgttaccgctaggttaagttgtagttcgaattgtagtgttaatttgagttggttttagcttaagctgattttgatgtatggaatgggatttatgcaagtttcggtttgaaaaactaaactttggtctttaatggcatgttttgatttagtgggtttttctgtggtttattggctagaacatgttttaatttgacacgtttttcaagaaaattctttgattagcaaagacaatactgtaattgaaaaagcactgtagcgtgccttagtattaggg

SEQ ID NO: 333419 - DNA, 1560 bp, Cannabis indica
cgccctaatgctaaggcacgctacagtgctttatcaattatagtgatgtctttgctaatcaaagaattttcttgaaaaatgtgtcaaattaaaacttttatattaattattaaacttaataatttacaaaactatttacaagtatcgggatcccgtttaaaagctttcatacacaaaataacaaaatacattactggtcgcataacgactacaaaataatattcccagatgtcgcgagactgaacactccaggttgcgctgctttgacatatacaacttcatcccagctcaggctcactcctgttcagctttcgccttacctttacctacacatggaagtagaactgtaagtcgacagactcagtaagaaaagcatataacatatcatataatttccgacttgtatctaggcgcccatacacctatttacaaggcttaagagatcagtaagaacgttctagcaaggatatatgaccatgtaccatgtacaacatgcactcagtataccttcgtactagtgtaggtaaggtatggaccgcaccttaagtattgttaagtgttgtaccacagacaccttgtacctttccgtacaagtgttgtagcatcacgatgtactttcagacatcatacactttaccaatgctctctgtaccgcaaccgtacaagtgttggtattatatgaatcacaacatataagcatgcatatacactaaacatatacatacattcccatatccatatcacacattatatacagttcttaccttctttccagattcaagtgtgctggtcgacctgaacggaaagtctcgtgctagatggataccctaatcacattataaaaccgggtaaatcacatgatgaaaaccctaattcgggaaatccaaacctacaactttaggttctgttatactctctatgaatcacactaactcaagaaacagggaaacacccaactacggcactgaaatggacgagaattgagaaaactaatttttcggggaaccctgccaaaaccagtaaaccggtttttataccagtctcctcaaaaactcaccgatttgctcaaaacttgtccaattgccaccaaactttccagagtacctaaacaatgtatatacaacatattccaaccagaaaatcacagaaaaacccaatgaaactcaacttgccattaaagaccaaagctttgagttcaaaactcaaatttgcataaatccaaccccatacactaaaaccagctgcaagaagcttaaaccaactcaaatgaacccttaaaatttgaaccctaaacacttataaccctaacagctatcaattctcaaaatcatatactcaaacaaaaaaaaacataaaaattaaagaagggtgctactagggcttaccttgggttcaagaacctttgaatccctactgaaattccagaaaaaaggttgaattgaagtgatcctcctctggttttttccctagccgaaagagagaaagagagagagagttgtattctttagtttttctttaattttcctttattttcttcaaatgaaaagagattaactaatt

SEQ ID NO: 333420 - DNA, 1187 bp, Cannabis indica
ttttttgagacgtctttctatttgcacacctatcttttcgcgtattggtgggatggttagttttcgcgagaattcaaatcatcctcccaagacgattttatagtctatatgcaggtgagatcacttatcttgtttttcacacattcaccacgctgaaaagatcttctatctttcagatgagcgacctgtcggatagtcagctgcttggctcaggaggcaacgcgtttgatggtgacgaggaccaaagggaagatagctttatcccgtcctcgatctcagaagtggagatcgcaactactggaggtatagaattaggtccgatgtcttccgtagacattgagagaatggtccaggagctcgctaaactaggagccattgaaattggagacagcgaatttacggtgtcagcacgcgattatgttgtccattcccatgcccctgacgtcgaggtcgaggagatggatgatgattgggcggccccagctcgagagtttggcgaggaagaagaagaggcagaagggagtgggactgattcggtggacaacactcagctgaacgaggccttttcatgcgaggacttggtcttgagggtcaccaaatcggatcttactacttttacgagactgaacctcctgcgactcgcttctttgcgacctaagtctactcagagggcgcacctttcctttaccaatccagcgattattcccacaaaggatgtggtagtctcaatacccattcttccatgtggggtatcgatcccttttcaccccttcattgcggccactctcaagcgttacgacgtgtctccattccaattgacccccaacagtaatcgcacaaccttagccttctatgcaatgtatatggagtacgtacatagggcacccacggtagaagagttcagctacttctatgatataaagagcgtaggcctccataacggtttctattgcttcaacaaatgggccacctctgagattaatggggtagaaggcatggtttccaatatgggagattcgaaatcgaagtggttttatatattcaaagttcctgggattaggactgactttaatcgtcgacctagtatgtcgcatgtttcctgacttagttattttttgaattattttgagatttcatgctaactcactcttttttgttttcgcagatagaccagctcgacctgcact

SEQ ID NO: 333421 - DNA, 1217 bp, Cannabis indica
tcctctccttctcttctttgtgttctccattgttcttgttgaataaactacgatcaaaataaaagagaaacgatattaccaaatgaaaaacttctgggttgagtcgcggattaggtcgctttctttaagacgttcgtgacactgcccaggagtgtgcaagcagtcagaattcgccggtcgtccccaggataaaatagcccagtcgtactgtatcggaaccccactgcactgtagagcaccatcgaatacacccaaatatatttgataccgtagacgaaattttagtattaataaaaactgtatttttcttagataagaaaagatgtattcttcccatcagttcaatcgcactatatagacgaatggattgaaaaatcataacgggaagaagaacgttttctaaatcgtggggtgagttggtttgaacgtgtcccattaactgatacgactaagtaatcagttttaattaaacatgtttcttaattaaattaaaaataaaaaataattattttattaaagaatttttttgttaaaaataacatagtgtcacaccataccaaccaacccaacccagtttggatcgggcggacggggcgcgcacgcgtgtgtggtgggtcaagtgtgtgagtcctcacccattcgcacaaaactaggtaccccttggggcccaaacccaaatgccaaggttgcactctttatacctttataaataagggttcatatcccatgtgggactttttccacttcacacacactagaacacttatatattttgttaaaagattcatcaaagttctgacaatctcccacttgaatttttaagaaaatatttccatcttctagtatcatttagtaagattgagcataaataaatgtatctttcgatttgaacatctgtgtagtgaatacaatttagattttactagagtgacccgtagttttgaactctatctctaacatagtaccacgcaacaaccttttcaagggtgtaatcaaaagcttgtgcgttaatggccatgcacgtctatcccagtatagtgaatgctctagaaattttgcccgaaatttcataggagcggccccacttccacacttcacataggtgactctataaagagtactcccatagctcggtactgcactcaacttggagtatagatctcattaagagttttctattaactcagccttaaagcgcttcaggattcatgcttctc

SEQ ID NO: 333422 - DNA, 1142 bp, Cannabis indica
cggggttatggaatttgaccattttacccctagcttttggaatatcccagttttatgtgtaagggcattttggtcatttggttaaatggtaggataggtggctgccctagcttggtgacacctttcaacctttttctcagccaaagataaattaattaggttgttttatttagttaaaaagaaagagggaaattaaaagaaaataccaaaatttgagagaaagctttgatcaagggaaggagctgctgatttgttgtgttttcagcaaagaattcaagggggaatcaacctaaggtaagccctaatggaacctttctctagttttcaagttttgagcttgtttgaaatagtgaatttgtgatatagtggctgttaggtttaggtaggtctagggttcgaattttagggttcttttgagttgattttaactcctagcagctggttttaatggttgttgttggttttatgcaagtttaagctttgttcattaatggcaacttgagtttcaatggtttgttctgtgattttctggctggaatatattgtgtatacccttattaggtactctggaaggttccattgaatttggtggagagttgaggaaggaatgagaggctttgcgaactccggtgcaaaccggctagccggttttggcaaggttccccggggctttcattttctcaatttttgtctttgcggtgccttggttgggtgtttccccatttccaaagttagaataacctatagaaagtataatagaacctagggttgaggttttgggtttcctgggattagagttttaatcatgtaacttacccggttttaaaatgtgattagggcatccatctagcacgagactttccgttcaggtcgggtagcacacttgaattcggaaataaggtaagaactgaatataatgtgtgatatgatatctgaatgtatgtatatgttatgtgtatatgcatgcttaagttgttaaatgcactaccaacacttgtacggttatggtacagagtgcgttggtatagtaaatattatttgtgagtacagtacagtgataccaacataggttcgggaaagtactaaggtgtatggtatatcactcagtggtactcaggttacgaaacaaatcctaccaacac

SEQ ID NO: 333423 - DNA, 550 bp, Cannabis indica
aggaaccgtgaggacgagccggtgaagattgtacatgtcggggcagttaggcctggagcgtacgatcctcgagacagcagcgcttttgtagttagtcgctaggcgacaaggaacttgtattagacagtttacttttgtaaagtattttgtaatcaggatcacgagtatttttgtataaaatattttataagtttaattaaaaagcaaaaattttaattaatcacgttttccataaacctcgttgattagcaacgggctgcacagtacgtttaaaaatcacgtaatacgcctatgctagttagggtgtaacaagcagaatactttgcacgaggacaccttccgaaatccttgggacctgaacatggaccctttgacagattggttcaactgcttcgtcgggcccaccttagctcccttcggctcggagatgaccaggaagtttgtctcccacctgactcagttcccagttaaaagatatgtggcttgtgcctccttgaactcggtttaccacgtccaagacatcagctctgccatggccgcggtgagtact

SEQ ID NO: 333424 - DNA, 831 bp, Cannabis indica
gagggccaacataccgaataggtctgaaagaattatgacctggtacccaagggtcaaaccaaacctgactcaatgtccatctccaatcttccaacaaagaccttcaattaacaaatcactctcccaaaatgataccctgccaagtcattgatggtaaattaccatagcttgcttcaaggaaggagtaattgtactagtatcgatgttggagtaatctgttcaaaagagattgtggcttttaaagaatcctccaagcttgcttagccaataaaaatagattgaagtgaacaaaagatctaaattcatatcaccttccaatttggatttgcaaagtaaattccaactcttccaatgtatattagaacagtagcattcgaaaccaccaaaaatttgatattatagactcaatctgattacaaatattgatgggtaaatgaaaacaactcatcgtgtatgtgagaatagattgcaccacttctttgagcataacttcacgaccacccacagaaaagagcttttcatgccacaaattcataagtttccaaaatgtgtttcttaatgttgctaaagagttgtttcttatcttttccaaaataagatggcaagcctaggtatctatcatggaaatcagaaaataggcataacaagttgtttatgaaaataacaatgtattgctaaggtggtattagatgagaaagacatcacaaactttgcagtgttgagaacttgactagaagcacgatgataaatatctagcacccgtttaatgcttggcacaaagcttagtcgcttagccaaaaaagcaagttgtcgtctgcaaacacaagtgcg

SEQ ID NO: 333425 - DNA, 975 bp, Cannabis indica
ctaacaacaacattatataaatagatagattatggggttctatctcaaaatcattgatgatgagtggagtagctcattgctcaatacttttacatttaatccatgtgggacaatgttctccaatattcccctcaagatggtggttatttttgctcaccaattttgaatcaacttatcacaagccaagtcatttgctcgcttatttttgttcagatatcaagcgcgtctttgcaccatctggatctcgtgcggctgactaactatctagataattatagatcgaaagcccgcaagagatatgactttgataccatgttgagaatcatggagttccatctcaaaacaaattagtaatgagtggagtagcccatggctcaatacttttacatttaattcatgtggggcaatgttttccaatagtctccacatttctaaagtatagaaagacaagaaatgcaaagaaagaatgaaagatgttggaataaacccccttattaactgtacactgtaaaaccataatatacaaagggattacaaacagtaaaaatcttatgtggccttcggcctctaagttacctagacgtagttgggttagttacaaagtttattaatactttgtaactaactctcctatctttatgctctaatacatcacatataaaaaaaaccaagagaaacaacattttgacagaggcagaaaaacacaactcagagcagtcctacagaattagaaaatcagaagcataacaatatataacaaaatcaggtctttttcacagtgaagaaacagattgtttttggggagttttggaggaagcttacaatggagtatgctttggaacccaagatgtggttcagatatccaagatctcaggaagattgttcatgcaacaaagaagaaatacacaacagttagtgcaaaatcttagagaaacagagagaatagagaggaagaaaatcattgtaatatattca

SEQ ID NO: 333426 - DNA, 556 bp, Cannabis indica
aaagacactattttcttaagatatgaatacaatttaaggcgtatgaaagatatacaagacctcactgctgtaaggtgtatttataaccaatatatatcttattgacagctcacacatggcttgaacaagaccacaactcactagacaattccctaaaatagatctttaatcagtccacaagaaatctgatcaaatattttagaaaactcacacaatatcatattaacacagctggatagatagagaaagaataagtcaccaaacctactctttataccttattttctataaatagaaaagctagacaacgtctttatttccaaatatatataaattaattaatacaaaatataaaagtcaaatacacaaaatatgaaaaccaaataaatactatagtcgaaattaagtaataaattttaaaatatttttgtcaaattaaagatgccaaaatagaattaattttggcactttgattgaaaaaatattttataagaagaaaacctacatcaagtgttagaaacaaaaataatagagtatagaaaatactccccctgca

SEQ ID NO: 333427 - DNA, 1142 bp, Cannabis indica
acttccctcccaagcttaaagccatataaatgtgattcatactcactgggcaaagggtcaaaaatctatctaagaattcatattcagagatattattgtaagacctctaagaaaaggaatcattctccttattcttaagtcaatacaagctaagaggattaggctatcacaaaaatgctggggactgaatctctataaaattcctgtgtctttatttgctttattatttgatctacctattatactactttttctcttacaaattagactcactatcattggctaaaagcaaggtcaacattttttggggcttttattgagagcagaatcaaggattgctctttatctcaaatctaattgtaaatacaaaggtggtacagactcgcagaggcatggttgatggctcagcaaggagccattgacgaccagacaagataggctaccgtactaatacagaaagcctatcaagccatcgggcaatagcctccaaccgtcatccccctgggcgagacagatgaagatccagcgatgaacacctctcagactataaatggtcagccgcccaatcctcggtcacaggttcgacctgtgggcctagtggtaggccggtagaccttgtctagcaattcattaggaaaagccatacccaataattctaaccaagttaatggtgccggccaataaattggccaaaccaaccagtcactaaggcagccaggcgtttctatatttgatagattggagacaactcaagatatcaaaaatgatctgaacaggaggagaggattggacgatcaacatgacgcgccaatcgtacattccgaaacccgcgctaaaaatcctgctcaaagagatgctgatgtgacttaggtcggccaagaggctgaacaagttagtccaggcatgcaggcacagttggacgaacgaaaatatatgttccaaggcctggctggttagacgaaaaacgatctcgagttggaccgagcacgtggaacccctttctccctcaagattaatatcctagaattgccccacaagtttaagataccaacctggaagatgtatagtgggaaggaagatcccttatcccacctcaagtatttcgagatgcaaatggacctgcaaggagcacgaggagatgt

SEQ ID NO: 333428 - DNA, 601 bp, Cannabis indica
aataacgtacatgaaaataaaaaaaaattaaactaaaaattcttctaaatgccgaaataaatagagggtacatcaatatattctttttaaagaaaaatattacctataatatatttggtatgatttcattaaaaaataaataaataaataaataaataaataatctgtactctttcttctgtgcctcctcttgcaacttataattaactaaaatacacataatattactttccaaaaaaataaaataaatacacatgattaagggtaacgtggacctccccaaattgtggagaattttgtttttaatttgtatgttttttcgtttttgcttattttttttttttttttttgtctttttcttaatttttttaatttatagtttgttcccactcttaatttctttcttatttgttttggtccccgtcgaatcctaataagtttggtctcctcattatttatttatttatttttgttgagggcgaccatcatatttagtgcttcaatgaataaatatgtacgctctatattgttttgtaagtagtatgtagtgtctagatctaatgctgggatcttctctatttgataagataagttttctctt

SEQ ID NO: 333429 - DNA, 511 bp, Cannabis indica
cctcctcagtgaaataatacctataatttttgtcaggtctttatcctgtcaaatgccttttggaacttaagagcacactctaacatcaaataagtagagttccatcttgtaggcacatctaaacacaatagccccttacactcaatatcttcagctttgacacattctttaaatgccaacaaccttgatggtgatgatcttacatatttcacagcatttcttatggcagcaattgactcatttttctcctttagcccatcagttactatcagattgacaatatgtgcacaacatcttaaatgcaagaactctccatccaaaattatagcatgccttttgctcttgaattttctcaaaacatactcaatcgcagtgctatttgtactagcattatcaactgtaattgtgaaaatcttatgaatcccccattgattaagacaactttcaatctcagtccctattgtctcccctttatgatcagtgatttgacaaaagttaatgatcctttttt

SEQ ID NO: 333430 - DNA, 537 bp, Cannabis indica
agtgtgagatttatactaatcatcagagtctcaagaactttttcacccagaaatatttgaacataaggcagaggagatggctggaattggttaaagactatcactgtgaactactgtatcaccccgggaaagccaatgttgtggctaatgctttaagtagaagaggtgccgggcaggtttgtaccacggttttgatagcccctcaactaacctctgaaatgtttagtccagggattgagtttgtagttgggaagttactcaacttgacacttcaatctgatatgttagagagaatcagaaaagttcaactagaagatcctgagctagtcaaggttagagatgaggtaatggctggtcgacctagagacttttaagtcttgaataatggaatgttgttgtataaagcttgggtttgtgttcctggtattaacgagcttaagaaagagatactagatgaagctcataccacaccttattcactgcatccgggaaccaccaaaatgtatcaggagttgaaaccctacttctggtggtatg

SEQ ID NO: 333431 - DNA, 744 bp, Cannabis indica
cacagatgctaagcccattaacaattgatcaccaacaacatgggctaacacagcaaagaactatccaatcaacccaagttttaataaaaccaataaaatttaatgtaagcccaaataaaagtctaacagaagactcatccatatttgtctcattttttttccttaatgtcttcatatgtagtatatatatatatttatatatctatatatttttgccaatttattttatttaaatttatttacgagaaaattacacattttataaattactgtatgcaagaataccttttttttttcgaaaaattcaaaaattaaaaaaaaaaattggaaaaaatagaaaggtacgtaactagttactctttagagtaaccaattacctccttaaagttagggccgacaaaatgggtcagacacgatgatacgactcgaaacccgcacgagagttagcgggtttgggtttgccttaaatgggttcgggttgactcgtctaacccgtttaataaacgtgtcgtgttcgggttgacttgtctaacccgtttaataaacgggtcgtgttcgggttgacacggctaacacgaaattgacccgttaatgacctatttaaagttattttagtactttaacgtgtcataaatgggttacaaacgtgttgaatacttcataaacgtgttattgattgacatgtttaaacaaatatacttataaacgggttacacgagtcgtgtcgtgtcaacccgtttataa

SEQ ID NO: 333432 - DNA, 602 bp, Cannabis indica
gagggccaccccgtggcatttgagagccgcaaactttccgaagcagagaggcggtacactgcgcaagagaaagagctcttggcagttattcattgtttacggacgtggaggcattacttgctggggtcaaagtttgtggtgaagacggacaatactgctgttagtcatttcctcacacagccaaaactgactcccaagcaggccagatggcaggaattcttggcagaattcgacttctacttcgagcacaaggctggacgtcttaatcaggcagctgatgcccttagtcgtaaagcagagttggcggcactaaaggtgttagcgggcatgtcagctagccaagtgggtacaccaatcaaagagcgcatcaaggagaacttggagaaggacccagttgcaaagaacatcatgactctcgcaagaaagggaaagacaactcagttttgggtagaggatgacctcttgtgggccaaaggtgggcggttgttcgttccaaaggcaggcgatctaaggaggacgctgctgagtgagtgtcatgacacgttgtgggcgggtcatcaagggtggcataggacacatgcccttttgaagcatgggtacta

SEQ ID NO: 333433 - DNA, 762 bp, Cannabis indica
cttcactaccagatgagtctggttgccccatgcatctattcccagcacttcagagcctccagaatcagtatcctttgccataaggcaaggttggcgattttggacagggaacaactagctttgaagcaaggtcagactgctcttttgaaatgacagaatgagattatgggtcatttgaagaccataatgagactcctaaaagatcttggaaggccgacaccagattcacaaccacaaccacaagaagagcttcagtcatcggaaaatgaaatcattctcccaaatgattatagaccagatgatgatgatgatgatatgttttgtacacctgacaacacaaagatcgccagcatcgaggatactcaaaattttgagatacaggtgttagagacagctcccgaactagtggagcaccggagatagagaaagcaacctaggtggttcgatgagtacactaaaatgaagaagaagtctagggcatcgaagacacatgtgaatgtggatccacttagagtcgttgattgaaagctgctctcgacttttcacagttgggttcttggccagattgggaacaagtacccgagggagtgttacttcgttagacacgattcagcttggttcctccaactacatactctgaagacatggcttggagacgatgtaagtttttaagactttttacgtctttggtttttaaagactttatctaacctttttttatttaatctcttacatattttattttcatgttttagcatttag

SEQ ID NO: 333434 - DNA, 648 bp, Cannabis indica
aaattgtttaattatacatattaaaaaagaaaaaaaaacattcatatagatcattcctgagaaacgattaataatgtacattacaaaaatcaaggttgttctaaagttgtttttggcttataaacatgaattcattgctaattagggggattaaccaaataataaaaaagaacaccagaaaacgatttttatgcattattttatagtgttattttactgttgttttaattggaaaaaaggtcacataaatgaaatattatgaaaaatgacacgttatggaatctataccagttctgataaagagcaatggataatgggaagaagaacgtaattatgtcaaatatgaggctagtggagaattcatactaaaagattgcaagtatgaagagctattacagatactacttacttcattggggtgcgaaaatacaagaacaacactggaaatacattgccaagcgaaagaaggaataccactgataaaaataatcaacgatgccagcctctccttttcttacaattgaaaatcaaagaaacagatttcaccaccatatcaaatatgcgtcaaccaacagaacaacaacacaacacctgctgcaatcccaaaaatcacaaccacaacaacaccatatcaagaaaatgtggcaa

SEQ ID NO: 333435 - DNA, 754 bp, Cannabis indica
cgagccctgagggtcagatgcatcagccatgcgcgttgtattttcagtgcgagccatcatcctatggctgggcgaaagattcgagggagaatgactttcactggaagaaggtgggctagaacagagacgaggatggtgctcgtgcaagagttgaagaaagtcctggttgattcgatgttcgctctcacaaaactcacctgagttcatctacaaaagacaacacacaagatgagtgtttggtcggaatatcgaacgttaaaacaagcaaatatgccgaccaagagtactcaacagattaaagaataagaatgttcagcgaaaattcaaaactcagaaagtttgaaattttctcaagttagggaaaacatttcatgaagcttagaataagcaggatgaaagacagacattatgcagttcagaaagcaaacaatatggactgtgaaatcgcatgaacccatgacaaaggaaaatcgcagagtttctaaacttagggtttcctacatgtcttctacagaaaagtcaaaggtgcgttgaagaagtaaaaatgcaaagtaaacataaaggaaatcgagaacttactcaagaatcagatgtttggattcaggtaacgtcaaactaaacgagcagttttgatgaaggcacttcagcaagcttgaagccaaaaacctctcttttctctctgaacttacttagcaaagaaggatggtgaaaatgagtttgtgtacaaatgcacgttggaatttataggcaagca

SEQ ID NO: 333436 - DNA, 1376 bp, Cannabis indica
caattaaacacttaatcaaataattgcaagtaatatagaaagcaataatgtataactaataatcaaacttgtaatgtaaagagtttaagggtaagaaattgtaaactctctatttttacaatgtttggtagagctaagccacctacgtccttggtcttcaaagatatggacctagctttgggttccaatatcgagcccaattaacaggcttgactaacccttacaactcgaaaattttcaccaaggtgttttcaaacctcttacaatagttttgcgctgccaaggactattaacctatttctcagattattgtagtgacaatctcactataaccatgttgtttacaataccggtgccaacctcacctctatcacaatataaaaatgtgtttgaaactacaagcaaaatcactctagatgtatgatgatacaatagaaacctagagtgataagcaagcacacttgaaatgaataaatataaattatggctcaaagtatgtgaaaagtgtttgttagattttaaacttaggagctcattaatatcactttaataggttcgtgtatgatataaatgctcagccaactacaatttttgagtaaaaatcaagtttatatggtattggggtgaaatgtacccgtttctagtcgttagcacgcatttctaggagaaatctatggtgaacaagaattttgaatgggaaccaaaattctggaatgattacaaccgaaattctggattccaatcaaaattttggatggcttacaatggcaaattttgcatttttttcaactaaaacgtgcataactttttactcgattacccgattttagaaattctaattttgttctcttagttaaatgaaatttgatttagaaagtcaatcaaaaaaatttttttgaaccatcaggttagaaaacttgtcgcaaaagttagtgagtgggcaaaaatttatacttattaaccctaaagtactatgcaaaacactttaacaagactaaagtaaatttgcaccatttgattgtgtgtagtcttgatgtagatgaacttcctagcttgatttgcatgttttgatcaaaagttgaattttccagagagttgactttgactttgacttttgggttgacttttgactttgagcttttgaagacctcttttgaataaggtcttgagttcttcattccttgatgaatcttttactcttattaactatgaggtagttgatatatttgttgaatccacttcgggttcgtttgagaagtttggtaaaattactattttgccttagaaaaatttattttaccttttgattgagctacaaaataaaaaaaattattagtaacaaataataatcaaatatttgttaatcatcaaaataa

SEQ ID NO: 333437 - DNA, 1310 bp, Cannabis indica
gcaaaagttacatcagttgagatacttctaattcccatattactccagcaagcctttgcaacagagcagtgcacaaacaagtgaagagaagtttctgcagtcgtattacaccatgggcatcgagtatcaaggtgtacatgcctttgccgaagctgtgaacgagtaggcaaacacctcgaacatgttcgccaaagaaaattcttgactttagggggtaacttaagatgccataaagccctccaaaaacccgagttgttgtcttgagaccaattccctttcaattcttgaagacaatggtatccactctttacggtatacataccagatttttctttacaccagtaccagccatcgttaattcttgcagaatttagaggaatacttagcactaattttttatccctttcattcaacacatcctccaaaacttctttatcccactccctcacacctattttcatcagagaacttaccgtagcattattcaacacaggatgaattgatgaaatgaatggatcatcatcatgaataagccacggctcctttaggacagcaaccgaatcacctgaccctataagccttctcatacccaccttgatgagatctcttgatgctaaaacacttctccatatgtagcttggattggctcccacttcagcagataagaacgagccctctggaaaatatctagctttgaatattcgagtaacaaggctctcgggattagtcatgagtctccatccttgtttgcccaacaaggcaatattaaaatcccgaagatctcggaatcccataccgcctacgcccttgtgcttgctcagatttttccaactaagccaatgaataccattcttttgggatgatttcgaatgccaccagaaattacacatacttctctcaatatccttacaagtatcctgaggcaattggaacacattcatagcatacgaaggaagtgcctgaaccacagccttgattaacacttctttgcctgctctagataacaacttcccatcccaactttgaatcttctttctcactttgtctttcaggtagccaaacactacagacttattcctagacaaagtacttggcagccccaaatacttactatcctcccctgcttcgataatgcccaaagtctgacatatacgatctctgtcttgacttatggtgtttgtgctgaagaaagctgaagattttgcaaaattaaccttctgacctgaagccatttcgaagacccgaagcaattgctgaactctttgaacgtcactatcatttgccttgcaatacagatagctatcgtccgc

SEQ ID NO: 333438 - DNA, 1195 bp, Cannabis indica
aacatcaaaaagggagattagactctaaaaaatgcgatcaacatataaacgagacactctaatcataaaatgaacaaccccattagcagatcatttgacaaaatataaagaaacatcactaaaagaagatacaatcctcaacaacaccaccgaaagtggatgacaaaacattcaaatttctaacagcttgtaccaatacccgaaattctagccacaacctgattgtggtgatctcgaacaactctaccgaaaccatgcctttcctccttgtcaaacaacgcaatatcaatattcaccttgagtttttcataacctagtttagagtatagctcaacctcatccgaaagataccaattaccaaataaaggaaccaaacttctttcttgagcttttctctattgatcaaaagtgatacaagccaatttgacaatgaactccacccgacatttcttacatttcaaaaagagttgatttcgtgcgaaccaaattacacaaaccatcatcgcttgaacactttgttcctcgcccagatgtgagaacaaatgaaaaaatcaatccccaaacgaccctgcattaactggaaccatagccaaacccgcgaccaccaacaattccgtgcaaaaccagaggaaactaaccaatgcaaaaattgattcacctacccccatgacaaatcggacacagcaaagaaacatccacatgtttagtattcaactgaactctcgtcgaaacacacccattagtcgccctccatacactgttttttttgccttttggaggaagttttagttgccaaaacttcttccaaacaccacaacctccccctccacactaccatttcagtttgcctgtaacaatttaaaagcactcttaactttatacttgccaacaaagtcaaaaccccaataccaatagtccttagaaaccgaatagaaaatggattaccaagaatattggttgccactttctcatcaaacaactctttgacaacatcaacatcccaagttttctcacccaccacaaaaatactactaacctttttcattggccaagctaggatccaaaactagctagacttggaattgaaccatttgaaatccatcgagtatcctttaaagcaaaataaaaaaaaaaaatgtaataattcaaaataaattgaaaaaaaaataaatttaaattaaaactaataattctc

SEQ ID NO: 333439 - DNA, 1556 bp, Cannabis indica
ctttagagaaaaagccctagttttatatcagaaatctaataagatagactcgtggactatgcagaattttaactgcaaaaccacgtaaaaaagctttgtgttatttcttttctttttactactgttatttctgtgcaaattcatcacgaaataggctttaatttagttaacaaaaatctgtgttaacagtttggtgctttcattaagagccttcatgaaaaaagctccaaaaaccctcctgatcaaaagaaaaaaaaacctttcttcatggctgataacggagaaaatgttgatactcatcctgaagagaccacccatcgtcgtgtcgagaaagagccaatggactctcagaggcctcccaactcgtgatctacgcggaccactcattccaggaggacccaacctgaaggtggctcaagtacacgatccacacgttcaagaagaacttagcatgagaatggccaaaacccaaaagtaagggatgaagaacccgatcttggaggcgctcaacctacagattatgataatgatggtgcctatgatccaacaagatatgtgccaatcgtcgagttggaaaatcgtcgtctcaggtgccacctggaggaggtgaaccgatgaaatggtaagttggaacgggaggcagtcgctgccagggcggcacaggagaacaacgcacaaaatcaacttgatcctggagtgagaagaccacgaggtagaactcgtgtctcacgaactaggaggcaggagacggctcaggagaacccttaaaacatttaggaagaacaacctggggaaactgagggtccctctgagaatgaacaaccaaatgatcaaccagaaccttctcacagtaatgagaacagaaggcgaccagaaaccagggaacagggaatccctcgtgggaacgagggaaatcttaggactcaacctgagacacatgggtcaccaacaaggcatcgccaacatccttctcgaaccaatagggaaagggcacgtacaaaccccagcagggggtatgcaacgactcatacccaagggagaaggacgggacgtgaagaggcgagcattacctcaagacgcataaaaacccatagtcaatcaatgtgaggaggagaaagtactcgttgcaataatgatcgagaaagtacaagcacaagtaaaaaatgaaagttactcaagaacgaggtccatgagcaagacgaggtccatgagtaggataaagtccataagtaggacgaggtccgctagcaactataaccaacaggatcttcgcaatcacttgaaccaaaaaaaacctgatcttcgccaataactcggtcaaaagcaagatgatcctatccaattgtgaatagatgagttggagaataaactcaagaggtatcaagtcgaggaacaaggaaaacagtctagatatgactggaatgaggaactcaagctgttccatccagacatcatgaatactccattcccccagggattcaaaaaccctcacatctcatatgtcatagtgattcacaattgatagtaaattagattctcagggaatactaggctaa

SEQ ID NO: 333440 - DNA, 781 bp, Cannabis indica
agtacaataatttgagcaaaattagatgtacaacttattgaggttaggtcttggagaccgctagatgatagcctctctgactcatacatcaagttcttggagttcaccatcaagaatgggtaggatcatatcaatacatttatgggcaacctctgtaactcactactaggtggtcgtgcctaccccatggttggatatataggcacccttgccataaagctagtgtaggggtggggtcctccttgatggaggattaataatcatcaactgaccagccggtgcaggcctcaaaggaggaggatgtagtgaagaccctggagcatcaccaaattgggtggtccaggcaaccttggccctaagatgaccagaagccacgcccgagggctatcaagtaagatctcttagcccggaagccatatctgtaaaaagaaagtaacaaagtcagaatataggttacaaatattaaatacaagaaaaaattacaaaagttactacaatcaactatcaactaccatcatcctttgaagaggaagttggggattattttacgaggatctagatttactaccatgtatgttgtttaacatcctaaatatgaatttctaaaataatgaaatttaagcacatatagagttcaagaaaccttacattgattgtagcaaaataaaatgtctccttccactcagatctctaatccttgttcctttttatgacaaagtattatcaagatctgagcccgattctccttcatgtgttggattcttcacagtcttacacacta

SEQ ID NO: 333441 - DNA, 802 bp, Cannabis indica
ttgatagtaaattagattctcagggaatactaggctaagggcttaaaaatggccaagtatctagaaaaagttttgaagaacttagaaaagttcgattatttcaaaatcgagcaaattcaaagagaacaaaactctaacgccagccttaggaaaactggcctcgcagaatgacttggatggactaaacttgatttcggtggaaatgttaaatgagcaaagtatatgtgaaaaggaagatgtcgagatgatagatagctctcccacatggatgacacccaaactcaaccatctactcaacggacaactcccaactgacaagaaggaggcatgaaaactcatgtattcaatgcctcgctacacaataatagagggaaaattgtatagaagaggctatccagtgcctctccttcagtgtgttcttcctgcagaagcaaacgagatcatcaaggaaattcatgtaggctttgcagggatcatgcaggttggcagagtttgttgaaaaagattattatataaggatattattggccaaccataaacaacgacaaccatgaatttgtcaaaaagtgtgataagtgtcagagattctcgcatatacctcgtgttccaccaacaaaactgagaatgatgatcttgccttacccatttgctatgtgggggattgacttgattgggcacttcccacagggcgaggaggagtcaagtacgcggtggtggcagtcgattttttaaccaaatggacagaggctgaacctctagtttctataacctgcaagaaagtcctcgactttgttgtcaaaaa

SEQ ID NO: 333442 - DNA, 691 bp, Cannabis indica
caatgattgagtactagacttgtcatgtgtgggcatgtaatctatcactatgaggctcaaaaaatttgtgaagaacactacgagatttcaaaaatataagaagaagaaggatgtctcaaaacaatctctagttgtctgacaagttgtaaactaggttattaacaaagtttgataaggagaccatcctattctttttatactaattcacttagggttttttttttttacgaaaggtaaaatcaacttttattaaccttcgaaatcagttaccaaagtaggcaacaactcagttggaatattttccatactgaaggtacaatcaagataaaataaagatgctctagcaaactcatgcgcaactctattagctgaccgcttaacaaaacaaaaatagacattatttaaactagccaacatggctttgcaatcttggatcacacatccaaaatgagaagacaggatagccgagttccgcaaagcttgtacaaccactaagcaatccgtctcgacccaagcttcattgtatgtttggtctttgatccaacttagagcttcccgaaagcttagagcttcagcaatggacggagcaatattaccaatatgtaatttggtacggcattcgataagtgtaatatccagattaaaataatatttaatttttttttctctccttgggatattaattgtgtga

SEQ ID NO: 333443 - DNA, 534 bp, Cannabis indica
aggatgttaataaaacatacttggtagtaaatctagatcctggtaaaaagatttccaacattatattggtttgcctaatatcttgggtcggtctaagtctgtgattctaggattcttgaaggatagaattcggaaaagggttcaagattgggatgggaagcttctttcttatgctgggaaagaggttctgattaaaacggttgctcaatcattgcctacgtatgtcatgggtgttttcttgctcccaattgatatgtctaaagatttggagaaaattatgagtaagttttggtggtattcaaattcttctcacggtgatggtattcattggatgagttgggaaagaatgagtagatataaaaatataggtagaatgagcttttgtaatcttcatgacttcaatttggcaatgttgggaaagcaaggtggcgtttactgacataaccaaactctttggtgagtaggttatctaaggctcattattttctcaagggtaattttctttcagcatcccttgggaataatccaagtttt

SEQ ID NO: 333444 - DNA, 994 bp, Cannabis indica
tatatatatatatatgtttgaaagtgatgtgatcaaaccgatcacaatgtccaaatatcaagaacaacttaattgatctaagtctatgacagattaacaaaaactcaatacaaaaaatgtcaataaaaacagtaaaacaaactgagtttaacaagacaaaaatgaaatcaatattcagccattaaactactttccattaaacatgtatgcaaagaatacattgtacatcaattggtgattcgaactagagtaagaggaagagaaattaaactccaactgagcacaccagaaaactggtttctttacaccagtacactactctctctctctgtcactctctctctcttgtttctgtaaaatgaaaatgaatcacacctagctaagagttagttgagtctatttatagacaaaccaacataactaacttaactataaaaccggtaaggtagttagaaagtcctaagaacattcagctaaggctaagtttctaggccactttacaacaattccaccttggcatagatacttagacttagagaacatgagcaagaaaggctgaacattaaaggaaatgggaaactcatccaatttccttgatgttgaccaagttcagacagtgtctaaacttggtttgagtgacacattttgtaaaaatgtctgcagggttgtggtcagtgcagattttcttcacttgaacctctccattggcaatgatctctctgataaagtgaagtttgatgtcgatatgctttgatctatcatggaacataggatttttcattaagtgcaaagcactttggttgtcacaatggacagtcatgtcctcagagttgaacccgagttcttttgagagaccttttagccacagtgcctcttttattgcctcagttgcagccatgtactcggcctctgtggatgacagagctacaactttctgcaggtttgacttccagctgatgcatccacctaaagctgtgaagatataacctgtcaa

SEQ ID NO: 333445 - DNA, 501 bp, Cannabis indica
cagcgctgccctagtccgggaagaagagaaaactcaacatgccatgtactatgttagcaagtgcatgataggagcggaaacaaggtaccccatcatcgagaaactggttttctgcctcctgttggcctcgagaaaattaaggccgtatttccaagcacacccgatcaaggtactgaccaaccatccgctccggcaagtcctccaaaaacctgaagcatccggaaggctcctcaagtgggcaatggagttaagtcagttcgacttacactacgtttctcgaatctacataaaaggccaagccttggcacacttcattaccgaatgcaatgaagccgagacaaccgaaaatgcgccaacaccgtcggtccccacagggagagtgttcgtggacggagcctccaatgaaaatggatccggagcaggggtgggaatgatatccccggccgtactgcgactccaggcagccctacaattcgcatctcagtttcaaacaatgaggcc

SEQ ID NO: 333446 - DNA, 878 bp, Cannabis indica
tctgggggtccttcgctccaacgaagccccagtacgaagggcccttctgacggtcgcctaggccttaatgtaagccagctcctgttccctcttgaagaggtacttctggtacttgtcctcctccatggcgataatttcaccccggagcaccttctccgcggctggagccctcacgttcgggcagatgactttggagatattatagtcatccaccgactggtgccttaggatcagcttggccttccgacagtgctctgtcgtgacgagctccccgacatcaagggccttcttctcatatgtggtgaaggtcttggcccgttgaagaaaaatttgagtgggttcggtccgcatgtaaggggggatcctaacccactccgtgagaagctctggatgatccatggcctggaaaccggaggagaagaagaagaggtgacggtattccttcacgtgcttctgataattaaaagggaccgggccctcattcaaaggatgggcccggagaccgtaaaaaccgtctttaagtttatctccctttttagggatggaaacgagttcataaaaatataaaatttctgccggactgggcgagtcccagctccgggcagagtaaaaaatgaacaagcctgaaagtagccggtaagcttgaggaataagttggtatggcgcaaggccgacaaatacaagaaagttaataaaattgtgacagtcagtagtcccgtgatccgtaaggggatataccgggtaagctgtgaaatcccgcaccgcctgggaaacgtcaagtgagatgattctgagactgtgtaggtatgggactacacagttgaagagggcttaaatggattgattggtactacctatgtcaacaaggtgcatcttgt

SEQ ID NO: 333447 - DNA, 698 bp, Cannabis indica
aatttcacaatatcaagaattttgtgattaaggaaatgtaatggtggagaaagtttgtattgaatacaacctgtcagatcctattatacggagagaatactacatactatacttgatctggatatcaaggtgtagagattatttgaaatgcaccttttgttttgtattagtgtaagtgagagtttattgggttttgtgccctaagtaaaacttatttcaatataatcagatttactaattaataatagatcaaaactcattttatgttgcatggtttacatgatttatttcatgattatgtttaatgtataaattctattaagcccggaacatatatataaatacaaagatgtatatatttgttcataattatagtgtcgtcagcacagtagaatataatcatgattatatgtccaaaagtttaattcccatgatttgtcacttcactggatttagaatgacatgataatcggcaataatgtatacttacaccttagataagtgttatgtcctttccagggcattggtaaagtttaccagtatcacagctatggagtatacattggaaggaaccaatattgatcttagataagatatcataaacttaccgttatatctttctaagtcaatatcaattattgatcttaggtctatagatcttattcctgatatggttaggttcaacttagttgtattat

SEQ ID NO: 333448 - DNA, 2284 bp, Cannabis indica
ggtatcgaggatacaatttttgaaataaaaatattttttcgggcccagcgattgtggaaatttgacgatgtggtcagaaatgtcacgacatgaatggatggattattttgaggatattctggactagtttagaattttagaatgtcggtttggtggattagtaaaattaccataatacccctaggttattttaaagtttaaattttgtatgaggggtagattagtcattttattatataggtattttgacttttagttttgtgggcaaaccattaaattccaaaaaagaaaaaataaccttatatatttttgagttaacttagaagtcaaggcaccaagcttcttcttctcttcttccccttcgtgcaagccaaaccagccaaccttgaggatattcttcaaccttttcccttcatttcaaagttgattcttacccccaagtcaacctagaagagctttgaggtaagttcttaaccttttttgattgaaaactttaggttttgagttggttttgaggtagggttttctaattttgaggctggatgaattaaactaagattggggtatgtttatggtaggttattgagtatgttggacatggttttaagtggtttctatggttgtttggtttgatttgtgctagttgaagctaaaaagttcagtttcattcacttgaacatatgattttgattcaatgattgaattattatattttgaagcttgggatatgttgtattatggttattatattgttctgtgaagtttgggaacaattggttaggtttggagcaagttttgggacattcaagatctaaaattttcgagtttctgctgtagtgaactggaattccggatgatcaattttttcaggaatcgccaattttcgtattttagccataacttttcactcgggtgtccgttttagacattctatataccgtttcaaagcttatgaagagctctacaatatgagatatgaattagtgccaaaatatgtattttaatttagggtgctttcaccataaggttcggttaaaaaccctaggtttattttatgtgtgttttagacagtgttattgaatagacccttattgatttacatttgtcatgaaataggacccaaaatggtcgagcatcgttccactcaggtcggcccacatacttgactttggacttgaggtaagcaaatattaagcaccgtataaggtaatgttatgattgttacagtcttgattatgatcatgatccaggtatgtgtttattgtgacttaatcctaatcgaggttaacgatatgtatttgtcgtgactcgatggtaatcagggtaatgaggagaaacaattattatcatttgtgaatcgtctatgattgaggaaagaacacggttatcaccgttgttgtgaatgaattaagatacgattagtaccgttatgagcaatccttcttaaaactgcggataggtttcttacttatcgtttgctttactgaccaacgatagtgacatacgtagctcgtggataacgagtggtaaggtttgaaacagtcattaccgttatgagtaattactcgttcaaactgcggttaggtctcttacttattgtttgctttatcgagcaacgatagtgacatacgcagctcatggataacaagtggtgaggattggaaacggtcattaccgttatgagtaattattcttgaaactacgaataggtttcttacgtatcgtttgctgtatcgagcaacgatagtgacatatgtagctcgtggttaacgagtggtaagggtactttatgaagtaccaggattgtgagattacaataatgtgaaatgaattaagcatgttattatgtgatgagttgtaatctatcacatctttattataatgtgaatgattgaattttatattgcttatgaaattagtctcttttcttgcagagtctctgtgactcacgggatgtaagaatatgtgtttgcagggatgtaagattagactgctttacggggcactgcaaatatgtgattgtgtgctgagtgaatatttgattagtgtaatgataaagctattcgttgcaagatgctatgatatttttatattgggtaatatatgagttcgtaaagacattatactacatatgcaggctgaatgataatgaatcacgagtatgaatgttacgttatgattagaatacttgcatttttattgcttttgagttaataacttttcttgctgaatcattgtgactcacgggtgcttcatggtgaaggtaaaaaggttaaaagttgtg

SEQ ID NO: 333449 - DNA, 690 bp, Cannabis indica
tcccaggaagcgtgcgagtgaggacaaagcacgctggaaactctcgtattgatttgtagggccagtcatcagttcatgaagcagccagagtgacgtacacttgtataagagccattagtccgtgggtgtaagggcccaatggaggcttgaagcagggacgttacacaaaactaagtaaaaaaaattgtaatgcaatttaaaacatattgaggagttgatattgttttgtatattgcaattaggtcattattttgttattattctgttgatttgtagttatctttttgctgtttgttaatttgttttagagttgtttttaagttatttttttattttattgaaatacagtatttttgtaattttaaaattttataacatagcatttttaaaaacttagtatagtagaaatatataaaaaaagagtgaagtaaaaatataaaaatgacaaaaaaataactatttttgtaagatcccataaaaaacgcattttgaaaaaaagtctcaacattataatatatgggccttatatgaaatgggcctagtgttgcttattctcttaatctattctgcttaataatttttgtttccaataaattaaaaagataattacggattattttttgtgaaaaaaattatattttaatatttaataatttttttttttacactttaacagttttccataaaaaa

SEQ ID NO: 333450 - DNA, 955 bp, Cannabis indica
attcacgcattaccataattccataatctcagtgcttcataaagcactctaattcacgcattaccataattccataatctcagtgcttcataaagcactctaatcttacatctctataagcacgaattcttacatttcgtgagtcactaagattctgcaagaaaagaaactaatttcttaagcaatataaaaatccattcattcacattataacaaagatatatccagttacaaatcatcacataataacatgcttaagtcatttcacaacttcgtaatcacacaatactggtactttataaagtacccttaccactcgttaaccacgagctacttatgtcactatcgttgcccgatacagcaaacgataagtaagaaacctatccgcggtttcaggagtaattactcataacggtaatgaccgtatcttttactcgatcataatcgagtcacaacgataataatcggttcatatcattaccctcgattataatcgagtctcaacgatgataatcgtttcctattatttccctcgatcataatcgagtcacaaccaatacataacgttaacctcgattaagattaaatcacaacaacatataccaagatttcaatcttaattgatattgtaacaatcataatattaaccttatacagtatttaatacttttcttaccttagttcagaactcaagcgtacgggccgacttgagtggaaaataagctaggcaatcccggtcctatgtcacaacaaccaaaactcaataaaaaccttaatcaaatttctgataatcgactccaattctcacaatcgaacacaccctactttcccccggatcaaactagcttaaccatctctaaaacaccctgaatttcactccgaaagacaccccgaatcagatcggacttgaggagaaaaacccaaaatttccccctactgtgaaaaacggtcggcc

SEQ ID NO: 333451 - DNA, 521 bp, Cannabis indica
taagctcggtataaatagtatacactggcacgtatttgtcatgcttcttttgtttctttctatccttcgatggttccctaattccatcctttcttttcggaccagacacccctgagttatcaattctcgtcgaagcagtccctgttaaaacattgctgggtttacctcctgagcttgttttcaataatttcatttcctttcgggcttcttccctccggaaaaacacctaagccctctcgttgaacttagtgatgtttctaaccggacgttcttgtaaatcatcccataactcacccccggcggttaatggatcagtggagatccctgcctgaagggctataagttgcatgctatcatcaaagtttctaaccctagcggtagccatgctaaaacaacttaagtaagccttaagtgtttcgtcatgctgttgctttatattggttagcgaggccgcttcaggtcgcctatccctatcggcttgaaattgcttcttgaaatccctggacagctactcccaggaa

SEQ ID NO: 333452 - DNA, 1014 bp, Cannabis indica
aactcaaagcgcctttctctccaataggcttataacagataacattttggttgcttttgaactcgtgcaccatatccaacacagaacaagaggtggtaaaagttactcagcactcaaattagacatgagcaaagcgtttgatagggtagagtggccttttctttgggcagtcatgaagaaaatgggctttgatagtaactggattgcattgatacagaattgcttgacctcatcaagcttatcattctcccttaatggggaagttgcaggctatgtcaaaccgtcaagaggtctacgccagggcgatcccctttcaccatatctttttctgatctgctcagaaggactctcaagactactgcatcatgaagaagctattggtaacctccaaggactacgccttactaggagagcacctctgtttctcctcctttttgcggatgatagcttgcttttttgtgaaacaacaaatagttctgcattggcaattgagagaacactaaacttatatcatcgtgcttcgggtcagatgcttaacaatcaaaaatcggtaatgtccttctctccaaacactccagtagcttcgaaaacttttttccaacaaacactgaacatgccgattagcgagtgtcatgagcgttatcttggactcccttcgtactctggccgggacaaaaaagagctctttagtcatattaaagaacgagtttggaagttaatgcatgcttggaatgataaattgttttcagttgggggaaaagaggttttgctcaaagccgttgttcaatcaattccaacctatgcaatgagttgctttcgcttaacgaaaactttttgtcaacaattggaaagcatgatggctaatttctggtggggttcgaacaaagatggatccaaaattcattggaaaagatggaaattgctttgtaagtcgaaatttgaaggagggatgggttttcgatctttcgttcattataaccaggcgctcttggccaagcaagcatggagaatttt

SEQ ID NO: 333453 - DNA, 583 bp, Cannabis indica
accaggcgctcttggccaagcaagcatggagaattttcgaaatgcctacatcattgttaagtcggcttctaaaatgcagatatttctccaacaattcttttttggaagctaacctaggccattctccttcgcttacatggcaaagcatccattggggtcgtgaacttcttctcaaagggcttagattcaaagttggaaatggttttaatattcagtgtggacaagacaaatggatacctggttttactgagtttaaacccatcacttacacaggacctacctctatgttggttgctaatttcataacagaagaaagggagtggaatatagggctgctggaaaattattttggtcagttagatgtggaaaaaattgtctcaatcccgctgagtttcttccctacttcagacagattaatatggcatcacacaacctcgggcatatatacagtaaagtcaggcttccacttagctgctgccttagatgaacaaccagaagcctcggcttcagatttaaatagtaaatggtggaaatccttttggcacttgaaactcccatccaagatcaaaatttttgcttggaa

SEQ ID NO: 333454 - DNA, 1231 bp, Cannabis indica
atgaacctatgaggttcaaagccggattagtggctaagggttttacttaggtggaaggtatagactatactgaaatcttctcacctgtggtaaaatacaagacgataaggttgatgttgtccttagcagcacatttggagtttgaagttgaacaacttgatgtcaagactgcttttctaaatggattcttggatgaagatatctatatgaagcaaccacctgggtttcaggtggaagagaaaggagttgaatcagtgtgcaagcttaatagatctttatgtggtttaaacagtcctcaaggtaatggaataaaagattcgatacgtatatgatcagatcgagttcaaactattcgcatacaatcactgcttatattttaagaatctaaagcaatctacagttgtgttcttattgctctatgtggataatatgctcatcatgagtaaagacaaatcaatgatcaaaagtataaaagccaagcttaagagagaatttgagatgaaagagcttgggcaagtttaaaaaatacttggtatcgaagtctcacggtactggaaggaatgaactattagtttgaagaagtctaggtacatcaagaagattattcagaagttcaaaatggaagatgcaaagagtacatctgttcctttaggaggtcagtttattctgtcaaatgaataatgccttaacaatatgaagagagagaagaaatgaaggatgtatcatatgcagtggttcttggatgcttaatgtacgtgatggtgagcatgagacgggacataactcacgctttaagcatcctaagcaggttcatgtccaatctgggcatggaacattggaaagcccttaaatggttactgagatatttaaagagcacatgggattatggtctgacctatgagaaaggaaaaagagaattggagttcgtggatgcggactatgcctcgaatagagatacaagaaaattaaccaccttttatgttttcttgagaaactagaactgtatatgctcgaaggcttagttatagtctgtggttactctttccaccacggaaccagaattcatgacaactacgaaagcttttaaagaagtgttatggcttcggggaatactttatgagttgaaacaaatcaaaagaagagtgattgtgtattcttacagctagtcatccatccatctatgtaagaattcgatttatcatgaaaagagcaagcatatagatataagact

SEQ ID NO: 333455 - DNA, 681 bp, Cannabis indica
ggatcgcgttgtaagctgtcggacagtccaccaccacaaaagtgcagtatttgaatgtgttctgggggtgtccggacacaaggtgactggaagtcttacttttcccatcgggataagcgtcgttcaattaaaccctgtgagttgggacccacttggtgagaggtttcggtccgtcaagcctattgcagtgaaggcctccttgaagagtaggttcacggaacttccattgttaattaagactctgaccaccactttatgagcgatgggggtctctatgaccaacgggtcatgatgagggaagcgcaccatcttggcgtcctcttccgtgaatgtgatgggttgatccatcagcccgggcctttgagctgggagttgagtgacctcccaaacctcattgtgtttcacggcccacgcgtaccgtttgagctccttgcgagtagttcctccgatatggggacctccggagatcatggctaccctcccgttaggtctgggcggcagaccggggatgtgctgggcatcgcccgcgggagcagctggagccaacgctcctgctgtaccccccggtgttccctggggcacaccccctgtcgcctggcccggattgaggtgaggcagcctattcttgatccactcatagaggtggcccaatcggatcaggttttcaatctcgtccttgag

SEQ ID NO: 333456 - DNA, 919 bp, Cannabis indica
atccaactcactatctcttagtcaataccatgaagatatggaacaatcaaatccatgtcttgggagctgaaattacatgaacctgcactctgaaagctaacctgggtacctaggttttcacccagtgcccaagttgacattccaaaccaagatttcagttttcgggactatcttagtgcaaatgggtcaaaatttacattgagacatcaactatacataccacatacatatttaaggcatcacaatcaaattcagagcaagtttattttttagcacccggagcaccctatgcacggcacccaacgctcaggttgacaattcgtcaatatggatgccttccaagtatcacattaacgatctgaattttgcatcttcttcttcgtcataaaaaataggaaaatatgtactttctgggaagaaacaacactttatgggtgccaaaagcaaggcccagtgcccaggttgacattttttcaacttgggccaattcgatcatgtgttctgagaactcttccaagcatcttctctattttcaacaaatattaagattcaactatttctagggaccaaacataactttcgaagggccaaaagggagacccaactcccaggttgacacttggcactaggcccatgtcaacttgggccatttccaaccaagttctcaaaaacttgttccaggctttttttcataatcgaaaataatgaagattcaagcaaactcggggagaaacccataaactcgagaccctagaaatagggcccagtggccagttgacctaatgttggacccagtgcccaagttgacaatcaacttggtgcgttggtttcaatcactcaaatatcaaatctaatttgaccattgaatatggaatggtcaaaatttttttggagacctcgtcctcaagttcaagaacct

SEQ ID NO: 333457 - DNA, 866 bp, Cannabis indica
attacataattaataagaatattgattactcgttttacaaacgatactataatatgtatattcttaaattaattatttccttaatcttaaattctaataactcgttacaaatggattcatctcttgaatggtgttttaaatacactcccagcatacttaatactccactcaattagacagttccttatttgtctattgtctttaatcatttaattaagacttctcttaatttatgatttgatatctattatttttttaatctcattatatgtaagtatctctaaatttcaacagttaaataattattatattcaatacatgtatctcataaattgaatatttttttaaaattgtttgccaataatgtaaagaccgcttagcttaaatttggaaattagcagataattagggtttgattatgaaatgtatttattaattctaaattattaatttatgatgatttatttaaattcagaatgcattttatatgtcatatatagaaatttcataattttgcattttcggtacccgacaacattggaacgcggtgtttggctattagaatcacatcctagtattttaagtatagcagggcgttatagttagacattaggaatgtcgagagtagtcgggaatttagaatttctgaaaataccccttagagacctttagtggttttagtatggaaggataatatggtcattttggctttttgtgttttttctttttgtgagattatgctaggtttttaatctaaattttgtttaattcttgcctaattattttagatcaaaaccaaccatttttaattcattttatgaaaaatcaaaatgtagacaaaaattacatttcctctcaaactctct

SEQ ID NO: 333458 - DNA, 640 bp, Cannabis indica
aattgactcaaaacaaagaaacaattaaaaactaaaataataaataaaaatttaagttcaccccccaaactaaagtgacatcttgtcctcaatgtgatattaaaaataaaggaaagggaacttacctgagagccgtatcaatatatatggtgatggtggtggttgttgcataattcaactgggatacaatccacctcttgcatccataagggcccttgtaccaaatgaagagaactgtcctccaacgttacaaattttgaagatatccataagatgagagtcaccttcacaattcccacacatcagtcttttcatacaacgttgaaaagttcgaaattgttctttgggcttccctttcttcttattggtagttgcttcttgactatcctttacaactttcactcaacaacaggtaggaatttcagttgcagtaaagacattgaaagtctcttcttcttttttaacgcgtaactttaactctcccttttgcacatcaattaatgctcttcccgtggctaagaatagtcttcctaaaaagatgggaatattctcatcttcctccatgtcgagtattaaaaaatcaacagggaagataaacttaccaacattcaccaaattatcttcaattataccccgagga

SEQ ID NO: 333459 - DNA, 583 bp, Cannabis indica
tgagggcctccaataatgacttgtagatgtccatctactggtggtggtagcaagtcttggttgttatcgcccctctgattttaattggccttgacatacttctgtacgtgtgggttatttttccttatcaagaattcgatttctcgcttcagattgttgcattcattggtgtcgtggccgtagtctccatgaaatcgacaaaacttggtcatgtctcgcttgctgacatcttttttcatgggtgctggcttcttgtacggggctagtgattgagtgcccatgtaaacactttttatgtcttccgtcaggatggtaaatgcagtatacttagcaggattctcccagggagcttgttcggtcttgccggtgaactttccttttttcccattcccatgcctattattgttgctggaccatttaccatttaaacttgaattgcttgggtgatggtggagctggacggatgttccagctgaaggagcttttgacttgccaggtttttgttcaccttctgctcgctggatagcctcttcaagtttgataaaaacctacacgatcaaggaaatcactcattgagtcgact

SEQ ID NO: 333460 - DNA, 539 bp, Cannabis indica
ttttttttttgatgaatcagaagatttcattgcacaaaacttttatttacatcctaaaagcaccaacattggcctcaataaatctatacaattatttacaaactatcaaaccaatctctatctttgattttcactttttgaggcaacacaagcattgttctagttttaaccacctgctgtagccgctggattaattcctcaactttggggactttcttttgccaaatgagctcattccttgccttccaaatcaagtatacaagtgctgcaatacttgatgctttgacatttttcctgaatttagtttgcttagctttcctaactgttttgagaactgcctgcaatgtatcggcctgagttctccaatgcagccatttcttcacctgcaccagacaatgctgggaaaatacacacctgaagaacaggtgttcagttgtttcatcatcactgttgcagaagctgcagactggagaatctattacactaaacctgcataaacgttctctggttttcagcctctgctgaatggctaaccaggt

SEQ ID NO: 333461 - DNA, 504 bp, Cannabis indica
aaaaatattacgaaatgccacttatataaaatgtaacttccaaatataaaaagaataattacataatgaactatttttttgtaaaaatttaacacgtttatgttcaaagatttttttttacacatttttacgtatggtgttctataaaaataacacaaaactaacaaaaaatctacataaaaaagtaatagaaaaatagcatgtatcttaatgatataaaaagggaaatttacgcttggtactgtcttttctacttttatttcatttttactgttaaacgttatttattacatttttactgtatctttactttttgctaaaccaatttgttattccattttaactgatacatgtcatactatagattatttatattcatttttattattttaatgagtgtaaaagttatgattagattgattaaagctgaacaaattttctttttcaagtttattattccatggattatttgtattcttttttattattttaatgagtgtaaaa

SEQ ID NO: 333462 - DNA, 542 bp, Cannabis indica
tacaaaggatgtttcgaattttacatttcgcccttaccttaccaataattgcacctattttaccctcgatatgtacccaggaagtgtagtaccattgacagatgaggtccgttcttctttcactacttctgctggtgaagcaggattttggtttgttgtctgccttccccgatcactgttatgtcttcgagatgatccgaaatctttatcttggtcatttgtttcatatcgccctgatcgtgtggctagacaatttgggtttgatcaacatgttcctcatgatcggaagataggggatttagaaaaagcaaaacagtcatgtttgttgggttccttccaactctcaaagcaatctcacgacacatttcgactacccgataaagacagagaaggtggagtttctgttaaatttgctaacatatggatgcgacatcattatattggattaatcagtcaaggtgagacttgtgaccgagagaaagacgtgggtccatcgtcaggtatctcctcgctcgctcatcttctcttaataatgctaaatc

SEQ ID NO: 333463 - DNA, 581 bp, Cannabis indica
ttgcagggtcattcgtttcatgcccattaattgatatgacgcattaatgggtgtcagatggacactcaagcgtttccaccgccttgatgacatacacatttagccattggatcttgggaatttgaatcgtgtgccttcccaaccgcacgattggtaggtaatcacgcctgttccacatgcacttcggcctataaaagccaccattctcccttcatttggttactttcagactttcaccaaatttctacgaatttttcagagagaaagaaaccctcaaactagaaaaccttcaaacaccataggtttcttactaaccttccttcgctattgtcagtcaatgtttcaccgtcgatcaacaaacaatacccagttctaaaactttatgtaagtttttcgcataccgtactttattgtttgtgttcattgcatgctttactgttcatctgcttttcctgggtttaatgtttgaagtttctgggaatttttcgccttgagtttctgtgtgatacgttggattcctcttttctggtttttgagttacttttactttgcgtactgcatatgtttgttggaaattattt

SEQ ID NO: 333464 - DNA, 501 bp, Cannabis indica
tttcggatgtggaaatctcaccctaagtatgactttttattaaaggatgcttagtgcttgggaacttcaggtagtaagatgtatcaagttgtttgcaagctgaagtcctttaaagagagattgaggaacttaaacaaggaagcatttagtgatttacatcagcaggtgattgaggccaggtcttctcttgataatatacaaagtcaactacaaaaacagccgcttgaggaaagtttacaccagatggaaaggttagcccgtgagcatctgatccaaaagcagcaggattattctatgtttctaaaacagaaagctaaattggagtggattcaagatggagactcaaattctgccttctttcatgcttgcattaagcatagaataaggcaaaaccgaatcctctccatagaaaatcaagagggcagcagagttacagatcctgaacttattacatcagcattcctagagttttataaaagcttacttggaactaaaagagag

SEQ ID NO: 333465 - DNA, 647 bp, Cannabis indica
ttttttttcagtttcaactaaaataaaaattagctaaacaaatctttgatttatgtgctctcaatatatttgtttggtcatggaaattaataatttacatatatatcatcaataatattatagcagttagtactgttttgttcaaattagctatagacatcatgctcaaataataatcaaacaaatcttacatgtacttatctaaaattgttatattaggctttcctgatttagtaaagttactagtagtgctagttttttacccatatatttatgtatattttgtgataataaaaattaaaagaattatatcactaatatatatatacatattatcattacaaatttatatgaacatgaaatacatcacatgtaccaaaatttggcaactgggaaaacgatgacctaccatacacaacctactttgaccatgcacgcaaagagaaacctagaggaggtcatgccaggttcaactcgaacgaccccgaagagaatcccgaggccttcatgccgctcgttgttacaccggaggtactgacctgagcgaagataatgacgatgatgaccgctgcacgcgaggatgatgatggttgccgccgccgcacgagagagagagagagagagagagagagagagagagagagaga

SEQ ID NO: 333466 - DNA, 786 bp, Cannabis indica
caatctccttcatggctgacaatccagaaaacgctaacacaccacatgaagaaactcatcaccgtcctggaaaggagtccatgggctccagaaggccttccaactcacagtctaaacgaaccacacgctccaagagggcccaacctgagggtggccccagcactcggaccactcgtttcaggaggacccaacctaaggttggccccagtacacgaacgacatgtttaaggaggactcaacaatggaatggccagaatcccggagtgagagatgaagggccccatcgtagaggtgctcaacccacaggtgagggtaaactgccatcttaggcgccgattggaggaggcaaaccagcggaacgctgaattagagtgtgatgcagccgcagctagggcgacacaggggaataacactcaaaatcaacctgaacctggagtgagaagaccacgaggcagacctcgtggctcacgaatcaggagacaggaaaatgctcaggaagaacaacctggggaaaatgagattccccctgaacatctgaatgatcagccagaagcgtctcatagaaataagaatgggaggcaaccagaaactaacgagcaagaaattcctcgtggaaatgaggaagatcctgtgacacaacctggggaacgtaggtcacctgcgaggaatcaccagcgttcttcctgaacccatagagagggatagtacgaaccccagtgggggaaatactgttggaaatattttaacaggaactagatttactaacaagtatgtttcattaacatc

SEQ ID NO: 333467 - DNA, 2645 bp, Cannabis indica
tttaattttaaacctttaaatataaaatctatttatttgataattataattaattatcaaataaaatttctatttaacttaattattaattagacattacaaagtctcttaattaacaaaatccaaaaccttttttcttctcaattaagcccccccgtagtgaaaattcataaataagatatagtctaatttagaattctaattagttaatcaaaaccaattaactaagtctacaagccaatattatctcaacttgtgtggggaccatgagcctatataatcaagcttccaataagcagttcaagaatttattgagtaaactttctaacttattaattcctcttgatttcactatagatttgaaattgcagtcttaattatatagaacactctatatgtttcaaatatagatacactattaattatctattgttataatctaactaatcaaagatcctctatagatgctttacatcaagtaaggacaaattgatcgttttaccccttaatgtattttttttaccccttaatgtattttatccttaaaatacttagcttcctataaatgatattttagtaaactaatataattactgaaataagagctcttcattttatctctattaagccaagcttgaaggaaatttccatttcacttctatgtcaatatagaagctatagattctgtatctatgattagcgctcccactcaattatgctaccatgctcccaagatgtaagtatcgggccgatccatttggtcagctttaacgactaagtcaaagaacataaataatacagttaagttaaaacctaaccatctcaggattaagatctttcgctctaaatgcaactaagtgatattgacttagaaagatattacagtaagtttagatattgatctcaaaaagtgatcaaccgatagcgggattgtatggatcccatgcttgccacatgtttgcacaaataataatgaaaaacaataaacaacagatttgttatagaggttcgacccccttgtgatggtaggtaatgacctattctccctttagttgtatttataccgagggaaatactatctagatcactatagatgggatctgctataacacccttagaattacaaggtatgaattagtaatggcaaaattcaagtgttgagaataggctatggtaggcgtgtgagagaagaagtgaggaagagaaaaagagcttgtcaaacacttagagcttggaggcaggtttcagacatagatgcaacttaggtttctaggctaaggttaaggctttatataaaaggcctaaaagcctagattacagtatgattcccttaatacttgcattgtttgttagatatttacaaaagactaaattgcccttgaatctagatattattcagccattctgttgggttttagggcccacttcgcagcccatgtgttgttgtccacgtatagaactgcatagaaaaccctgctgagcacctcttggctgggcaagcccttgtggaggctaggctggccggccatggtgcagtcccaaggctggccggccatggtgcactcccaaggctagccagccaggggtggtcggccagctcctgagagggagctagtcttcacttgatgcccattttagtgctggggtctctgtttgttcaggtgctaacttggccttccaattggtgagctgtattgccccatggtactaattttgtccacataagcatgccacatcataaggaccaaaattgggataaaatttgccccccaagtctctgtgtggacgtttgtacggatatggactttatcaactatatcgatgtggttgggactgttgtagcctttgctgaataaaagttgatgcacttttagcttcttaaaacactttgtcttgaatgtctgatctcattgtagtagaaaaataactgctttaattgtgtttatgatgtgtaggtgaggtaagtgaagaaaaggggcccacatgtattacataagtgacttctggggggaaaaccttctttcacttttcattttctctcactagaaacttgatttaggaaaagctcctccttctctctagggtgccgaacccacaagcatcatttttattgggatttttacatcgtttcaatgatccaagcttcccaccttcttctccaatgaaatcttgtagtggtaagctttctattctcgctatttcacttgatttgattgatttttccatggatgcatgaacattatatcattttatgaacatgctttgattcttacattagattgtagtacttttggtattttgatctgcacgatcaccttaggatagataatgtgtgacttctagacgaaaaagatctcaatatgaccttcattgtgattcttggctctttgagtcacgaagaacatgatgaacatgtttgagttcttgaaaaacacatgttttaatccatgcagatcctggctggccaaggaggccttgtttgaggtctggctgacaataggtggctttcatggggttaggctggccatagggactgtgtccctaagctggcaggcctatgcctgaaactagggttcctggctggccactagattggatctttgggtctggccggccactaggacctagtgttgggttttgtgccc

SEQ ID NO: 333468 - DNA, 906 bp, Cannabis indica
gacgtcgggcctttagagagtcggattttgtttggtatagaattattttaatatcggggtgttgttgttaggttttgttagtgtcgggaattagttgaaatatttcatgaccaaacgcccttataaaccttttttttttaaatcattgatgtttattttaaaagggtaattagctaattctttttttcctttactactttcagcctattaattaaaatacattagtaataaaaaatatatataatctttttattgtaaagtagtgagagaaccgtagaagctatcatcctctcaacccttctctctctctctctctttcgatttttgcaaaggggcagctagggattttgagttttcaattttttgtcaagaattcaagctgaattctaaggtttcaacccaaggtatctctttttagcaatcctcttttgtttctctcaagtctaggtttgatttaatgagttaatttgaggattttgtggctgtttgtttaagaattgtttgaattagtattctgaagtttaattgagatgtttgctgctggtttgggctaagttaggtgattatttaattgtttgtgtcaaattggagtttatgaactccaacttggtgctctaatggtggattgagtttttgtgtcaattgttgtgtttttgtgcttgaatttggttcattatagtgcatacaggtattctggaagttattgggaagtttggatttgaattgagttgtggggagaaatttttgggttcccagcacagaaccggtcgaccagttctggggaaccatttgaaccggtcgaccggttggaacccaggaaccaggcttccggttgggaaccggtctgccagttgaggctttttcctgaaccctagttttctcctttttgtgttgtttaaggtgtta

SEQ ID NO: 333469 - DNA, 613 bp, Cannabis indica
aattaattataccatttagaggcagttgggaaataataatttttttaggctaacccctatgacgttggttcctttataggaaccgacgacatagggtactgattaaggctcaaatttatatattttaagcctttaatggtgtacataaaattaatttaattaaatacttttatagttttaattgtaaaattatcttaattagaaatacttaatttattttaattttgtgccatttttcagaattggagtacaaataatataattgtaagtgattgaaaggttgggagaaggaaaaattcaatgtccaaaagtaatggccaagtttcatgtttggtgccacgtccaaaatccaaaggcacaaacatattccatttagagcctattaagatgtccaaccattaaataatctacttttcaactccatacattaatgggccatagtgtacttcaaggccacaaaaacacaaaagcacgtatgagagtaacacaagactccttttcaaacggtcaacaaatccaagtggtgggtcccactctgaactccaagttacgtgtcccatctgttggaattattttacctaggatcttagatctactaacaagtatgtttatt

SEQ ID NO: 333470 - DNA, 1019 bp, Cannabis indica
aaataatatcaggtttggtgctaccaatagagtaagtatatctgccactaatagagttctcgtaaaataacaattatcaaagtacaatagagatggctccctatgaattgttatatggcagaaagtgtagatctctcattcactgggatgaaacaggggagaagaaatatttagattcggaatcagtacaacagactaatgaagcaatagagaagattaaagctagaatgcttgcctctctgagtaggcaaaagagttatgcatatccgaaatgtagaaatgtagagttttaggtaggatcatgtattcctacgggtatctccgatgaagggagtcaagagttttgggaaaaaaggcaaattatgcctaaaatttacaagaccttttgagattctcgagaaggttggacaaatggcatatcgtttagttttgcctccagctcttttagcagttcacaatgtattccatgttgtcattctacggaagtacgtttcagaccctgctcatgtactaagttatgaaaatcttaagctgcaaccagacttgtcatatgaagaataaccagtttagatactagacaaaaatgataaggttcttcggaataagaccatagcgttggtcaaggtactgtggagaaacagcaaggtagaggaagccacctgggagttagagtccaatgagggctcagtatccagagttgcaaagaccgcttgactttaattttggaattagtagataattagggtttagttatgaaacttgtgtattagttatgaattattagtttacggagatttatttaagtacagaatgcattttatatgttaggtaagataacagactataacaaaaaactgatatatatttaactaactgacaagacaataactaatattaaccaataaccgactatatctaagaaaactagtagttttattgaaatagactaacacatatatcaatatactttagtgactctcttctaggcttcagcgcctattcatgtttttttttttttt

SEQ ID NO: 333471 - DNA, 546 bp, Cannabis indica
ggcaaatctgacttagagttaaaattagtagtggtggtccaagaaagaattactcattttatttggtataaatttaagtctttcagtttaatttgagattccaaacagaaattttcttatatttctaattccaatttacaatacagttttcactttcacaagtgtttaataaccattttctatcaatggattcaaactgtatggaatatgagtttagtattctgtgaccaggatccacttgcactattctaaaaactctttgatgtaactatacctaagtcatcaacaagactaaaacaaaattttttttaaatctatggcatttgtatcttgttacatagtgtttttgggacgagtcaagataacagagagcgaggggtttagaagatggtacacatgacgagaaagatcatctcgactctagaaggtatagttatcacagttaaaataatattagtctcgagaagccaaaatgacaagcaaactgctcgctatcaaagttatcttggctccattctcgacgaggcatccctatgagataaggct

SEQ ID NO: 333472 - DNA, 750 bp, Cannabis indica
attgaggtacgtagtgtatgtggtatagtggctataccctagtatggaacgttcgtactcatctgttcagccttgtaaataggtgtatgggcgcctaagtacaagtcggaaattatatgatatgttatatgcttttcctactgagtctgtcgactcacaattctacttccatgtgtaggtaaaggaaaggcgaaggctgaacaggagtgaacctgagcaagggtgagattgtacaagtcgaagcggcccgacctagagtgttgggtgtcgggacatatgggagttttaatttgtagtcgctgagcgacctgtaaattatgtattttgggatataaagtttaaaaaatttgaaaaccggatcccagggcttgtaaatattttattatattataaaatttattaattaatacaaaagttttaatttgacacgtttttcgaaaaaattctttaattagcaaagattgcaacgtaattgaaaaagcactgtagcgtgccttagcattagggcattacataaggcttacggtatggcaccaccgagtgagtcgcattgtagatgttttctcttgtgtccaagagaatgttgtaggtagtgaaccttgggttggatctcgccaggctggctcaggggtattctttagttgcttgttatcattgttgttactaccataactgttattccccctcttgccattgttggatccattcataccattactattgggttttgtgccctaaataaaacccttt

SEQ ID NO: 333473 - DNA, 363 bp, Cannabis indica
atgggggagaaatgggtggtggaggtggtggtcggcgagggtttttcgtctctgctaggtactggttctttggctttggcttggtttggtcgagtgaggaagaaagctgagggagggtttgtcttataaccctatggcgtcggttcctttataggaaccgacggcataggcactacaacaaatacaccctttagcggcgatactattagcggcgggcactctccgccgctaataacaggggtattagcggcgggcagttcgccgcaattgctccgccgctaatactagtaccggcgggcccgccgcaattgctccgccgctattagtgggcccgccgcaattgctccgccgctattagtatta

SEQ ID NO: 333474 - DNA, 707 bp, Cannabis indica
tcaagcgtgtcgaccatttttttgactcgtgtctaattatctcaaccctgacccgactcataaaaaatcgtgtcgtgttcgtgtcgacccactgtgacttgttttgctattagtaaagctaaaattgtagagaaaattaataaatttaagctccattaaaaaacttatatacatttatatatactagaagaaagttacgtgcaagacacgtatatttagttttatgttaggtgttctataatttaattgagaaagattcaataaataatcatataatttaaaataatttaaaaactaattttaattagtgtgtggggttatttgaaaatcaatagtgaaaagtcaaatttaaaatttgcagaaagagaagaggagaatggagattagcttgaaatatatttaaaaaataataatgctacacacttactatggacacttaactggagccgacaataataaaattataaaaaataagggtagcaggcatataacgggacatatgaaagaaagaatataaaaaacaagaaatatgatagcttccaaataatattataacaaagcaatgctctccaaatttatcttaatatcatttttctcttgaagcctctcatcaatctcatagcactccatgatagattcaacaaaatatatgtgtttatgtatatttggattcaacaaaatatatgtgtttatgtatatttattttg

SEQ ID NO: 333475 - DNA, 664 bp, Cannabis indica
taaaaagttttagaagcaaaattataagatcttcagtccatctggagaaacaaagtcaaagcgccgagtcttctttgaatttcttcttcttgaatcttgagtgttgctttcgctctctcagcttcatgaaatttttctacattagcttggtcctttgacagatttatctcctcagcgagatttcgttgctccttcaaggaatcattgagactagaaagatctacctcaaatgatgctttatttacttcgaactcagctcgtcgttgttgtatggctagttctgctgcaataatctctacttcctttgctttaaaatcttcaaaatcctttgtcttgttagtgacagatatggacaaatgatctatagctgccaaattatccttatcacgacgaagaagatccatgataagagattcatcaagactaagggcattctcaacaacttgagcagaagcgagagacttttcttgggccttgagcaagtcattgacagagtcagtgaaccatgcaacctctgctaaaccacatttataatgcccgcaaagggtactcaacacgtcgagttgcatactcacgtcagcacgatgttttgaaatgtctgatgtggtcaaaggagaagatgacaaatgaagaatgtctttcatgcattcaatcacaaactttt

SEQ ID NO: 333476 - DNA, 578 bp, Cannabis indica
atttacataccaattagtgttctaatttagacaattttcgattgtgttgttgaggatattctattttgtttggtcactgtaaaaaatattgttgtaatatttatatttaatatttatttttgtattttttctgaattgtatataatgtatattgttaaatatgaatatatattattctaaaaaaaattgaatatatattaattttatttattttaattaatattttatttatgaaaaataatattattatatatatttaatatttaaaaaataatttcatttatatttaatttaatttacataatacttttgccaacagttataaacagtcatttaaaaagatttttcccaacagttgtaaaccgtcatttaatgtaactttttccaacagttataaactgtcttttaaagttccgcatttttatgacacccacatagccaacggttttaggaaccgttgggaaatagtataaaagacagttataaaccgttgggaaaactcacttttgtagtagtgatctcataacattattgttatcacttttaaaatatcaccatatacaatctttgatcatata

SEQ ID NO: 333477 - DNA, 625 bp, Cannabis indica
ttcccttcttcaacatcttgaagaagtgtcagaaatttgaatggcgcgacgagtgtgaggaggcattcaaaaaactaaaagagcacatggccaaacctccaatcctgtcaaaacccgttctcagagaggacttgttcctatacttagccgtctccgagcatgcggtcagtgcagccttagtccgggaagaggagaaaactcagcatcccgtgtactatgtcagcaagcgcatgataggagaagagatgcagtacacagtcattgaaaaactagtcttttgcctcctaatggcctcgaggaagttgaggccctacttccaggctgacccaatcaaggtgttgaccaaccacccactccggcaagtcttacagaagccagacgcatccggaaggctcctcaaatgggcaatgcagttaagccaatttgacctgcactacattccccgcatttccataaagggacaagcgttagcagacttcatcagggagtacaatgaagctgaagctaccgcgaacataccgacaccatcagtcccagcatggaaagtatttttagacggatcctccaacgagaatggatccggagcgggggtcgcaatgatatccccgagcaaactttgactcca

SEQ ID NO: 333478 - DNA, 1886 bp, Cannabis indica
ccctcgtaccccctgcaaatccatttgcatttcgaaatacttgaggtgggaaagaggatcttctcttcccgtgtacattttccatgttggcattttaaacttgtggggcaacgccaaaagattgatttcaggggagaagggagttccacgtgctcggtccagctcgagatcattatttctctgtccggccatgccttggaacatatttttcagctcgtctacctgtgcctgcacacctggacttacatgcttggtattttggtcgatttgaatcacatcagtatctttatgagtcgaaatttgagcacgggctccgggctgtacgatcgtcgtgacattctgatcgtcgactcctctccttatgttcagatttcttcttaagtcatgagttgtccccaacctatcgaatacggaagcgcatgtctgcctcagcgattgattttcttggttgacaggtggaatggcaccgttaacatggttggaactatcaggtatgacctctcctgatgaattactcgataaggtctacccgcctaccgctaggcccccaagcgaaacttgtgaccagggatttggcggctgaccatttatagtcagggaagtattcatcgctggatcttcgtccatctcacccaggggatgacattcgaaggttgctatcctacagtttggcaggcttttcgtatcagcacaatagcttgccgactacgattttcaatctgagtatgatgagcccttaacgcttccatctctttctctctccactcggcaaacatgcgtctttgttcctcaaatgcgagatttaccacagcgcggagttcctcctgatcatgatatagggtattggtatgaccttgcatgagtccaagagcagcgcggaggttttggatctcagtatcatctccaatggtcgatcaaacgttggtagtaggtggaacgactgtgttatgaatgccctggctgggtgctgaacttgtattcccagtctcttgcacaccaggcgcgatttcatctacaggagtcgtcacaccatgacctacattcgacggatgttcaagattaacacttggcggaacccttgcgtttcctgggttctgcaatgcaggatccaccgcctgtggattagttggatcaaccaggcccctacgagtctgtaccaccatcgtacttgtggttagattttgaatgaagagcgattcttgattctgctctcaatgaaagcaccaaaatgttgacctcgcttttagccaacgacagtgagtcttatttagtaagcgataagtaatttatagcgatagatatatagtaaagcaatgtaaagacacaagaattttatagagcttcagtcccgaacagttcggtaatagcctaatcctcattatttgtattgactcaagaacaaggagaaaggttccttttcttatagctcttacagcggtatctctgaatatgaattcttggataatatctctctaccagaatgtttcgaccctttgcccagtgagtatgcatcactgtttataaggctatgagcttggggaagaagtatttcccttctcgttacaatgaatataagcagaaagattgcataataaatacagaatacattgatcgtgggatttggacagcttgccatatctctgcaatctgatccccaagttatagggatttctttgatgactcacgatgcgaaagctgaattcgctaagtgttgctcgctctgagctggttgctgatcgcttcgcttcaggcatgcatatgaggcatcctgtttggactgtattctccgagcagattgtaacaccctaactaccttaggcgtattacgtgatttttaaacgtactgtgcagctcgttgctaattaacgaggtttatggaaaaacgt

SEQ ID NO: 333479 - DNA, 708 bp, Cannabis indica
aaaagatttagatcaaacggatttttaaaacccgagttaggacccttttttggcccactgtgctgagaaaacggcagtccgcttttcccagtaccagagaaaacggactaccgttttctacaggaaccgtgggcatgggacttttggtctttcctaactcggttttctctccataaaaccattctaaaccttttcctaaccctatttgacagcctcctaccctcttctatcaacatttctcttaccaaaacctaatccctcttttctcttttcaaaatcctacctctctccaaaatcaattatcttccatggcttcatcatcaagacaaggaaagaggacaagaacttccatgcaacaagaagagctaaggagcaaggctaggcatgaactcttctcccatggaaaatgggcaagaaaatttcaagaggatttctcaaagagggacatactcattggtaagaaatgtgatttggatgcccttaactttattaattttagcactctttttgaagaaatgggttgggaaactttgataggaattaacacttatatctatcctaggctagtgagggctttctttgcttgcattgaaattgcttgtgatcctttgtaacgccctaatgttaaggcacgctatagtgctttttaaattattgtgcaatctttgctaatcaaagaattttgtcgaaaaacgtgtcaatttaaaa

SEQ ID NO: 333480 - DNA, 1036 bp, Cannabis indica
ttttgaaaaataaaaaaaaatcaggggtggcatcaacccttacccgcacggataccccatgaaactcgggggtgcacgcattttggataggtgttatctgaggttccacgcccattcgggcaaattttgtctgaaaattgggccttgcgccgtgtttgctcaatcatgatcaccatcccacaggcacggatggtatgcaatggaaaccatctgcaccaattccattttttttttcgatattttcatttttcatgatttttttcaaggaattaattttgaatttttttgtgtagttttgcatttagatttttatttttgaaatctcaaatctaattatcagtttgaaattaattaatatttttaattaatttcagatattagtagattttgaacctaaaaataaatataatcttttttttttcttaattggttatcttatttttaaaatttgattattttatcttattttcaaatataaggtcagatattttatattttatattatttaaataattttataaaatgaccttatttgaaatttaaaataagatatattttaataaaacaatcttaaaaaatttggaaaattaacaagatattttctgaactttcaattttttattatttttatttaaataaaattataaaatgaaataaatgatatttatttatcattttagtttattagatatttaattttattatcttttaaaaataacataaattttgaaaagttagttgatatttttgaatagatatttaggtttgttaaaaccctaatttttcaaatttataagttgaaattttaaattaattatttaatttaatttaattatttttgaaaataatctttttttatttaaaattttgaaatcaatttaattatttaattaatttaaattaaataaatcttatatccaactatccatcatgttgcatgtgtgtgttttatatattgtttattattaatttttttttttatatataaaacctattattgtttaatctaaattgatatggttaacttgttgacaga

SEQ ID NO: 333481 - DNA, 1006 bp, Cannabis indica
cgaaaccgaccgccgtagtacaaaaaaaaccgaaaccgaaaccgaccgccaaattcggtgatgacgtggaaccgaaaattcggttacggtctggtcggtttgatggtcggtttcggttttcggtttttatgaacacccctactttataatagagctactaatgtagaactttttatctttttttttattatttaatgttctgtattctcttcatctaagagcactcccatcagtttctctactttatctttcaaaatacctcactaaaatcttttcttttcctttattttacctcacacttttatattacactataattctctatatcttcttttattttatttaaatattatatttataaagaatatttattaaataaattttcaaaaaaagaataaaaaaaatatgaaacaaatgctattgtgagagacgaagacacatatcaacaaaaaaaaaatatttaaatcgaaaactctatcaaaatacatataaatatggaaggggtttcagtagttacatcaaatatataatcatcatagttatatctatttttagtcattggatcactattcaatggttgtgattaatttagaaattaaaataaataaagaacttataacttgatagaaacctgatactttatttctttataaaatcttaattaaaattatttatatttaaaattaaattattaataattattaattaattttttgtaatttattactaaataagaatcttttagcaattaattttcttacacttaaattattgaaatatttgtaacaaaactccttaaaatttaaaattattacacacataactttaattaataaaaaaaatagtaagaatgatctctaattagatgtaattctacactcaatcttatcatcaatactttaagtgctaaataagtgtgttagtccaggattgattctaaaaaaaagaaataaaacattaaaatctaataacaattataaaattaaagataactttttttttgccg

SEQ ID NO: 333482 - DNA, 1550 bp, Cannabis indica
attttaattttatttaaatattttgctgattattttaaatacaacaaacattttctttaattcaatttattacaaatcaaagatagacaagaattgcatttcgtctcaaactctctctttcgcccctagagcaactagggttggctatttttctgtcaaattcaagctagtttctcaaagtttggtggtctcaaactctaggtaaggttttaagcaacttccctttagtttcttgattttaaagaaatggaattatgcatgctcttgatgttttgcttgctgttcttgtgattgttgttagattatgttttcagtagttaaattatggttagaaatgttaatttgagcaggttttgtcaactagttagtgggatgagcaagttttggctcatcaatggtgatttttgtatttgtgcataaagctgtgttttgttgctttgaaattaatctttgggatgcttagaacaggtttgaaaggtttcatgtggattgcggtttatttggttgagatatgaaaatttttgtcattcctccactgaaccggaattccggttcagaggggcctgtaggagccgaaattcttgttggctcccaggaattttcccagaaccagaattccggttggggaaccggtctaccggttggggcaattttgggaaccctagtttttcccattttgtgttatttagggtatttccatgatattcatcgatagggaaccctaggctttcaggttgaccggcacacctgaattcggaatcgaggtaagattagtataatgtcatgcatatgcttgtacatgtttagcgtacatgttagtttccatcagaataacatattatatatgtgttaggaaaattttatatagccatcagattcgtatatgagggcaacagtgaggtgtacatagagttgcaccgagattccatcagatatatgctaggctatcagatagtatggattaactgctaccacatcagtgcgattagagtactgagtacaggctagattcgcggttaatcatactttgtcaagaacgttcctgattcagttagggtaatggttaggtgtatgggcgcctgattataacccgggatttagtatgtttattatgttatgcttttcttactgagtctgtccactcacagtgctattgctatgtgtcggtaagggcaggctaaagctgaggagccgtgagagcgagcaggtgaagattgtacatgtcgaggcggttaggcctggagcgtacgatccttgggacattagggcttctgttgtttagtcgctgggcgacaaatcttttgtaaatgaatagcaaacttttggaattgtatttgtaaataggatcccgaaatattataagtataatatgttatgttttaattaaaaagcaaaattttaattattcacgtttttctaataacctcgttgattggcaacgagctgcacagtacgttgaaaatcatgttaacacgcttatgctagttagggtgttacaatttggtatcagagctgccaggttatcttccgaagatcgtcacgacatgtac

SEQ ID NO: 333483 - DNA, 713 bp, Cannabis indica
tccttccaacatgtttgcttcttatgcataggatactagtatgttaaagagtgtttcatcctgagtgtctttggttatagccgtggctgacttcttcatcttcccgtagtctacatctccataatcttcgacaattcgacgtttccccctatttccatcatcatactttcctttggattcttctctgccaatttcccctgtcttcatatcagaatttttagatgaataccctgacccttcttctaatctctgctgaatcttgcgttgtaccgagtctctgctattcaccccgaacttgccttctattgtattctcacccatggaagctattgagggagaaaaggaagcattcgtggcccttccatttgtttttgtcgattcctggatagtgtcttcaagaattaaatttctttcaagttcttttcgatcatttggtgtgtctccttgtagactatttccaaccttcaaccatttaccataaaccgctgtaccatccgtgccttctctttgagtgagtatgggatcttgatgacaatctttgaaacaatgcccaattcttccacattgaaagcacatgaaaggcaattcttcatattggaatgctatccacttcttttggccgctccaagggaggttaaaattcccgaacacactggtttgttgatagatatcctgattctaaatcgaaaaaatccgtctgcaaccatccgaga

SEQ ID NO: 333484 - DNA, 1100 bp, Cannabis indica
acaaccattgataacaactgacctgtcactactaacggactaggatcagcgtcactctgagtcatagtaaaaagtcaccccggattctgagtaacatttttcttaggttcctcattcttggcctgaggataatctctgataaagtggcccaccatgccacactgaaaaacatgccttggcccgacactcaccccggttcttgcatttaggacactcgagataagatcgcaatgaggacctacggccttgacggccacgtctatttccccggaactttttattaccccttgatgctccggaagccttagccttccgtttgtgatcagggttgccactgtcggtccccttactgacattaccactagcaggcgagttcgatgccgtaacgacatcctttacagtctgctcttttgctacatgttgctcagcctcctcagctatcaaggctagctctaccactttcttgtacaaagtgtcacgttaagtggtaattttcaagtcccgactgatcgtggcattcagtcctctcacatatttctgtttcctggtgaaatttgtgggcaccagatcactagcaaacttagacaaccgatcaaactctagtatgtattcagccattgacatcttcccctgagtaagcttcacaaagtccaccatgtgtgaagttctcacagcaatgttgtaaaacttttcttcaaatagatttttaaattcttcccatgtcattatactgacatcccaagtctgacccacaatgtcccaccagacgtgggcatggtcttgcaacatgaaggctgcatagtttactctctctgttcccatcacccccatattatcgaggatacgggtaatagtactcatccattgctcggccttaattatgtcagtacctcccagaaaagtcagaggttgcagcttcacaaaccgctcaaatacagaatccctatgcagcactataaacccctggttacccaccactggcacaagtgctggtggtaacccttgatcaataggggcagccggcgctggttgccttaatcatcgcaactcttcttcttgacgaagtataatacctcacatttcatggaacatctgttgcc

SEQ ID NO: 333485 - DNA, 755 bp, Cannabis indica
tacaaatttgagccttaatcaattctccctctcttttatttagaacgaaaatatgacagaaattcgtgaaaaatcgcaactacccacctatttgattcatcataccttggaggaagatgaattgcatttacatacggataaacataaggcaatttctgcctaatttcccacttcttcatattttttttttggaagaacaaaagttcattaataggaaatagatggggatcacagagggatccgccctccccttgatacacagcgacttaattggctagcaactctagcctctttagccaaaccattgtactaagagtcttccaatctgaaggacattgattcttgttcagagcttggattgcatgtaggcagtccgagagaacatgaatctcattccagccttcttcgagtgcccaggttaacgccaaaagaattactttaagttcagcttccaaggccgaaaccgctctgtctctagctaatttgtagctccagccaaccgtgtcttccttcagcattacaactgctaagccatcaacccctttaacccaagaagcatcggtgcataggaccctctcttcattcaatctcctaatgctcctgtgggtcatatgttggaaattattttaccaggatcttagatctactcacaagtatgtttattaacaccctaaatatgaactttcgaaaacgatgaaataaacacatataaagtttaggaaaccttacattgagtgcagcggaataatatgact

SEQ ID NO: 333486 - DNA, 1496 bp, Cannabis indica
tttttatgtgtgaagagatggtcatctctgaagaatttagctgaactaccattgcagtgaaatttttaatacaagaaggaatgggtcctgataaatcattagaagcgaagtataatatttgtatttaagtaagctgacaagacttaatgggatacttccataaaacttatttgacttcaaactgagaaaaactaagttgtttagttcttctccaatccatgcatgagggtattaaactttccaaactgttgctccccaaatctagaacttcaagtgaagtgtaatatttcaacgaggaaggaaactttcctgagaagttattgtgcctcaattgtaaagtgttaatacttgtcatattaatagagttagggatattttcggataacttattgtatcctaaattaagtacaacgtaccaattgtgtgaaattctcccaagaattaggaatatttccaaataaattgttattagagagatcaagtacttgtgctgatgtgacccgctcttttgcttcacatagggaagaactgaattcggtgaacttgttattggagagatacaagcgggttgggttaacaagatgagaaggtgggacagaaccttggaattggtttgaactaaagtcaactattaaaaaaggagaaagtggaaaattggtcaatttgttgttaagaaggttgtaagacatatttaaataaatcaagttggaagttatatttgggaaccaactaggaagaggaccaacaatacttgaattagaaatgtctagacgtatgagatttgtttgggttcgaagccaattaggaaattcaggacctaacttgcaagaagccaaatttatggttaccaatttaaatgaggggttgttaggatatttggagttgaatttagatgtcatttctaagttataggaaatatctaggtacttcaagctcgggtattgtagatttactacatgatagatatacccactaagatgatttgaagagacatctaagtgccttaaattgtcaagcttgccaatactctcacttgaagtaccactaaacttattgttggatgctttgaaattaattagatttggcattgatgaaaggtcaggcaataatcctacgaattggttatgacttatatctaatctttcaagattggaaaatgttttcaaacggttaggaaaattaccttccaattgaatattgtcaagagtaagctcactcaaataaggaaaggtgttttcaaagtcatcaacaatcaacccaccaagttggttagaactcaactgcaaagattttaaggaattctttgaggaacttgatatatttccaagaagatcatgtaatattgttccactaagattgttatcatgtaaattcaagaattctacgttaatagtagaattttgtaaccaagtaattgttgcggaatggggtaaatactattttggaccccctattttacaaaagttaccaattggaccttgtgttttgttaaatga

SEQ ID NO: 333487 - DNA, 551 bp, Cannabis indica
ctgtgtgataattgggatttgctaacatcaattgcctatatttttgtttattcattatgtttgttgtttgagtatgaatattgtaatctggagttggtttgtatataaagtgcaaagaaatccagaattttgttaaagaaataatttggggtatattgatatttgatttaattgggattttatttgatttaagagtttgattttctgcatgaatttgtgcacgggtaaatagctttcaagtgtttttactattcattttatgacataacgagtagctattcgagtattgagcatcaattttaaattctttgctttgagccgtgaaagcaagagttatggcagtgtagtgtgctttactaaaagggcttctcggtatcacttcatttagtaagtttaattagattttgttcatatgctattaacaattctacaataagaaagctatagtcacttactggtacttgatcatttggctgctatttggtgatggtaaagctagactggtccgtttaaaagtttaagctatagattggaagaggactatgttctgt

SEQ ID NO: 333488 - DNA, 734 bp, Cannabis indica
ataccattcaccaaaatatatatttgaaattgtaccatttcaaataataaaaatattgttataccaaaattcgctaccatttcattggaggacacatgtcagattggaaggagtagggatcaatgcatgaaatggtaattatatttgaaaatgaaataactcaataaatgcggaagtgacagagtatatttacaatttgctcactataaggtcttacgcgagataaggatatatcaactgttgcctcatacattagcgagaaaccatacgtcaaggaatacgcaaggcgaggcatcaacctcgttaagcatgagtagacgtaagcgagatataatgaccgtgaagacacttagcgtataatatacagtatacagactaagtataacagacgggtaaaccgaagcaactgatagcgaggcatccatctcgtcataggaagacatgcgcatgactgtagaagttcaccttgtcgccaagaattgcgattgtcagatggagtgttatgtcttcagcgtaggagcgacgagatttacattatcaaccttgaaaagatacgggaaaagctccagcttgctatcaaggtcattggtacttggttcttattgagacatcctagagcgctatgatttataacgatttaatacacgattattttgacccagttaaagtgaactaatcacagctttgtgatattcaaatattaattgcatttatcttacgtgatatgtaattaa

SEQ ID NO: 333489 - DNA, 609 bp, Cannabis indica
gaggtatcttcgaaaatctttggcatttgtcacatttcttaacataggcctttgagtcataaatcattgtctgccaaaaataaccatgccttagaattttcttagataaactctgcccaggggcatgatttccacataatccgtcgtgcacttcagatagaagttgtgcggtttcttcttgagtaacaaatctgagcaacgacattgagaatcttcttctgtacataattccctctactataatatatcgtgctcccttcctcctcatctttcgagcctcattccaattacttgggagttccctagtgttgaggtaggcagctatcagtgtcatccagtttgaggaagtatcaatcattttgatctcttccgtgccaatgatgctaggctcttcgaggaactgataggaaccaagttcgccatatcacttacattactacttgccaatcgagttaacgcgtctgcagttgtgttttcttcccttgggatttgtttgagaccgttgcatttgaactatgccagaaagtcatgtattttgcttagatatgctatcatcttttctcccccgagcctcgtattctcggatacatgattaaccaccagctgtga

SEQ ID NO: 333490 - DNA, 634 bp, Cannabis indica
ccctgcgaccaaaaattggaaccaaaacctgaagttggccggggctggaactaggatttggacttggacctagatctagaaccgtaaccggaccaggacctagactccaaataagacctagacccgaatcccaacccaaaccttgactcgggacccgacctcgaacatgaactcatacccaaacaaggaacaaaactagggacatagaaccagggtcgggacttagaaccgcaccccagtcttgatctcgaacacaaacttagaaatgggacctgggagctgaacaagaaccagaccgagacccgtgacattgatcgagatcttgactcgggatttgggtaacagggcctcgaacaaaccagtagtcggtgcctagatctgacactcagattagtacgagaacctagacgaagaaccgaacccgaacccaaacctagacatgggccccaaaattagaaccaggacaagaattgtcgaaccaggaacctagaacaagactaggaccacgaccaggacctaaacccaaacacgaacccagatcaaaacccagacaaagacctaaacccgaaccgagactaggactcgaacccgaacctagaccgggacccaaacccacacaataaccgggacctgg

SEQ ID NO: 333491 - DNA, 731 bp, Cannabis indica
gatattttagaaagagggtttggaatcttaatgcctagcggggaattggttatctctaataggcacattaggtttatgccagttaagatcgagggaagggagttgagtgctgaccttatagaactggaactaactgagtttgacattatactggggatggattttctatccaagtattcggccagtatagattgtaagcggaaaatggtgactttccagccagaaggtgaagatccatttgtctatgttggatcagttcaggggtctcggatcccagttatttctgtactgagggctagagatttactatacagtggctgtgtaggatttctagcagtggtgattgactccagcagacctgaaacatttgggcctgaggcagtcagggtggtaagagactttctcgatgtgtttcccgaggagttgccgggattgccgccacaacgagagattgattttgtaattgatctggcacctggagtcgaacctgtttctaaagctccatataggatggctccagcagaactcaaggagcttaagttgcaacttcaggggatgcttgacattgggtttatccgacccagtgtatcgccctggggagctccggttctgtttgtgaaaaagaaggatggttccctcagaatgtgtattgattatcgggaactaaacaagttgacgattaagaacaagtacccgttgcccagaatcgatgatttgttcgatcagcttca

SEQ ID NO: 333492 - DNA, 549 bp, Cannabis indica
cccaaaactgtaactggactagggcgcagactcgaacatagacccacactcggattctgtgtctgggtttgggtttgggtctgggtctgggtcggggtttgagtccttgttgagtctaagtccaggtctgggtccaagtgtggatcccgatctgggattgggttcggtctatgtaagagttctggtccccggtgcggtccaggtttgggtttgggtccggatctaggtcctgatctaggtcccaggtttcgatcttggtctgggtctgggtctgagtccaggttcataccttgatccctatctaggtccgagtctgtgtttgggattatgtcccagatttaggtctaatccaattctcgattccgatctgggtacacggccatgtctaagcctgagtttcggtcttagtttgggtcttggggttggttcgagttcggttctaggtcttggtctgggtcctggtcagggtcctagtcttgttacacagtcctggtctagcagttcttgtttaggtgctagttttggctccttggtctaggtctgggtttg

SEQ ID NO: 333493 - DNA, 574 bp, Cannabis indica
tagtgtaagaggtattttagtaattaaaattacataaaagatataaatgttgtccacaccttataaatgtatttttgtaaataaagtgtcaatttatattttctatataattattctaaaaaaaattcactcttgaacccctattttcttcaaaaaaacaaatatttaaatatttgtaacatgctcacatgttggaaggagaaagaagctaaaagggagaggggtggaaggagaaggataaaaggattgttgtttggcaaaaaaaagacaaaaaattaaataaattatattttctgctgttcacaaaataatatataattgtattaaaaaataataaaatagtaataattttttacatttattttacacttcatttgtttaattttactcctaatatcaaacaacacaaaggagatcaactatctttaactctactccttggtgttgcaacaacacaaaagaggtcccttgttgatagtttgtatcttggacttactcactatgaggcctaacaaatcaacgatgttatcttaaaggtgaataccattttagaccatgtgttttgtaaaagtta

SEQ ID NO: 333494 - DNA, 727 bp, Cannabis indica
atgacttcgtaattgtcttcattatcgctattgtgatatcttccgattcactagagacatatgagagacatcttttgatggtgctgtaacatctctagaagcataagttttgtcctaaatataagaaacgcgagttttgttgaccccaaaattgttgtgaaggttagaggttttctggaactaataggatgctatggaatgtttattgagggttgtctacgccattactggaatcaaatcaaaagaactaaaatagaggttaactattgtaccaatgtcaacattgctagtcagtgaggagaaattatgatttgatgtgacacttccaaacaaggattagattgcattttgatactgtcaaggagagttattgcatgtgtttctaagcgattaaggaagtgtgagtaatagtattccagttataatattgaattgatagcagtggcttctaccttgggagtttggtgcttttacctgtttggcaaaagtacgaagtttatatgaatcataggagcctcaatattttatcatttagaaaggatttaattaggaggcagcgacgatggttagagctgattgaagattataacagtatgattccctacctttcagggaagaaaattagtagtggatactttaaaccaaagaggtctaggaactgtctagcaaaagtttgtaaacaaaaagatctcatcaaaggttgctataaatgtaaccagaataagga

SEQ ID NO: 333495 - DNA, 493 bp, Cannabis indica
tttatcggttttttcggttcggtttgggcgggttattcggtttgggcggtttacaaatttttttgtacagccatatttaaaacccacggatttttccccagtatcctttccaatgaagagtttgtcttgtaggagagaaccaagaaaatggttgttgcagtggttttcttgatttttaggtcccattctgttttccccagattccatagtcgacacagtatgttctttagcaaagaacggctgaaaggtttcattgtgcagagccttccaattagacaagacttgcctatgtcttcttccccttcttcattaatttctcatccttcttcatctgtaaccttcaatttgctagtgcgagagagaagttcctccatttgatctatgcttgctgagcacatcctttgattagcccttccgaagagagcatgggagaacaccagtcgcagagaatcccaatatatatattttatatggtataattaatatccaaaaa

SEQ ID NO: 333496 - DNA, 957 bp, Cannabis indica
tgacgaggctgtacgaactattatagaggatattatagagttttgagcctagatgttctacgtatcttctacaaaaagtcaagaacaactacattttctacaatggaaacccagaaaattgaaggtacaaagttaaaggagaaaaagatcgaaaacttactcactgtttgaagcctacgtgttgtcctaatttagatgctcggatacttttgctagaaatcccacgacagacttgaaagaaaactcctttatgctctgagtttgttttgtggaaaaaaatggtgaaagtaatttctgagatatttcagccctatttataggctaacttgtaaaaaagggtaatcaattaaaaatccccagatgcttcgatttccccacaaaagtaaatattgggaagttaaaagcaatcaagtgcctcaagataataatcgtcaaaggcgtgcaaggggaaacgtgtctcgaggtattaattagctaaaaactgaagggatgcctggtcagactcacatcgaatcacgaacagacgcacccgacacgtgtcacccattcaaatgtaaaggcagctcggatgaagtttgcacgcaacttcggaagtcctgtacagacttgggggcaaatgttatcctaatttttgcactctcacgtggcatcacatgctggtgacacatggacttgattcttcatatctggccaaagaatatgtttcgagctaaacaccgcgtatacctatacgatcaaggtcctcccagccgagcagtgaacaatccgaacaacatatcaacacttagcaatttcaacatttgcatcgtgaaacataagagcaatccctacaaatttgggatcatatcacagaaatatggcaagctatccaaatcccacaatttgtgtattctaaacataatttgtatccttaccaattataggcatggtaagaaaagggaaaccttccctcaggca

SEQ ID NO: 333497 - DNA, 867 bp, Cannabis indica
aagaaaaccaatttcctctcaaagctctctctttctctctttttcggcctccttgagcagcaaggatcattggaatttttcttgtgaattcatctctttttggtattctaatcaatctaggttagctcctaatcctttcctctttaagtttgttgaaaaattatgaaatgaaaatagtttgcatgcttagtttgggttgatgttgttgctgtgattttatgttgtttctgaggtttaaagcatgttaatttgagtagattagagctggttatgatgcatgtttgttactttgattcaagcttggaaatttttagtcaaaattatagttttcaaagaaaagtgaagaatcttgttactgtggttgttgttgctatgaaaatgcattttttggtgttatattatgttgaaataggtagagatatgcatgatttagtggatgttcggagggttagtcaagttttgagtttttgaactcaatcttgaacctccaatggtgaaatgagtttctgtggttgaagcttcgttcttttgctttggatttgttcttaggggtgttgtcagaggaattttgacaacaccaattttgtgcgagtattcaagggttgcttggataccaaaaaatagatatgcgagtactcacttagaatggcgagtactcaaagaatatagtgtataatatatgcgagtattgtaaagagtatagaatagacacagaaaaatatagtggttcagctggagcttcaggctcggcctgcctaatccactgttgaaaagagtactctggctctgtttctttattcagatcagcccccctttgaatggagggggaagcccttacttataggtagtaggcatcggttacaaata

SEQ ID NO: 333498 - DNA, 729 bp, Cannabis indica
gacgataaagcccggaaacttactcgacctaactcaaaaggagcactttaagggattgagtttcatattgtatttcctgagcactttgaagcattcgtccaggtcatctataagccccccaaccttcctagatttgacgagcatgtcatccacgtacacttccatattttttccgatctagtctttgaacattttatttaccagtctttggtatgtagcttcggcattcttgagaccaaatcacatgactttataacagtacaagcccatatctattcgaaaacttgtatgttcttggtctggtggatgcatcttgatttgatcgtaccctaaataggcgtccatgaagcttaatattttgtgttctgctgttgcgttcacaagttgatctattcttggaagtggaaagcagtcttttgggcacgccttgttgaggtcggtgaaatcaatgcatactcaccattttttgttcggcttgggtactaatacgggattagcaacccaaaccgggtataaagcttaaattatgaaattgttgttgcgcaacttttctacctcttcttttagtgctagggctcgttccttgtccaacaatcttcttgtttgttgaacaggccaaaaattcagatcaatattcaagacgtgtgaaattatagaaggatcgattccgaccatgtcctcatgtgaccatgctctcagaaattttatcaatgttgattttacttcgag

SEQ ID NO: 333499 - DNA, 515 bp, Cannabis indica
aacaagttgatgagttcttgaaccccaagattgcacctcaagagtttgtggatgagattaaggtacttttactatgatataacattcttttgtttaaaaatttgcagatattaaatccatattatatatttaaattgatgttcaaaatgttctatttttcatactttaatagaagtgaatatcttatatattcatctatagagaagtaggatttgtgaaatttatgtgctgcaatgatataaggatggaaacttgtgtattatccgattgtttgcgattgaaattgacagatggttaggttaataaaatagggaaaactctgtccgattttttaaaaatatatttatcatattttctaagtagcgtgcattgatagacatgagaatataatgttattgtaggttaattaaagaataatgtctggtcaaatcggttctaattttgaggatgatattgattttgtgccatcaactaatattgaagaaagacaatctgttagtaatacattagatgaa

SEQ ID NO: 333500 - DNA, 827 bp, Cannabis indica
tagcttcctataaatgatatttcagtaaactaatataattactaaaatgagtactccaccatttatctctattaagccaagcttgaaggaaattatcatttcacttttatgcatttatagaagctatagattctgtattatgagtagcgcttccacttaattgaactatcatgttctcaagatctaagtatcaggaagatctaattggctaactgtaacgaataaatcaaagaacacaaataatactattgagctagaacctaaccatctgaggattgagatcattgatataagattaattaagtgattatgacttagaaagatataacagtaagtttataatttcttaatcaagttcaatatcggtctagtccgatgtataataatacatccaatctaagcttacttacctatgcctttaattaaaagacataacactatccaagtgtaagtaaactacattgttgattatcatatcagtagaaatcttgtgtattgataaatcgtgtgactacatttaatcacataatcttgattactttccactgtgtagacaacgcagtaatcatgaataacaatgtgataagaatttagataaatttataaatcaaacaaatgatcatgaaacaaacatgtgaaccaagcaatacattaaacaagtaagaaaataattctgtttctttattgataaatgaatattcaagattacattaaaataaaattttaattagggcacaaaacccaatacaatatcagtccgtctgatatatagtcgatacattcgatacaaatttactttgctaatgttatggaaaggacattcgact

SEQ ID NO: 333501 - DNA, 532 bp, Cannabis indica
taaaatacccttaattatataagagaatcattcagattatattcattctccaaatagaagcacaagctctgctcaaaaatccaaaatgacgaagctttcctctcctccatttttttcggttggtttggatttcttcaaaaaaattggtaaattacagtgatttttcccaaaaggcgatgaaatattcttctgtcatccatttattcgatttattaatccaatcattttttcctaattcctcacaattgaaggcgacgaagctctactcatttttttcttcttctggttttctcacatctttaaattacaacgattgctcccaaacaacagcaaaagtctcagtcaaatttttctgttagtagtatatacattttgcattatggtatatacattttgtgtactatgacataccatttagaaaataaaataaaaaaatgtggattgtatactaatttgttatatggtatacatataactttaaacaaataatatcaatttttagttttttatttctttctttatttcattcgtc

SEQ ID NO: 333502 - DNA, 861 bp, Cannabis indica
ggggctctcccagtccggtcggagattttgtatttttacaaacttgtttcagtcccaagaaggggacaatttaagatagtttttacggattccaggcccacccttccaatgattgggtggtcccttacaataggcaaactcatattaaggagtatcgccaccgcttcttcttctcctccgggttccgagtagtggagcacccggagcttctcacagactgggtcacgattcccccctatgagcggaccgcgcctactcaggtctttctccggagggcccaggtctttacgacttacgaccgggcggaagttgacgttgagggcctagtcacgacggagaattgcaagaaggccaagcttatcctgccgcaccaatcagttgaggactctaacctttctaaggttatcgttccaaatgtgagggtgcctgccgcggagaagaccttccgggacgaactcatcgccaccgccgagaagaagtaccaggaatatctctaccggaaggcctaggagaaggattattccaaggcccaggcaacatccgggaggccacttcgcgttgggagcccggtcgagaggagaagcctggcgatcgctaggaagccccttcgcattggggactcagctgagaggacgattcccaagccaaagccttcggttcaggtgctgaacaccggggctcctgatgccagtacttccggctccggtaagtctcctttagcagtacattacgttccttccgttggcgaatatgtcagtcttaggcctttagggttcgatgagcgtctccataggtttaggatgccctcgacccggtggggagaccatatgaaggattattatttttcaaacttaggagatt

SEQ ID NO: 333503 - DNA, 609 bp, Cannabis indica
tcaatgatagactcagatgatgatgattctgttaacatgtttgagtctgaatttgataaagagtgtgatgaagatgatgctttagacatgaaaaatgagcttgataggtactttatggatcgaaatgaggataggaaacaaaaggactttgatatcttggtatggtggaaaatgaattcatcaaaatatcctatcttgtcagagatggctcgtgatgttcttgccatccaagtttcaacagtagcatccgagtctgcttttagcactggagggagagtgcttgatccttttcgaagttctttgagtcccaaaatggtacaagctttaatatgttgccaaaattggttgagatcttctcctatgccattagatatgagttcaatattagaggacatagaaacgtatcaatcttgtgattcaggtaaataattaattaatgattgtgaattcttatatgcatatactttttttaaattattcatctagtgtctaataatattttattttattttgtagatatctcattctcaatctcaactacttcatctgaaattgcggatcttgaatagcttgctaaaagttggagttggaattggaagtttgtgtttg

SEQ ID NO: 333504 - DNA, 1826 bp, Cannabis indica
acgcagatttttgttaactaattaataagtcttaatcgtaataaattagacacagaaactaaaaattacgagaagaattatagtgatgataataatgacactaattttttatgtggttatgtagttagctatgcgtagtccacaagtctatcttattcagataattctagatacagaattatggttttacaattagtgatctgtctctaagatttttttttgtcaccctcttctgtataatatgcccctatttattagaatatagcttgacaattatttacatttgaatttgaaagacataattattttaataaaacgtgggttttgaccacatcccattgtaacgcgtgtatagctaaaaatttgcataaccatttgttattcttatctttgaagtagtggatacggacatgggataggagcatctcgctctattcatagatgaatgacttggtttataagtattctagtaatggcatgagcaccagtgtattgagcaaacttaagaactgctctttgaccataaggccttacagactggacaatcatgtcctccatgttctcaagttcttacacttagttattataacgcaaaatatacgctatgtttcaacaaccgattcgcctcgtcaataccttcttacatgtagcgaggtagatgtctcgctatgcattgtccgtagttccctcgtgattatgccatccgaggcaagatggtttcttgtctatacatgaattgatagtttgtgtatccttgtctcgcctaagactatgcagccagcgagttatgaatatactctattaattctatatttaatgagttattccatttttcatttaataatataattatcattatatctgttaatttatattccacttgttcgacacgtgtcactttctgaagtacagccaaatttcgggtataacaatcgccccttaaaaagtccttttcaatgaaaagtgctttttaaagggaaattttattttttatacttaataaaaatccctattacaaaaaataccctataaattattttatacaatactatcctaagaactcctcattttacctaaaatacccttaccatttaatttttttttcaaaacctaaaaaccttaaaaataatccattatctctctctaaccccatattaggagaaccactttacaaaaaaaaccctacactgccacctattgcctctgcgatactcggccaaccaccgtgaaggacgtccgctcaaccttccctcatcagcccaactgatgcccctcgttgtcaaggatgtccgccctacctccctctcattgtggattaatgggtaagtgtttagtaaaatattttgtttgaaagtattttgtaaacttccttgccccatgtacagtatattttcgttagatttatgtggttgttgttggtttgttcgctttttttagttttgatataaatttttcagaaatcgtgagatctcgttgtttggattattttgtctgttcatatttttctggatcggttctcgacacgttctcgatgggttcttgacaccattgtttgaaggttaggaatgatctttctcgactagttcttgatacgttctcaacacggatgtcccaaggtcagggaagacctttctcaacgggttatcgatacgttctcaaaaggttcttcagagatactttctataaatcttcaagtattcaagtcacgattatatccctattttatgaaacaaatttgcattgataagaaaataagaggaaccctacttagtttgtttttttactttatttgtttaaggaaagtacttaagtttcctattttaatt

SEQ ID NO: 333505 - DNA, 1197 bp, Cannabis indica
aaaactcacatcggaactcaagacaagaacccgaacccagacacagacttgcacccaaacccaaacgcacaacccggaccgggattgaagactcagacttggaccaaagtcccagacctagattggggaaccaaacttgaaattagaacaaaaatcgggacccaggagtgggattgggacccaagacccgacctcgatttcaatcctcgacccgaacccggacccggacccggacacagacacagacacagacacggacacggactaggacccagtatccgaatcgaaacgagaccgggacccaagattgggatccgaatcttgaccacgacccggggcttggacccaacccatagtcagtttctcgatcttggaatcgtaccaagacgagactcggactcgggacccgaaatcggaacaagaatcagaatgaggaccttagaattagaattggacctggaccgaaaatcggatctagatgcagaactgaacatgaacccggacccaaactaggatcgataccaagacccaaacccaaacccgaactgacacttgcgctaggacctacgacccagaacctggaaccctagacccgtgaccgaagacctagaccagaacccaaactcgtaccaaaacctagacctaaacccagacccagaccaagacccaaacccaaactcaaaccgaaaaccagacccagacccatacccagactaagacccagacccaaactcagaccgaaaaccagacacagacccaaacccaaacccagaccaagacccggaccgagatcaggactgggacctagacacagactaggaccgagccttgaacctcgacttggaccagaacctggattgggcccgggacccgagacctgggacaaagacccaagactcaaacctgggacctaagaaccgaattgtgacctatatgggggactttggccccaaacccgaacttggaccaagacttggacaaagaatcagaacctagatgggggacttggacccaatactgggcctcagaaccggggtctgagacccaaaatttgaccctagactcgagacacaggacccgaccttagacttggaacccaggacctcactacaaggacacaaccccaaactcggacacaaactaaaacttaagactcggccagggacccgggacccgaactagaacaagactgagatc

SEQ ID NO: 333506 - DNA, 3528 bp, Cannabis indica
taggggttgttagggttaggttatattgtaattcgaatgctaagcttaatttgagttgaatataacttcttggagttggttttggtgtatgggattggagttatgcaagtttaaatttagaaacctaagctttgatctttaatggtataatttgatttagtgtgtttttcttttatttactggctggaatatattctgtataccctaattaggtactctagaaagtttggttgcatttggtggagttttgagcaaaatatgggatttttgggagaactagtataaaccggctagccaattttaccagtacctgtaaaactggttagacggttttggcagggttccctgagtgtctcgttttctcaattctcatccatttcagtgccatagttgggtgtttccctacttctcgagttagtataatccctagagagtatagcagaacctagagattgtgtgatttacctagtttcattatgtgattagggcatccatttagcacaaggctttctgttcaagtcagccaacacacttgaacttgaaaagaaggtaagaacattgtataatatgtaatatgaatatctgagtgtatgtatatgttaattgtatatgcatgcttatatgttagttgcactaccaacacttgtacaattatggtacaaagttcattggtatagtgaatattgtttaagagtacattagagcgataccagcacaagtacgggaaagtcaaggtgcctgtgttatatcactcagtggtactcgatgtacgaatcaaactcgaccaacactcgtacatcaaggtacgtagtgtatgtggtatagtggctgtatcctagtatggaacgttcttactcatctcttaagccttataaataggtgtatgggcgcctagatacaagtcagtattatatgatatgttatatgattttctgactgagtctattgactcatagttctgcttccatgtgtaggtgaaggaaaggcgaaagctgaataggagtgaccctggctgagatgaggttgtacatgtcgtggcaccgcgagctggagttttcagtctcgagatatctggggtttagtattttgtagtcattgtgcgacctagttatgtatttggtacatttgtataagagtttagaaattggatcccggtgtttgtaaaagactatgtaaactataaagtttaatatttattataaaagttttaattgaaacattttttgggaaaattttttgtttagcagagatagcactataattgaaaaagaactatagcgtgccttagtattagggcattacaattttggtatcagagccgccaggtttgtctaccggagcttgccaagacacgtacaatcttcaccagagaaagctcggctcacggttcagtaagcccgtacttttttagaattatatgttgttattaaagtatgttaggaagcatattagattatgattatttattttaagtgtgttgcctttaaatccataagagcggtattaagttctatgatcgttgtctaacctgcctagcttatgggttcgcaggctaagtcctattaaatggatgcccatcaaaatacaagaagtcaaggtaatatggcttagaccggaggcacttagggatatcaaattcactacaatctctgtggtcgcggccgtggtcgtggcagagctcaaggtggtcgtcctataaatccaccacaagctcttctagattgggagcagaggtttgcagaaatgcaagattgaatccaccgacaagatgaagaaattttgaggttaaggcagcagggtctcctgccgtgcctccacaacaagctcaggtcgtggtagctcgagcggtaccaacaaaacaacctattgctggcaaccgtatggagctgttatacgaaagattccttaagcaagcacctccaatgtttatgggaggtctagatgtgatgaaggcttagtagtggctcactgtgattgagaaaattttgaatttcatgggggtggctggtaatgatcgggtgacttgcactacatttcagttccagaaagacgccctagtttggtgggaattggtgtcctcacccgagatgttattattatgacctgggaagaattttgagagttattcaacgccaagtattataatgaagccgtccacaatggtaagtcgaaagagttcactgagttattccaaactgaggggatgtcagtcactgagtataccacaaagttcgatcgtttggccaaatttgcctcaggtttgtgccatttcagtaagaaagaaaagtacattgccaggtttgaatgtgaagattagacgtgatttggtgtttactaccaatgaagcaacatcatatgcagaaacggttgagaaggccctccttctcatgtttatggtagggatggttgtgattccaccgctgatcagaagaggaaagttaccccggcatctggtggttcggggtagagcaagcagttctgtgggaactaaggcagaggtggacgccaggtttactcttaccctgagtgcccacgttgtaagaaacatcattcgggagagtgcaactggaagacatgctttcagtgcagcatggtgaggcatttgaagaaagatttcccttaggcaaagaaagaagagctgaagtcaaagacaaaacctgtacctgttggggtgtttgctatcacccaagctgatgctacagccagtccttcggtggtgtcaagtcagcttctagtcaacaactccttgtatattgtgttatttgattcgagagctacaagctcatatgtggctacacgggtaatttatcttttgggtaggccttgtgatattcttgaatgagggtttggaaccctaatgactaacggggagttagttatctctaataggcacattaggtctattccagttaggatcgaagatagggatatcatatttaggatggattttctgtccaagtattcggccagtatagattctaagcaaaaaatggtgacttttcagcgagaaggtgaagatccatttctttatgttggatcagttcaggggtctcggatcccggttatttctgtgctaagggctaaggatctactacacaatggatgtgtaggatttttagcaatggtgattgactctagcagacctcaaacatttggccctaaagtagtcaaagtggttaaagactttctcgacgtatttctcgaggagttgtcaggattactgccgcaacgagaaattgactttttgattgatctggcaccgggagccaaacctttttctaaagcaccatataggatggctccagcagaattcaaggagcttaagttacagcttcaggggatgcttgatattgggtttacccgacccagtgtatcgccttggggagctcctgttctgtttgtgaaaaagaaagctggttccctcggaatgtgtattgactatcgggaactaaacaagttgatgatcaagaataagtacctgttacccagattcgacgatttgtttgatcaacttcaaggaaagatggt

SEQ ID NO: 333507 - DNA, 1732 bp, Cannabis indica
gttttctttattgatattgaataaaatggattacattgaaatggagtttttattagcgacataaaacccaacagattccccagaaggaaagatagaggaggataaactttttataatgcagagtttgaaagagatagtggaaatacaactagagataagagagataaagttagttgagaaacctaagtaggaaagaatgcgtttaaacaaaactctactcaactttatcaaaagctttccccatgtcaagttagagggtagcccaaccaaggtttctatttttcctggtattaattgacattaataattttattggaaataataatattatcaaaaatgattctattattaagaaaatatccttaattatgagaaataagatcagtgcggaccacctttagtatattggctaaggacttaacaactactttataaatagtagaacaaagactgatgggcttaaaatcacgaaccctggttggcttttttttcttaggaataaggacagcaaaagtctcattaatgggagcaaggttagcaccgttgtttaaaaattacaaagaagatgaaaaacctaaatccattaaacctcatgtccaacatattccaacattatataatatgaagtccaaaaattcactttgtatatccatacgagctcttcagttgggccttaacatcatggaaagccccagagaaagaatgaatgttggcccctatcaatatcacccatggtccatctaacgttcaacctgtgacccatcattcccacgaagcaattaagtgtgacattaaccatagttagttgcaagattatctcttgtaacccgcacgtccaagaccatctccttcgacctttgaaaaatggcccatttgacttcttcaggaaattatattaatgccatgtagccacattttctcagctttgcccactatatttgttgggctttgtgcccaaaataacattttatttcaatgtaatcttttctattcaattattaataaagaaacagatttattttcattacttgtttagtgtgttattgacttcatgtgatcatttatttgtttatttgatttataaattcatccaaatccttatcacattgatattcttatttattgtgtcatcatcacagtagaaaataattaagattgtgttattaaatgtattcctatgatttatcagtacacagaggttaaccgataggaaaatctataatatagtttacttgcaccttggataagtgctatgtcatttctagggcattggttaaagtaagcttgggttggatgcatggagtgtgcattggaagggaccgatattgaacatgaactagatatgataaacttactgtaatatctattcaattcaatatcaccttgttgatcatagatcaggtgatctcaatcttgagatggttaggttctagttcagttgcattatttgtgttcttaaatctgttcgttaaagtcgaccaaatagttcttctcgtgacatataggttaaggacatggtagttcaattgagtgggagcactaatcataaatacagaatctatagcttctatccggatatagaagtcaaacgatgatttccttcgagcttggcttaacagagataaatggttgactactcatttcattgattatattagttcacttaaatataatttataggtagctaagtattttaaggataaaatacattgaagggtttaacggtaaatta

SEQ ID NO: 333508 - DNA, 601 bp, Cannabis indica
caatcatagtgagtaagacggtggtaaccaaacccaaaggagaaaaagagattcaggttcagatcttgataatgctctacaacagaaaggaatcaagggctagagatctgaacggaaggagtcattatattctgctgcaatcaatataaggttttcttaaacccttatgtgtttaatttcattgttttagatatattagtatttaggatgctaatcatcatacttgttattaaatctagatcctggtaaaatattcccaacagatcaaacacgacctgttgttcacaactaatgataataccacatatgttgacatggtgacaaaagcactgcgagctgaggggacaattgagtgcattcaagaatcttaagggacataggttgttggtgaagccactactcctcctacctctggttatgttaggagtggtagtgacccgaccattgatcataaaagaaaggcaccatctgcacctaatggcccaagtcaaaacaagagtatctaagagaaccaaggtcatggtaaccgtcagggtggttttaaaacccgatacacttacccggaaatgtcctaactataagaagcatcatcttggtgagt

SEQ ID NO: 333509 - DNA, 514 bp, Cannabis indica
aaaaaaaaactatatacaacgataattcaaaataaaaaattaagatacgcaacagatacagcccaaaacaactcctaacaacttggcacacagggcggtggggtcaatatgtacattgctggagaagattgtcacctcttggctactctaacttttccttgcccttacctgcaccacaaatcacccgtgagtcacaaggactcggtaagagaagtaacaaagaagaatacattaaataactaattatccatttcactattataaaataattaaacaataacattcaagagtgggtaatataaccaaccatatgaatggatataaaaataatcatatattgtattgcctaattaggcaagcccgtgtcataattttgcatcatacctgatttcactacgtcacctaatcaggtgagcccgtaccacaacctggcaagaatgtatcgcattgcctaattagacgagcctatgccatagcatggcactcacttgtcactgccgcccgtgcctaatca

SEQ ID NO: 333510 - DNA, 753 bp, Cannabis indica
tgttatagtttctccaaattaaaagatctctaaaagttattctggttatggaaagttagatatcttttgaaagggcattcccgaatgtctatcgtgtccactggatgaagtctttagggaagctagcctccccccggaaaggagttctggatggtcagctgttccctactgaaagggagccccggatagttgacttcaattgttgcctctcttactcgggaattccctccaatgtacgctttggtctgtctagcttctaggaagcgtacgtctcatctggatgcacttcatcttaggttgacgtggagattctgttacgaggattttgttaagtcgtaacaaacttaagaacttagttttcgtagccaccacttttaggatctatatcatgaacctgtaaataccaccaacacttagcatttcaaggaacaacgtggtttacggccgagatttgagaggtgatctcgagagggaaggattgagaggtagagagaggtacggagaaaagagagagattgagtttgggatttgtatgaagaatcttttgtaaatgaagaagattatggggtaagcgtgtgagagtaaacattttaagagaattcaacatagagtcgatcttgactgcattgtaccatgttcttcttgttcaattaataaagaagattttagtggtattccagaactggaatagaactatagatcacatcgttttataggacttaaactagtatatatattggtattgattttact

SEQ ID NO: 333511 - DNA, 753 bp, Cannabis indica
acccctatggagggaaaaggaaatctgtcctggaggagcgggaagactctttggacgatgacgctccatctgtacttgttcgggagaacgctcctgccagcatgtagagtacttcaacttgcatttctttttgctaatttttatgccttcacatattatatgccttcagatattttatgccttcttctgactgtattattttttccgtgcaaaaatgtctcaaaagatgattgaggctctgaagaagagagtaggggggagctcgagcttgtctcctccgaccaagaagtctaagggtggtgagactccgcccaaggagaagattccagttgaagaggtcattgatctctctgaggagaaacctgctgtggacccttctaccttaaaggtcgctaagtcaaaaagttcccggggggagttcatacggacctgagtaagctaagattggaactgagcaagttaagggcggatcttaagaagttagggcccctgccctaactctggtgttgtgcacagagactaggagaggcaaagacatgcttaaccactacgtgactcggtcgctcccgaaagtgaatgagcaactgaccggggcagatagtgagttatccttggagctggtcttgggaggagtttttgaaggaaatttctcgagtaagttccctctatcactcttatttcattcttctttggatagttcagatttttaatgcattctccgtacaaactagtgtgaagatggcttacgcatct

SEQ ID NO: 333512 - DNA, 1571 bp, Cannabis indica
atggatcctgaattttacgtcgagtacaagattgatgacgaaaatcgattagcattccttttttgggctgatggtatgagtagaagagactacatgttattcggggaagctattgcttttgatacaacataccgcaccaataagtataataagccattgactgtagttgttggcgtcaatcaccattttgaaacttgtgtgttcggttgcgcagttttacttgatgagacggaagacgcttatatttggttcttgagggtgttccttgattgcatgggcaacaaaaaaccaaaagtagtcctcactgataatgatgaaaggatgggattcgcaatcagacatttgttacgagactctacccatcgactttgtgcatggcatctagggaacaatgccacaaagaatattaagattccagatttcaacaaaggcttctttgacttaatatacaactactacacagtggaagagtttgaagaaaaatgggccgctttgttggcacagttcggccttgaagaaaattcttggtgtcgtactaaatacaacacacgtggtcaatgggcagagacgttcttaagaggggttttctatggaggcatgcgaacaacccaaagatgtgagtctatgaacaatgtactcaagagattcttacttgctaattacagtttacgagagtttgtttcacaaattacccatgctattggcacaatgcgccataatgaagccgctaaagatttcaaaagcatgcataccgtccctcatattcccgctggtaagacagatttcttgcaaacatattacaaacaggccgccgcaattttcaccagaaacatatattataaagtaaaagaacagattgaggaagagcaaccctattcaatttctcatcgggaagatcaaggggattcatacctcttctctttagctagattccaatacggtacgataagacaccgagtcttatataacaaagagaagaatgagttaaattgttcgtgtttgttgtttgagtccgatggtattccatgcaagcatatatggtgtgtaatgaaaagtcttgacattcgagttataccagaatccttaatattaactcgttggcgaaaggatgtcaagacttcttcctctacacaagttggtgaacactcatccgagcatcaaaagatgacccaattgtcaaggtaaattaaaattaaattagcaaataaaattcttttattcttattctattagtgttttaattatgattcatatgattgttcaggtttggagcgctcaatgcttattcaaactcaatgaatttctttgcatcacactcagaagcaacattccaaatggcaaagatggagttggaaaaacttaataccatctttagggcgtcttacgaggagggacagaatagccaaaactcacaaccaaccacaacatatcgtgataatccaaacataatccaagatcctgtaagagtgaggacgaagggcatggcctcaacgaattctagaaaaggaacaaatgatggagtacaaggaggtaggcaatgcacactttgtggaggtcgagatcataataaa

SEQ ID NO: 333513 - DNA, 1106 bp, Cannabis indica
aagaccgaattagtaggaaaataggaggccttcagaacacggttacaaagagcattaggataccttatacaacgccaaatctgcttagccaacaatgcttgattgaacattcccaaatctcgaaatcccattccccctttgtcttttggcttacagagatgctcccacttgcaccaatgaattttcttatctttttcagaggacccccaccaaaaacgcgccgccattcgatgtaagttagatattgtccctttcgttagcctaaaacagctcatagtgtaggttggtattgcttggacaatcgccttaattagaacctctttaccagccatagagaacatcgacgctttccaccctttcattttcgcccacaccctgtttttgatcatatcactcagctcctttttattacgccccacaaaagatggcaggcctaaatacttcccatgcgaaactaccctccgcacccccataaaaccagccaacagagtacatcttgcctcgtcaacatgcttgccaaaacagatctcggacttgccataattcaccatctgccccgaagcatttgtatatttattcaataactccctgaaagtttgacagccctccatcgtagcatcaaagaagatcaagctgtcatccgcgaaaaacagatgcgatacaaacaaatccgttcttccaaacttaataccttgcaacaatcctcttctttcctgagcttgaattaaacaagagaaagcctcagcacaaaacagaaatagaaatggagacaaaggatcaccttgacgtaatccgcgacccggcctcactcgccccttcacttccccattaatgagaaatgcaaagctaaccgaagtaacacatttcataattttttccacccattgactctgataacccagccgaatcatcatcatctccaaaaatccccactccaccctatcatatgcttttgccatatccaactttagagccaccttttgtccattttgaaaccgatttttccgcatacagtgtagagcttcatacccaataatagcattatcatgtatgagacgccctttgacaaaagcactttgtgtttccgagatcactccatccaacgt

SEQ ID NO: 333514 - DNA, 1236 bp, Cannabis indica
gggtctccatcgagttgtaaaattctgaacctcgtttgttttgggtacatcgattttcaaccctaaaattcggtccacatgacaaatcaagcatggattgccgcagatgaccgctttggcatttcttgtatcattttttgtttcttacctgagtggggactggggattgtcaatctgatttgtaaaatctgccattttcggtcaattatcttttcgggtagcttcagtttcacaattgctctcgttctaggcggcttcaatttcttctttcctctgagtttcaccattgttgttgcaagaaaagcgacaatcgttcttcaatttggatagtcatagcgccacatttagttgatttcctttgattttttttcaactcaatatttatcaatgatcgatttccttcaataagtttttttaaatacaatcaaacaatttcataaatagtgctctgatacaaccaaacgatttccttgttattctataaatagttactatagaatttttatttattattattcggaatagaaaacgttaacaagaaaagtcacccaacaatttttcaaattttgttatataggcacattttatatagaatagatataatataaagatataaagataaatataaagataaagaaatatataaggacactatagttgtttcatataaatttaatttaggatttttaatttttgtgagtttattttcatctagaaaaatgatggtatttttaaattttctgatatgtatatatgttattaggggtgttcatcaaactgctcaaaccgcccgcaccacaccgcaccgcaaaaaaaatacggtttgaaattcttcgcggtgcggtcgcggtttgaatttttcctaaaccgcgcggtgcggtgcggtttgcggttttgaattgttaatatgcggttcaaaccgcaccgcaccgcacattataaaaataccaatttttatatttatttaggtatgtccaacccaaagtcgactaattattgtatggttgaaacttaattttttttgcatttttattttgaagacttatggtatttttgataagtgttgctcaaattttgttgtatttgtgatagtttaatcattttgtgatagttcaaaccgcaaaaccgcaaaaaccgcactgcaccacaccattttttgcggtgcggtttttgcggttttttagtttcgcaatgcgggtgtggtttgggaaattagaaaaaccgcatgtgcgggtt

SEQ ID NO: 333515 - DNA, 569 bp, Cannabis indica
gtgtggtaaatacgtcctcaagctcttggaaaatctatctcttactttcattttcttagattattctttgtgtgaagattaaggctttcaaaccttgttattcaaatttttaactaattttttaactgtaaattttatttaaattttattcaattagaccaattagaccttaacaatattaacaacattaaagggggaattatactccaaaaaaatacgaccagcatatgagcaagatgttctaggcataagattagcagaccgttgacaaaacataaagaaacatccttaaaagaagataaaagttatttacaatccttaatgataccaccaaaaggggatgataagacatctaaaaaattgcgcttcaactatgataacacttccttgattgccatggcttcagcaaactctagaagaacttgcccaatatgcagtcccgtaattccagtcacgacccgactcttgtgatcttgaacaacgccaccaaaaccataccttccctcctcgtcaaacaatgcaatatatattcaccttgagtttttcataacatggtttagaccatagct

SEQ ID NO: 333516 - DNA, 412 bp, Cannabis indica
gaaggtatggtttgtgttcattgtgatgctgctgtcattccaggtcaggtgggcgttggtttggggttcgtttggagagattggaatggcaacactctctcggctgggatgagttttctccctgctatttgcccggcgattatggctgaagcagaagcaattgctgctgctttgaaggcgtccccaataggtcagaatcaggcctttgaaataagaactgattgcaaattgctggtggaaagtttcaaggtcaaggaaaatacattaagtgatgttaatatagttatcaacaagataaagaggcaccagatttttcccctttgtacaaagctcatttttgttacgagaaagaataatgaagtagcccataggctagcaaagaaaagtcttgtgtaacatccccgcttcaagc

SEQ ID NO: 333517 - DNA, 836 bp, Cannabis indica
tcaaggaaatccttgaataccctattcatcaaatccataaaagttgcgaagcattggttggtccaaaggacataaccaaaaattcatagtgcccatacctagtgcaaaaagccgtctttggaatgtcctcctcttggatttgtaactgatgatagcgtgatctgagatcaatctttgagaagaccatcttcccctgaagttgatcgaaaagatcatcgatcctagttaaaggatacttgttcttgactgtcagtttgttcaattcctggtagtcaatacacatattcaaagatccatccttcttcttgacaaatgatacgagagctccccagggtgacacactaggccgtgaaaacgctaggtcaagcaacccctgaagctaaattttcaattctttaagttctgttggagaaattctgtaaggggctttagaaactggttctactccaggtgccaaatcaataataaaatcaatttctctctacggtggtaaactcagaagttcatcaagaaaaacatctaaaaattttcgaactaccctgatgtcttctggctgaattatctcaagtcgtgtggtatccaatactacggccaaaaactccgccttgttacaattctctagttgttagtactgaaatcactgggattcaagatccctgaaccgatcccacaaaaacaaacggttcctcaccctctggttagaagattaccgtttatagtcaatactaactgagtacttggataagaaatccattccaattataatatcaaaatccacaaaacccatttctattaagtcagcactcaactccctatcctcaattctaatcggcata

SEQ ID NO: 333518 - DNA, 1296 bp, Cannabis indica
cttgttcggtcatcgatggctgcttgttgagccttcaatgtttccatctccctatcccttcaatcgatgaactggcaccattgctcatcgaacgcaaggtttattgcaggatggagatcctccaggtcatgatgcattgtgttagtatgaccttgcatgagtccaagggcatcacagaggttttgaatctcagtgtcatcccctactgtcctctaagcattggttgtggatgggattctagtgctgggagtgttttgatcggctgcagaactggtattcccagtctcttgcacacctggtgtgatctcagcagccagaggggaagtcacaccttggcccacagtaggtggctgtgtgttaggctgctcgggaatggttcctggtgggactcttatattccttagggtttgcatagcaagatctgtcagtagtgggtcactctgatcaaccaagtctttgcgagtttacaccaccattctctgtgcttgttgaaacttaagacaaggaacaaacttaaatttttgctctcaatgaaagtaccaaaatattgaactcgcttttagccaatgatagtgagtcaattaataagcgattagaaatataataagaacagagcaaaaatcaataagcaataaagaacaccaagttttaaagaggtttggcccctttagttcggtaatagcctactccccttagattgtattgacttgagaacaaagaatacagtgtttcctctcttaaagctctcacaatgaaatctctgagagtttctcttagatccttatctaaagcaattctttctattaaagcaattctttctatcccttttacagtgaagctaaatcactatttataggggctaaatgcatgagggaaggtttcccttttgcttacaatatctatagttggaaagaacatatattgcatatttagaatgcatgaaataggggattgagacagcctgccatatccctctgttacaatcccataattgtagggattgccttcgtgcttgggctttacgataccattctggagtagtcaagtcttggtacacagctcgaagaatgaacctcattctttgctcggataatctgccctttacctgcttggacaagcaaactttgtgcgtgcaaatatgttgcttgaagtctgttcggaatatctcttcgtccaagtgcaagaaatgatggacacgtgtcactcgtacatgctgccatgtcactgttcaaaaaatgggataacaatattgaattcggttactgacatttatgaaggaatctctcaaccacttga

SEQ ID NO: 333519 - DNA, 822 bp, Cannabis indica
tcttgaatttcgaaattctagtgatgagagtgcccacacacagcaagtgatacctcaatcatagtgaggaagatcgtgaagaaagacattcagcaaaaggagtttcagcatcaaagattcagagaaagagatccaggttcagatattgataatgctctgctacagaaaggaatcaagggctagatatctgaacggaaggagtcatttaattccgctgcacccaatgtaaggtttcctaaactttatatgtgtttatttcatcgttttagaaagttcatatttagggtgttaataaacatacttgtgagtagatctaagatcctggtaaaataatttccaacagacattacttccagtgatcgagtttcttaagatatggtgtactgtgtaagtgttaaacagtcaagcgataactgataaagtaaaataaagaaagctaacatcggaataaaagttttattaagttgaaaataatttctaatttaactaaaacaaattgtgataacattttactaaggcttatccacatcaaaaggtctctcgggaacgaccaactaacacactaaagctaaatgctaaaaacaaaaaagaagaatggactcgaaccacatcctcgaagcttatcacatcaatagtagcttcctccttttcctcactctctgcaactggcgcatcaatagcaaaaggaggaaagtagggatgttgatggttgtagccttcaactcttccaacttcttcgaccattggctcactgccatttaaagtaaagtctattttttggagagcttctttaaaacactgctcatagcgctctacaaactt

SEQ ID NO: 333520 - DNA, 498 bp, Cannabis indica
ccaaacgagcccagcagctactacacaaatttgatagaaaggataggaacgagtctataactgaagcagaagaattgatcatttctcctggaaaaagggaagaccacctcccacgttcgttcttcaaaataggagaattcaaccgtcagaggctctgtaaaaggagaaccgaggagtcctaaaggatcatctgattttcactcactgaacacttattcaagcatttacgaaatacattactattattattaccagtccttctccatcagtctacagaggaaatatttattttctatcttctttatttatattatattattctttattcgaattatttactgacttgatcgtcggagtcccttcggctggactatcccagtgtcccaaggtcttaatggtcctttttcctttgttctacaggttgtaagtgcctacgatcctttccattccgatcattgtagattttgccctctacaattgtcgggttttatgccctaa

SEQ ID NO: 333521 - DNA, 1640 bp, Cannabis indica
acggttcagtaagcttttattgctttagtagtttattttagtagtatgatttaagaaaagcctgttaagaagcatgttagtagcctgatagtagaataggtatatgtttttaaattccaaataagcggcaattagtaagttttacttgatcacgatctgaccagactagctcttggttacacaggctattctaaatagtatagacgtcaggcgaaacaccaggagctagggaaacttagttggatccagtggtggtaagggagttcagatcccacttaatatttgtggtcgaggtagaggtcctagaggcagggaacgtggccggggtgatgctaacccgccacaggctgctcaagctgcccaagattgggaaaacaggtttgcagaaagcaagcaaggattaatgaacaagatgaaaagattcgacgattgagacagcagggtgctcctgcaatccctgctccaaaaataccaatagctcctgcccctgttgtgcaggctggacctgtagctgcagtaaaccgaatggaacccttgtatgaaaggtttcgtaagcaggaacctccagttttcctaggaggtcccgatgtcatgaaagtcgagcagtggctaactatgattaccaaaattctgaactttatgagtgtcaccggtaatgatagagtggcctgtgccacattccaattcaaagaagacactctggtgggacatggtgtccctaactcatgatgttacaattatgaccttggaaaagttctagaaactgtctaatgcaaaatattacaacgaggcagttagaagcgcaaaaagagaagaattcactcagctgactcagaaggaaaacatgagtgttactgaatacacaactcaatttgaccgtttggcaagattgcctcaggaattgtcccattcgattttagcaagaaagagaagtacctagacgggttgaatgcgaaaaataagacacgacttaatgatcactactgatgacaacaccacctatgctgatatggtgggtaaggcactgcaagctgagggcacagtggagtgtaccttagactctcgagggactccggttgttggtggggttcctactcctcctacatcaggctttattaggggaggtagtaggtcgaccactgattagaagagaaaggcacctactgcatcttgtggctcacatcagaaaagaggttccgagggaaccaaggtcgaggcaatcatcagggtagctctgaaacccaatacacttaccccgaatgccccagttgtaagaagcatcatctacggttgtgtaaagggcagaggtgcttccagtgtggtgtgccagggcattataaaagggattgcccccaactcaagagtgaagcacaaaagactgcagcgaaacccgcaacatcaagtgtgttcgcaataacgtagggtgatgcagaagccagtccttcagtggtaacacgtcagctctcaatcaacaactcttatttctcggtgttgtttgactctgctggggccactcattcttatgcggcagccataatttttagtaaattgggtagatcgcacgatagttatgaatcagggtttggaaccctactgcctggcagagaattagtcatctccaaaaggtggattaggtctat

SEQ ID NO: 333522 - DNA, 693 bp, Cannabis indica
aatttacacaaaagaaatcactttggtgatattttgtttcaattaatttaactaaatattagatatccttaataaattctaaaccaaaatttgaatttaattgttactgaattattattattattactttaaaattatataataataaaataataataataataataataataataataataaaaccagaatacaaatacaatgcattctcgctgaaaccgtatatatataatatgctttataaagataaaacaaaacagtaatcaatggaaagcatattggtatcacaaacagtaatcaatgctatatctgtatcgcaaattgatttcgtaccaaaagtgcaatcaaaatgttattatctaaattgataaaccaacatatatatattctcaagagaatatatctctcacaaatttaattccacacataattatgcatatacatatgctgcaagtaacgattgaacctgagagaaataaaaaatttccaacagcacacatatatatacacagtaatcgataattacaaccaaagcaaatatatatatattcatagacttttaggatttccgtgtactgtttcaaaaaacagtaagactttttttaaagaaatctgatactgaattaatcccatgtaaactacaatcatatatacactttatcatataaatttcaatacttcaatcgcatatgc

SEQ ID NO: 333523 - DNA, 977 bp, Cannabis indica
aatggagttttatttagggcataaaacccaacaattaagcttcatggatgcttattccgggtacaatcaaatcaaaatgcatccacccgaccaagaacatacaagtttctggacagatatgggtctatattgttacaaagtaatgtcgtttggtctaaaaaatgctggagtaacataccaaagacaggcaacaaaatgtttaaagaccagatcgggcgaaatatggaagtgtatgtggatgaaatgctcgtcaaatccaggaaggctggggggcacatagatgacctggacgaatgcttcaaggtcctcagaaagtataatatgaaactaaatcccttaaattgttcctttggattcagctcgggaaagtttataggcttcatcgtcaatgcacaaggaattgaagccaatccagagaagattcaaccccttctggatatgaagtcgccaactaaaaccaaagaagtacaaaattagactagtcatattgccgcactcagcagatttgtttcaaaatcaacagacaagtgtgccccattcttcaatatcctgcgaggaaacaagcaatttgagtggatggaggaatgtgaaaaagcttccgaagagctaaaagcacaatttgcaaaacctctcgtactctcaaaacctctggacgaagaagaacttggcatatatttagctgtcacggagcatgctgtgagtgtcgcgctaatcagagaagagaacagcgtacaacacccagtctattacatcagtaaaagactcattgagggcgaaggccaatacccattgatatagaaactcgcttactgccttattctagcaacaagaaagttaaggccttattttcaagatcatcctgttctggtgtacactgaccaaccattacgccaaatattgcaaaagccagatgcctctggacggctactcaagtgggcggtggagttgggccactatgaaattactttccaacccca

SEQ ID NO: 333524 - DNA, 910 bp, Cannabis indica
atatcatattctccttctctaaggtaaacaaaattatcatgtcactttgttgacttctcttgtctctgagatcttcttagcggaggtacttttggaatagcttctatttgttgatcattattttgaataacatcttccacaactggaatttcttcgataatagatacctcatcaacaaaaagagcttcttcaataataggcctctcgtcaataataggcccttcattaataataggaccctcatcatcttcgatacgggagcaatatattcatcagcaatgggagcattaccaactgcagtaagattaagactactactatcatctctttaaaaggacataggaataaaggaataaaaattcttttagatgactctcccatttcaagagacgttgaaggaatattttcaacaacatcaaattccagaaatttagcagtctgagattcaacaattcgcgtaccacgagtgggacagtaaaagcgatagccttttgagcgcattggataaccaatgaaataacagcgatttgttctcggatctaactttttcaaattaggatcataaatctttacttcagctggacaaccccatacacgaagatgattcagactaggcttccgcccagtccacaactcaaaaggggtcttgggaacagatttactgggaacacgatttaaaatataagttgcagtcataagtgcttcaccccataaaaactctggaagatttgttctactcatcatacttctaaccatatccatgagagtgcgatttctcctttcagcaacgccattttgctcaggtgaaccaggcatagtgtattgagcaactataccattttcttgtaagtactctgcaaaaagccccatgtgttgtccagattctgtataacgaccataatattctcct

SEQ ID NO: 333525 - DNA, 1620 bp, Cannabis indica
cctaatgtcaccactgcgaatagtgacactgaataatgtcactaatctaggataactgatccagttaaatttttttattgtcaaaaaattgttattaaaattgttgaaaatatatcattttgagttagcatatctaattaaaattttaaaataatattaattaaacaatatgtacaatacaaaaaacaaactctctatctcaagagttaataataagaaaaataattagggtttctcgtttttaaatttatcactattgaatcttgtctttttttttaaggttgtgttttgctacttacaattctattttttcaattacgattagtcttgttcatgtgacattgttagaacttaggataagatgcatgggtatctatctcaaaattaattggcaatgggagaagcaactcattcattttatatatgacaaattattttcacacattagtaatgtgggacgaattctaatacaccctcctcacaattaggattagaaagtgtgggtataacgaacgacctttaagagaccacaagaccgacatgacatttgaaagaatctcacaaggccaaatatagggaaatttgtgggtgtacagaaatttgtagattttgaaacaggtcaaagaccccaacattagaaactggcacacattggccgaaaggtcccaaatagagattaaagggaagacagtggaagtttttatgtttggctcgtcttttttggaccggcgacactttaggctcacaacggatcacaaacggctcatggctcgcctttttggactgtcgacactttgggctcacaacgaatcacaaacggctctgataccaagttagaatttgggataaaatgcatggaattccatctcaaaaccaattggcaatgggaggagtagctcattcatcttacatatgacaatttattttcacacattaacaatgtgggactaattctaatagacatggttttgagtgtgacatgatttttgagtgttttagtctcgtttctatgatatgattgtattttagtcttgtttgtgtgacatggttttatttttttatttcgttgttggttttctttgttcttcgatgactcgctatcaaatcattattagtggttagaaatgactatttctttgcgattgaaggggttgttagtagtgcagttacgtatcttatacaatagttgaatactcaagttacgaggttgaatgaacttgttgcaacaatttctaatgttttatcttttgagcagtggatgaaacagaatatatgtattcttaaggttaattgtgacgctgcaatctttttcattttgttttattttagtttttttttttttgtcaaacaatctaagaattaggtggctgattatttggcttatttttttaattctaatcatagtcgtattttcaacagggagatgtcccgattgaattgcatactgatgtcgcccaattagttacactgtggtcgcgatagtaaacgggctatatgtcgtatccacaaggaggcaaattaccactaaagactagtataaattagggttgtacattggtcggtttgggcggtttatcttatatattttctaacccaatctaaagttcgggttgctaaaat

SEQ ID NO: 333526 - DNA, 526 bp, Cannabis indica
aaatttaaatatataaaattatttaattgcataaaagcagataaaatattacatactatttactattcaatattgtaattattatacaaaaacacaacttcaaaaatcgtaaaaatgatattaatatacttaaaaaatacaaacgcatatataaaatataaaatattaataaaaaataattaataaattaaacgggtccccgtcggggcggggagtgtcatccctgtccccgccctgtttagcgttcggggattaaatttgatccccattccccatttagatggagaatcctcgccctattaggggcagatccccgcatggccccatccccatgggaaaaatgtgcatccctactcatatctctcctttatatatatggaacacttcttaataggtattacccatgaatggtaactaaacaaatttaactataaatattaattttaaaaatatcaaaccatcgaatttggatctcatagaataattaaatcacatatttgaatttttatgcttaatttaactactt

SEQ ID NO: 333527 - DNA, 926 bp, Cannabis indica
ccgctttccattttaggcagtatgcaagcatctagagtatatatgttttacgtgatgccatgctttaaatgttatttgattaatgaatatttatatgaggtaaatagatgagttagggtttaaggcaataagtgcgtaagtgttgtattggtgcttaactcactggggttgttgattacaggggtactagtaatgaccctctacaatcatctagaccacaaggcgagcaggtagagcctggggtagcccaaactgatccaccggcaccgcctccacctccgcaaaatctaggggacaatgcgaggaatggtaatgctaatcctcctgcccactgtcagcaaatattttaagaaatgcgaagtgtcatacttcgttaagaagaagagttacgacggttatgggaaccggctgcccctattgatcaagtgttaccaccagcacctgtgccagtggtgggtaacgaagtgtttgtactgccgcatagagactcagtgtttgagcgattcatgaagctgcaacctccgactattttgggaggtattgatattataaaggctgagtagtggatgagaactattgcccgtatccttgataatatgggtgtgacgggaactgagagagtaaactatgcagccttcatgttacaagatcatgcccgcgtcttgtgggatatcatgggccaaacccgagatgttaatgtaatgacctgggaggaattcaaaaatatgtttgaagagaagttttacaacattattgtgagaacttcacagatggaagattttgcgaagcttactcaggggaaaatttttgtggccgagtatactctagaatttgatcgcttgtcaaaatttgctggtgatctggtgccacagatttcactaagaaacataagtctgtgagaggactgaatgccacaatcagttggg

SEQ ID NO: 333528 - DNA, 835 bp, Cannabis indica
ctaaatctgggacccgatcccaaacacagacttcgacctagatagggatctggatacgaacctggactcggaccaagacccagactaggatggaaatgctagacctagatctggaccgagatcctgacccaaaccaaaactttgacccgcactcgggacccgaacttggacctggacccgaacctagacccagatcgcggtccagacctagacacaaacccggacacagactcggacccgaactgaaacacccacacctagaatcagacccaaagctatactcggactcggacccaaacttgaacccagacctggataagaaccaaggacttagaccaagaactgaatccagactcagatcgggattagaacttgggactcggacccaacctagaccaagaccaggatgtgaacccacacccggagcctaatctggacctagactaaaattcagacccaaacccaaactcaaaccaggactcgaactccgaccccaactcaaacctaaactcgtagtcaaaatcgcatatggaactagaactgaagtacgacttggaccaggacaaggacctaaaccaaaacccgaacccagatcaaaactgagacagagacctaaactcgaaccgagaaaaggaccagaaccttgaccgggacccaacccacacaataaccttgacctggaccaagaatcatgatagggacctaggaaatagaacgaggaccgggacctagtactcgacccagtcccgaacttaaacctaggacccagctcgtaacccggcacaagaaatgaaaccagactgggacccgagattgggatccggatctggaccca

SEQ ID NO: 333529 - DNA, 540 bp, Cannabis indica
ctcgtttggcttggcgttacctgaatccagacatctgatccttgagtaagttctcaatttcctttatgtttactttgcatgtttactttgtcatgggttcgatttcaccgtctgtagtgttttgctttctgaaatgcataatgcctgttttttatcttgcttattctaagcttcatgaattttttttgccctaactcgagaaaatttcaaacttcttgagttttgacttttcgttgaatattcttattcttttatctgttgagtactgtcggcatatttgcttgtgtaaacattcgatattctgaccaaacactcatcctgtgtgttgtcatttgtagaagaactaaggagagttttgggagagcgaacatcgaatcgaccaggacttgcttcaactcttgcacgaggaccatcctcgtctctgttctaacccaccttcttcgagtgaaaggcattcttccttaagtctttcgtccagccatagaatgatggctcgtaccaaaaagacaatgcacaaggttgacgcatctgaccctcaag

SEQ ID NO: 333530 - DNA, 693 bp, Cannabis indica
aattctggttcagtgcaggaaagttaaaaaaattcatttcgcaaccaaaacaacccaaaaccacacgagactctccaaacctgctctaaataacccaaagaacatttctaaagcaacaaaagaccaacccaaatacagaattaaaatccaccattaaagctccaagtttggagttcaaaactcaaactttgttaaatataactaattaacaacaaaacctacttgaatcaccttaaataacaataatcaaacttcagaaagccaacacaaacaccagcagcaaacacagaactcgaacaccaaatttcatgcaaaatttcattacttgaagcttaagaaaatgaaggagattaagtgtaagaattctacgttgaattgcgtcactagcaatggatctttaactcagatttcagcaagaaaaaacgccacaagctgctgattcctagggcttcgaacaagaaaaagagagaaaaggttttatcctaaattctttttttttttcttatttttttaattctctaaacacaagatcaatactatacttatgttaattacaaaattgtggccagctgccagcttaaaattaaaccacaaaacaaaagggtaaatgactaaaatacccttccccacttaactaattaataaaaagatcaaagggtaaaatagtcagttctagctcatgactaaacccaa

SEQ ID NO: 333531 - DNA, 739 bp, Cannabis indica
caagcagtttgacagttaatctttcactgatttctgtgtgaaccatggcatcatcaaaagcttctccgcagtggcacatcctcaagcaaatggtcaagttgaagcagttaacaagaccttgaaggatacactaaagaagaaacttgaagatgccaaaggaaattgtccggaagaactccccgaagttctatggtcataccgtacaacggaaaaaatagcaaccggtcagacaccattctcaatggcgtacggttatgaagctatgctgcccgtcgaactcgagccaccatcccacagaaggttgacgtacgatcaaggtaccaatcacatactccttgcagaatcacttgatgaaatcgaagaaaaacgagcaactgcaaacttaaagttggtagctcatcaacaaaaagtagctcggtatttcaacaaacaagtgaaagctcggaaattctttgtgggagatatggtcctaagaagggtattcctaaacaccaaagacagcacgtcaggcgtactaggacccaactgggaaggaccataccaggtggtcgaagttctcgactccggagcatacaaactgggtaagtatgacgaaaaaatgcaactcattctagtaccacgatattggaatggagaacatttaaggaaatactaccaatgagtactcaggtcgggtagaccacttcaaagtactcaggtcaaatagaccatttcaaagtactcaggtcgggtagaccac

SEQ ID NO: 333532 - DNA, 777 bp, Cannabis indica
ttaattaatatatttttatcaaatatttctctgatttttttatttatttttaatagttccaactaagaaaagaactcgtggtcaaaatagttgcaaatacaaaccaaaagttaccagtaacatctagaaagggagaacttcactcggtaggagacaatgcttcacaattagcatcagaatttggtttttagtaagaaatcatgcacctcttaaatataaagagtcgagtcatgtcccaacagagcataaggcaattattcatactcgtattaaggttacttagcttattcaaaaataacttctttaattttttatgattgacattgtaattttttatgtaatgaataaatgtgtataatgttatttaaatatagctttgaataatttgtttttattatataattttaatgaatatactctaaattaaaaaaaaaaatctaaatttttatgactaaatattagtcactgaataattcatttatgtaattctttatttattattgccaacgaaactatttagtcacaaaatattcgccatttcatgattaaattttagttgttaaagtttacttttttggttgttgaaagtgcatattagtatttatgtgaccaatatatcaatcttattgtgactaactttaatatattttgtaacaaactttagtcatagaaaataacattattcgtgactaaatatattagtcactaaaactcttctacgatcgactttcggactttcaacgactaaatggtgactaaaaataattagtcgcaaaa

SEQ ID NO: 333533 - DNA, 1398 bp, Cannabis indica
tgcgtcgggtatcgggtcgggctattgcgggttaggtgtagtcgggttcgggtcctattgggctgagccccaatgattaatttatggtttgaaatgaactgagccggctgctctgggatgcgactccgccggagaagaaccagtcgccgtcgccggtcttggagaagaagaagcgtgtgtgcctaccatgcgtggtaatggtttaagggtagggtgggtgactcagtgactcagtgtgggtgacgacgactcgagtcgactggtgtgggtgagagtgagtcggtgacgagtcgtccagttccagtccacactgaactgaagtggagatgaataggcagtgaagataaataggcaggcatggcaatgctgaacttttgtttaaaaattgaatattattaaaaaatagtattactatttaatcacatcaacttcaaaaattattattaaatagtattactattaactcagtcaacttcaaaaaaatattgttaaatagcactattcactgattggatggaagcgtggaaagaatacaaaataggttaggcattaatattatagggttactttttcaattttattaaattaataattaaatatatctatcatatatatataaaaaagtatagataaatattaaagagagtacactatcggattacgggttataacctgaacaaaaaaaaatcaattaacaaaacccgaacccgaaacccgtttgagtctttttcgggttgaacccgacccgactacacgggttttaaggagatcagtttttttggctgcgggtcggggcgggtggtcgggtttttgtgtttgcgggtctaaatgtgcagccctaaaattcataactaattcaaataaaatcgaaattgagttctgtaaaaagtaaattgcttaattttttccaagctgtccaataaaaataatttcagaatcgaaaattgaattattttccccagaatttcacaaacatcaatcaatcatcaatacaacacacaaaacaacatgataccatccaaatcacatacaaatcgttttaagtccaaatttcttgcaggcaaattaattaccatggctctggtgctagttgttggaattattttacaaggatcttagatctactcacaagtatgttgattaacaacctaaacatgaacttctagaacgataacaagtaaaccattgattcctttctattgcagagtataatcaaaatctgagtctgaatgtccttctcttggatttggatccttcacagtcttccaatctatgattgaggtactgtttgctgtgtgtgggtactactctgtcattatgtatttcgaaattgtatctctcttgtaaaagaagaaggagatgggcggctatatacagagaaaaggaaaagctcaactt

SEQ ID NO: 333534 - DNA, 762 bp, Cannabis indica
aggtgtttgttgccttgtttatgttctttgggttatatagaacagatcaggaaggtttggtttgatttagggttgatttgagtgagttaggaatttttgaagctttcatgcactgaatcggtcaatcgggtcaattggacctgtaggaaccagaattctggttggtccccaagaaatcgcacagaaccagaattccagttggggcagttttgggaaccctagtttttcccgtttttgcgatatttaggttattgtcatgttttttatcgacgaggaaacttttagtttcaagttaaagtccccaaaaagtattttagcgtgtcactcaccaattttatgaataatgtgatttaggggcctgtaattcgccgagcaactgttccactcaggttggccggcacacctgaattcgataatgaggtaagattagtataatgatatgtatgtgtatttacatgtttagtgtgcatgttggttaagcctgttaaattacattagaaatgtatgttggctttgtattattcgacagtatcacatcggtacggctagagtatgactagcataccaagtataggctgatattatgatcaatagtaccgtactacttgacagtatcacattggtacgactagagtatgactagcgtaccgagtatcggctgatattatggttaatagtactgtcatacgaacgttctagactcaaataagaaagtgtttgtttaaacaaatactacttttttaagaaaatgactaagtctga

SEQ ID NO: 333535 - DNA, 1071 bp, Cannabis indica
ctcttatgtaataaaaagagttttgttatatgcaatctgattactcgacaatggtttgagcttcctaagatttctcgggttcttaataagtatacaatgaaaagagatcttcaaccatttaaaggaattgctagatcggtttgtcggccaaataataataataataatatatacaaagttgtgataatatattattataatagcgatcttgaaatgtattgtatttggacctttcattttgaaattagaaaatggagtagagcattctttactcttggtatgatggaagaattggatgaaaataatttttcatgtaatggaatacaacattggctagtgactaattctatcactaaatgtgttaagaggattattgcaattgatccatatcatgaatatgaagatccacaacacattcgtagcattaacttaccttcaaactttgagagaacgcgaggtaaaagtaatactagaaaggttcgtattggagtggttcatggacgattaaggctttcgtaactttatatgattagcaagaaggatggatttctttggagaatttgggtattcagttttaatcgtaatcataatagtgataatgatgaacataaggagtttcagtcgtctgtgtgaagtttggtgcataaagttatggaaggtttcgaaacaaaaaatttgagcgtggtttctctccatacgggcaatggcactttgatatttctactacaagattcttatattatttaccaatatgatatagtagggaataagatctcaaaagttggtcaatttccatttactcatagggctttaagcaagctaatcactaggaaatttcaagtgcacaccctattgcatcctctatttccaacaccacttcctctacgtatggcttagaattaatattattttttatttatttatttatttattttgaaaattagcgtcgagttacattagataaaggaaacataattagacctcatggtcattacaaagcaggttcttcggcaaagaagagaccggaatacagccaaacctacgggggtaaaagcccacttagccacatta

SEQ ID NO: 333536 - DNA, 561 bp, Cannabis indica
aagaaaacaccaaggtttctgctgctcaaggagggccgaaagagagagggctagagagaaaatagaattttgctttctctttgatttttttccaattttgaaacataaaagatgaaatggtttttcactaagtaaataagccaaaataacataacatacatcacataatcaccaaataaaatgcgttccatgttaccgggcaccgaaaatgtctaaataaactgcccctataaactaacatactaatttgtgattctactgagccatacaccgcgttccatgttaccgggcaccgaaaatgaaaaattataaaatttcactatatgacataaaatgcattcagaattcaaatatagccacataaataattatatataaaatatctataaataatttccataattaaatctttattaattgctaattttccaaattaaactaggtagtctttgcatcaattctaggtcattggcaaagtttaccactatcagatgtacgaagtatacattggaagggaacgatattgatcttaaataaaataacataaacttactgttatat

SEQ ID NO: 333537 - DNA, 986 bp, Cannabis indica
ttggcgcttggtaacaaatttgcgatcagaaaattgcattgctttcccagaatggtcaactaggagagtaagggtgtgacactcggcaaggagaaaattattcttcgctctacccacaatctagatccttacatgtaacgtaccaaacaacagtactagacttcctaacgaagtagtcgaaccctttcttcattgcttggaagccaacaaccatcttcaaatattttttgtctctaaaaaactttactagatgtaactcctcacttggtatgtcacccatagatgtataatgactattatcctcgatgtcttctcttgtaaatattttctcattgaatttaccgtaacttgtcaaagaagaaaatggatcactatatctagaattattggtccctctagcatcactaggatctctaccattagtggtccctctagcatcatcggttcttctagcatcactacgatctctagcatcagtggttcatctagcattactagttccatctaaacgactactactagtaccaagtgtttggtgatcttctctacgaggtcttcttctatgtgttgcttgcctaagtatttggtacaataataaagtcatgttcaaagctacagtagtagggacctctgtatctcagtcatctcttatatcattattacctctaaaatttcattcaaggtcggaccatcaccaaaatcatcatgaaagggcatttgtgctacaatgtcaactgtcagcatcatagtgtttaattcaggtaacacatcaaccgccaacacctccagatttgtttttggaacgaaacttccaacctagctacgagtatccttaacagtacttggtgtgggactaggatcgatacagaaattcttcttcaccaaagtcacaaacaagggaataaattcatctggcttctttgcaagcatagagaaaaaataaccttagatgctagagatcgtagtgatgctagaagaaccgatga

SEQ ID NO: 333538 - DNA, 620 bp, Cannabis indica
atcctataatgaaaccttgcatgtggaatcacgaggtactaaacgcaaattaaataaagaaaattcagcgtcattaaggcataaatgcttaggtcatatctcaagtggtatagaattgagcgtcttgtgtctgatgacattttagagtctcttgacttcacatatttcaatgcctgtgtagattgtatcaaggaaaaatagaccaaaactaagagattaggtgccaatagagcttccgaagtcttataattgattcacacagatatttgtgggtcattccctacggcatcttggaatggtcaataatattttatatcattcatagacaattactcacgttatgggtacctatatctcattcatgaaaaatctcagtctgtggacgtgttcaaagcttacaaaactgaagttgagaatcaactcaacaaaaagattaagaacgtcaaatctaatcgtggtggtgagtactacgatagatatgatggattaggtgaacaacgttcaggaccatttgttaaattccttgaggaatatggtattgtcccacaatacaccatgtcaggatcacctagcatgaatggtgttatagagagcaaaaataggactcttaaggatatggt

SEQ ID NO: 333539 - DNA, 523 bp, Cannabis indica
cattgtatggtctgaaacaagctcctcgtgcctagtatgaaaggttaactcaatttttaatttctcatgattatcaaagaggtagtgtggataaaactcttttcatcaagcatataaaatctgattttatcattgctcaaatttatgttgatgatatagtttttggatctacatctaaccatgaagtgcaggtgtttgttgatcaaatgaaaaatgagtttgaaatgagcatggttggtgagcttactttctttttgggtcttcaagtcagacaaatggaaggaggtacatttgtatcacaaagtaagtatgccaagaaccttgtcaaaaagtttggccttgagtcggctaaacaggtaagtactcctatgagcaccactttgaaattaacaaaagatgagaatggagtgaaggttgacactactctttatcgtagtatgattggtagtctattgtatttaactgctagtcatcctgatattagttatagtgtgggagtttgtgctagatatcaaagtaatcc

SEQ ID NO: 333540 - DNA, 474 bp, Cannabis indica
aaataatttccaacacatacatggtagtaaatctagatcctggtaaaatatttccaacagcaacccctggagttgaattttcaattctttaagctcagctggagccattctataaggggctttagaaaccatttctgctccaggttccaaattaattacaaaatcaatttctcgctgaggtggtaaacctggaagttcatccagaaaaacatctaaaaactctcgaaccaccttgatgtcttcaggccgaacagagtcaggccgagtggtatccaataccacggacagaaaccatagacatccatcactcaacaattctttggctgataagactgaaatcaccgggatctgagatccctgaactgaactgacaaaaacaaatggttcttcaccttctggttggaagattaccatcttcctcttacaatcaatactggatgaatatttggacaagaaatccattcccaatataat

SEQ ID NO: 333541 - DNA, 594 bp, Cannabis indica
ttttttttttgatgaataaggaatcttgtattgctcaaacaatcaatttacatcacaagttttatacaaaatcagctaattactgctacaaactgctataaatctaaactgcctagcaaattacaaattcaaattacaaactcagcacccaattcttgtcctcatcctttgttttgcttggccataccccaacaatcctcctcttgctttcctgctgtacccgattcactattactgtgatttgccactgtttttggttccatagcacatcattgcgtgcaccccagatatggtaaaccaaggcagccaacatagttaaaagcatgctcctcctggttgctgatacgcctttctttttgttgataagatgcagcagctgctgcaaatcagtagctttagtgccccattgcagttgtgtcttccattctgtaaggcatttattactatactcacactggaagaagagatgttgtattgattcattttccttcccacaaaataagcaagttaagtccacctgtgtgtcatatttacttatcctatcttttgttttcaatctgtcccacaaaactagccataggataaacttgtgtt

SEQ ID NO: 333542 - DNA, 1075 bp, Cannabis indica
agagagagagagaggcgtgtggcttttctgagagaaaccaatgttcaaagttgtgtgtgtttttttcctatttgagtttaggtcgagatcccgatccgggtctgaatgaaggtctaggtccaagacaaggttcaactctgggtttgggtctgggttcaggtcctgagtctgggtctaggtgcgagtctggatccgagtccgggtttgggtcctgggttccaatctttgtatgggtatgggtctgggcccgtgtctaggttagggtttagggttttgggttttgggtttagtgtttagggatttagggtttagggttttgggcatagggtttagggggaagtgtaaagagtttaggatttagggtttaaggtttaaggtttagggtttagggtccgtttacagttcaaatttcaaattcgggtcagagggtacgatttaagatttgggtctgggtctgggtctgagtccttgtctgggtctaggtccgtgtttgggttcaggtctgagtcttagtcccaaattcaaaaaccaaccacatgtcgagtctagttcaagttctggtacaggttctggttctggtctgggtttaggtccgggtcaaggtctaattccataatttagacaccgactatgggtcgggtccaagtctcaggtcttgggtcctgggtgctgggtcaaaatccagatcttggaccaattgtagctcatgtcttgggtcctagtacgggtcttaggtctaggtttgggtctaggtttgggtcttgggtcctaagtcatgggtcagggtccccgattcaagttagggtcctacgtcccggtctgggttagggtcccagtctaagtccaggtcccagtccgtgtttggtactagtccttgtctcgagtctttgcctagtctaggtctgggccatggttcaattttcaggtctcgagtccgtgtatcgggtctcgggtcccaagtctcggtccagggtctcggtccctgtcccagtctggttctagtcctagtccaagttttgctctggtccttatctggtctgggtcctgtcctgatctcggtcctggtccgagtctt

SEQ ID NO: 333543 - DNA, 746 bp, Cannabis indica
attggtggatttgaagggtggtgagtagatactggcacttcttgcgatgtctactataatagaaatatgtttaaaacatatgttgctgctactaaggatcagaaagtgttgttgggtgactcccacactactatagttactggtactggaaatgtggaattgaacttcacttctggaagaactgtgattctaaaagatgtgatgctagactttgtcacgtaaataaacgcataatcaagaacatgagtagtttaggcctaattcctaaattatctttaaatgactttgaaaaatgcgaattttgtagccaagccaagattactaaaacaccacataaatctgtgatagaaaaggaaaccgagcctctagatttaatccattctgatatttgtgaacttgatggaactttgactagaaatggtaaacgctactttatcacttttattgatgattgttctgactttacctatgtgtatttaatgaaaaataaaagtgaagctcttgatatgtttaagatatttgtggctgaaattgaaaatcaacttagtagaaagatcaagaagtttcgtagcgatagaggcactgaatatgattccactgcttttgttgaattttataactcacatggaatcatacacgataagacagcaccttattcacctgaaatgaatggcaaagctaaaagaaaaaatagaactcttactgaatctgttgttgctattttattgaattcgggtgctgcttct

SEQ ID NO: 333544 - DNA, 630 bp, Cannabis indica
gaaatacaaagaacacgagggggtatagtgattcagtcaaatcacgatctacttagtcaactattgccaggattcagtatgtcccatttcacggtggatcactcctttatatacaaagcaagtgtcctatcatttacacaaggattgcattcattgtcaatccgttcgtacattgatttacaataattaatttaaaaaacgtaaacattaataaatgaagaacagtttctattcactaaatacagcaatgtatgcgactgataatgtgcgagttggttgttcatattcttgcgtaagctcgtggacttagaatacattcaacacttagttgagtctaagatgtttgcgttcttgtaacctcgcatttacggacatcgtataacgagctgatagaaccaagacatgcgagtctatattggtttatctaggctgttgggtcatcggggccagctcgcatcatagagagtcgatctccgtgttattgcaggaggatcgaggggatactcgcatataccctggtatatgcgagttaaatccgttccttggtcctgcataatgagattcgtacaaatgcgcctagacttggtcatatccgcatcatctcactgagtttagttcaggcgaggttta

SEQ ID NO: 333545 - DNA, 501 bp, Cannabis indica
ttctcatcatgcattggaatggtctttccgtcaatttcaaaatagaatagtcattctaccaaaatggtggaaatattattctattggaatgacattccaattctttaatatgcaattaaacgaaagaatagaatgaagattatttcatttctattccattctatttctttcacctccaaccaaacgccactcaagtctcatacttttcatagttaagcaaaagaaaaaaaaagtctcatacttttcacgagtataaaaaaataatatatttttaaaataataaagaaacaattgagtttgaagtgatgaaggtaaaatcacaatattatttttcttaaaaaaaatatatactaaacgctatcttattcaacaacacacaagggcagagccagaattaaatagtaaggagggcagccgacacatacaacaattgtgaattttggtaatttttttagtggcgtgtgttgattaaaaaaatatcataattttttattttcataa

SEQ ID NO: 333546 - DNA, 593 bp, Cannabis indica
cacagatgctaagcccattaacaattgatcaccagcaacatgggctaacacagcaaagaactatccaatcaacccaagttttaataaaaccaataaaatttaatgtaagcccaaataaaagtctaacatgtaaagcaataattttcttccaatttcgtcaatacatattctatttcgaatttattaaaagaacatttaaaataactgattttacatatttttatctagatacaatgatctagaatttgagtcttttatgtgtcatgtttaagataataatagagtctgtactgataaaattaaggaaaaattatagttttacaaacatttggcacttatgtatctaaaaataaacattagttttgtgtcacttacaaacttgaaactttgagtacttatacttctatttaccctaataataataaaggtaaatccattttggaccctgtattttgcaaaagttacaaattagactttctattttattaaatgataaaatggaacatgtattttccaaaatggtacaaataggaccgtgaactaatttttgttaaaataaaacttaataataatccaacctagaggtgttatga

SEQ ID NO: 333547 - DNA, 979 bp, Cannabis indica
aaaaaaatcatataaagaaatatcaataaatatgtatgttttgttataaaataatatagaataaagatttattgtcaacaaaaaaaatatatatatagaatagaaaaagaaatagtagaagaaagaaaacaaagagaatgagaatgagagattgaatgagaatttcccactagtttattccaatagagtgaatttctatttttacaaaaatatgactagaataatgggaaaccaaattaatcaaataaaaagaaatataatcaagcatttatggtggtaattaatgcattgatttggacatccataataatattttataacaactcccccttaaatgtccatgaaagttgcctcattaaaaaccttgctgaaaaactcgatcaaagaaaaaagagtgtagtgtaaattaacttcccctcatttaggcattcgtggagattttctaatcgacgaattccgatcttgtgaaccatcttctcaaatattgatgttggtaatgactttgtgaataagtatgcatgactgacacttaattgaatatgttggacaccaatatgcattctcttgaaatgtattaagaagaatttggtgtaatgtgttttaattctatctccttcaatgtaccatctttttagttgattgagcaatgcatgaaatattatctccataaaaaactgttggtgttgatactcttttattgagtgtaatctatatatttcctaaatatgttatgccatgatctcactctcacaaattgtctacttgctacataaagtacaagtatgttatcatgatttaaagttgtcttgttaaaaatcttgtcaggaaaacccagtgggataaaatccgagctaagagaaaagagtgtttcacattcataattatttgaaagatgcctcattaaaaaccttgctaggaatattcagtgggacaaaatctgaactaaggaaaaaagagtgcaacatgaatatgtctcccc

SEQ ID NO: 333548 - DNA, 635 bp, Cannabis indica
ttaagactacgattaggtcatccgtgaagctagtaattgtttacactatgtacacaacacaaccattctatcattctgaaatttttctatcactagggtgtttccttagaaggacttagggaaccactagtaactaatcatagacattatactatcatcaaaatgaaaatcgaatttctggggaggtaagtttggatataattcaaaaaattaacttaatgatctttgaactgcatatctaccaaatatttctccacccctatcagttcgcaagatctttaaccacttaccgtaatcgttttccaccatcgctagatcctagtaaaatatttcaaacaactggcctcagagccatggtaatgatttactttcaagaaatatgaattaatacgatgtgtgtgttgatttggatggtttcatgatggtttatgtgttacttgatgaatgtatgtgttgtataaaatttttccatgaaaatattttttatttgtttctaaaaatattttatttggattccttgtgaaaaattaagcaattttggttcttacaaaactcgattaaattatacttagaatgatatgaaaataaattaaattattttccattagtaataattttcaataaatattttgaaa

SEQ ID NO: 333549 - DNA, 880 bp, Cannabis indica
tattttaaacgatttaatgagtacaaaaagtcgagaaggctctcgagtcttcgctggtttgtatgttgataacaggtgttttgccgagaactgatttttggaaggagttataatctcgaagaccagaatcactagttgaattcttcgctatggccgaaccccataagagaattgaaaattctctagcagagttggaaaaaggcaaggataagcgtaaatcactagtgccgcgatcaaggtctcgcagtccccgagggaaaaattccagaggtcgaagcccgagaagacgcatcccacggagacagtgaaattcgaagttggccaaatctcctccaaagaaagagtccttgccgaaaaggaagggtggaccgtgtttcgttaactataccaaactcgcggtgccacgagaccacatctatgcaattgagaaaaggaatggagtcttcaagaagccgccccctatcaggggacaccgtgacaaaagagaccccaaaaagttctgtaagtaccataaagatattggtcacactactttggaatgttgggtcttgcaggatgaaatcgaggagctgattcgaagaggaaagttcgacaaatacaaaaagaacgaggaaggtcatccccgagcggatgacaaagaagaaaaccagaacgcgagtggttcgagaacacctcgcaatatattaacaatcattggagggccccatatcgcaggagactcccgcaaatctcaagagcgatatgccaaggaagctaaagagaagccgctcaccaatgtaaacaatctcagtgaacggccagagaaattgtttaaaagagaatgcgacgacatcacgtttatggaaagtgatgcgagatgggtccatcacccgcatttcga

SEQ ID NO: 333550 - DNA, 1458 bp, Cannabis indica
agttgatgaagcttatgctttcactggccttcagtcaaatttgagccttctctttctatctataaattttgaatccttctctctctctctctctttctcttcaatattttgaaccctatagtgatagagtacatgcccacgcatatcaagttggtactcaatcatagtgtgtaagactatgaagaatccaatcaactgaaggagaatcggacttagattttggtgatactctgctacagaaaggatacaagggttagagatctgagtggagggaatcatttaattttgctgcaaccaatgtaaggtttcttgaactttatatatgtttaaattccattgttttagaaattcatatttaggatgttaaataacatacatggtagtaaatctagatcttggtacaataatccccaacagcaaggccttggccaaagaagtcatacatcaattgtgtacaggatgctagatctatcaattggagccccattttttcataggttgatttgaaaagaatgttggaagaggctccattattaatcatgcacctggcaactgtcatgttccctatttgtgcagttatgaccagggggtcattatgagggaacctgacttacgcaacatctccctctatgaaggagatggaaggttctccaagcttaagttgcttggaatctctttcctctacaactaggatttttcttttttgctcatgatggagggtccgagcatagcgctccatgggcttgcttattttgcttgctatatggggtatgccaattatgaccgctaggagacgcgccactagcaatggtatttggtctctgtttgggcatcctatgcgtaaatttggtcattttgcacataacaacgcagattaggattgttttcctcatcaaaaattgaatctccattttcaaatgcttacactcatttgtgtcatagtcaaaatcattgtgaaattgacagaatttaaaggtgtacctcttgttgatgttgttggaattattttaccatgatctagatttacaaacaagtatgtttcattaacatcctaatatgaatttctaaaaaaatgtaaataaacacatataaagtttaagaaacattacagtgggtgcagcagaatgaaatgactcattacgttcagatctctagccattgattcctttctgtagcagagcattatcaagatctgaacctggatctctttctctccttcttgagctcgattctccttcttgttgattggattcttcactgtcatacacactatgattgagatacaacttgatgtgtgtgggcactcactctatcaatcaaggtttgaaattatgaatagaagaaagaagagaatgtggtttcagaaggctcaggaaaatttttctggaagtgaaatttcatctatctgtaagtgtgagccatcactatctatttataagcaagcactaggtttaggtt

SEQ ID NO: 333551 - DNA, 829 bp, Cannabis indica
aatcggacgaaaatcacggacattcttaggattcttctttttagggatgaggacaatgatggtttgattgatggaagagatatccccctgatgattaagaatatgaagcatggcctttgtgaaattagtgccaatagtggaccagttacgtttgtaaaagagcgagttgaggccatcgggtcccggagctttgtctacagagaggctaaataatgcatttttaacttccatttctgtataaggctcagcaagaaaatcagtttgatgagtggagagcctattgggaatcccttggagaagagcattgacagcaacttcacaagctccttgggaggtgaaaagagagttgaaaaaatgaagaaattgggtcgttatagtggctgtatcatgagatatagatccatcaggaagggtaatgaggcggataaagttgttctttttcctggtggaggcacggtggtgaaagaattttgtgtttttgtctccagcacgcagccaatcgaccctggaacgctgtttccagtatatttcgtccttcaggagaaggccatccagtctggattgaagggaagctatgagggagagagaattgggggagtggtaggtcgcgttcaactgggtatcaagctcagcttgagtctgagagatttggagcttaatagggtgctgagatttactccaattcctaatagtggcgacacagttagattgtttgtctagaaagagcttcaagggagatgaaacagaagtcccagagtaagtccaggaggagataagaagatttgaaaaagagggatctttcagccaatgattttcaaaatgaaaacga

SEQ ID NO: 333552 - DNA, 649 bp, Cannabis indica
aagatcacgccagagttggtttgtggtacaccaatccagacgttcgaggatagaaccatgtttccaagtaaattttggcccaacatgaggcatgggaatatgattacggctatccagaaaatcatggaaagaatgcataacatgaggagggggattaagagaagaattcctatcatttagggaaagataatcattaaaatcacccataactaaccacggcaaaagaggagcagtatcaaataaacgattgagtaaggtccaagtaacagatttaagattaacatagggagaaccatagtaaccagaaaagtgccaagttttgccattaaaattatttataatacagtctacatgattaagggagtaagatattacattaacatcaatacagtctttccaaaagagtaaaatccctcccccaaacccctgcctaggcacctctaaaacactatcaaaacgaagcttgtgtttgaggtcagttccacgtccagcaggcaattttgtctccaaaacaaacaacatcacaggctgatgctgcttgaccagcagggagagattacggaatgctcgagggctccccaaacctcgagcattccaactgcagagactcattgttctcggcgggccgcgtagcagcacccgccgatgg

SEQ ID NO: 333553 - DNA, 614 bp, Cannabis indica
aagagaacgttgaaatctcaaatataagatcctcttccaatcatattagttgttttatacgactggaaagtcaagtgttggcatggcatttttgtggattctatggggatcctaaggtctctaatagacataatacatggcaattgctcgaacacctcagaatagtggctactggaccatggatggtagttggggatttcaatgaaatcttaactaatcaagataaggaaggagggaacttgagaagaccttcacaaatggaagcttttcaaaatacaatagaattgtgtgctctacatcctttgccttttacgggtgagcgctttacttgggctaaaaatacaaatggaaatctaatcaaggaaagattagattgggtaatggtaaatgaagcatggaccgagatgtttcccataacactttaacccatttggattattaccattcagatcatagagctttaatagttaatatgcaagaaagaacagataattccttgaagattatgaggaaaagaccacggtttcggtttgaaaatatgtgggcgaaggaatctgaatgccaaagcatcatcaaggacagttggtcttcctcctcgacatcatctataattg

SEQ ID NO: 333554 - DNA, 648 bp, Cannabis indica
tttttattatttttgtgtatctgaaaaattatccctttatataatgttgaacactttaaaattttaaatacctaatataaaccatctccaatactatatcaaaaatgtgtactaaatataacatttgaactaagttttatcccactttttaaaagaatattagtcatttaaaatattgtaacaacatctctaataaaaaaatataaataaatgtaaataaatgatataaatgtaaaatataatttattttgttaaaattctatactttaatggtttgttaaattatgaagtaaaaatctcacataattaaaagtaatttaaatttgtataacataatgtaaaatttacatcacaataaatattatgattttatatttataattatgtcatttttaatattttattattaaattttaactagtatactccttgtattattcttattattattttatatttttaaataaattattaagtaaatattaaataacatataaatttacattaaattaatttaaattatgacaaaattattttctttacaaaatatgactcaatattcacatttacgttacttttgtgctaaatattggagatgtcttccatatgttgccatggtgtagagtactacagcttagcaaatcatgc

SEQ ID NO: 333555 - DNA, 500 bp, Cannabis indica
atttaacctaaatttaaatttcagcattggacatggcttaaatgatttcattttatcttgtcccttatcattatcacttatcatttattatgataagactacactaaacatgaaaattggacttgacagaaacaattgtgtaataatttattatttgcttacaccccacatgccaaagtagaggagaggacctataatttttaagaaattgaaattacctatcaaaataatgaaaagatatgtgtcatttccatagtgggattgagaaaactactcttgctcaaactcttttcaataatgaatgagtcaagaagatgtttgaatctagaggatgggtatgtttcagataaatttgattctacggttgtgacaaaaactctcattcaaacaatgacataaagttgaatttactttaagttaatttgtcaaataagttaatgagaaataaatttttgattgttctagatgatgtttggaaagatgattatgttgagtggaca

SEQ ID NO: 333556 - DNA, 552 bp, Cannabis indica
gactagtgtaagaggtctttaatcggtgtaaattggattaaaatgagaggacttgagttgagagttactaaaaccatcttccaacaactagaactttgctttaatgctgaggaaaactgtctccatttgtttagagattgcccttttgttaaaaccgtttggttttctggagtttatcctatccttgcagataagatcccagggaattcgtgtgaggattttattgagaacctgcttcagttagatactagtgctaacaagacggagtttctgatatatattgtctgtctttttcaagaaacttggtatcttaggaattcagtcggactaaaaggatcccgtccgttgactgctcccttggtctccaaaatttccgagatttactctgagcatctctccttcaacaaccaggttttgtgtgacaacatgaatccctttctagtgccccagccttctcatgttccagtctccaactttactctgttcactgttaggctatttttagcctaagttttgggtcacattttatagttgtttttcttctttattatt

SEQ ID NO: 333557 - DNA, 1585 bp, Cannabis indica
tattttttttaaccattttatcttttattttacaaataccatatttttcaaaattttttaataaaataaaatgacctaaaaatttattttatttaaattaatttataaatttaattatactaaaataaaattatcattttatattatttattaagtatcaggtttactaagataatttatagtcttctcaaatatataaacctcaattatatgcactttttctactctcgtgataaattaaacatgtaatacgcattcaacatataaaccctactctcaaatctcgcatcaaaatcatagacatttaattggtgatcaggcagttaaaaaaaattaagtatgaatgacatagaatacatagaaattgagggaaaattaaatcataataaaaccacaaatcaatatcaaacaatctccatctagaccctaatgaactgtttagctactcatgttcattgtagcaaattcacaaatattaatttaagaaaatagagaagaaaaaaatactgaaaaaccctctcaaaaatgcctccagtattgaattcgttctccgaaatatgtactctttgatttctctgatttccttctgaattactttctaattaagagtttctaagttttttcagctctgaaaacatactaaaaacactaatgataatgtgtttatatagactaacaaggttacctaaaagatactaaaaggatataaagtttaaacttaaagaagataaaaatcgcaccactatccttttttctcgctatctttttacctttttaattttagaaatttcctgctgcaatgactgatagtattttagttataactctctcgatattgctcaaaattagaagattcaagatgttccgaaaagctgaaagagagatctagaaattttatgttttgactttttctaaaatatgaacatatcatagtcgaatttagacttgaagtttcagctttattttttttacataattttctctattttatagataatcttattctaagatttgaccaatttatacattccatgtgtcaaaacctaaaattaaagaaaacaagtgtaattctattctaaaaagtgacaataaagaagaaaattaactttaaaaataacataaataataggctaaaaatatcctaacaaatccccccaaacaaaatccttactcgccctcgagtaagactaacaactaaacacaacctaaataaaacaagtcaatcagccgaaacatgagcaattttcaaataatataaataacatggttataaacaaaaatttcacctattataatctagaatttcagtttaatcacacccttgattcacctcaatcttttattcagttcatgaactataattagcacttaactaacacttgaaataatttgtgcatgccaattacaaccatcaatctactatcccaaaaatattccatatgcttgctatacctactattatccactaatgtaaatcaatgcacaaccaagaatcaaaaggtctttctaggcttgtaatgttaagcttaggtacaggtagatggatgttgggttttatgccctaaataaactcatttcatataat

SEQ ID NO: 333558 - DNA, 537 bp, Cannabis indica
acacaaaaatataaacaaaaaaaagcatacttgtgaaaaaataagtgaccaagagacaaaagtctgctcagtcacttggggagcacctatacatgtacaaagcatttggtaaaaaacaaaaacaaaatgaacataattgcacgatgattataaacaagggatgaaattcattgagaataacaaaagcattcaaatccaggattaaaggctgcccgatcagccagttgttcaaaaactgaaaaaataatattccaagtttaaagatagcttggccagttaccttgtctcaaaagaaggcctattggcggaacagacataaaaaaaaaagattgtaaaaggagagcacgtaaacagtaggagttccaagctctttgtacgggtcagctagatttgaaagggctgaaggatcatcattttgggtagaaggagcctcaacattctgattggtaggagaggtggaactggtcaccttgggatccccgtaggctgcctgagcaccgcagttgtcgagaaacatgtctttggaagtgcccagat

SEQ ID NO: 333559 - DNA, 1156 bp, Cannabis indica
gatccgccgtgaaatggacaagacataatccttgcaacagtggactaagcagaccgcgatctgactgaaccactatactctcttgtgttcattatatttccagtttttgctaaatatttttgtgttcttaatttgaatactcgccattctgggtcgagtactcgcatatattcttcataccatattattattatttatttttggtgttataaaaattccttcgacaacatttggtgtcgtctgtgggaatgcattactttgcagatttagaaggagaatcacaatggctgaaaaatcatacaaatggaggcgtcaacaatggatcaatcaacattgggacaatgaatgtcccacttccaggaaatagggtacctcccatcgataccatcaacggcggagtaggacggacgaacataatgccgcttaatttgttccctgagactgcagctcacattggggaaacatccacgccagcagccacagtgggacaattctcgcctatcacacctgtcgtggtttctgaaggcattgttcaattaaccaccgacaagtacacgatgatacatgatccaatacgcgctttacaaagttaaaatcgacagacagaacaggacacggcgccctcctcgagtacccactacccgctcagacaatccacaggtaactacctctagacaacaaactaaccatatttgcagggaagaaaggacaggtcaggaggggctcaatttaaatcaaccaatgtcaagagatcaatccgtaagaaacctcaaccgcgaggcacaacaggaagaagatccaaaacatcgtaaccctcgcagtagaccccaaccacgaaacgaggagaatgacgctgagtctggctcttcatcttcataaagtcacactcctagcaggtacaccaggtcaagttcggtggagtcacctcaaggaggaagataccaagttcataggggtgatcttcgtgatcaccttaacgcagtttttagggcgcgttcccagacgccccgaaacgatgaagaacctcgtgatccctgtttgggcgatcagggcataaataaccgcaccaagctaacgcaccagctgcgaatacttgagttgttatccccgcaaatatagtcgctgtagtctaatttgtgagttataattgattaat

SEQ ID NO: 333560 - DNA, 2110 bp, Cannabis indica
ttctagaagcatctagttttgattaaacttatctcaagggctgatcatgatggcttgtctattaatgccttgatttttttgagatttgcttcaatacccttcgcgtcaactatgaatccaatttcttgaggagactccaaagttaacttttttttgggtttagcttcatgttatacttctttaatatcttgaagcattgggtgaggccaatggcatgatccctactctttatggattttaccaacatatcattgacgtaaacctccatgttccgtccgatctagtttgcgaacatttcgttcaccaatcgctgatatgttgcccaagcattcttcagccaaaacggcatgactttatagcaatagagccccatgttagttacgaagctcatatgctcctgatctgggacatgcatctttatctggttatatccagagtatgcatccataaatgacataagcttgtgttcaccagttgcacgcgttattcagatctaaaaatcaatacaagttctccaagttctattaggctttgggttagaacaggattggctatccacgaaggataaaacacctcgcctataaagtcattgactaacaacttgtccacttcttgttttagtgccccttgcctttcgaaatccaagggtctccttttctgtctattcgttgggtagtttggatcaacatttaaatgaaggtagataatattaggggtcgatccctatcatttctccatggctccaggcgagttgatcctggtttgcctttaaaaaacttattagctactatttgagttggtcgtctaggttctttccaatgtatacacactttgtgggatttcttgggttgagaataacctcttccaattcttcaattggtttaaatagttttctttcatcttgaactcaggggtcaagatcgtcgtctttccttgcatcttcttcttccaagattgccattaattggtgaccaactttcctatgttgcaactctatgcgatagtaatcgcgagtgagcatctgattgcctcgcaccactcctacaccttctagtgtttggaacttcaaggataggtgcttgatcgaactaactgcccctagttcgattagtgccgggtgacccaacaatatgttgtaagccaatggaaggtcgacaactaagaagtcttgcataacagtggcagataggggtgcctcgcccaaggttaatgcgagctcaattatgccaagactggcaatgttgtctccagtgaagccgcaattatttaccatacaaggcctcaatttagctttttggagccccatcttcctcagcatttccttataaagaatatttactgatctcccgttgtctatcaacacccttttgatccttttattggtgagatggatggtaatcaccaatggatgaacatgaggatatctcacatttttcttgtcttcctctatgaaaataattggaggttcctctattttcaccttcttggaaggttttggggcaaatgtccactgctcgttctttatctctctcacatatcttttctaggcattattgctttgccctgcgatatgtggccctcccaaaataactaggatgtcctccccttccatgggaagaggttgtaatccctggttgtttgggttattgggcagactaggctggttgtatccatggccttgtcttttaacgtactctataaagtggccttgagggatgagactttctatctcatctttcaattggcgacattcgtcggtcgtttgcccaatatccttatggaatttacaatacctgttaggatctcttttgatcctcgcattcctcatgggctcagggttgccgaagccaaccttttgctcatgtgcgacataaatattctctcaagtttcattaagctcagtataaatagtataaaactacttatcgtgcttcttctatttcttattatcctttgacagttcctttgaaccgtcctttctcttcgcactaaaagcccctaaattatcaatggtcgtcgaaaccgtacttaaacgttgctgggtttgcctcccgagcctattttcaacaaattcatttctttttgggcttcctctttttgaacaaatacc

SEQ ID NO: 333561 - DNA, 544 bp, Cannabis indica
agggcatcagccactacattggctttctcaagatggtaaaggatttcacaatcgtaatccttaaccaactctaactaatgcctctttttcatattcaaatctttttgagtaaagaaaaatttgagacttttatggtcggtataaatttcacatctctctccataaagataatgccgccaaatctttaaagcaaacaccactgtggcaagttctaggtcatgagtcgagtatcgttgttcataatcttttaactaacgggaggcataagcaataacccgatcgcctacatcagaacacaccccagaccctgtctggatgcatcacaataaaccacaaacttctctctgtcagaaggcagagctaacactggggttgtaattaacctctgcttcaactcctaaaaacttgattcacacttgtcaggctatacaaaattttgattctttttggtgaggtcggttaagggtattgaaattttagagaatccttctacgaaccgacgataataaccagccagacccaacaagcttctaacttctgtcac

SEQ ID NO: 333562 - DNA, 775 bp, Cannabis indica
ggcacacctaaaatcaaaattgaagtaagactagtataacacacatacatatgcacatgttatttttatgttttgccatatgtatgacatatccgttagaacgatagttggtgtatatatgattgcatcttgatatcgtgaatgtatgtgtttgtcaattcagaaagtatgaaccaatgctacaaacactagtacgctagattactgagtgcatgtggtattatggttaattatacttttgaaagcatgaactagtgctaccaacactagtacatcagagtattgagagcatgtggtattatggctagttgtacttatagtatggattgatgctaccaacactagtacgactagagtaatgagtgcagtggtattatggtcaattatactatggtcaagaatatttgagactcaattatacatgtttgcatagtttatgacttgttgatgggtgtatgggcacttagtcgtaggtcggttatatatttatgttttatgcttttcttactcagtctgtcgaatcacagatgctatgttatgtgcaggtaaaggcaaagctgttgttgaacggcagtgagttttgagctggatgaagattgaatatatcgagacagttcgacctagagtgttggatctttgggacaactaggcctcacgattttgtagtcgatgtgtgatatcttttgattatgtaaagttgaaaaatatacatacgggatctcatattttataaatgtaatacaatatatgtttatttattaaagtttaaatttta

SEQ ID NO: 333563 - DNA, 580 bp, Cannabis indica
caacgtagtttacttacaccctggataagtgttatgtcctttccatgacattgggtaaagtaagcttgggttggatgtatggagtatgcatcagtagggaccgatattaaacttaaactagatatgataatcttaccgtaatatctcttcaattcaatatcacctagttgatcctagatcaaatgatctcaatcctgagacggttaggttcgatctcgagagtattatttgtgttctttgatttgttagttaagcctaccttttggtccgggtgatacgtacattttgggaacacggtagcacaattgagtggcagcgctaatcatagataaggaatctatagcttctatccggacatagaagtgaaacaatgatttcctttgagcttggctaaatagaaataaattatagagcgcccatcttagtgattatattagttcactaaaatataatttataggtggctaagtgttttaaggataaaatacattgaaagggtggaacagtaattttgtccctattcaatgtatatcatctatagaggatcattgattattgggattacaacaatagataattaa

SEQ ID NO: 333564 - DNA, 692 bp, Cannabis indica
tcaacggttctatgtaatgacttattttaatttaattaactttttattttattgttttcaacggttttaatttaattaactttttattttaatgtgttttactatacttttctatatattaaaccaaaaaaaagtttcacagccaaattaaatcattaatgacaatttaattatcgaactagatacatatatctatttggataggctaaaagatcatttctgccaaaataaaaatatatataaataaaataattaacatacatatataaaaataaaataatggacgcactcataacaattaactgaaaaaaaaaataaatacaatcataattattaatgttttcaatgtcttttgaaatacattcttaatgattctaccaataattattttcattaatactataaatgtacagtttttcatactatcaactatttaaggattgctaaattgtcctccaattgataccaactaaatattttacaaaaatagaaaaaaaaaatcttatttggattgcgtatagtatacttcatggagtactcttttcttagtgacttacacaatgaatcggagagttggatgataagggttagggtatgtcgaatgtgggaatctcttaacactaagaaaaatggagaattgattcacctcaacttgatttttattgatgagcaggtaatttcaatattaattt

SEQ ID NO: 333565 - DNA, 909 bp, Cannabis indica
ttttggaaaaaaggtaaaaatggtaagtttggttactcatttcttttttatctaaccagctggtacattctgatcttgtgtgagtttctcattttattagatcagatttcttgaggacaaaagtggagttgaactttccttttctataaaaggaaagttgtacttactgcccatgattctgtaggtacagaaatagaaattcctgggctgattgaagaattattttagtgaagtttctagtgtgctagggtcttattcagaccgtgtgtaagctatcaataaggtgtatattgattataaatacaccttatagcacctaagttttgtatctctttcatacacttaaaattgtatacatatcttaaggaaagagtgtctttgttttgtagagaagagctgttcgactcttactctgtttatttgtagtgtgtattgtcttgagtctgtattcaagtctacatcgaagaagaacatcagtgcaaccttcgggagaagatttttacaagctttcgggagattgcttttgaagtcttgcatcgggaggatacaagcatacaaccttcgggagaaggtttttacaagctttcgggagattacttttgaagtcttgcatcgggaggatacaagcatacaaccttcgggagaaggttttacaggctttcgggagattgcctttaagtcttgaatcgggaggattcaagcactcttcaaggtaggggtgaaaatcggtcggttatggtcggtttttataattttataaccgatcggtcggttacggtttttattttacgaaaaactataaccgaccgtttagaaattataaccgtataaaaccgccgtacggtttttggcagttttcggtttggcagttgtaggcggtttttggcagttttagatagtttttggagg

SEQ ID NO: 333566 - DNA, 1082 bp, Cannabis indica
tacttagttaacattcatttacaattagttaatgaattatatatatatacgataactaattagtttttaaaataacaaaaaatgtatataaaataattggtatataaaaatagtaaattaattatattacatgacaatttactaaattttcgattttttttaaagtttatctaatgtattttaaattataatctaccataatctaacttaaaaaataactaattagttattaagatgtatataaataaattttaagagagtaaccaaaatacatctcaaattatatgatataaaaataaaactttttacataaaagaaactaattagtttcttattaacattattagtattaaaaagttatttttaaaaatacagaaaaataaaaaagaaaaaattagaaactaaaaaatatcaaaaagttaaatttagttgatattagtaatcatagtaatgttattattgtaaattagataaaaaatgtatattattataatttttcttaaaaaaataagccgtgaagtataaaattcattttttttttcttttggtctgtcggcgtcagaagcaaaccaccgcttcattttgttccagccgcattcctctcttcaatgcatatgttcagttcttctgccttttcccaaagcccaacagtggcccattctatttctttctttctttgttccctttcaaaattaatatagtataagcccaaataaaaacaaaaaactaattaatttggactgataaatggataggcactttatacaataaatttggctttagtgagataaaaaacaaaaacaatttgatgaaccacataataaaagtgctctccattttgaccccataccacaaatttattatttgtatttaaatttctacaaaatcacaaaattgaattagttatagaaaattaaataaaaaaataaaggaaaattaccctttttttactttttttttttttttaatttacggtttaagtttctaaagtagttacagcggtagttgcaataggaatctctgtacgattttttgttacaatttaggttgcagcgctatttgcaatagtagtttctatatag

SEQ ID NO: 333567 - DNA, 719 bp, Cannabis indica
gccttgcttctccaattcctaacttcctaaaaattgacataggcatgagattaatgctagctcccaagtcacaaagagctcttccaacctctcgacccccaatagaaattggaattgtaaagctgcccggatctttcaatttgggtgggattttacttttcaacatagcactacaaccctccgtcaaagcaacagtttcaaactccccaagcctccttttctttgtcaaaatatccttcaaaaacttcacataggttggcattttctccaaagcttccactaaaggtatattgatgtggagctgctttagaacatcaagaaatctccggaattgaccatcgtcttgctgcttcttgaaccgttgaggaaatggtggaggtggcttttgcaaagacttttctgcagcagaatgctgactggatgctgtagctactgggggaatttcagcagctgaaattgctggttttttcatcatttccccctctctttggattgaagagggctctttactgcctgttgcagccacatttgactcaattatttttccacttctctaggttactgctttacaatgttctttgccatctcttcttgggttttcggtgtcactaggcaaagttccttgtggtctattcttcaagtcattggccaattgccccaattgaacttcaagattccgaagagatgctgcctggctttgaattacagcgtcattcttg

SEQ ID NO: 333568 - DNA, 537 bp, Cannabis indica
ccaaggcttgagcccctcacctaggagggaatcttcaaggaaaggacaaggcattccaagaacatatagaagggtacgaccacgacacctgcaaaacctgataaagtaggatttgtgccgggggcatggaagtgggagtgtgatcccaagtgtcaatacagcttgacacccgaccaccactacctgaaccctactacttttaactttgaccactagccttcttcacacaacatgtggtcccccttagggaccacttagggtaaaataatttgtaacaatgggccattagaacctcctataaatacccccttccattcatttgagagggtcgggggctgaaaactttgtaagaaagaaagcaataattccaatacaagattatttctaatctttaaacacttaagatttcttctttgatctaattactattactattactattatatctctacttagcaattaacacaaggtttttggtccttaattgttgggattttatgccctaaattaaacacatttcaatgtaatctgatttgt

SEQ ID NO: 333569 - DNA, 1682 bp, Cannabis indica
ttgagaggtgggatcgttcaaatcgcatgagtataataattatgaaacacatcattccaggagtctgttggggcacagaatccgaaggggttactatggcctagaatttccttgaacaaattgaggaacgttttgctaaaaacgataaggttgaaatgacaacactttttggttctttaatgaaactaaagtataagggtcaaggaaatgtaagagagtatattatggaaatgcatcatattgtctcaagattaaggacacttatgatttagctttcggatgatgtacttgtactcgtggttttgttaacgttttctccacagtttaaccaattcaaaatttgttacaactgtcaaaaggagaaatggattctcaacgagctcatttctcattgtgtgcaagagaaagaaaggttgaaaaaggaaaaaactgaaagtgctcacttggccactaccgctaaggataagggcaagaaaaagaaatttaaggatgaagctgctaagggtccagttcaaaagaaacaacaacatgattctaagagttgttttcttttgtaagcaacctggacatgtgaagaaagattgtgccaaatatcacgcatggtgtgtaaagaaaggtatgaatcttactttggtctattctgaggttaatttagtttcagtacctagaaacacttgttggataaattctggtgctactactcacataagtgtttctatgcagggttgctagagctaccgaaagccaagtgatggtgaaagatacatctttgtgggtgatggacaatcggtggaagtggaatcaattgggcatttcagattgttattgggaattggtttttatttggatttgaaagacagttttgttgttccgtcttttagacggaatgtagttcttatttctttgttggaaaaatttggatattgttgttcatttggaaacaatcagtttactttgtctttaaattcaaatattattggaactggttattgaaattcttatgataatctttatttgctagaaccaattgtatcctacaatgaaaccttgcctgtggaatcacgaggtactaaacgcaaactacataaagaaaattcagtgtcattattgttgggattttacgccctaaataaaacccattacaatctaatctaatttgttatcattaagagattataagtcatttatgtttacatgttgttttcatgattatggtttaatatatgtacaaaatctgttaagtcaataacatgtagtcattcacaattatagtgatgtcaacgtagtggaatgtgattgtgattatattattcgaaagactaagttcctgtttcatcagtgcattggatttacactgatgtgataatcagcgatgaagtgtacttacactttgcataagtgttatgttctttccagaatattggcaaagtatactagtttcgaatgtatggagtatacattggacaagaccaatattgatctaagttaagatattataatacttacggttgtacctttccaagtcaatatcactagttgatcttagatcaaaagatcttaatcctgatatgcttaggctcaatctcaggagtgttattcatgttctttgatttgttcgttaagcctacttttgggtcagggtgatacgtacattttgggaacatgatagtatggttgagtgg

SEQ ID NO: 333570 - DNA, 1225 bp, Cannabis indica
attaagagactctatatgtctaattaataatatataatgagatatattataattatttagtattaatatagtttggcatttaaatggttagaataggaaaattggcgtttttgagaaaatagaaatgaaaattgtcgaaattgtaaaataccaagtggggccctttaacaccatggctggccacttggagaggttttttccaattaatattttcattattttaatgccaagtaattactaacctaaacctagtggttacctataaatagatagtgatggctcacacttaagaagtgattcaagagattgaaaatcataaaaaattgagccactcactatcttctatagctgaccctctctctctctcttttcttcttcgaattttcgaaaaacttgagttatagagtagtgcccacacacatcaagtggtatctcgatcatactctggaagatcgtgaagaatccaaactgaagagaaggacattcagactctgatcttggtgatactccgcgacataaaggatacaagggttagagatctgaatggaaggagacatattattctgctgcaaccaatgtaaggtttcctaaactttatatgtgtttattatcgtttcagaagttcatatttaggatgttaaacaatatacttgttagtaaatctaagatcctggtaaaatatttccaacaactggcctcagagccatggtaactgatttactttcaagaaatttggacttaaaactatttgtgtgtgatttggatggtttcatgttgatctatgtgttatatgatgattgattgatgcttgtgaagttttatttaacataattaaatttttgtttctagatttatttttgttgaatagtttggaaaaaattaagtaattcacttttttacagaacttaatttcaattttatttgaattagttatgaatttttgaaaatcgtaaaaaacaagggtggcatcacccaccgtacgcgcgcgtacgagcctgatttccacggatgcacgtgctctgacaagcacatgaccaagaaacattggtctggacgtgctgggttgtctgaagaccacctgggtgcccgcggagaggctgcatgcagcctcctgcgccgtgtcctctcggtcagtcaccccatcattgcatactatccgtaccacttaaattttttttttcgttttcttcgatttttaatgctatttcatggaattaacttccaa

SEQ ID NO: 333571 - DNA, 395 bp, Cannabis indica
tctctgagttgtagagatattcctaataaagctttatggtatttcacctcctctggtaattattttgttaagttaggataccgtgttattatggaggctcaaaacgacagttactattctctgatccatgataaaagtaagttgaataaaatatggcagcttcgtatcccctgtaaaatcaaaatatttctttggaatgtagctcatagtatcctccgtgttgctttaaatttgaataaaagaggtattattatatcacctagtttcttcagagttggtgaagagagggagacaaatagtcatgctttatttgaatgtcaatattcaactatgtattgggacaaaaaaccccaagctattgaagtggttcagtggcctttattgaaaattgaaga

SEQ ID NO: 333572 - DNA, 1398 bp, Cannabis indica
taagtcagcgaggccaaaggttaaaaatatgaaataacttgaaacctagtttttaagataaagtttacttacaaataatgcaaaatgttgtcgtgttgattggggaatgactggttgtctagaacaaatcctccttaaaagcggtcttgtttggtaatcctacaatgatcctatgatcatttgtatgagtccgaagatagtaaaaaccccctacacaacgcttcctcacaggaactgctttaacataataaagataaacaatctcttggggagtgggacactcccatcctaacatatgatacagaatctttagactttcaagaattttgtaggaaatatgaaccaattggaaaggagcgattccaagatggttgatgaactctttaaaataatctctcaaggggataatttctctagccctgatatgctcgaggctccaagctcctattccaactgagctagtagtacttgcttcatccctggcttcaccactagcctccctacgttcctcgcgtataagtctttctagtggataacaactgaattcaccaggtgcaatgagtctaacacaaaaccctcgcttttggttgatgccacaagtccttaatataccaccaacataggcccctatggcttttattcttgactcaatgagctcagcctcgaaagtgacattatgatcctggggagtcttttacttacggtgcttggatgacataattttaaaatccaggtcacctgctgaaaaaataattgtgactctgggtaaaaacaagggtttagccaaaggaatagaagataacgacaaaggttcaggccaggttgcatctcgcaagtcacgacatttacccaaagttatttgttgtaagaaacgcctataaggcctagtaacttcatctttattggattttattaaatggtccctaatttttacatcgtttatctctattttggactgatgtttgagaattttgggtttgtataggagggctaattcctgaggataatctttttctaagaattttggagaataaacttcataaccagattgggacatttctacaaaatgagcaatcccaattactggaagaaatttattatacaagaaacttataaatatgataactctaaatttttactcaatctaacccctaaaaattacccaaaaaaattaaattaaaattacaaaacccaaatggaacaacgaaagatgcaactaacagaataatgatcataacccaggaaaatagagaagaccagagaaaaggggatgaatcacttaccgttcgaaattgagtttttgtatgaaaaaatgctctgaaattgagtacgagttgaatggcgcaaagccttttttgaattcctgaggtcgaacagtatatttgaatggatgcgcaa

SEQ ID NO: 333573 - DNA, 648 bp, Cannabis indica
tgataatcagcgataaggtatacttccaccttagataagtgttaagtcctttccagtattagtaaagtataccggtatcggatgtacagatattgatcttggataagatatcataaacttacttgatatttttctatgtcaatatcactagttgatcttaagtctatgggtcttaatcctaatatggttaggttcagctcaactgtataatttatgttcttagaggtgtcgttaaagtcttgtcggctgaacacttacatcttgggaacatggtagttcaattgagttggagcgttgatcatagatatggaatctatagcttctataagtatttagaagtgacacgatgatttcctttgaacttggcttgatagagataaatgattgggaagggcagaacggtaaatttgtccctattcgatgtagatcatctatagaggatctttgactattaggattgtaacaattgataatcataacgtatttatatcttagtacatatagagcgttctatataattgagagtgtaattccgaatgtatagtggcccaaggaagaatgaataagttagctagggaattcacttggtgaattcttgatctacttattagaagctcggttatatagactcatggtcccctcactagt

SEQ ID NO: 333574 - DNA, 585 bp, Cannabis indica
attgttgatgctcgggtaagtgctagaccagatgactatgttatgtccaaagcagcaatgagggatgttgaagaggaattggcagagaatttacaggattccagtggtgattctgatgatggggttgatgagtttgttgtgtacatgccagatattgacatgccagagtttgacatggaagatggtgttggaggaagtgatgaagacactgattctagtgtccaaattattgagacagtggtggatattgagtctgacaatgaaggcccaacagaggaagcccatttacaccccaatacccaaacacatgcccaaaacatatttgaaacaccatccaaaccagaaaaagcccaaaccagtaaaagaacaccaaaaaccagatcccaaacacaaggcaaaactggccatttaaatccctgcacatcacccaatagaaggtcccaattaacatccaaaacaccacctccaaccaagaaaaaaagttgccagactgagctgttccaatcacccaaaagtaggtcaaaaactccatccaaaacaccaccccaaaccaggaaaaacaaagggcagtcagacctcaacaaa

SEQ ID NO: 333575 - DNA, 805 bp, Cannabis indica
gtgtgatcaatgctgaatgcaaggatcgtgggattgaggttgagtacattgatagttgcatcgtatgtatgccatatccacgtaagttcatccctgagttgtagggattgagctgatgactcatgatgcgaaagctaaattagctaagtgttgattgccctgcacggctcgctgaatatctcattttagatgtgacagcgaggcatcctgttcggtctatcgttccgagcagatgctccaagtggactccacatgtcaccattctcgagatgccacgtcagagtgtaaaatttgagataacaatatacattatataagttatattatgtaagatatatcaaaaacacagttaaacgaaagaacgaacgaaccctcgttctctctccttcgacaaaaccttctccccctatatccattttcttcgattttcaatccaaaacttagcgatctaagctccggtagtagcaggatagcaaatccttgaacagggaaagcttaaggtatggtttaatttcgttttaagtttaaaacaattggtttcgtataggggtttcgtgaattagaatagttatggagattctgactttgtagaattgttctttggtacctatgggactagtatctaggggtgagcatcggtcagtttggtcggtttttttcatataaaaatctagatttcagtgttcagtctggattagtgcaatccaaaaactgaccgaccaatctaaaaatccatttaaaaccgaccattccaaaccacggtttggtcggtttaaaccgtccaaaaccgaactttatttttttt

SEQ ID NO: 333576 - DNA, 685 bp, Cannabis indica
acttcatcgctgattatcacatcagtgtaaatccaaaacactaatgaacagggacttaatcttttgaatcatataatcacaatcacattccactgtgttgacaatactctaattgtgaataaatatatgttctggacttaactgattttgtgcatatatattaaaccataaacatgaaaaatacatgttaacataaatcacttcaaaattctaaattgataactaatcaaattgtaatgggttttatttaaagcacaaaacccaacagatatttcaacaaaaatgtcaagaaaagactattcaatgttagagacatggtgctaaggcgggtatttgcaaacgcgagggatgcatctgcaggagtgttcaacccgaactgggagggtccatatgtaatcgatgcagtagttggaattggagtttataaattggctcgactcattggctcgctaataatgaactactggaacgtagaacatttgtgaccctattactagtaaataaatgatgtaactcacattgctgatgtaataggttgacttcagttatgaataaagagaatcatttctattatttaagtaattgcaaagctctactctttaaaattacttaagaggcatttgtgtatgattaaacaaaattcatttggaaatacatgatataatacaaacccaccacttcaaaa

SEQ ID NO: 333577 - DNA, 652 bp, Cannabis indica
agagagagagggtttattttcttaatttctattttttgtaaaatatgaaatgaataaaaggttttattatttaataacataattacattcagcataataaatctattaatgtccactaaaggacaaaatattaacttaggcaaaatgaccattttgctcctcccaaacaaactaatcataaaaattacctaggggtattttggttaattctaaaatctcgactattcctgatattcccaatgtctaactatattgccccgctatactaaaaatactaagatgtgattctactagccaaacaccgcattctaatgttactgggcacaaaacatgcaaaattatgaaattctgtaaatgacacataaaatgaattctgaattcaaataaatcatcataaattaataattcaaagctaacaaacaagtttcataattaaaccctaattatctgctaatttccaaattaaatctaagcagtctttacaattatccctccttaaaaggatttcgtcctcgaaatctaacctaaacaactctgaatattgagctctcatgtcggattctaactcccaggtggcttcctccaccttgctatttctccagagtactttgaccaaaactatggtcttgttccgaaggaccttatcttttct

SEQ ID NO: 333578 - DNA, 744 bp, Cannabis indica
aataaaatacttaagtgagcccaaataaaattaaaaaataaaaccctagttttatcttcttcatagcagctcctctcttcttcagagcagcacacaactgctgcatatttcttcaagttcaacccacaaaaaaaaaaaaacttgctgcatttttccttcgaattggtgcactgccctgcccttgccttccttctcactgctcctccattttaactacgttcctccacgactccaccttgctgctgccttttcccttttctcatcacagaaaaaaaaccttgctagtttgctgctgccttgtctgacttaggtgcttgttggttgctgctgcctttctttgttccataggtaaacatttgaatattatttagttcttttaattcataagccatatttagttgttcttaggttcattaggtggtaatttattatttggttgttactttgttttgtgtagatattaaaatgaatagaaaatcaaaattgagtggtattgatgttggaggagctagtggcagtggtagtgttgacggtaataataataaaagtcttggaaatagaaatgatttggcttggaagaatggtgttgaagttgatacttcgggtggaaatgttgaaaacaagaaaaattatatttacatggagtgcaaatactgtagaaagcttattacgggaggtgttgcaaggttgaaactgttgggttttatgccctaaataaaactctttacaatctgattagtaatc

SEQ ID NO: 333579 - DNA, 228 bp, Cannabis indica
tcagccaaagcttgaccctttatagatgttcgaggatggtattattgggctttgtgccctaaataaaactccatttaatgtaatctttatcactcaattatcaataaagggacaaaagtatttccatcacttatttagtgtgtcatttggttcatgttattatttatatgtttatttgctttataaattcatccaaatccttatcacattaatattcttatttactgt

SEQ ID NO: 333580 - DNA, 1075 bp, Cannabis indica
cttgattatttggtaagttggaagttggagggatgttccagtggaaggagcctttgacttgcccggcttttgttcaccttccgctcgttgaatggcttcttcgagcttgatgaagccttcggctcggtcaaggaaatcactcattgagtctaccggcccgttcttccttatatctttccaaagttcaccgaggacttcgatgccccccagtatcacggataactttccatcctcggttacccgtgaaactttaattgcctccgtcatgaatctgctaatgtatgccggagtggctcgcctggtcgttgcttaagttcgaccaagtctcccaaatgcaatggaagttggcgtgaggaggagaattgtgcatggaattccgaagagaaggttttccatgaactaaactttccaggagccaacttgaaataccattgctgagcggcttccgacagagtggcaggaaagattctgcagcatacatctcctcgtaccccttgcaaatccatttgcatttcaaagtacttgagatgggaaaggggatcttctctccccgtgtacattttccacgtcggcattttgaacttgtggggcagtggcaggagattgatctctcgcgagaaaggagttccgcgtgctcggtctaactcaagatcattatttctttgtccagccatgccgtggaacatatttttcagttcgtcaagctgagcctgtacggctgggctaacttgctcggcattctggtcaatttgaattacgtcagcatctttctgagcgggaatttgagtacgggctccaggctgcatgatcgtcgtaatattctgttcgtctactcccctcattctattcagatcattccttaggtcatgggttgctcccaacctttcgaacacagaagtgcctggttgccttagcgattgattcgcttggttgacgggtggaatggcaccattaatctggttggaaccatcaggtatgacttctcctgatgaattaccagacaaggtctgctcgcctaccgctgggcccacgagcggaactcgtgaccggggattgggcagatgaccatttgtag

SEQ ID NO: 333581 - DNA, 775 bp, Cannabis indica
tgagaaattcactcgaaaatgaaaagttttaagtctctcatttttgtagaacaacaacatctctgagtgctggtgaccagctttgccagaatacagattcagactaagtgatgtcaaaatattaattaggcatctaaaagtacattccttagacgtttttacacttaccaagcatccaggttaacgttatatgtcaacatgggcgttgggatgtcaacttgagcactcgatgtcaatatcggcactggatcatgaactatctacagtaaaacagccataactcacacaatattaatatgattgacgcgatttaactagcatttcaaagctaattcaatgctctatcaagccatgtataacacttcaatcacaattttgaagctatcaacctcaaattctacccccaagagagttacaaaaataagctctaagttacccgcagcgggtactgctgggcttcaaaaaatgactatcaccatcataagctaattttcacaattggatcatcatttacggttaaaaacatctattttgtattttttttttccaatttttgtgggcctccttcacctatgaaaggagagctcccttagctcatttttcacattcagaaaactaccaacaaggtcagagcttctctctctagtttctctatctagaaatattggattttgtgccctaaataaaatccattttaaaataatcagatttactaattaataaatattagaaatcgttttatgttgtatggttcacatgatttgtttcatgatta

SEQ ID NO: 333582 - DNA, 468 bp, Cannabis indica
caaaaacaaatccgtgagggcttagcccaaagcggacaatatcattccaatggagaaatagatggtgcctgatggtcctaacacaatttaagttaggattgaacacaattgagattgtgatatggtttaattaatggtgatttagggttacaatattagttgcgatttgtgttgcaatgatttagtattgtttaggaaatcaatggaagctttatgtggtcggtggtcttgcaatttatgttgcgattgggacataattggaattattacatggtttgatggtgatttagagttgcgatttgagttgcgactataacattctcgcttcaagcctctattgggtccttacactttcagaataatggctcttatacacgactacgccactctgtctgcttcctggattgacgactgaccctacaaaccaacacgagtgtttccagtgtgctttgtcctcactcgcatgct

SEQ ID NO: 333583 - DNA, 1375 bp, Cannabis indica
aagcacaactcgtaaaacctcccctagtctcaaaacctctagacggagaagaacttggaatatacttagctgtcacggggcacgttgtgagtgtcgtgctaatcagagaagagaacaacatacaacacccgatctattacatcagtaaaagactcattgaggctgaaagccgatacccactgatagagaaactcgcttactgctttattctagcaacaagaatgttaaggccctattttcaagctcatcttgtttgggtgtacactgaccagccattacgccaaatattacaaaagttggacgcctctggacggctactcaagtgggcggtggagttaggttagtacgaaattactttccaaccccgaacaccaatcaaaggccaggccttagcagactttgtggtagaatgcacatgcaaagaagaaagcatactagaaagcaaccccgagccagtacaaacacctcagccaaataacagttaagataagctgacttggaaactacacgtagacgggtcggctacaaatcagccatctggtgcaggaattgcccttgtcacgcctgggggcaacacctgcatgctgcattcaagtttggatgcaaagcatctaataacgaagtcgagtatgaagctctaatcgctagcttatagatagcctaggagatgagagccgagcacattgaaatctgcagtgattcagaactactggtaaatcacgtatctggagaatatgaagctcgaggagaaaagatgatagcatatctgagcaaaatacatgacctacttgcacaattcaaaagctacggtcacagacaaattccaagggataaggcgataaggcgaacttggttcctatccagttcctcgaagagcctagcatcactatcacggaagagatcaaaatggttgatacttacccaaactggatgacaccgatagccgcctacctcaatagtggggaactccttgataatcagaataaagctcgaaagatgagaaagaaggctgcacggtatatcatagtagaaggaattatgtaaagaagaggattctctatgccgttgctcaaatgtcttaatcaagaagaagctggacgactcctatttgaggtgcacgatggattctgtggaaatcatgacgccgggcagagtttatctaagaaaattctaaggcaagattatttctggccaacaatgattgaagattcaaaggcctatgttaagaaatgtgacaaatgccagagattttcaaagatacctcgagctctgcccaatgagttaactcagatgcaaagtccgtggccctttgccatttggggaattgacctgatcggacaattacccaaaggcaaaggaggagtgcagtatgcag

SEQ ID NO: 333584 - DNA, 788 bp, Cannabis indica
gaagtgaaaaaaggttttccccccaaaagtcacttatgtaatacatgtggaccccttttcttcacttacctcacctacacatcataaaggcaactaacgcagttatttctctactacaatgagattagacaatcaagaaaaagtaaaaggctaaaagcgtatcaacttttattcagcaaaggctacaaaattctcgaccgcaccaacatagttggtaaagtccctatccatacagacgcctgcataaggacttggggggcaaatattatctcaatttttgtcctcatgacgtggcatgcttacatggacaaaatcagtatcacgtggcagtaaaactcaccaataggaaggtcaagtcagcacctgaataaacggagacctcgacactcaaacgagcattagatgacagaccagctccccctcaagagctggctagccagccttgggactacaccatggtcggccagcctggcctccacagaggcctagccgaccaagaggtgcactgtaaactttcctagacacttctacacgtggacaccaacacatgggctgcaaattgggccctaaaagcccatcagattggctgaataatatcttgaatcaagggcactttggtcttttataaatatctaataaactatttaagtattaaggaatttaaactgtaacctagggttttaggcctcttatataaaggccttaaccttagcctagaaacttaagttgcatctaagtttgaaacctgcctccaagctctaagtgtctgataaactctctctctctct

SEQ ID NO: 333585 - DNA, 520 bp, Cannabis indica
aatgagttttatttaggtcataaaacccaacaaaaacaggggctttattttccaagaccagatgaactatttgcgcttaataacaaactaattaaggtagctaaacctagaaaccacaaaaagaaaaagaacgataatgaagttacgtcttggtcatataggctatgatggacttcacaggttaaccaaaggttgtccattaaaaaatgtcacattacgtgaattataagtttgtgaatcttgcctagaaggcagaatgacaaaatgttctttcggtgcacagggagagcgtgccaaggaaccactaggcatagtggattcagatctttgtggaccactgaatgtcaaagctagagtttgttatgagtaatttgtcactttcatcgacgataactgtagatatagtcatatttacctcatgcataaaaaatttgaaacgtttgaaaagtttcaagaatctctagcattagctcaaaatcaattgggtaaaactttaaagatcttgtgaactgataagggt

SEQ ID NO: 333586 - DNA, 2275 bp, Cannabis indica
acctaaaagatctgaaaagaattaggttaatttttataatctgtcattcacattaagaaagaaagtagtaattagcattaacaattgggtaattaaatcaacaggattcttttccctaatttgtcatctttgattaaatctttttactgctgaattttattttcttgttaatctttatttttatctcaatcacaaaattattggtttgccaaatagaaacataagtctaatctagtggtatttagtctaattccctgtgggatcgacctcacctgtgtgagtactacttgattacgtacacttgcgtattattcatatttttcgcaacaagtttttggtgccgttgccgggaagttgtttaaacattgatattacataagattagattaagttctactttggttaattctttctgctgattgctaacctgtttctttcaaattgtcttaatctatttgaggaattgaagttgtatgcgacgtcaaggacaaagtgtaatactgtcggttgatcctgaaattaaaaagacctgtagaagaaacagaagaaacaaaaggcaagaaagaagtggagcaagagctgaaacagaagaagtcatggctgacaattgtaatggcggtaataatggcggcagtaataacggaggtgccgttgaagaccaggcaaacggtcgtagtctgagagactacattctcccaacattgacgagggttcagtcttgcataagaccacctgccgtggaggccaataactttgaaataaagccagccatactccaaatggtgtagtcttcagtccagtttggtggactcccctctgaagacccaaatttgcacttgtccaatttcatggagttatgtcagacttttaaagaaaacgaaatcaacgatgatgccatctgcttggaactattcccattctcgctgagggagtgagccaaaagttggttgatctccttgccaccaaaatccattgcaacatggactgatttggcaacaaagttcttgtccaatttttttcctccagcaaaagttaccaagctgcgaggaaaaattaataatttttgtcagctggacaatgaatctctctatgaggcttgggagaggttcaaggatctaattaggaaatgtccacatcatgggattgaaaaagtgaatgttggttcataatttctacaacgggctgattggtaacactagaacgattatagatgtcgcagctggtggggcatttatgagaaaaagtacaaacgagggctatgattttctcgaagaaatggccatgaataatcaataatggccaactgaaagaagccaaacgaagaaggtagctggtatgcacgaggtagacaccatcacaaaattgacagcccaagtagaggccctaacaaagctgatggttgttcaagcaaaacaggctcaagttacttatgagctctgtgggggtcctcacacctatgaccaatgtcctgtagatgtgaatagtttgccaatggatcaagcaaaagcatcgggaattattctcaaaacaataatgggtataatcaaggagggggtcgacgatagaatgtacaagggcagtcttctaatcagcaacaacaggggttctattagcagagaaatcgaccccaacagaatcaacaacaaccatagaaacaaggttctagtggaggacccagtctacaaacagatctgttgctacagtttatgacagaaactagatcatccattaaagccttgaagaatcagatgggccaattggcgacacaaatagctacccaccctgaaggaaacttgcctagcacaacaaaggtgaacccaaaagaaaactgtaaggaaatcaccttgagaagtgggaagaagtatgaagggcctgatgagagacaaccagtggaagaagaggttcaagatcaaccggcaccgacaccagcaaaaaagaaaactactgagggtcttgcaccaaaggaagcttctccaccagtcaccatagaccaccatgtaaagatcccttatccgcagaggctctaaaagaccaacctaaacaagcagtttttgaaatttctagaggtatttaaaaagctgcacatcaacatcccctttgcagaagccttggaacaaatgccaagctatgtgaaattctagaaagaaatcctgtccaaaaagagaaaaatggaggactatgaaatagtggcattgaccgagaggtgtagtgcgatattgcagaagaaacttccttccaaactcagagatcttaggagtttctgttgggttttatg

SEQ ID NO: 333587 - DNA, 1389 bp, Cannabis indica
ccatgtgtttttaaagtagttgcggctggaaattgattgaattaagtgagatgaagctcaagttctagagcttgaagtttgcttagttaaagcatgaatttggtgattttttatgcaatctgaaatgagggtttgttgttggattttgatgcatgattatgtgtttttaatccctagtgtttgctagaaactctggtctatgatttggaagttttggttatgaatttgaatgagtttgattgagttttagcctgaaaattcgtgttcttggtggctggtttctgggttttcaacccaggtgccgcggcatgctcagagcatgccgtgacctgcccctgtttggtcgaacctgggatgtgtcccaggtgccgcggcatggcttgggcatgccgcgactcgcccttaagtttttgggcagttttgagttcgaactttgaaaattcataacttttgattccgaactccaattgaggagttcattatgtcgttggaaagctcattccgagctctatgtgattatttgaattttaaattccttgaaaatattttatgagttggaaatcaaggggctaaccctatttgtgaaaatctcagattgtgtgactaggattactggcacctgattaggagcacccggggattcagaatctctactattgtaggacaacaggtaagacagtggttagcacgtagagtatgcgcagtggtgcttttattgaaagttatatgtatgattgtttagtaaccgggattagggattattaccctaataggaacggtttagtagcctagggttattaccctagtgatatatctgtgtaaattccatgccatgttaaatgtaatgagattcaaggattatgcgcttaaggcataatcaggttggacttggtaaccataaccgagatgaaccattctaaggccttattgtaattagacgtgtgagagcaacacgtaggtctacaccacgtagatataaatagatgtgtgagcacaacacataggtctatgccacgtacacataaatgggcatgtgagtgcaacatgcaagtctgtgtcacacagacatatgtgaatggcactactgtttaaataagcatgatgaacatattgttattgttatgatttatactatcttgttgggcttggatcacgagtgctctactgtgcaggaaagggtaaggctatagccgatcaaccacgagttcaggagttgggcgcagaatgtacatgtttgagccacattagaccaagcaggttaagggtctaccaacgatgtattttgaaactctattttgccgtttaggtcggctgaaagaaagagacgtgtaataaagtttgtaaatatttttgggaccccaactgttgtaatgtttaaattattacaag

SEQ ID NO: 333588 - DNA, 930 bp, Cannabis indica
tgagatccttatgtgataattcaatgactcataattcagaatgtaataaaagaagggttgttagatgaaagtgtagatactgtgacattggaggataaggaaaaatatggcatcattgattcaacttcatcaatgatattgactaataatctaccacaatacttcacatccaccactctcaattgattgaaggagcctcttgggagtttattattaccaccattacatataatgctttccaagcttcttaaattatctttaagtcttagtgactccaaacatggaaaggcttcatgatgagtggaattaatgatataatggaacccatcattattatcaaatctcaattgctgtaatctaggaaaactatctttaaggatgtcatgaaaaacattgtggacacactcgaatccatctaatgataaatattcggaccctttaatctgggaaggggatcgaatgctggaaccagaggaggaaagccatctcaacaacaacacaggcctcaatgccagctttgtcataagcttgggcatactgtggttgattgcttttatcaatttgataagagttttactggtgtaattccctctgctgaaactccctcgatgcaggccaatttagctcagaccacatcagttgatgatggaaattggtatcccgactcaggtgctacaaaccattgtacaccagaccttcagaacttgatgacaaatgctgaatacactggttctgatcagatttatgtgggaaatggaacaggtctgtcgattcaacaccatggtacaaatcttattgcatctaataatcatgataagcctttattgcttcgaaacctactgcatgtacctgagataactaagaacttgctaagtgtttccaaatttgctttggacaataatgttttgtttgagtttcatgctgatgctt

SEQ ID NO: 333589 - DNA, 789 bp, Cannabis indica
tattgaatgagaataatagtgttcagtacaatcttaacagaaatgaactaaggtatttatagaacataccttaggatacaaacattagactacacccgagattactacatatagttagttaacggtttgttaactaactgacagggacaaaaatagaaagtgacacctaatgactaagacacaccatacaacaattctccaccttgtctttgtaattacaagtcacttaggtacacattttgctgtcaatgtttaaaagtttcaagcagtggtcgaatttagttgcagacaaagatttagtcaacatatctgcagcattatcatcagtagacactttgatcaacttaaccctgtcactagcaagaatgtctcggataaaatgtaaccttatgtcgatgtgtttggtcctctcatggaatacctggtttttgcttaagtgcaaggcactttggctatcacacataacctgtatactcctttgatcaattcccatttctctggtgatacccttgagccacaaagcctcttttacagcttctgtgcaggctatgtattcagcctcagtagtggacagtgctacaactgattggagattagatttccaactaattgtgcattgatttagctgaaatgcataccctgtttgagactttcttgtatccaagtcaccagcataatctgagtctacatatccaacaacattggtatgctcactgcctttaccatagatgagaccaacatccatagtgcccctgagatacctaagtatccattttgtagcattccaat

SEQ ID NO: 333590 - DNA, 1306 bp, Cannabis indica
cttgaattgttatggattgtttgagtaggtatgatggagttttggatcggttttggaggagaaaacccaaggttttcttccctgtagaaaccggtcaaccggttgctactggtatggccaactggttgaccggttggtctgtaggggaaaatcctgggtttttttttattttaggttttttggctcaggatgtttctctgagcttggattaaaacattttagtaatgtttgagttaattttgatcctgtggaaagttagaatttgtccggtcaagaattagggtttgtttcgaggatcggataagttgttaatcgagttttgttatcgtgacataggacccgagattgtcgagcatggttccactcaaatcagcccacacacctgatattggtttgaggtaagaaaagctttatgcactgctaagagtgttggtaaaaaaatgattatcatcgttgtgactcgattatgatagaggtaatgatgaggaacgattattatcgtttgtgactcgattatgattgaggtaatgattattttcgtttgtgactcgattatgatcgaggtaacgattattatccttagtgactcgattatgatcgagaaaaggataaagatacgatcattacaattaatgaaatgagtaattactcccttaaaaccgcatataggtttcttacttatcaggtgctttactgggcaacgatagtgacatacgtagctcgtggataatgagttgtaaggatgctttatgaagcattaaagtagaattgtcttataagacaattaattgcttatgtgattatgtattgagtgaatatttatttattatgatgatgaagtcgttgactatgagttactatgactttcttatcatgtgtaatataagtgtttgtatagacgttaaattatatgtgcatgctgaatatgtaatgaatcatgggtatgtatattatgtcatgttgtgattacttgcattttacatcgcttttgatttagtagcttttcttgctgagtctttgtgactcacgggtgcttcatggtgcaggtaaggaggataggaaagtgttcaaccatgagtcagaggtctcccagcgatgtacatatcaggcatggtggcttggcttccaggaaacaggatcaaccctttgactatgtttggaaatgaaatcttacttttgtaatagcggttttgagacttgttgtaaacgaatttatgaacaggagatccccatattatggcggtattttgtatgaaagttttattttaatttaatcaaaagcttttaattaagccacacttttcct

SEQ ID NO: 333591 - DNA, 416 bp, Cannabis indica
aatgtctaataaaccgttccaaactactaacatactaagttgtgattttactgagccaaacatcgagttccatgttaccgggcaccggaaatacaaaattatgaaaactactaaatgacataaaaatgcatatcagaattcagtaataacagtataaataattatttaaatagctataaataattctcataattaaacatgattaactgctaatttccaaattaaactaagcggtctttacaggttcggtccgaaggtgttgttgggtttctgttggctgaaggtggtggggggttcggttggccgaaggtggtggcggggaaagtggtggtgccagaaaaaatgggagccgtctgttgcaacgtcggggtcatggttgtaatgaccgctctaataatttggattagtaaaggcaa

SEQ ID NO: 333592 - DNA, 1449 bp, Cannabis indica
aggtgaccatcaagaataagtactctttactaatgagagaagatctcttcgatcaattgcaaggctcgactgtattttcgaaaatagatctaagatctgggtatcaccagttgaaggtctgaaaggaagacataccctagacaacattcagaacatggtatggacactatgagttcttagtaatgtctttcggacaaactaacgccccagcaaccttcatggatatgatgaatagggtgttcaaggagtacctagataagtttgttgttgtattcattgatgacattcttatctactccaaaaccgtggaggaacatgaggaacacctgaggatgactctaaaccgacttaaggagaaccaactatatgccaaattcaagaaatgtgaattctggttagagaaggtggcattcctaggccatatagtttccaaagatggagtcgaggtggatcctacaaagatcgaagcggtcaagagctggccaacacctaagactgcaagtgaagtaagaagcttcttgggtctagctggttattatagacgcttcgttgaaggattttccaagatcgcaactcctctaaccaacttgactcgaaagacgcaaaagtttgtctggtcagaaaagtgtgagggtagcttccaaacacttaaggacaaactaataacagcccctgtattatgtgttcccaataacaaggataagtttgtggtgtactgcgatgcatcaaaacaagggctgggatgcgtgctgatgcaaaatgacaaagtagtagcgtatgcctcaagacaacttaaggagtatgaacagaggtacccaacacacgatctggagttggcagcagtagtttttgcgctaaaaatatggaggcactatctctacggggagaaatgtgaaatttataccgaccacaagagcctgaagtacttctttacgcaaaaggaactcaacatgaggcagaggcgatggctagagcttgttaaggactatgattgtgaaatccactaccacccggggaaggccaacggagtagtagacgcgctaagtagatgcagttatgccagcttgggaatactggcacaaatagaaaggccactacaacaagaactccaaagaagtggtatagagatcattactccaaaactagctaacctaaccattgtatcaacgctgctacaagaacttaaagatgcacaaattgttgatgagttcttacagaagaaaagagcaagcttgccagaaaaggaggcagaggatttctccgaaggtacagacgacatgttgaggtataagggaagagtgtgtgtagccaacgacgtagaagaaagatcatgatggaagcacacactacaccctactcaatgcatccagggtcaaccaaaatgtacaatgacttaaaaaccttgtattggtggccagggatgaagaaggatgtaaagaccgcttagtt

SEQ ID NO: 333593 - DNA, 603 bp, Cannabis indica
ttttgtaaaatttaaaggaaatattatatagtgaataataaagaaaaagtgtcatccaaaaatattggaaaaaaattattaaataaagagtaatttgcggcataaatacctaagtttaactctcagttgtaaataaatacctaaatttaatttttttttccattaataatacctaagttataattttagaacttttataggtacatgactgttaagtgttaagtaaattactacgtggcaattcctgattagtcaaagtcattaaatttttatttttttaaagaaaaaattaatttaaatatatcaataagaaaatgacaaatggataatgacttaatatttaacggtcatgtacctacagagttccaaaaatataacttggatattagggtaatttgaggcataacctcctaaagcggtcaggtgtttgcaactaacccccaattctaaaattttggtggtaaaacctcctaaactgatattctgttagcaattagccatttccgtccatttttggctgttaaatgccatgttggaatgtctacgtgtacacagtgtacacgtgtcacaattttattggtccacataaataattatttaaaa

SEQ ID NO: 333594 - DNA, 718 bp, Cannabis indica
tatgacttaaccaattgttgtgagtggatgctcttgagatctacgtgttgcacgcagccgctgccacgtattttgggaaaaatctgaggcagcagtattcctttcgtaattttgtgaattttattattataaattctttttcggcatacactatggataacgtgtaataaaatatagttagcgcatattaattatagttagcgcatatattatgaaatttattatcaacatttattttcgatgttagaaattttaaaaatgcgcaattggctttatttgataattacgagattaaaattatttattgaatgtgttatacttacctgtcgtaagttttcatatatcaattatcgaaaattgtgattcatgttaatagttttttctgtatcaattacaattaatactaagatccatacatgcaatgtcatccggtcgatgattttattgctaggtaggatgcttagatggtgaaggatcgcattagttttcatgaaccacacaatcttttctaccatatcagtagtgaactaactgtttttttttttgttatgacatttgaaataggtgtccttacttgcataagactcatatttttttttgtttgtaacgactctagcatgacctgatcgaatctgttgatagatcattgagaaagctaagaaaacgagcatattgcatagtccttgttttctacatagtggcactgctctaagatatt

SEQ ID NO: 333595 - DNA, 1113 bp, Cannabis indica
aggtaaatttcgaggaagaaatttttataaggaggttatagttgtaatatcccaataagctaatagttaataattagggtttatatttatattatgagttaactaggtaataattgggattatgatcctactaatttagtttaacataaaattttaaatttgatataagtggataaataagcataattttaaattacagagatttatatagcatgggtgaatgtaatatgaactatatgtggaatgaaaacatgtttaggtttggcgaccttggagactcgattggagcccagaaatgtcataacagacttaattgatagaattaatggaaatattatgataagttgattttagaattatcgaaatattttggaatactcggagtcaaccaaattacccctagctttagaagttacttataagctaagtaaaggataaaatagtctttcacctaactaagttggttttttttaatgtgagattctaaaataaggctaatggttaatattaatggaataattatagagattaattgtatttttctccacttgacacctccacacgtgactcacttagagtctatatatatcatcatttattacataacaataaaataaaagaaattatatgtattaagttattattaacaattacacctacaccatacactacttcatctctctctccttctacttgttcggccgaatcaaccaaccaccaccatcatcttttttttatgtatatatacaccattattacactttgaagcttggggttggatagcatatatcaccttgagttaagctatcataaacaaaacttggtaagtgatatattgagacttagagccataattatattccttgatatatttaacttaggtattataaattattgttgaatttcaggttgttagactttattttggcaaattattgtgtttagaaaaggtttggattgaatcctagaatcgaaactccgaatggtataagattggaccaaccgaaatttcgtttggcagtaatcgagaaatgccaattttttgtattttggcgttttctatttaagggctcgattttaattttgttacgtaagaatggtagtattcatggt

SEQ ID NO: 333596 - DNA, 1084 bp, Cannabis indica
cacacatattggagtcagatcctggtcttaccaaagaaagtggttgctgaaattgaaagaatctgcaggagttttctatggaaaggctctaacaatatgttaggagttggagccgtagcctgggataaagtatgtctatccaaaactgaaggtggaataggttttttaaatatcaatacctggaataaggctgctttaatatagaaaatatggatactagctgtcaagaaagataatttatgggtcaaatggatccatagtgtctatacgaagaatggtgactgttggaaccacaaggcttccatccatagtagttggtattggaggaagcttgtggatctaaaagatgaaatgagaagaacctgggatacaagtcagctccaagctactgagtttaaaatagcagatgcatataagaagcttcagctgtcccaagatcgaactcactggtgtaatcaagtttggtctagactcaaccatcctaagcatagttttatactttggatggctgtgttggacagacttaagacaagagatagattaaaaagaatgcacataacagatgtagaagattgttgtttctgcagcagtcaagttgaaagcagacttcatctattctttcaatgcagcaaaacaagaagcttgctccaacaaatgaaagagtggatcggctggaaggctactgcttctgatctgaactcactgatccgtagcattagcaggtccaagcgttccaaattccaacagcaagttctctcagcctccattgctggtttagtgtacttcatttggcagcagagaaatgaaactatatggcagcagaacccgaaatccatgaatattcaggagcttaaatggcacatcaaaacaagaatatcttgtgttttaccaaagaaaatcaaagtggaagataggatatggtttgataatttgtaaatactgattgtctagttatttgcttccttaaaggagtgcttagtttgtaaaaagaagtttgtgcaatgaaactatttgattcatcaaaaaaatatatatatataatcagatttacttattaatatagatcagaaataatatttaatgt

SEQ ID NO: 333597 - DNA, 2089 bp, Cannabis indica
acatgcaaaaggactcgacctctgcatagacctcattctctgcagcagaagacctccatttctcgcatcagaagatcctatttcctgcagcagagatctcattccctgtggctaagacctcattcccagcctcaggaaatttataaacaccagtgattggctggtttggagattttcttgtgcaagccttggtcttgagcgatttgggttctttagtagaatccatgacctcgccaaccggaattaccttcttcctgaattccttgtcagcctaaggaggacctctgaacttgctctcaaaatctctgcccattcccgtagagacaaatataaaagatcaatgaagcaacagtggtaataaaaatgacgaattcaaatcagaccaccattcgcataggatgatgcttaccctctgaaatttcttgtggggatcacctataatgatcaactgtatctacttgatttggattaatcagacgatctttagtcttggaatctgtcgtttccaatttaaactgaggtttgaagtttttgggaacatatggagaggaaaaacggttggtatattccagcgttacaagttttgaaggatatatttctgaacctggatgggacatctacacaggagagtgacaatccaatttctggatgaaatttaccaaaaacaaggagtttatggaatatcgctagactgagccaccgttttatatttagaacccagtaatggtaaggctaaaggttggaaaatctaacagttggaaatgaggaagaagatgaaaaggctattcattaatgctaataatgacccttgaaaccgtggagtctttaaaattgaggccatgcgtggtcttgaagaaaggggttgtgacgaatatacccactgtaagcatttaaaaagtacttttttattaaaaaactttttaaagggcaattgttatacccgaaattcggctactattttattggatgacatgtgtcagattggaaggagtagggatcaatgcatgaaacagtaattatatttaaaaatagaataactcagtaaatgcgaaagtgacagagtatatttacaaattgttgactataaggtcttacgcgagataagcatatacaaactgttgccttatacattagcgagaaaccatacgtcaaggaatacgcaaggcgaggtatcaacctcgttaagcatgagtagacgtaagcaaaatataatgaatgtgaagacacttagcgtataatatacagtatacagagtaagtataatagacgggtaaacccaagcaactgatagcgaggcgtccatctcgtcataggaagacatgcgcatgactgtagaagttcaccttgttgccaagaattgtgattgtcagatggagtgttatgtcttcagcacaggagcgacgagatttatattatcaacctcagaaagatacgggaaaagctccagctcgctatcaatgtcattggtactgggttcttattgaggcatcccagaacgatatgatttataacgtgtttaatgcatgattattttgacccagtaaaaaagcaagctaatcaagatgtgtgatattcaaatattaaccgcatctatcttacgtgatatgtaattaaaccccacgatttgaggagataattgttgtaaagatttcagtcaacccttgtaattaactgtctgactatgcaattataaatagaggcacataagactgaaaaagggacgaaacattcataagagaaaaggccctagaataatatcagaaatctaataagattgactcgtggactatgcagaattttaactgcaaaaccacgtaaaaaatcttttgtgttcatacttttttctttactgtctttagtttttctgtgcaagtttgtcactgttagacttatatctggttaacaaaaatatgcgttaacaaatatatattactaatatataatatatatgtgaatactatactaacaaaatcatataccacaattaaaatatatactatgaaaacaaaattatttaccaccattatattaataaaatagaaattattttagtattatataaaataaataatatattatacaattaaaa

SEQ ID NO: 333598 - DNA, 828 bp, Cannabis indica
tcaattcacgaggtcttttaaaaccacctgtgagatacacacaaaatacgtggaaaatcatcattagtaccatcatacttgccgaccatcaatgaactgatcaaattaaccagccaaagttaacttcagtcattatatattgaacataagtaaaagcctccacaacagtcaggcaataataaaaagtaatagcaaaccacgtagctacttgttttaaaaaacaagtaagcgtaattcttcctagacagcaaaatatgttgacatgacggggaacatatttactagttctataatccacaattgcttgaatctcaagatgttctttgaaccaatcatatattttattgagataggtaagccaaaaaaactccccctttaataatcgtaaatcatcactaattctacttgctcggtacgtaaacaagcttgggagtccattggacatgcactatttggatgtaagtatgccctatcaatatggcataatacacaactgagttttgattggagtaagttatccactatgcataagggtgattatttggtgcatctctcaacaatttataccaaagaagagattaaacaaatcatttgtatgttgtggccaagccagctctagttcttgcttcgtttgcagttacatatttgtagaatttcagagctgtaaaaattaaatatcacatgacgtttgtgcaaccccaaatctctccccactgactactgttcaagcaccgtggaagccgccagctgaaggtgatttcaagctgaacgtggatgtcgctctcgatgctagccgaaaatgttaggaatattttaccaagatctaga

SEQ ID NO: 333599 - DNA, 568 bp, Cannabis indica
attacattcttaatcttataatttaataaattaaacataaaaaagaaaaaaattgaaaaataagatattttattgttaagatgttatcaattttatttaataattaaattaaaacaaaatatcctaagttaaaaaaaaaatttgttagaaaacccttaaatttctattcaaacaaaaattaacaaacttcttaaaatttcatattattttgtcaaaagtaaaatttaattaacataaatatctaataagataaaatgttaaaactaacatatttctaatcttataatttaattcaataaaatatattttaaaaataaaaaattttaaaaaaaaaaatatggttagctaatttaaaattttaactagattattttaaattttattaatattttaatatcaaaataagatcatttcaaatttaataattaaataagtaatatctgatcttgtaattaaaataaataaaaataaacaaaataatcaaaaatttacaaaattaaccataaggctagtttgtggaaaaatcaaaatttcaaattcaaaggttactaatatctaaaactaattt

SEQ ID NO: 333600 - DNA, 1261 bp, Cannabis indica
gctttcgcctttcctttacctacacatgaaagtagaactgtgagtcaacagactcagtaagaaaagcatataacatactatataactttctacctgtaactaggcgcccatatacctatttacaaggcttaacagatgagtaagaacattctaactagctgtgctattgaccatgatatcacccattatcagcactatgatcgcactgcgggaccggcactatgtttgtaccgctatgatagcatcaatagcacccaagagtacaattggccatgatatcactcttaaccagtactgtgcccgtactgccgaaccgacacaattgttgtgccgctatgatagcgtgaattaatactctctgggatgaatatcactcttaactagtacactgcctgtactgccgaaccgacacaatttttgtgccgctatgagatcacccaaaacatatacaatcatacatacaacattcatatatctcatataacacgccatatacagttcttacctgatttctgaattcaagtgtgctggccgacctgaacggaaattctcgcgctagatggatgccctaatcacattaattgtaacgcagatgagtgactccctaaatcactttctgcggacttaaacttgaaactaaaagtttccctatcgataaacaacatggcaatatcctaaatatctcgaaattgggacaaaactagggtcccaaaaattcccccaaccggcagaccggcccaaccggaagtccagttctgggacaccaaccggttgactagttggtataggtccacagaagcagaattccggttctgcgctgggaaaaccaaaaattctccccttgcactcaaaacaaacccaaacaataccaaactttccagggtacctaatatgggtataaacaataaattccaggcagtaatccacaaaacaaaccaccaaaacctaagttgccattatagatcaaagctttgaactcaaagctcatacttgcataaaactcaaaccaatcaacaataccagctgctaggaacttagattaactcaattgaatcctaaaattcgaactaaacaagcatcaaactctaacagccactatccagcaaaaacataacttgaaatcaatgaaaacctagaaaaatacaactaaagaagaactagagttacctttgctcaacatccttgaattctttgctgaaatcccagaaaaaaactattgaattaaggtgattctcctttggttttggtcccagccgaaaga

SEQ ID NO: 333601 - DNA, 627 bp, Cannabis indica
cactacaacccctaccataaccaaagggaagtggctccaccaacaacctgagtccctgagaactcctaggtgcacacaactgtaccctaagctcgtagtaccttccccaccatatcagcatagatggtgttcttgccagtagtaatcacaagatcatcttttattttcaaatttaatccatccaggtacttttatttcttgctgaaattggttggcacaattctcgaggccaacctagccaatcgatctaactgagttgtgtattcggtaacactcatattctccttctggatcagttgggtaaattcttttctttttgcacttctgaccgcttcgttgtgaaactttgcattgaacaactcctgggactcttcccaggtaactgtaataaaaacacgagtcagggacaccatgtcccaccaaaccagggcatcctcctaaaattgaaatgtggcacaggccactctgtcattgccgatgacacccatcaaattaaaaattcttataataactgtcagccactgctcagctttcatcacatcataacctcccaaaagactggaggttcctgcttgcgaaaccttacatatagtggttccattcggttcactatagcaatcggccctg

SEQ ID NO: 333602 - DNA, 800 bp, Cannabis indica
cggtctcaagatgtgttttgattttttgaaggctagtccccgggccaactttgactacttgggcgaggctaaggacatgtaccttaagtactgcgcgacccaagtggcttatggtgggaccgaggcggctacttcaacctccgatcataattgtcgtgcaattgtgattgttttattttaccaaatgctttgtataggtataggtgccccccaagtgaccgaacagacgtatgactcttggtcacttgtctttcgcacatatattgcttatctgtttggtgttttgggtttgagtaaaccttttgaacgcacttttggtaaattataatcatgttgatttttttgactcaattgaatttgaaatactattagagctattcgatctaatctcatcttttagcttcacatgaaataaaacaaattgcagtcataagaaactgtactttaaagtggtgtgcccgacttgagtactttgtttctgaaacctttgcgcgtagtccgcccataaggccattcacttagaaggtaatgttcatttagtactttaaaatggtcaacctgacctgagtactttgaaatggtcaagcaaacctgtgtactttaaatggtcaaccggacctggtactttattggtagtatttccttaaattttctccattcaagtaccgtggtactcgaatgagttgctttttttcgtcatacttacctaatttgtatgcttcagagtcgagaacttcaacaacttggtatggtccttcccagttaggtcctagtacacctgacgtgctgtatttggtgtt

SEQ ID NO: 333603 - DNA, 604 bp, Cannabis indica
agccccttactaacaaaatcatagcttaaaaccaaagaaaacttaactaaaactcataaactcaagagataagggtttctagggtttaccttacaacccttacttgcaaaaaccttgaatccttgctaaatcttagagaaatgggaaagaaaagtttgtccttgcccttgctttgtctcagccgaaagaaagagagagaaagtttcaagagaaaaactctattttctaatttccttcttttcttaatttttttcctcaaatggaaaaggattttcctcaataaatccttactgaatattacttgctaggtgtccaataataagacagccacctaactcaccattcaaccaaatgaccaaaatgcccataactcaaaactaaggtttttctaaagctaggggtaaaatggtcaaaatccataaccccgctcaaacccgatattttattttctctaaaaaaattcccactaagaaataaggttctaaacttacccatgtgataaaactagccatccatcgcattttccgttgtcgccgagcaaaaataacaaaaatagcatatttcatatatgaatcacataatacccctagagtttaataaaatc

SEQ ID NO: 333604 - DNA, 1113 bp, Cannabis indica
tatcttagtgcctttgaagtatagaaagttgtcatagtaactcctagagaaccatttctttgtcataaaggtgtcaaaccttttactccattatctaggtgaccgtttgagtccatatagagatttgactagcttataaaccattcctttactgcctttttcaacataacccttaggttgttccatgtagatgtcctcatctagttccccatgcaaaaaagttgtagtgacatccatttgatctacctctaggttgtattgaacaaccaaggataacattatccttatagtcttatacttgaccactagagagaatattttagtgaagtcaattccctctttttgtgtaaatctcttagcaactaatcttgccttaaacttgattggtttagagttgtcccttccttctttatgcttaaacagccatttgcaagacactatgctcttgccctcaggtcttgggaccactttttaggtcttgtttttcttttaaagaactcatttactcatccataactctgttctagtacttgccatccttcccttgaatagctttttcataggtttccagtatcgttctgtttaagttggtagcacttagaaaagcataaacaagaatctcttcccatggattatagataaatttctgtgttggcttagatgtcctcttggccatgtcccttgtcagctggtaattttgtagattctcatcctcctattgtggttcctgatggatatcctcttcctgatcttgggtaaggtgttctatgccttattgttcaggttccacctgaactgggtccacctgatctgggtccacttaaactaggtcaagtgtgatctgcatgggttgcatattgatagtagtaccttcactattactttctaaggaagcactagtactttaatctttgttagaaatacatggaaaaatatcttccttaaaaataacatctccactagtaatagttttgagtccaggattctcctttacccacgatctattcccttttgtacctcttggatagcctagggacacacatttcaatgcttttggctctagctttcccacactttgatgtgcataacttgcacatataaatacctttagat

SEQ ID NO: 333605 - DNA, 615 bp, Cannabis indica
ctggctgccaagacctatagggaggtctggccggccaaggcctgcaggttgagatttggcgagccaaggcctgcaagttgaggtttgctcggccatgctcctgccaggacctgataagtcatgtgtctgccaggatcctccaggtcactatagctttatcaagaggaggccaacctttggatgtggaggccagccttttgcaagtggaggacaactttgtacactatttctttgtagaggtcaggttcctttagtcgaacggaagctcccttggaactcactttttggtcggctagcttgtgcccagaccctagtcggcctatatgctcaccatggccgacctataggcttctcttggcctgttagggatgttaatacaactccttgagggctggcttcactccattcggttgctgcttgacggttttgctatatcttgcatggagaccctgttctgctactagcaaagatgtactccacatgtactttacttttggcttacgtgaacatgccacattaggtggacaaattttggggttacagttgttatgagatttttcggttgtttgataattaatttatagttatcgtgaggttgatttcacgttgtttttt

SEQ ID NO: 333606 - DNA, 847 bp, Cannabis indica
ggttttttaaacccttatgtgtttatttcatcattttagagaattcataattagaatgttaatcaacatactagttagtaaatctagatcctggtaaaatattcccaacaactggccttagagccatggtaatgatttactttcatgtaatatggatttaaaacaatgaatattatttgtgtgttgattttgatgtgttcatgttggtttatgtgttatttggtgattgaatatgaattacgaaatttttccatgaaaatattttatttttattatgaaaatattttctttcgattcgttgtcaaaaattaagcaattttggtttttacgaaacttgattttgataaaaactggaaaagatatgattttttgaagtttcgggaccaagaggtgtcgagttgggtgcattgcatgcaccaggcactcagacaaggagacccagtgcacgcacaagctcgaacagcacccgtctctgaagacacggtgcactcgttcagacaagcctcactggcatgcagacatactgcacctgaccgaggtttctcgatcaaggaggctgcaactccttctcgtgcgcgcgtaggggctgcatgcagcctcctactgggcagccaccccaaaatgcgatttttgtgggatattttaacaaatttcgatttttccaatttcaaacccaacaattcaaaataaaatattatttttaatatttttaaacttaaatattattttaaattaataatatttattttcttaatagattattattaattctttgatattttgaggttaaaatttaaaaatagattattttatttttaagttatggtcagattttaaaaatttgtta

SEQ ID NO: 333607 - DNA, 1127 bp, Cannabis indica
gggcacaaaacccaacaaaaaggacttatagttttagattaagataatacgtcacaacaagatgtccctaagaatcaatagtaagagtttaagtgtacacttgtgtattactttaacaagactcctactgttgagtgggagccatataagatgtaatcaaacaaggaacattaggagataatcaagaaagaacttctgaaagcgacctatatgttagatgttaggggtgtacactagaatctttttatctacacgaactcagaatattagtgatgaggaggaattattctagaaggacgtaaaaacccatcgataataatttagtttcaccagtgaagcgaaatagtttagtttttttcgaaaacactagaaaagttattcaaactgaaaaaaattcttaactgttttaatctctattcaattttagatagaattagagattcgtcttctgtatatttagatgcacttagtaagctatatagatttcagtatccctagaggagtaatgcatatagaaaaatgatgttgcataatgttttatgaacacaaaggaagtaatggtggagaaagcaattgctcaccatagacttacagttcctataatttgggtttagtcaaatacactacacttgatctggatatcaagacaatggattgattgaaatgcacttcttgttttatgttagtgcaagagggagtttgttgggattttatgccctaaataaaacctatttcaatataatctgattttttatcaatagaagattagaagtcatttatatttacatgtagttttcatgtttatggtttatgtataaaatttttgttaagtccagaacatatagttattcacaattatagtaatgttaacacagtggaaggtaactgtgattatatgcttcaaaagataatgtcccatgattcatcagtgcactggatttacactgatgtgatagtcaacgataaagcttacttacaccttggataagtgttatgttctttccagaacattcgcaaagtatgatagtatcagatgtatggagtatacattgaagtgaggctgatattgatcttggtaaagatattataatcttatcgttgtatctttctaagtcaatatcactagt

SEQ ID NO: 333608 - DNA, 2307 bp, Cannabis indica
atgtaaactttaaacttaagttatgaatgaagagaatcatttatattgagtaattacaaagttttgctctttaaaaattacttaaggggcatttatgtatgattaaccggaattcatttggaaatacattgtataatgcaaacccgttatttcaattttttttttgaaattcaaaggttctcgactaaacctctttgacaaaagtggagtcgaaccgttataactccctgaccaaacatttttgtcgagagaggggtcgaatcgttataacaccttgatcaaacctttttgacgaagaagggatcaaaaaactataatttttgatttaaaatctatccgaggggaaaggaaaatcaaaatttataactcgcgtataaaactgaatactaacggttctcgtgagctaagaaagtactaaacgaggcatcacgacgccttgataaaagtacttgaacctagaaaatggatcgataatataactattcatacaagcaaattaagaatatacaaagtgataaaatccttaaattatttttaagtttgcttaaggcagattataactgctatagcgaggtagaaatgacaattgatcgaaaattagaaagtttggtagatcactaactacttaaacaggaagattacgagcaatagaaaaacctaaaagtactgtacatttggtcaaaatatagttgtttacattgtgaataaaaacgcaagtaaacacgattgtattaagttcaaatgaaaatagtacaaggcttttaagataagaaaaaatccaagttgggttacaaacttgtctttcacaaaaatgtcactaggggcaaaccattaagtcatcttcctaaacaaaggatgagaggggaagccgatgaactcgagaaagaccgtctacacatagcctgagaaagaccgtctacacatagttcggagaaagaccgacagcacatagcttgagaaagaccggctacatgtagagagccttgatctctgcacagacctcattctcctcatcatcagatcccattttctgaagccaagatcttttttcctagcctcaggaaattcctcgatggcaccaagatcttctagcacaggtttgggtcttgggttggctggattctatgatagaaaccacttcaacttccttcctaaattcatctgcaaccatgccaacttcctctagaattctttatcagcctgaagaggaccttttaaatcgcccacaagatctatgatcacttgtgaaaaccgcccatggcgggccatggggttcccctggtgggccacggggttcctttggtttggattggtcggaagctccacaaccttggaatctattattttcgacaccgatagagatttgaaatccttggaaacaaatggaaatgggttggtgtgtctgggtattatgagtttgggaggatgaacttctaaactcagaagggacattttggcaggaaagggatgatccattctgaaaatgaatctcactaaagagccagaggtttatgaaaaatgacaagcttgagccgcccttttatacacaaagtccagtgacaagaaaactaagtattgaaaaattcaacgattgggagaagtgcagaatatgaagagacgattcataatgaccctcgaaaccgtacaactgccaagaatcaaaggatgcattttttctaagaaaagatcttgacaaaaataccctttgtaattattataaagccctttttactaaaaaagaactttttaaggggcaattgttatacccaaaattcggctggaggacaagtgtcaagataaagagaatgtgaatcgatgcaatagctcattaattacgtaagtatcagagtatatttgtaacccactgactgtaaggtcttaggcgaggaatcaatgtacaaactggcacttagtatattaacgagaaaccatatgtcactaaatatgaatagcaagacatcaaggacaaaacacattggaagatgaaagcggcacatatcaatcgtgaaagtccttagcatacaatgaacaaactaagtgtaaaatttgaatcagctcaagaacaagtaagcaaggtgaccatctctttatgggaagactgcttataacttcaccccgttagcgtcagcgaggcttacaatcctggcgagccaaaagatagcatttaaatgagcctcgaagaattttttgaggataagtagcgcgatcgacaccagatatacatcgtcgacctcggaaggaagaatggccccagctcgctattgggatcactataaccaagttgctgtcgagacatctccagatata

SEQ ID NO: 333609 - DNA, 593 bp, Cannabis indica
acgtttttccataaacctcgtttattagcaacgagctgcacagtatgtttaaaactcacgtaatacgcctaaggtagttagggtgttacatcagtggtagatttctcaattgtatcaacttgcattggttcaatcaagggagtgggattatcctctatttgagtagaagatgatggaatattagttagagttacttataaaagcatttcctctaatactactttactttgcagcttgaagtttttaatatagtcatcttcaaggaatgtggtatttgtagagataaatactttattatctttgtgactatagaatagtccacccctagtctctttagaaattttgacaaacatgcaaacctcagttcacgcttctagtttgccttctttctttctcaagacatgagcagggcacccctagattctataatagcgtaaactaggtatacgaccattccatagttctacaggtgtcttggagacttatttaaatggaacgaaatttaaaatatcatttgccatcttaatagcatatttccagaaggacgttgacagagttgaataacttagcatagacctaaccatttccaaaag

SEQ ID NO: 333610 - DNA, 683 bp, Cannabis indica
agacctccttcaattggcttttgcagggaaaccctagagcagaaatggcatttgatgagacctttctcattgcaagccaaacaagtcctaaaaccacattctccagcgtaactgtaggccttatggcaaccatcacattcatcgatggcaccgccatttgacccgagtatcagggcattgttggcaatatccgagcttgaactggagtagtgagtggctccatgttttctcacagaagcaatccatcatatatagcgtagaagtacccatcttccatgtcaaattaatagatgatctatgttttcgaacacttattggatatccacatccaaatacatcatcttcctttactcctcaaactatatatatacatattagaacatgaaaaagaagtagtaattaaccataagtatatatagacatgatatataatatatgtttatgttatatacttacattccaaatatggcaaactcatgaatctgattttcaggtggatagatgggttcaatctcacgaactatgcaaccctaagacttcaaaatgtgactaattaatctttctcaaaatttttgcgaatgagaagcttcttaattaatcgttggagttgactaattaaactcttatttttcactggatcccatgattttagtaaatcggttagggctaaagaaatagatttt

SEQ ID NO: 333611 - DNA, 942 bp, Cannabis indica
aagatgatattcatcagtcttttcacttccatgcatcatactaatcttttttctgttcaatgtgattactcatctcttcaactttttactacgtagaggcatgggaaggaagctcttctgcctataaattaccacatttttcttttatttccatgcatttccttcattcttcctatgaaacctcctttttgcctcttttttttgaatatcaatcctgaggtatgtcacagttcatctcctcacgcacacaacatgaatcctattactaaactaaaataactccctcctaatgctctttcgtaccttaacgatttgcgaaataaagtatattgtttggagcaatctctttctaattcagaggatgttaatcgagaacgaactatggaatgtcatgatcatatatatcaactggatggcctaactggtcgtgttgaagagctgtctttgagaacactgtttctcagaaacgaactactgcatgcatcgactattatttctaaaaaaaatgccgagatgaggcgtgtcctcatcgagtatgacataaacgtgcatgtcctttgcgatcaatttaatagggatgtggagatgttaaagactgaaatccaaatatggttccgtcaatatttggatgctatatttcctgtctcgctaacatctcatccttaataatcggggtactccatttgataacatgtatgttgtatagtatgtatatatgtgtcaaaactgtttagaatatttaaaaaaaaaaatcattataactcaatattaaaaaaattatgatcctttaaaataaaatttaatttaataaatagagatatgtcttttaatataaagaatatgaccaatcaaaatagtctaattgataagttttatctcggttaaacttgtttgaataaaattaaaaaaaaaattgactatgacaatatataatgtttaaag

SEQ ID NO: 333612 - DNA, 838 bp, Cannabis indica
acatgcattaatccacaaccaaaatcagatttaacaatatacaactctcaagctccaaacttgacctaaaaattccatacaacatttattcaagctcttgaatctcacaaccaaattctcaagcttgaaactaacttaaaacagaaccaataatccaaaatcaagcatacatacaacctaagaatcacatccacaacatattaagagaaatctacaccattttaccacaaaatcaagcatacacaatcactaatcatcaactctttactaacatgcatccaaaagaaattcctcaacacattatgcttttccttcaatttcaaaattagtgaaataacttcagcaagaaagtctagaagcttaccacaacttcaagcttctatccacaagaaattcaactttacaaaaccttcaattcaagaacaatctacaaaaatctaaacatttaagaaataagtgaagaggagaggaggggtacggttttagggctgaaggaaaactagaaaaataattctcttttccttaaaatcattcttttattaaacataaattaagggtctaaaaagaccattttgccccctagggccaaataacattcacttaggcatgcaagggcaaaatgacatttacacaccaattcaaacccaattaaatttcagatttctcattatcaaataaaatgccaattaattcaatctaatttgcatttcgggcccgaacccggttcggcccaaaatacccggttgtgactataccgcgccaacctgtcagaacacacctgaaaagacaacacaggcatactatataataatatagttctattaagcacataattaaa

SEQ ID NO: 333613 - DNA, 955 bp, Cannabis indica
aacccagaagttcatcaggaaaaacatctaaaaattcttgaaccatcctgatgtcctctggccgaactgtctcaagtcgtgtggtatccaataccacggccagaaatcctaaacctccatcttgtaataattctctagctgttaatactgaaatcaatggaatttgggatacttgaaccgatcccataaaaacaaatagttcctcaccctcgggttggaagatcaccattttccattttcagtcaatactggctgagtacttggataagaaatccattccaagtataatatcgaaatccgctaaacccatttctattaggtcagcactcaactccctatcctcaattctgatcagcatagacctaatccaccttttggagatgactaattctccgtcaagcagtagggttccaaaccctttatcataactatcatgtggtctatccaatttaccaaaaatcctagttaccacataagagtgagtggccccagagtcaaataatatagggaagcaagagttagtaatcgagagctgacctgttacaactgaagggctagctttcatatctgcatgagttaaagcaaacacccttgctggagcaggttttgcaggtgtcttctgctcttctttcttaagctgtgggtagtctcttttataatgtcctagcaacccacactggaaaaacccttgtcctctacaatcacccagatgatgctttttacaactgggacactccctggttccctcgaaacctcttgttctgacctgagccaccgggtgcaaatggtgcttttcatttcttatcagtggtcgagccactaccacccctaccataaccagaagtaggaggagtaggggctccaccagcaacctgagtctttcgagactcctcagtacactcaactgcgccctcagctcccagtgccttccccaccatgtcagcataggtggtgt

SEQ ID NO: 333614 - DNA, 741 bp, Cannabis indica
tgatttaacaagtttactcaccattcaataacttcctgggaacaactgtccagggatatcaagaaacagttctaggctgctagggatagacgacccgaagcggcctcgctaaccaatgtaaaacaacagcccaacgagacacctaaggcatatttaagtcgatttagcacagctgctgctagggttagaaatttggatgatagtacacaacttacagcccttcaggcggggatctcaactgatcgatcaactgttgggggcgagctgtgggacgacttacaaggtcgtccagtaaggaacatcactgagttcaacgaaagggctcaggtattcgttcgaaaagaagaagcccgaaaagaaatgaatttgttgaaaacaggctcgagaggtaaacccagcaacgttttgacaagtatcgtcgcaacgagaatcgataactcgggggcttctggctcgaagagaaaggacggttcaaggaaccgtcaaaggataaaaagaaacaaaagaagcacgataagtacgtgccaatgtatactatttataccgagcttaatgaaactcgggaaaatatttacctcgcgcatgagcaaaaggttgccttcggcaagcccgagcccatgaggcatgcgaggaacaagcgagatcctaacaggtattgtaaattccatgaggatattgggcacacgatcgatgaatgtcgccaattgaaaaatgagatagaaagtctcatcactcgaggcc

SEQ ID NO: 333615 - DNA, 730 bp, Cannabis indica
tagtgcccaagccgaacaagaaatggcgagtctgtattgatttcacagatctcaacaaaccatgacgtaaagactcttttccactaccaaggatcgatcagctcgtagatgcaacagcagggcatgaaatactaagcttcatggatgcttactcaggctacaatcaaatcaaaatgcatccacgagacgaagaacatacaagtttttgaattgatatgggtctatatagctacaaagtaatttcgtttggtatgaaaaacactggagctacataccaaagattggtaaacaaaatgtttaaagaccagatcgggctaaatatggaagtgtacgtggatgatatgctcgtcaaatccagaaaggctgggggcacatatacgacctggacgaatgcttcaaagtcctcagaaagtacaatatgaaactaaatcccttaaagtgttcctttagagtcagctcgggaaagtttctaggcttcatcgtcaatgcccgaggaattgaagctaatccagagaggattcaagccctccaagatatgaactcgccaacaaaaaccaaagaagagcaaagcttgactggttggatagccgagctcagcagatttattttaaaatcaacagataagtgtgtcccattcttcaacatcctgggaggaaacaagcagttcgagggacggaggagtgtgaaaaaagctttccaagagctaaaaagcagaacttgcaaaacctcc

SEQ ID NO: 333616 - DNA, 830 bp, Cannabis indica
caattttcaaaagtatgcccatcaccacaatacacacaagagatttctgccctttgaatggcagcggctggttgtacacttcctcccatattcatattcttcaaaatgttggtcattgaggccatttgagcggttagagcggtcaaagcatctacttcaagaacacccgctacttttcggcttgtaggagctctattagttgaccattgatagttgttgctagctatcctttccaaaatctcaaaagcttcattgtaagacttggaaagaatggctccattagcggaagcgtccaacaccatcctagaagccgcattgagaccattgtaaaatgtctcaagttggatacaatgaggaataccatggtgtgggcacttcctcaacaactccttgaatctttcccatgcatcactagtagtctcatcttccaattgttgaaaggacatgatctcgcttcgaaactttgcatttcttgttggaggaaagtactttctcaagaatttttcagccaagtcattccaattagtcaccgaatcgggaggaagagtattaagccatgctctagcccgatccctcaaggaaaatgggaacaacttcaatcttaaagcctcttcacttactccttgtagcttgaaagaatcactcacctccaaaaatgagcgaatatggaggtgaggatcttccgttggcgacccaccaaattgaccaaccgtttggagcatttgaaacatgacgggcttgagctcaaagtgaggtgcttggatttcgggtctcacaatacccggatttagctcattgaacataggggctgcatactctcttattgctcg

SEQ ID NO: 333617 - DNA, 719 bp, Cannabis indica
gggcataaaacccaacagctactgcatcgaatactctgattgttgcaaacagatccttcaccaggagaactattgtttagaagatcatcagtttaagactacagataatgcaaattttgttttatttactgatgcatcttggaaggatggtcaaggtggttttgcggtggtggaaattaacttagaggataattcttggtgaatttacaaagtagatactggttttgatgctagtgctatggagacgtaaactcttgcagttcgaatggcctagaaattaattgttcagagttcgtggagtaaagttcacatcctgtgtgattgtaggaacttagtgagagctttttctatgaagacataccccccggattggagttttattaatctatcttagaagttttagatttacttaatttagtttcagattgcagtttcttttatattagtagatgccaaaatattgttgcagacggtctggccagaagtgttagaatcacaagtcttggtcctggtttgtatcgtggggagggtgatccccctgtgatccccactttttgttctctgttttaattgaaccagtgttctttcaaaaaaaaatggatggaactgatccaatctaatacatccattggatcggaccagatgattcaattcgtttggattggatcagatacaaaattcaatatccaataatgattggattggatcgattgggtcca

SEQ ID NO: 333618 - DNA, 882 bp, Cannabis indica
gttagtatgctataaaaaaagcttgatagaaagcatgttagtagcctagtagagaataggtgcatattttaatttcttaagtaggtgtaattataatttattcttgatcgcgatctgaccaggatatttcttggtttttcaagatgttctattaaaatggatgctatgcggaatacaagagggtatcggtcggatctagtggtggttaggaagtttagtttcccccgaacattcgtggtcgaggcagagcatgcgatcggggaaatgttaaccaacacaggctgcccagaattgggagaatagatttgcagcaatgaaagcaagaattaatgaacaagatgaagagattagatgcctgaggcagcagggtgctcctgcaatgcctgctcctgtggtgtaggtggctcctccccctgttgtgcaagtagggttgatggctactgtgaatcaaatggaaccactgtacaaaaggttccgcaagcaagcacctccagtctttttggaaggttcagatgttatgaatgttgaacagtggctgaccgttattacttggattctgaattttacgggactcaccggcaatgacaaagtggcttgtgcaacattccaattctaggaggataccctagtctggtgggatatggtggctctcactcgagatgttactactattacctggaaagattttgaggagttttttaatgcaaaatactacaacgaggtagtccgtagcgtaaaaagaaaagaatttctagctgactcagaaagagaatatgtccgttatagaatgtacaacccagtttgataggttggcctcagaaattgtgccaactaattttagtaagaaagaaaagtatctggatgggttgaatgccaagatca

SEQ ID NO: 333619 - DNA, 716 bp, Cannabis indica
aacttggaatattttttcatttttacgaatagctggctgactaggcagcttttaatcccgggtttaaatgctttgttatccttaatgaatttcgttccttgtttataatcgttgtgcaactgtgttcgttttgttttttatgtgcttggtaatttgttttttaccaaatgctttgcacaggtataggtgcctcccaagtgaccgagcagacttttgactcttggtcacttgtttttcacaagtatgttttttgtctgtttaggtctatcgatacgagaagacatttttgtacgcatttaatggtaaatgtataacttgctaataaacttgactcaatctcaatttaaatagacatctttattcatttattggtcgggaacacgcttgttactgtagtaacttacataatagctattatattgatcttgtccgatcttcagcttaatataaacaaaaaaacttgcataaaataaaaaattgtactttcataagtggcactcgatctgagtactttgtcatttcatctgaacctttgggcttggtccgcctagaaggccgttcacttaagagtaaatgttattttcttttttacttaaaatggtcatccgacctgacactgtcactggtagtattttcttaagtgttccccgttccaataccttggtactagaacgagttgcattttttcgtcgtacttgttagaatttattttacca

SEQ ID NO: 333620 - DNA, 609 bp, Cannabis indica
ctgctattattttaagaactggaacaaatgcaacatatattataacaagtttaatttaaatttattatttaaatctctctaaattaaatattatttatttttgattcatttatttccttccgaactcataatataatacttaatataaaacatagcatacgtgcatcgcacgtaacaatatactagtatacactatatatacgaacatatacgggcactataaaaaattaatttttcaaaaactgtgaagcaatatattatataggcttatatgtatgtatataaagaaaggaggaaaatagaagaaaaagaatagaaatttaaacaaatgaagcttatctcctccttattctttttcgagtgattttttcttttaggcacttcattttcgcactactacaaaattggattttaaaggcggttcttaagggcgcgtcgattttgataaaattcgctactaacgctgttccaggtgacactgtaggggtaaaaacaaccgatgccataggacccctatggcgtcggttattatgatagggtcttcctatgatttttttttcagcgttacaattttttattttagcataaattatatatatatattatttt

SEQ ID NO: 333621 - DNA, 759 bp, Cannabis indica
cacttagttcagattttaatgttctttctctgtataaatcagtctgaagatggcttgtgcttattcccgagctaagtcggctgcctcaaagaatgttgccatttccaacactatgcgggcggaggtggacttggctaggaaggacaccgatgaagctagggttcaacttggggttgtccggatggagctgggagaggtcaaaaagaatcttcttgctgctgagaagaaggtggctgaactgaccaaagatcttcaaacaaccaatcagcttgaagccaccattgcctccttatctaaggaagtggccagccttcaagaagaaagggaggttctccgggctattttccacaggttggaagaagagaagaagaccaaggaggaggatcttagagttgaggttgaaaagtataagtcagaggccgggcagcagagatctgaagtggagaggctcggagggaaagtgaatgctctagagtcagctggtcttgagattttttatgacatctagaagtacaatccccaggcgaactttgaataattgggcgataccaaagacatgcttctcgagtactgcactactcaggaagcctatggggaatccgaggcgaccacttccacctctgtagctgaccaaaatgttgaagtgccccccatttagttaaacgatcctccagctccagctgacccagttgacccgtacaaagtgttggaaatatttgaccaggatctagatttactaccaagtatgttttattaaca

SEQ ID NO: 333622 - DNA, 500 bp, Cannabis indica
catttgttggatagtttgagcctttcaagcctaccatgaaatgattatccttagttaaccctcttgagcctaaacttattttgttcttcacctattgaatcgaaatttgtatccacactgttaattttgtcttcactattttatcaatgatatcataagctatacaattagtttgggagagaaaaaaaacatggtgtgagagaaaggatagaagagagtaaacttgcaagattgagaaaaaaagagtattttgtaaattcaatatcactgaaaaaaaaaaagaaagtaaaatatgattcaaaaagaaaatattaaaagaaaaaaagatttcagtgatgttggaaaaaaaaaagattttttttttctcaatcatggttagttgtgggaacactttgtgaaattttgaatttataagaagcttgcaggttcttttgtgcttatgatatctttagccaaaattgttttttgtttttcaaatatctaagccatactttctaaac

SEQ ID NO: 333623 - DNA, 692 bp, Cannabis indica
aaaaataaataacaaagtaatatcactgccaaaaaattataaaatggtcgacatcacgtcgacatcatgtcgatattctgtcgacattttaaaacagtaagcaacaacataagttgttcgacaacatatcgacataccatcgatatgctgtcgacattccaataaaatccacacaacacatcatcacacaacattatcgacattgtgtggacatcatgtccacatgaggtcgatacatcacacagagtataactgcataacgtgtcgacaacatatcgacatacaatcgacatgctgtcgacaacgaaatcaaatcaataaatttacattgtgtcgacaacatatcgacatgtggtcgacaaataaatttaaacactaaattcagatcaaaaatttttccactcaaaatatgtcgacattctatcgatacaccatcgacatccttatcgatacactttatcacacagacatttctaatggtcattttgtcgatattatatcgatatctcatcgataacattgtttaaacaaatagacacaactaatgaacatgcagaaaaccatccaaattcgaatacacaatctaaaacaatctaatttgaagaacatacacaaattcacatccaaatctatgaaaattctaatttttaatgagaaaagaacttagagttataagggtagtggcaaagttt

SEQ ID NO: 333624 - DNA, 796 bp, Cannabis indica
ttggtgttgtcttacatatacattgaaacattttgatatcagaacatatatgtctagtagctcccgtgtcaactatccaggaatttagaaaaggggaacttgaatggtgtgatagaatgatacctgtattacctgttgaagtactaagatcactaccattcataccattagtttgagaggcgagtaagttcagaagttgctggtactgtgccgaggagagttgggggagaatagcgtgattttcagttgcagcagagatgttttcttccccagtttgcacttggttcgtagctgcctccttagatttgttttgcttgttgaaacccgggggatatccatggattttatagcacttttcgatggtatgaccatgtatgttgcagtgagtacagtagggacgatttcttttggatggatgtgatttcccaacttgactatcatccttttggttcactcttttgtccccttggaatgcaaacgccatggcagagttattgttgttgatatttgaggttgttcctctttgttgttcttcttgagtgacaagatgaaacacacgattcacttcgggtagaggatccatgagaagtatgctgccccttacttgagagaatgaatccgagagtcccatcaagaacgacatgatgtactccatgtgataatgatcttgaagtctcttgactcctccacaagtgcatccattgcaagtgcatgtaggcctgtaatttgttagttcttcccatattgttttaagcctagtaaagtaaatgcttatggtctgattttcttgtttaag

SEQ ID NO: 333625 - DNA, 541 bp, Cannabis indica
ctataaataatttcataatttaaacataaacaactgataatttccaaattaactaagcgggctttacaaaataaatgaggaatgatttcttgttgtctataatgaataaaataggaaactgtattaattgtataattacaatgtaaggaataggaacctaaagtgtgtttcctttattctctgactgaatcccacaattatagggattgtcttcgtgtcttggaaatgacgagatggttctatggaactgccatcttacatgcttcatgtaacgcccccgcttcaagcctccactgggcccttacacccatagaataatggctcttatacacgatcacatcactctggctgcttcatggactgatgactgaccctacaaaccaagacgagtgtttccacggtactttttcctcactcgcacacttcctgggaaaacttcccaggaggtcacccatcctgaaattaccccaggtcaagcatgcttaaccatggagttctttcgtgatgggctacccaaaaacaagatgcaccttgttgatat

SEQ ID NO: 333626 - DNA, 1100 bp, Cannabis indica
acctttgcttttagaagaatgccattcggattatgtaacgctcctgctacatttcaaaggtgtatgatggttatcttttcggacttatttgaaacttgcattgagatctttatggatgatttcttggtctttggttcttcattcgatcattgcttagagaatttggagaaggtgctaatcagatgcgaaaattcaaacttggtcctaaactgggagaagtgtcactttatggtgacagaagggatagttttgggacacaagatctcaaaagtaggaattgaggtggacaaagctaaggtgtcaacaatagagaatttgccacctccagtttctgtgaaaggagtgaggagtttcttgggtcatgctggtttctatcgatatttattaaggacttctcaaagatctctaaaccattgtccagtttacttgttaatggcattccttttgagtttagagatgaatgtttgaaggtattccaggttcttaaagagaaattgatttcagcacccatagtcacttcaccaaattgggagttgccattcgagttgatgtgcgatgcaagtgactatgcaatcggagcagtcttgggtcaaagggttgacagggtgtttcacacaatctactatgctagtagaaccctgaatgatgctcaactaaattatgccacgacggagaaagagatgttggcaattgtgtttgcttgtgataagttccgcccctatctaattgggaataaggttgtagtctacacagatcattcagtaattaaataccttacgaccaagaaggatgcgaaaccaagactgattcggtgggtacttctactccaggagtttgaggtagagataaagaacaagaagggcactgaaaatttggtagcaaatcatctgtcaagactagaattagaagagagccagaatacaaaagaggtacaaataaatgagcaatttcctgatgaacaactctttagtgtgagggaaaacctgatggtaccgtggtatgctgattatgtcaacttcttggctgccaaaataactcctcctgagctttctcgtcaacaattaaagaagttcttttctgaggtaaaacattactattgg

SEQ ID NO: 333627 - DNA, 986 bp, Cannabis indica
ggttccatgtttgggactgagttcaggttcgggttcgggtcccgagtccaagtttgagttgggatcccggtccggctcccaattcaggtctaggtttgattaagagtccgcgtccgggtccggttacggttctggatctaggtccgatttcaactatgattccaaatccaagtcctagttcaaatcccggtcaacttccggttttgattccaatttcgggtcacagggtacgggttcgggtccacttttgcgtttgggactgggttcaagtgcgggtgtggtatcgagtccttgtcagatttcgagtccagggctgggtcccaaatccagacaccgactacggttttgtccaacccctgggtccagatatgaataccaatctcaggtcccagtctggttccatttctggtgtcggtcacgagctcagtcctaggttcaagttcgagtctgggtcgggtactaggtcccggtactagttctgtttcccaggtacctatcctatatctggctctaggtccaggttattgtgtatgtttgggtcccgatctatgttcgggttcgaagcctagtctctgttcgggtgtaggtatctgtctgggtttcgaactgactttgggtttgggtttaggtcgcgtcctggtcctagtcctagttcgattctagttccatttgtgattctgagttcgagtttgggttttagttcgggtcggagttcgtgtcctggtctgagttttggttcgggtccggattttattctagttacagatcaggctcctggtgtgggttcgcgtcctgggtcttggtctaggttgggttcgagtcccaagttccaatcccgatttgagtctggattcagttctgggtttaagtccttggttctgatcctggtctgggttcgagtttgggtccgggtctagctttgggtctgattctaggtgcgggtgtttaagttcgggtccgtgtctgtgtccgggtttgtgtccagg

SEQ ID NO: 333628 - DNA, 544 bp, Cannabis indica
attacacaaaaacgggaaaaactaaggctcgggaaaaagccccaaccggcaaaccggttcccaaccggaaccccagttcctgggtaccaaccggtcgaccgattgcactaggcttctcagaaccggtcgaccggttctgagcaggggacaaaaattcgacccctttaattcaaaacgagcccaaacttttcaatactttccagaacacctgtatgcactaaaataaaccagttccaagccagaaaactcaacaaatcaatcaagaaacaaaaccaccattagagctccaacttgagctcacaaactcaaattcaattcaaacattaaaatacctacctatcttagcttaaaatgatgaaaataatctctatttaacaccagaaactaacttaaacaattcttaaagcaaacagccatcaaattcccaaattcataccaaaacctaacctaaactaccaaaacttcatgagaaagatagaaagaagaattaccttgaacaaagcttccaagaatcactaaaaccccttgctacaaactcaaaaat

SEQ ID NO: 333629 - DNA, 561 bp, Cannabis indica
aaatgcactcaactacttattttgtgtttaatatgaatgatcattcaccttttttcatattgttatacctgaaattcagtaagcacatcagaggaaaacacatgtcgaactgggaagaacgaagaactcaaacacgcaaacgaaaagtacacttagcatggaacaactcgttggaaatataattcgcagggtatgtttataacttggctggctaatagtcttctgccagatagaaacatacgaactactaacttatgtattgacgagaaaccatgtgggtgcacgcatgcatgacgaggccacaacctccctacgtgaaagagaaacgataacactaaaaacacttagcgtatattatatgatatacaaactgagtatagatagtgtgacgagtcaagataacagacagcgaggcattcatctcgctacaagatggtatgcatgcgaggaagatcatcttgacaccagaaaatatagttatcagagtttaaacaatattagtcttaagaagccaaatgacaagcaactgctcgctatcaaagttaacttggctccattctc

SEQ ID NO: 333630 - DNA, 1122 bp, Cannabis indica
tcttagggtaataaccctatctttcataccaaataatcactcatataacatattacagtatgctcaaaataacatctattgagggtaataatcctaactcatgtcttcattggattaacaataataccatacatcatcgctttcttaccttcataatattctagggtaataatcctagaccacatttaattaaattcaaggtactagtttaccgaatctagcttatttatgctttaaccgcacaattcataatctcaaatatacatacatatatcatggcatatcaataattaacaattcactagggtaataaccctaggccaataaaccgctcactttagagtaataactctaatcccggtttctagttactcatatatatcatattccatataagcgccatcgcgcataactctacgtgctaactactgtcttacctgatgtcccacaaaatatgaagattccaaatccccgagtactcctgaccaagtaccggtaatcctagtcacaaacccaggatacataagtatatggttaatccctaaatccattttcacaaattagaaaactggcatttaaattacaagtattcacatggagctcggaacgagctttccaacaatacaaagaacttcccaaacggaatgccaagtcaaaagttatggccaaaacaaaaatccgaaaaaaaaatacaataagctgccaaaaactggtcgcggctactgggttttaaaacccaggaaacccaatttccagccacgaaaaatgcatctaaaaacaccaattttcatgctaaaccatcccacaatcataataaactttcacctatcataaatcaaaaaattagagaagaattacacctaattcactctccaacaacaccaaaatatgcatcaagatcttcaatttcagcaaggtttaactagagcaaaaatcccaattcaagagcttccaaaccataaaaatcagcatttttacacaaatttattctcaatataactcaagcaaatgcctttaaaatcattaggaacaattccatatctttgcaacacatacatgccaaaaacaataagattatcccattaatccaacaaacatgcaaagatgaacatattcacacat

SEQ ID NO: 333631 - DNA, 567 bp, Cannabis indica
atcttgataatgctctgctacataaagaatcaagggctagagattcgaacggaaggagtcattatattcccctgcacccaatgtaaggtttccttaaacccttatgtgtttatttcattgttttagaattcatattaggaagttaatgaaacatacatagtagtaaatctaaatcctaataaaatatatccaacactactttctaaaagattacaaataggatcctaatttctaaggtcaaatatttttttaatatgactagaatacccttagttataaaaagagttgtactattttaaaccttatattttagtagagtattttgcggctgaattctcccaactattattttacttgcgcttaacccttcaatctcaaatttcggtggtaaaactctccaaacaactgttctgttagcaaatttaaggtgtcatctatttagcacagttaagtgccaatatggattgcttatgtgtaaatttttgtacacgtgtcacgtttatattagtccacataatactattatttaaaaatattttttcaaaatttattttaaaataaaataat

SEQ ID NO: 333632 - DNA, 1017 bp, Cannabis indica
ggttcgtggatgtgtgctcctagctccccacctcgtgatcgatttcgggttcaacgcaaccgtgagaactctccttcgaataggccgattatgactatgggtgaagcttcacggattgtttttgcgtttgagaagaatcgggctcgttattcgggacctacaccggaggagcttgcacctacctcgattctagaggctcgggaaagagaggaggagttggcctcccatgattctgatgttactaaaattgtcgtggcacctatgggtaatgaggcggttgaggttaatgtggtggggttgaagaaagataagggtgtgggcagggataagagtctgaataatacatcttcaggtatggatagtgtgactgaaatggtgattcccgtagataatgagaaggaagtgatagtgggtgagggtgataatggcaaagttcatggttctactagtgttattgtggatttggttactgagatggaagttggtgaaagaagtaatcaaaagttcactaaagaacaaaagggtaagggtgttttggcgccttcctcccaagatgagctctcttttagccatgcgctacaacatacatttgaacaacttatcaaagcacaaaaagccaaaacttggaagagaatcaattcttcttctagccgtgggtctaaaggtgtgtccaagctgtcttctttccccattagtcctaagttatcacatgttatggttgctaatgctaaatacaaattgagtctgaaggtcaatggtggtgggaagcgaaaaatggatatagagggtgctactgaaagtgtgaaaaaaggaagattgggtgagcaagtgggcatggatccggaagatatgaatatgatattggcgaagcctgcggagcaggctcgccaagagccatgagtctgttatgttggaacgcccggggtttggggaatcccggtgcgttgactgccttacgaacgattgttcgtaagttttccccaagtttagttttttgtcggaaactaaactttatgg

SEQ ID NO: 333633 - DNA, 1092 bp, Cannabis indica
aaacgccaaagcctataaaaaaatataaaatagagtaaatcaaatggagccaataattgatgtttgaacacttatattgaattgaaccccaaatgcatatatactggcaaagaaatatcacaacacatgctttaattgcagtagtggtgtatttgtgaatgaatactacaaaagaaacaaacactggtataaagccttagacaaattcctgtagcctggcttatcaatctaataaatgcttggatttacatgcaccccatcacatgtccatctacacataatacatacaatgtaataatgtcagatataaagcctctagacaatagacaacctttggatattattgctgaccagagacgaaacacatcctccactagaaaatccaaaacttaacaagagtttattaatgctacacaatactagctattcataatgaattaatatgttatagtaaatgttgtgttcatttaatgaactggtaattgttatagtgagatttttctcacctacacactcgagaccagactcctatttgaagggcacgtgtactccatttccccgaggaaagatcagatgtcaatgagagactcctcgagttcaaaccttgcctgaactagactcagcaagatgatgcggatatgactaagtctaattgcattcgtctgactcacattatgtaggaccaagggacaaatttaacctgcaaatactaagatatatgtgagtatccccacgatcctgctgtgaaaacatagagatcaattctctatgttgcgagctggtcccgatgacccaacagcctcgataaaccgatgtagactcgcatgtcttggttctatgagctcgttatacgatgtccataaaagtgactgtacaagaaggcagacatcttagacccaactagtctcgaatgcattctaagcctgcgagcttatgcaagaatgtgaacaatcaactcgcactatagaagtcgcgtacgttgctgtatttagtgaatgaaactggaaactgttcttcatttattaatgtttatgtttaagcttaattattgtaaatcaatgtataaaccgattgacaatgaatggaatcctt

SEQ ID NO: 333634 - DNA, 874 bp, Cannabis indica
aatggtgaaaaaccattaaggtaagtggttaaagatcttacaaactgataggtgtggagaaatatttggttatgcagctaaaagatcattaagttgaacttcgaattgtatccaaattacctcccaaaaattcagtttgcacattgatgatagtacaaaggtctatgattagttactagcagctgcctaagtccttctagggatacaccctagtgataggaaaatttcagaatatgaaatggtagtatacatagtgtaaaccattactagatttatggatgtcctaataaaaaacttaagaaaagctagaactattaactaaggttttcaaatttgatagttattctaaagtgattaggggtggaccatcctatggtcatttgtttcaacaaatactatttttctaagaaaatgacaaaatctgaaactaacaaagtagaggagatattttcaattctaaagtgttctatcatcttattctgtataagatagccccactgcctctgttgtcttgacacaaccgatgaggataataccacttttgtcctaaacagaaagtcacagtaccttgtcgtagtgggagggtttaaaataactcaccctattatgacttggaagacacttgtgatcaaatatgtggttagtttaaacaagtaatggatagttggaataaagaagtaagaagcaaagccaagagaactatggttaaaaccattcatatggagtaaccaaagtttttctattacaaggacaataaaggaaattttgaaaataagtttattcaatggacttaacaaaactttctgatcctagtattataggtttgagattatctaaacctgtggcttatggtatgcctggtaatttacttact

SEQ ID NO: 333635 - DNA, 412 bp, Cannabis indica
acgtcaggatcaattcgctcttcgataattgccacttcgctacttggaaattcaagtatgaaatatgcaagggcttgtccttcgattgaggatttcggtttatatctaatgtcgaactggctcagctccactgactatttcaacaatctacccgaggcctctggtttcgttaaaatttgccttaaaggatagtttgtcaaaacttcaatgctatgtgcctggaagtaaggttgcaactttcttgacgttattaccaatgcaaacgccaatttctccatctgtggataatgggtttcagcatctaagagacgcttactgagatagtacactgggtactgcctactttggtcttcgcagattagtaccaaactaatcgcgtattcggacactgcaagtgttggaaattatttta

SEQ ID NO: 333636 - DNA, 1136 bp, Cannabis indica
ggtaagtctttcttgatatttcccttttaactttatacacttagctccatatgctgacttttttcctttgtgcaggccggtttgaagttggcttacacttactcccgggctaaatctgctacttccaagagtgcggctctgtccgacaccttgagggcggaggcggacttggccaaaaaggaagctgaggaggccagggcagaaactggagctgttcggctggagttgggcgaagccaacaagaagttgtttgctgccgagaagaagatctccgtgctaacaaaggacctcgaagctgctgatcgctttaaggagaccatcgagatcttatctgctgaagttaacagtcttcaggatgagaggagttctctgcggcaagttcttcttcggctgaaggaggagagggacgccaaggtggccgaggcggaccagttgaaggagaaggtcaatgctttggagatagccggcctcgagctcttcttcgatttctggaaggctaatccccgggccaattttgactacttgggcgaggctaaagacatgtaccttgagtactgcgcgaccgaagttgcttatggtaggaaagaggcggctgcttcaacctccagccatgcttctggccagtctactgatgcatctcctgttcgaacaacagatcctcctgctctagttggctcaaaaaacccaaccaagagcctgggactcccgctgtttaaacacttctctttttatctcctttatatatatatatcatatgcggcctcaaggccttttttaagacatcatgaccgaccaagcggtctttaaacttggaattatttttcattttttggacaacgggctgaccgggcagcttttaatcccggtactacgtgcttttgtcatccttaatgaatttcattctctgtttataattgtcgtgcaattgtgattgttttatttttaccaaatgctttgtacaggtataggtgccccccaagtgaccgagcagacgtatgactcttggtcacttgtctttcgcaaatatattgcttatctgttcggtgttttgggttcgactaaaccttttgtacgcactttaggtaaattataatcatgctgattttttcgactcaatagaattagaaatactatct

SEQ ID NO: 333637 - DNA, 1818 bp, Cannabis indica
gcttgattctccagggtgcttgtttgattttgctggtgaactttcctttttcccattcgcttgcctatattgttgctggaacgtttaccgtttaagcttgaatttcttgggtaatgggggagctgggcgaatgtcccagtggaaggagcttttgacttgcaaggtttttgctcaccttctgctcgctgaatagcctcttcaagtttgataaagcatttagcacagtcgagaaaatcactcattctaccaaaccgttcttccttatttccttccagagctcaccaaggacttcaatgccccctagaatcgcggacaactttccgtcttcggttactcgtgaaaccttagtcgcctccgtcatgaatctgctgatgtaggctcgaagaggctcgcctggtctttgctttactttgaccaggtctcccaggtgcaacgaaagttggtaagagaaggaaaattacacatggaactccgaggagaaagctttccatgagttgaaatttccaggtgccagcttgaaataccattgctgggcggcttccgagatggtggcaggaaaaattctgcaacatacttctcctcgtactccttgcagatccatttgcatcttgaaatacttaaggtgggataatggatcttccttaccagtatacatcttccaggttggcattttaaacttgtggggcaactccaggagattgatctcaggggagaaatgggttccacatgctcggtccaactcgagatcattgtttctctgaccggccatgccttggaacatactctttagttcgtctagctatgcctgcatggctagattaacctgttcagcattttggccgatctgagtcacatcagcatctttttgagtaggaatttgagcgcgggtttcgggctacacgatcggtgtgtcaagatgatcgtccactcctctcactatttagatcatttttgagatcatgagttgtccccaacctattgaatacgataaatgcctggttgtctcagcaactggttggtttggctaatgtgctgaccggcaccattaacctggttggaattgttgggtatgacttctccagatgaattactagacaaagtctacccacctaccactgggcccacaggcggaacttgtgactggggatttgacggttgaccattttatagtttgggaagtattcatcgctggatctttgtttgtttcacccaggggatgacattcgggggttgctgcctgacagattgaagacttttcgtatcagcacagtggcgtgtcgactacgattgtcaatgactgcatgatgagccgttaacgcttccatctctttgtccctccattcaccaaacatgcacctctgctcttcaaacgcgagatttaccacagtgcggagttcctcctgatcatgatgtagggtgttggtatgaccctgcatgagtctaagagcagcacggaggttctgaatctcagtgtcatctccaatgattgtttgaacattggtggcgggcaaaacggctgtgctatgaacgccctggtcggctactgaactggtattcccagtctcttgcacaccaggcgcaatctcatccacaggagttgtcacactgtgacccgcagtcgatggctgtttgttatttacggctagtgaaacccttgtgtttcctagattctacagtacaggatccaccgcctgtggatttgctagatcaaccacgcccctacgagtttgcaccaccatcgtacttgtgattaaatttgaaataaagagcgatccttgattcttcactcaatgaaagcaacaaaatgttgacctcgct

SEQ ID NO: 333638 - DNA, 729 bp, Cannabis indica
gttctaaaatctaaggtataacacaaaacgacaatcatcttaaactttaaggtatttatctgacttgcaccacatagagccagccaactcaatcttttctcttttaagatgtttctttttcttttttctttttctatttttcagaaaattacatttgattaagaagtattagagctgtaccaggaccagctgtattattgttttgtctgctaagtacttttttgaatgcaaaatgaaattttattaatttattaaataactcaaaaggcaagattataattgagtaggaatattcatctcactaaaaactatatttgaaaaaaaaatattacgctctaataaaattgtgcgcagtcatattagcagatcgtataataaaaaacaaagaaacattctttaaaatagataaaagttgtcgatagtccattaccactcccccaagatgcgaaaccatggtaatgttacttcgaatagcttagacaattgagagacaatcggactcgagttcaacattatgtcattcatgatccttgatctaacttaacgcctcttaatggctaaagcttcagccatgtctggtgccattgtacccctcgtgatagactgttttggcctccaccaaactacccgttgtgatctcttgccaccaacctaaaatcatttgatgaactgtggtcaaaagttgctgcatcaactgagattttgagtacattctcaataggcttaacc

SEQ ID NO: 333639 - DNA, 2093 bp, Cannabis indica
tttttagattgaccatctatgaccttatttattgtaccacttcaaacatgctatcatttattggtttcacctacatatttggtaatgtgtacttaataacaaaactaaaaagaaactacaatgcaactgttatgcaacttattgtttaatgaattcttatatttttcgtcaatgagtccacaatattgttgattaacttcttctaagcagtaggtgtcaaaattattgttgtctttagtgctttttttctatttatgtatgtttattgttcaaaaaaagctctcaatgactccattagtgccgtgattggtagttctctagttgctaagtttgttgagtttagagatttagctatgttagaagtcatagttgtatacttgttatgtttgttgtgataccttgaccatttgtggtatccaacttgttgtaaatagggtctaacacgcttgtccaagctattaagctctctcatatggtattcaaatttcctctttgtgtatgctttttctgatgcaaataatggtttattgagtttgcttgcattcttcttaaaggttgctcaatacgtggtatacacagtcccctgagttatgtctaaaaatacgtgagcaacagccttaattatgctctcatttctatctgagatcaagcactgttcttctcttaccccatatgcttccctcaattttgtaaaaaactattcccatgagttcttattttttgaatccacaacagagaatgctagggggaaaatgtgtttatttgcatcttgtgtacaggctgagagcaagtctctccatatgttcattttagaaaagttccatcaactacgattatgggttcgcacttgttccatccttttattgaagcatctagtgctacaaacaagtacatgaagttgttatcttattcagtttgcatgtgtactatggttccaggattagttttctacatcatgtgcaaaaaactttgaagcaggttgtatgattctttagcttttccgcgtaattcttgttgtgcatgctctttacttctccacgcttcatgtagttcatttttatgccatacttgtccttcaattttcctttgatgtcttgtggagtttgagttgtttttatgttggtgaaccttggtttgatgtagtttccaatcaactttggtgtagcttgtcgcttgtctgaaaatcttatgtagagaaaaatgggctcattttgaaagatccaataacttaaaatggaccttcatggccaaaccccttatgaacccaagttagatttttgccattattttgcgtccttaatgaaacaaacttgcctttcttcaataatgctatttttttgctctagttatttaaatattaattctagttatttaaaaattataattaattatatttaataattataattaattataaaaataaaattactatttaaatatatttattaattagaccttccaatgtctcttaattaataaataaactttgaatcttcttttcttctcaattgtgactatccttggtaaaattcacaaataagaaatagtctttatttagaatcataattgattaaataaatcaattaattgagactacaaaataatattatcccagttagtgtggggaccatgggcctatgtaaccaaacttccaataagtagttatagaattttccaagtaaattctctatcttattaattcctcctgactccactatagattcagaattgcactcctaattacatataatgctctattcatgaagaatagatacgttataaattatccattgtctcaatccaaataatcaaagatcatctatagatgatctacatcgagcagggacaaatttattgttctacattttaatgtattttatccttaaaacacttagctacttgtaaataatgttttagtaaactaatataattagtgaaataatcgctctattatttatcgtgttaagccaagctctaagaaaactattgtttcacttctaatagttatagaagcttataaattccatgtatataattagcgctctgactcaattgctgtaacaccctaactaacataggcgtattacgtgatt

SEQ ID NO: 333640 - DNA, 849 bp, Cannabis indica
tcagatttttgaatgttcggtgcccagcaacattggaacgcgtgtaaggctcagtagaatcgcatcttggtattttagtatagcggggcggtattgttagacattgagaatgtcgagattagtcgagaatttagaatttcccaaaatacctttagtacctttttgtgtcattttgatgtgagaaggcaaaaaggtcattttgcccatatgtgtactttgtcttttgtggatttttaattaagttattaatctgatttttctagcttagtttggctgaatcaatttaataaaataaagaaaatccattcatttactcattttatgaaaagttagaaaaatcacattttctctctcaatctcactctctctttcggccagccttagagcagctagggttcttgtttttgctccttcaattctgtgttttccagcagctcaaagtgtaatccaagccaaggtataatttctagcaacctcctttttgcttcttgagttgtaaggaaagaaaatagttttgcatgttgttgagttttagtttttgttgttgttgttgttgtttgaaggttatttctgtagttattttatgtttgtttgagttgattggaagtggttttaggtgttgttatgttgtttgagcaagctttggagtattgaactcaagcttggctcattaatggtggattttgattctgtacttgggtagttgttttgttgccttgaatatgttctctagggtgtgtagaacaggtctgaaaattttggattggattaggatgtatttggtcaagttatgaatttttagtgtttcctgcactgaactggaattccggttcagagaggcctgtagga

SEQ ID NO: 333641 - DNA, 584 bp, Cannabis indica
aaatttacattaaaaaacaaaactaaaaaaaataaactgtaaaacatatattggtaaatataaatacctaaaccacttcaaacggagacggaggcgaaggcggacacggagacgacactggccgagacgaagccggaggcagaaacaaagagaaaaaattagaggaggcgggttggagggtgtttgcttcggttttcagagagaaaatgagagaaaaatgaaattggggaaaaaaattgaaagggaagaaatgggggaaccgggtgttcgtgtgtttatataggcgaacaataccggcgggggtccgccgctaatactgggccccgccggtattaatggaaaaattattaatttattacaattagcggcggatccccgccggtattgatccgccgctaattgtaatttgaaataaagagcgggtcttttcccgcattaattgtgcatcgtaaataccggcgggggttgtccgccgctaatactggtaccccgccggtattactatttttcaattatatttttaatatttttaaaaaaataaatactaataccggcggaccccctaaatccgccggtaataacct

SEQ ID NO: 333642 - DNA, 992 bp, Cannabis indica
atatatataaaaaaaaaggagataaaaagagaagtgtttaaacagctggagtcccaggctcttggttcggttcttctgggccaactggagcaagaggagcatcacaagtctgaccggaggttgaagcagctgcctcggttccaccataagccacttgggtcgcgcagtactcaaggtacatgtccttagcatcgcccaagtagtcaaagttggcccggggataagccttccaaaaatcaaagaagagctcgagaccgactgtctcaaaggcattgaccttctccttcaacctgtccacctcggctgaaagctccccctccttggcatccttctcctccttcatccgatgaagaactgctcacagagaagtcctctcatcttgaagactgtttagctaagcggataagatctcgatggtctcctcaaaacggtcagcaacctcgagatcgttagttagcacggtgattttcttcttagtgggaaacagcttcttgttggattcacccaactccaacctaacagcttcggcttccgctctggcttcttcagcatccttcttggccaagtctgcctccgccttcagggtgtcggacagagccgcattcttggaagctgtagatttagtccgggagtaagtgtaggtcaactttagcatattgagctaagtgtggaagattaaagggaagtatcaaaaaagtaccctcgtgaactccttcaagactccgcccaccagcacatccaaagaacagtcattgtcagcaccagccagttgctcactgacctcaggaaccagccggttcatgtaatgggccagcatctccttgccctttttggcctctagaagcacttgcaaaggtggagttggtgcccgcacccgttcaggatcactcctgaccagttcagacccaaccgttggtggtccagactccttggacttggcagcttgggggtagaggggtttgcagctgtcagctcctcggaaagatcaatga

SEQ ID NO: 333643 - DNA, 1264 bp, Cannabis indica
taagtttattccgtcggcggttaagcagtaccctattttgtacgggccactactccccctagttttttgaaaatagagtaagtactctcttttcataaaactttctttcttttttgtttcgttctcttgttgtactttattaatgataattttgttatttcttgacgtattatctcgaccaggaaatctgccagcgcctgccccttaatcgttgtccggggcaagtactgcatatcaaattcacttaattctacagcccatttcatcagtcttccggatacttctagcttgtacaagacccgttttagtgggaaagatgtcatgaccgagatttgtatggcattggaagtacggccgaagttttcttgccgaagtgactaaagcccatgctaatttttcaattattgggtatcttccctccgcccccgagaaagttttactggtgtaataaattggtaactgcatcttcccttgttcccttaccagtaccgaacttgcggcagacttagataaggagaggtataggagcaaagtttcgtcgggctctggctttgaaaggacaggaggcgtcgtcaagtattttttcaaggcttctaaggccagctggcatttttcgtcccacttaaacttgcggtttccccttagcaagtcgtagaatggaaggcttttgtctgagagtttcgagatgaagcgacttaaggtggctgtctttcacggtgcggggctgtcctgtcgcttgaaatgcttttatttggtgtgggttcacttctacccctcgtcgggttactagatgacctaggaactttcccgatcctaccgcgaaggcgcacttggctgggttgagtttcattgagtgggtgaggaggatctgaaagcattctcgcagatgatcgacgtggtcggcgccatctttggatttccctagcatgtcgttgatataggcttccatagtaagtcccaattgttgggcaaacatcttgttcaccattcgctgatacgttgccccggtgtttttaagcccaaagggcatcaccttgtagcaatatgtcccccgctcactgatgaatgacgttttatcacggtcgggaggatgcatcattatttgattataccatgagaaagcgtccatgaagctcattagcttgtgccccgcggtggcgtcaattatcatatcaatgtgtggcgtggcagcagaaaactgtcttttggacaagccttgtttaagtcagtgaaatctacacacactctccactttccatttttc

SEQ ID NO: 333644 - DNA, 507 bp, Cannabis indica
agaccgcttagctttaatttggaattagcagataattagggtttaattatgaaaattagttattaatattaaattaattatttatgatgatttatttgaattcagagtgcattttatatgtcatatatcgaaagtttatatttttgcatgttcagtgcccgacaacattggaatgtggtgtatggctcagtagaatcatatcttagtatttttgtatagcggggcagtttagttagacattgggaatgtcgggattagtcaggaatttagaatttcccaaaatacccttagtacctcttttatgttgttttagtgtggaggggcaaaatggtaattttgccccatatgtagtttgtcctttagtggactatgttactcttaggaaatgttaaattttaattaagtcttggctgaagtattttaataaaaccaattttataattcttattttacaaaaattaagaaagaagcaaaaatcaattctttcaaagctctctctctctctct

SEQ ID NO: 333645 - DNA, 539 bp, Cannabis indica
actcaagacctaataagtgaggcgactatatcgctataggaaggcgcgctcctgttactttcaccaatcaattttagacatctttgagtaagacttatagtcttgacgagtcagaagctgacattcaaattatgataactgctgaagtaatctttgttatcaagaactacaattgtcaaaatgaggtgttatgccatcaagcgaagaagcaacgaggcgtacatcgtcaacctcagaaagatatgagaaaagctccagctcgctatcaaggtcattggtactgagttcctgtcgagacatctcagaacgttatgatttaaaacgtgtttaaatacatgatcattttgacccagtaaaagtggataaattacagctgcgtgatatttaaataataattacattaatactacgttaatatgtaatccgaccccatgatttcaggggagaatggttgtaaaagatcacagtcaactctgtaattaactgcctactatgtgattataaatagaggcaagttagacagaaaaagggacgaaaaa

SEQ ID NO: 333646 - DNA, 874 bp, Cannabis indica
taaaaacgtttaagtatatatattatatacgcttatatcaagaaaaaaaaaaaaacgatacgaactctcttctcccttcgacgaaactctctccctcctatattcattttcttcaatttttaatctaaaacttagcgatctaagctccggtaatagcgggatagtaaattctcagagcaggaaagcttaaggtaaggtttcattccgttttaagtttaaaacaattggttttgtatagggattttacgaattagaatagttaagaaggttctgaccttataagattgttctcgagtactcatgggactagttctgatattttcttgctaaaatttaggtgatttttgggttataaattgagtttagaactttttataacttaagtccgaacactagtggcgtttgccaattatgggctcgattttagattctattacgtaagtatggtagtatatatggtatatatgtgccctatgaaatttagggtggtttggacaggtaccgatagcgtttcggtgagtgcataaatttgaaaaatcatatttttgcccctaataaaccagtcaaccggtttgtaaaccggtcaaccgaatctagccaaccagtttaccatttcggccaatctcgaaaacttgagaatcgtattttttccatcactttttactcgtttgtctgttttggacgttctatataccatttcgaagtttttgatgagctataccatatggtgtatgttttagagccaaaatataagttttggtttagtgtttttgaactacaagttgtggtaggaaactctaggttgtcctttgcaactgttaagcagtgttttgggataaacacttattagtctattattgttatgacttagggc

SEQ ID NO: 333647 - DNA, 818 bp, Cannabis indica
aagggaaatacttcttccccaagctcatagccctataaatagtgatgcatactcactgggcaaagggtcgaacattctggtagagagatattatctaaaaattcatattcagagatacctttgtaagagctataagaaaaggaacctttctccttgttcttgagtcaatacaaataacgaggactaggctaataccgaactgttcggggctgaacctctataaaattcttgtgtctttacattgctttactatatatctatcgctataaattacttatcgcttactaaataagactcactgtcgttggctaaaagcgaggtcaacattttggtgctttcattgagagaagaatcaagaatcactcttcattcaaaatctaatcacaagtacgatggtggtacagactcgtaggggcctgattgatccaactaacccacaggcggtggatcctgcattgtagaacccaggaaacgcaagggttctgccagttgttaatcttgaacaaccgtcgaacgtaggtcatggtgtgacgactcctatagatgaaatcgtgcctggtgtgcaagagactgggaataccaattcagcacccagccaggtcattcataacacagtcatcccacctactacctacgtttgaacgaacattggagatgatactgagatccaaaacctccgcgctgctcttggactcatgcaaggtcataccaatatcctacatcatgatcaggaggaactccgcgcagcagtaaatctcgcgttcgaggaaaaaagacgcatgtttgccgagtggagagacaaagagatggaagcgtta

SEQ ID NO: 333648 - DNA, 956 bp, Cannabis indica
aaacggatcggtcgactcaatgagtgatttcctagaccaggctgaaggtttcatcaagctcgaaaaagcaattcaacgagcagaaggtgagcaaaagctacacaaaacaaactctccttctactggaacgtccgcccagcttccccaacattccagcaattcaagtggcaagctttgaggcaactaccacaagcaagggaatgggaagaagggaaagttcgccgaaaaacccggacatactccccgtgatcacgccaaacacactgcattcactatcttagctgaagatatagaaaatgtgtacatagcgacaccaacgaatttcgtacaaaaagcccgggcccatgaagaaagatacctgcaaaagggatatgaaaaaaatttgtcgattccagggagactatggccacgacaccaacgaatgctacaacttgaagcgggaaatagaacttttgatcaagaagaacaacccgcacttacagaagtatgtcaaggccaaccaaggtcagaataaccaggatctgatgcctccaccgatagatggacacttgcaagtcatcattggaggcccgcacatcgctggagacacaggcaaagctcgggagcgatatgtccgcacaactcaatacgagcaagaagtacgagcaagaagtcatcctagccgtggaagaaaggaagtccaaagttccacgagcaggagagccaaccataacattcaacgacgaagatgttgtccagataagatttctgcacaatgacccgctagtcatggaagtccagataccaaacaaaattgcatccagaaccatgatcaataatggggcttcttcaaatattttgttcaagactgcttatgagaagatgggccttcagcccgtctatggtttctccggtcaaggagttgcgcccctgcgacaaatccgcctacccctcacagttggacaagctccaacgag

SEQ ID NO: 333649 - DNA, 579 bp, Cannabis indica
ttagtaaaaaaattctaacatggatgaaagttcaagggacataatttagtacatatcaaagtttgagggacatgatttggtaatatcaaagtctggagagcatggtttagtgcataaacaatcactgaagcagcaaaattgaagatagttgaagattatattatgcatcattggtcgcatgtttatttccatttatttggatttgaataatgggtttgttatttcctaacttttgttgggagatctttggctgatagtcattgatgggtataatttgttagatttgcatttggtttagaaatctagcatacttcacacatgttggatgcgtcttagttgatggcttattagatccttagttggattgtcaggattttcttcctttttattgtaaacagtttggttggcctattttggatgatttttgtaatgaccgcatagttaaattatggaaattaacatagaattaagaggtttaattattattattatgtgattatgtgcctcttaggagaaattagggcttattgtcagaaataggccttaggaaaatattttctcaattacagagatatattt

SEQ ID NO: 333650 - DNA, 1682 bp, Cannabis indica
cagagggagcttgtgattggttcggtttaagctcaacttctactcactgaatggcctcttcaagcttgatgaaaccatctgcacgatccagcaagtcactcatagaatctactggtccgtctctcttgatatccttccaaagttctccgagaactttgatgccccccgtatcgcgattaatttcccttctttggttaaccatgcaactttcgtctcctccatcatgaatttgcttatataagcttggagtggttttcctggcctttgcttcacttcgactaggtcctctaaatgcaatgggagttggcgagaagaagaaaattgtgcatggaattccgaggagaaagccttccaagagttgaaccttcccggtgtcaacataaaataccattgctgggcggcttctgagagtgtggcaggaaaaactctgcagcatacatcacctcgtactccttatagatccatttacatttcgaaatattttagatgtgataagggatcttctttcccagttacatcttctaggttggcatcttgaacttgtggggaaactctagagcattgatatctggagagaaaggggatccatgtgctcggtccaactcgaggtcattgttcctctgaccggccagaccttggaacatgtttttcagttcatccaactgtgcttgcacggatggattaacttgttcagtttcttggccaaccaaggtcacgtcaagatctctttgagctggattttaagtacgagccccgggctaagtgattggcgagacatactgttcttctaaccctctccttctatttagatcatccctgagatcatgagttgttcccagtctattaaataaagatgcattaggttatcttagtgactagttggtttggccgatcatttggctaaaaccgttaacttgggcagagttattaggtataacctctcatgaaaaattactagataaggtttggctacctactgcttggcccacaggcagaacctgtgactgaggattgggcggctggccgttcagggtctgagaagcgttcccagctggatcttcgtttgactcgcccagtgggatgttggccgcaggttgctgattagtagcttgataggctcttcgtatcaatacggtggttcggttgtcaatggctgcttgctaggccctcaacgtttccacctctttatccctccattctacgaacagacgcgtttgctcctcaaatgcaaggttcactgtagcacagagctcttgctgaccatgatgcagagtattagtatggccttgcatgagtccaagagcattatagaggttgtgaatctcggtgtcatctccaacggtagttcggacatttgctgctggcgaaactccagtattgggagtacccaaattggctgttgaactggtatttctagtctcttgcacaccgggtgcgattccattcaaaggagacgtcacaccatgacccacgtttggtgattggttgttcaggattcatggctggtggaacccacgcatttcctggattttacagtgcgggatccactgccggtggatttgtcaaatcgaccatgcctctgcaagtttgtaccaccattgtgtttatgattaaatttgaggtaaagagtgaatataatcagatttagttattaatatagatcagaaataacatttaatgtt

SEQ ID NO: 333651 - DNA, 853 bp, Cannabis indica
ccgcagtaatctgaaaaaggagacaagagtgagatcaaatgccttagacaaaatatcgagggaagaaataaaccacaagtacttaccgcagccatggcgttgctgatgtcttgaacctggtagacggagttcaaggaggcacaagcggcataccgtttaggcaggaactgagtcaaatggaagacaaactcgctggtcatctccaaggcaaaaggagccaaggtgggcccaaagaaacgattgaaccagtccgtcagcgggtccatgttcaggtcccacggattctggaaggcctcctcgttgagggtattttgctgctcctcccgtaagattatcttcaaggcctccacctcagcatgcccccggctgtactcatcaagggcgtagttgtattttgctatctgaagattctccctctcctcgtctccagggaccggagtcaacattatgccatgaggcactgtctattcctccgcctcggaaggaatccgtgagtcatggctcggggccggagtgtccatccttcggggccgctttgaaggctcctcctccaccatcttgcccttgcgcttgcgctcgagggcggccgactgctcttcttcacctttttcgacttcctcaagagcctcctcctcgtccaccaggacaatattgcccaaaggggcattggaggaggacatcccgggagtgaccaactgagaagcaacatgaggcggggaagtatccggactgtggactccaacaagagtggccaagagttcatccatgtgttgggttttgtgccctaaataaaacccattttagtataatcagatttacttattaataaagatcagaaataacattttatgtt

SEQ ID NO: 333652 - DNA, 1586 bp, Cannabis indica
ccttcaacttagcctcccgcaaaagttgaatcagctcatcctccgaatgagctcgttcaggccgagcagcagcagacttcctcttcttccccgtcacggacttagaagaaaagtcctcagggtagagcccgtactgcaccagatttgcatcagaggtcaactggataatatccctgtcttccgccggcaaccgggcaagcttctgagccctatccctaagggtaagagtgaggggaggacggtgatatgtcggaatctgctgaaaccgagtccgggtgatgttcggatccttcaccatgaagtactcatcaacaaaatgccctattttgctgatggccttgttgtccgtcccgctcaaccacttgaagcctggctgagagaagtaaaaatactccgacctgccttgcttgggagtagacttcaagtcgaagaaccaaacaacatcatggggagagggaacaccccattcctgggaagcatagaggacgaagagggcagacaaatacttaatgcccttgggagtgatctgggccgggtacaggccgaagaagtctgccacatcccggaagtacttgtgcaagggcatcagcgccccttgctggccgtgagcccccgaccaggcgcacatcccctcactagggtttgaagcgcgattgtcgtgggcgggaatgaagcagtccagctcgcccaggtatccgtcctggtcgagagtgcggaggcgtgcctccgaaatcttggacggaggactcacccatctggcgcccaaggcaccctgcctcctatgaggaaccgcctcagcaagctcctcggtgacgtagtcgacgcctgcaaccaggacgtccccgtcagcatcaactggttgcccagcctcattgtactccccatagttagggggttcaatctcctcctctccctcagcagcgggagggctgcccggacgtgcctcgtccagctcctcaacctcctggacttcagcgtccccctcacggtcctcctccattgggaccgccaaatcctgttcggcgtcgggcagggtggcaagccgagccacctggggatcagaagcgtcagccagacgcgtagttttcttcgtacgagccatcattctatggctgggtacggaatcagaagaaggattagcacgaagacgagggtggacttcgtgcagaagttgaagcagttcctggtcgatttgatgctcgggctcccaagactcaccagggttcatctacaaaagacaacacgcaagatgagtgttggacggagtatcaagcaaaaaaacaagcaaatatgccgaccaggagtacccaacagattaaagaacagccatgttcgaagaaaagtctaaactcaagaagtcagaaagtttttcttgagttagggcaaaaaagttcatgaagcttaaagaaagcagaatgaaaaacagacgcaatgcagttctaaagtaagcctcacggctgaaagctaacgcaaggacatggaaaagaagagtcgcagaagtttcaaaccctagggtttcctacagtgttctttctacagcaaagatacattcaaaagcacaagcatgcaaaaggaaaacataaagg

SEQ ID NO: 333653 - DNA, 870 bp, Cannabis indica
ttgaattttctgcatctaacaatgaagacgagtatgaggctttgatcgtaggattaaaactcgctcttgagatgaagatcgagtatttacaagccttcagcgactcccagatcgttgtatgccaagtgaacggagagtatttggccagaggcggacgtctggctaaatatctcgccctaacttgcgagttgctacataaactcaaaaaagtgattgtttctcgagtaccccatgctcataactctcatgcagacgctttggcccatttggcctcaacaagagaagctgagttactcgatgtaattcctgttgatgtgttagctcacccaaccgtaagtcgaaccgaagtaatggaggtaaatactgccagagaagtcacatggatgactccaataatggattatttggaaaaagaaatcctacccgaagataagatagaagctagaaaactgcggtatcgagctgctcgatatgtcatttatgatggcaggctttaccgcagaagcttcagccaactgttgctcgaatgtattgatggaaccgagtgcgattacatactccgcgaagttcatggttgcatctgcggcaatcacgtcgggggtaattcccttactttaaaaataatgcggcaagggtattattggccgacactgcgagtagatgcctcaaactttgctaaaaatgtgacaaatgtcagcgaatagccacgtataccgaccgacctccaagccaattaaactccataacaagtccttggcccttcgcagtctggggcattgatttaattggagaattacccaaagggaagggcggggtcaaatacgccgtagtcgcagtcgattattttaccaagtgggctgaggcaaaagc

SEQ ID NO: 333654 - DNA, 1094 bp, Cannabis indica
gattcaagatttgtttgtgttcaatccaagctaggttagctcttactcttcctctcattaaatttcttgaaaattaagaaaagatgatagttgcatgtttagtttttgaggtgttgttgctgctgtagttatatgttgttttctgtgattttatatgcttgaattgattggatttgagtaaaatagagctgattgtgatgcatgttagttgtgttgttcaaagttttgaattttggctcaaaaactatgattttcaaggtaatttgatgaatttcgtagctgtagttgttgtaactgtttggggttgttttctgcagttttattatgcatgattatgtagtttaaaccaggtttggttgcttgtaggtgagctttagccaagtttgagttttgaactcaaagcttggagctcacatggtgatttttgattttgtgcatgaagcttggttttcttgctttggaaatgttgattagggtctatttagcaggtctggaagttttggtgtgaattgggtttgatttgagtgagttatgatttttgattgtttcctgcctagaaccggaatttcggttgtagaaccgatctgccggttggaggatttttgggaaccctagtttttcccatttttatgttgtttacggtattggcatgctttttatcgatagggaaacttttagtttctagtttaagtccccgggaagtgatttagtgtatcacttatctagtgttgggattgttatggtttaggagcctgtaaatcgtcatgcagttcgttacacttaggttgaccggcacacctcaattcagaatcgaggtaagattagttaacagtatgcatatgtattacatgtttagcgtgcatgttatgaagcctgttagattacattagatatgtatgttggcttcgtaccatccgaccgtatcacatcggttaggctagagtatgactagtaactggagtatgaccagtgtaccgagtataagctgatactagggttggtggtattgtactgtttgactgtatcacatcggcgaggttagagtatgactagctgctaaagtatgaccagtgtaccgagtataggctgttact

SEQ ID NO: 333655 - DNA, 542 bp, Cannabis indica
tttaaatttacggtttaggttgctgcaattgtttctatgtggattttgattgcaatttagtttggtctgttagttgttatgtgggtttgttatgtagtttttcataaaaatagtaaaaaaaaaaaaaaattgttttgaagtgtaaaaatgaaagaaaaaataaactccattattttatataattgtttactttatagttagactagtttggttcctgaaaattttgaataattacggtaataagattcaaacattcagctacacgcatgtctgttttattttccatgcgtgcaacacactattttaagctttattttttgatgcagaaagtcatccattctaattataaccgaccgatccaatagaattggatatccaatcataattgaattgggatcggatgtatattttgaaaatccaatcggatcggatcggttgttggaacatccgattcaatggataactggccaaaccgatcaaattatcatccaatggtcatctaattatatttatatatttttaaaatacatttataattttat

SEQ ID NO: 333656 - DNA, 597 bp, Cannabis indica
gattagcaacccaagctgggtagaaagcttcaattatgaaataattgttgcgtagcttctctacctcttccttcaaggctagtgctctttctttgtccaatagcctttgtttttgttggactggtcagaagtttggatcaatatttaggacgtgcgaaattacagaaggatcaattccgaccatatcctcacgtgacaaggcaaaaacgtccagatttgctctcagaaattttatcaatgctgattttacttcgagcaataaaccttttccaaattttagctatctagccagaatatcaggatcgatctcgatctcttctagttcttccacaagtccaacattgctgattgcatccccaagtcgaggatccacatcttcatccctaccttgggaagctccctacttcaaaatcttttttcccttatccgtgctctggctggacgatacttccttcttagccttggccacatcaaggttataacatttctgagcaatctgctggtttcctcttagacaccctaccccattcattgttggaaacttcaggcatgaatggaatatttacgtaacaatctttaagtcatataaggctggtc

SEQ ID NO: 333657 - DNA, 465 bp, Cannabis indica
taacatagaaaaaaactagcataaatttagtatacgtgcctcgcacgtagttttttgctagtatatatattatatatgaatgtatgtatattgacataattagtttctaattttcatatgctatcgaatatagtccaataatcaaactgaatgccctttttaattactttctaatctttaatatttatttacgatagtcaaatataatcaaactaattgacaatttttagagtttagaattttatcataaagaataataatccaatattcaaagtgattcacattcaataaaaaagaccaaagtcgcgcttcaatatcaaaacctaaattaattaaccatgcaagaaaaaaaaatacaactaaaaaaatgtcgaatggaaatcgatctctgttttgttatcaagtaataatatacttaaaaaaactgctacatttagtgataatttttagtcataacatactttt

SEQ ID NO: 333658 - DNA, 581 bp, Cannabis indica
tcgggtcataattaccaaaatgcccctagctcaccaacgaggtctttaacaatttaaaattcatataatttcacatatactgaactatataataatataattcctcaattattcataattattcaattagggttttgttaatctatttcttaatttcgggtattacaaactaggtactggccagatttttggtccaagatcatgtaccggctagggtctcggttagagaccattaactggccagggtttcgttaaagactatgtactggccagggtcacaaacataccctgtgtattggccaaaatctcaaacaaatcaaaatcctgcttttctaaaatttttgaatcatgttcttcgtgttcttcgagactcaaagagtcgagaatcaaaaaggagtttaaaactcgatcctttttataaaaaattcatacattatacatcctaaaactattaagcagagtataatgtaaaaaagactattctaaaacatgagaatcaaaaatttcaaaaagtttgaaaaaagcttaaagtcatcaatggaaaattcaaagaaaaataaaaaagtgagatttaaagagtt

SEQ ID NO: 333659 - DNA, 1465 bp, Cannabis indica
aaattgcaaaaatttgaaatttgaggaaaaattccacaaaaattgaaaattgggtgttggctcgcagcaaggctgcacgtgcagccatcataggctgcaattggcctcacatgcgcgcgtaatgaaggagctgcagcctccttgaccgagaaacctcggtcaggtgcgtcttccgtgtgtgggcagatcataactgaagcaagggacgagacaagacttcaaacaagaattttgtctgagatgcgcgcgcgtaggcgtgccttgtccgagtgccttgtgcactcgatgcacctactcgacaccatatgcattcgaattttgaaaacaccataactttttcaatttttatcaaaatcgagttctgtaaaaaactaaattgcttaatttttctgaaggaatccaaataaaatattttcagaacataaataaaattattttcatggaaaaacttcgtaattcacatacattcatcaattaacacataaaccaacatgaacacatccaaatagacacacaaaccatattcatcatttaaatccatatttcatgaaagtaaatcattaccatggctctaaggccagttgttgggaatattttactaggatctagatttactaacaagtatgttgattaacatcctaaatatgaatatctctaaaacaatgaaataaacaaataagggtttaagaaaatcttacattgattgtagcagaataataatgactccttccgttcgagatctctagcccttgattcctttctgtagcagagcattatcaagatctgaacctagatctctttctctccttcgggtttggttaccaccgtcttattcactatgattgagtacttgacttgctatgtgtgggcatggcactcatcactaagggttcgaatgtggaagaataatgaaggaggtgagaaaacactacggaaggaactacttcatctaggtttggttgaattgtcatggtgacattaatttgacaaggtgtcaagtggatgagatgagagcatcatgttccttttatagtgttttaagtagggcttagggctgaattatatggattaaaaaagaatactatattgggcaaaaaatacttcttggccgtgcaattaaagtggacaaatttctagttataattttgccacgttattttaaccacttattcttcttttcaataatactatattttcatattcatccttataaatgtcaaaaatatttatttaataattataattaattactaaataaaattgtcatttatgtaatttattaattagaccatacaaagtctcttaattaaaaaaaattgaccccaaaacctcttttcttcacaattaagcccttgcttaatgaaaattcttaaataacacatagtctaattttagaattaatataattgattaattaaaatcaattaactgagtctgtaagcagtattatctcaactagtgaggg

SEQ ID NO: 333660 - DNA, 633 bp, Cannabis indica
ggtctaggtctgatttggagtccggctccttgtttggttacggttctggatctatgtccaatttcagttatgattccaagtccaagtcctagttccaatcccgctcaacttcctgttttggttccaattttcggtcacatggtacgacttcgggtccactttttttgtttgggactgggttcatgtccgggtgtgggttcgggtccttgtcaggctttagatccaggcctaggtcccaaatcaagacaccgactacgggttttgtccaagccctctgtccaaatccggatgccaatctcgggtcccagtcttgttccatttctggtgcagggacacgagccgcgtcctaggttcaagttcgggcgtgggtcggctactaggtcctagtcctagttctgtttcccaggtccctatcctgattttgggtccaggtcccgcttattgtgtgggttttggtccaggttctaggtctgtgtccgggtcatggtcacagtcctagactcgttctagggtcctggttcgataattcttcttcaggttctaattttgggtcccaagtctaggtctgggttcgggtttgcttcttcgtctgggtcttggtcctagtttgagtcccaaatcaagacaccgact

SEQ ID NO: 333661 - DNA, 1005 bp, Cannabis indica
agagagagagagaatttcctttttcttcaaaatttgaaatttttaataaaatggtgaaataaaacatagttttatatattaaaattagtttattaatcagaattaaatctcaattaaagtcgctaaaggacaaaaagttatttaggcaaaatgaccaatttgccctcctccaagccaaaaagtccaaaaatcacttaggattattttagtcaattctaaaatcttgactatttttgacattcccaatgtctatattgccccggtataataaaaatactaagatgtgattctaatggccaaacaccacgttccgacgttgctgggcacaaaacatgcaaaaatatgtaattccataaatgacatataaaatgcattttgaattcaaataaatctttgtaaaatgaaaactcataactaacatgcaaatttcataaataaaccctaattatcagctaatttccaaattaaggttaagcggtctttacaattattcccccttaaaatggttttattcccgaaatctaacctgaacaactctggatattcagccctcatgtcggattttaactcccaggtggcttcctccaccttgttgtttctccagagtaccttgaccaaagctatggtgttgttccaaaggaccttatcctttctgtctaggatctgaactggttgttcttcatatgacaagtctggttgcagtccaagattttcataactcagcacatgagtagggactgaaatgtactttcgtaacatggaaacatggaatacgttgtgaattgctgaaagagatggaggtaaagctaaacaatatgccacttgtccaaccttctcaagaatctcgaaaggtcctataaatctagtgcataatttgcctcttttcttgaaactcttgatccccttcattggagacacccgtagaaacacatgatctcctacttgaaactccacatttttacatttcggatctacataactctttttcctactttgagaggcaag

SEQ ID NO: 333662 - DNA, 2175 bp, Cannabis indica
acaagttcaaacaacaaaataattatttataaactccaatccacttaacatgcatccaagaacactcaatacccaaagacatgctttactaatcatcaatttcagaaaccaaactcagaattaaactcaatagtaccaaagtttgaagcttaccatcacccacaagcttccatcatcaacaattaactccaatcaaagcaagatttcaagattaaagcaaaaattgaaaatgatgaactattacgagcaaaggggttcagctagggctaaacaaaccagaaaatgattttctcattttgtcaaaattccatttttgatgataattaactaatgaatcaaaagaccaaaatgcccttatggcctatatatgacatatacataaatcaagggcaaaaatttcattttcatcacatacatactcaaataaatttcaagtgattctctcaaccataaaatgctaatataaaatcctgaaaatgtatttcggccccgaacctagtaaggcccgaaatacccgattgtgactataacgcgccgacttgtcagaaaacacctgaaaaaggacacagaaagtataatatataataatatagtccataagcacccaattaaatttaatttatagttttacccctctcgggtcaaaattacaaaaataccctttgctcaccaatgggatcttatcatgtcatttccctatttaattcacatataataaattatataataatataattccataataaatacacatttaactagttaggatttggtaatacagttcttaatctatgggtatcacagtaatgaatatttattctactcatctccacatgttttatataaatatatataatgtactgtaataaatgtttgaggctggtgaagtcttatttggtgggtgaagactatgttactgaggaatacactgaggctgttcctaagagaagacaaggtgccgtaggagcttagtgggtttctcctccatctatagtaacccaagtcaagatgaagaattttgagaaggacgactacttggggaatgtcgaatgcttctttcactctccaaatcaatgggaaactagttcaaggcaggggtactaggcctagttggccgctcataccaagcagggtctaatgttgcctttgcttccgtacttcaaaaagattgcagactactaccacctttgcccgacccagtttactccgaacaacatcaaatatctatcttccctgtttatcttttacaccccgcaaggatgaggcgagccatcttctcacaacaccaactagctttttgacctaaagtcaactcccaagcagagcatgccacggtatttctaattctctcaaatggatgagaaatggctaacgggcactgtggacaccgatgttagcaaaataggacattttgtggacgagtactacttttttcagggcatggataccgtccacactcggttctaacagatgctgctcggaacatcaccctgctggccactgaggccaactatgttaagcacaaactcttcccaaaggactttgtgccaaggcctatgaagaagaagaagaaaaaggcaaagccacgcgaggctggtgtgaccgagcaggagaaggagctcattcaactcaagtgtgaggctaagttgaagggaaacaacagtgccaagcagtatgctcaagaatattcaaagcaggagaggccaagcaagaagtagaagaaggctctcccaaacgaccaagtattggtagaacatgttatcaggattagggaacctaatatgcctgctcggccatccgccccggtggagggtaaaggaaaagccgtcctggtggagcaggaggaagactcttaagacgatgatgccccgtatgtgcttatttgggaaaatgctcctgcccgcgtgcagggtatttttatgtacttctttcatgatatccttttcatcatatttgcttctaactgtgtcattttgtttgtgcaaaaatgtctaagaaggtgcttcaagcattgaaaaagagggtggggtatagctcgagccagactcttccgcccaaaagatctaaacgcggtgagacttcgtccaaagagaaggggccagtcaaagagtgttgggtttatgccctaaataaaactctatttcaatgtaatctctatcaattaaatatcaataa

SEQ ID NO: 333663 - DNA, 1264 bp, Cannabis indica
tggagttaatgcccctccacaattgaaggatgcattcacttcagtatccaatcatggtaaatctgtttattttgatcatagtgtgccaactgactttatgcgtgatgttagggatgctgatattaacatagtcaatggaggtaatggagaaaatggtccatcaattgtgattaatgagaatgattccctttgtgtttgatgatgaacttaccatatcggctcttaaaaggaaacgtgtggagaagggtcccattatgggttcacatatggaaaatgtggctgatatggaacaagctaatgagttaaatattggtattcttgcaaatactgaggagttgtcaaaaaacgattttatggtgggctctggtgacaggcccaccgctcattatgaatactcttagctggaattaccgtgggcttgggaacccacgggctattcaattccttacagacatttgtgtccaaaagaaacccaattttcttttcctatgtgagactatgtgcaaaaaaagatgtaatggaccgtataaaaaataaattgggctttgatagttgttttattgttgaagcccaagggagaaaaggtggtcttgctcttctttagaaaaatactgatgatgcccatcttctttgatattcggacaaccacattgacattgaaattcattctcctggttctgcacgatggagactcactggtttctatggggaaccaaattgatccctccgtgaccagtctattgctcctcactcgcctcaaccttagtgtattataggcgactttaataacattgcttctcaagatgaaaaaagaggcggatgaccctatccctcttatctgtttaatggcttacaagaggttattcgtcattgttgtctctttgatttgaagctccacggctatgccttcacctgggaatgtgggagaggaagcagtcaacatgttgaaatcaggttagataaagtccttgttactcaacattggcttgatattaagctatattatcaaattgtgatttttcttctagtgatcatactcctatttttctgcaacctgatgtgagtaatcgtggtagtcatctccaattttttcgttatgaaaatgcttggtctcgcgagccgtattgcaagcaacttgtgaaaaattgttgggaagtctatggcaatcttactctggctgataaaataaaacattgcagtaaaagtttgagagaatgggggtttgaacttcctgggaacttcaagaataggctgaaaaaaaaaa

SEQ ID NO: 333664 - DNA, 759 bp, Cannabis indica
tatacaatcataaaaaaaaagttccaaaaattggtacctgagtgtctgtttcctgagtgtctggtacctgagtgtctggtacctgagtatctgcctcagcctctgtgtcatccacaccatcatcaaccaggttttccacaccatcgtaagagatggtcctcacaaatgcctcctcttctgtccgtggaagtagccccttcaccacttcaagattctgtttatggtccaaaaaatatcagagtaaaaccatttagcatttattacaagcatttatgttaaataattactctgaacataagtgaaactcatacccgtctagaaaataatgcactgacttctttcttcccaatatcgcccttgctcgtccagctaagcatcctggggaaccgaatcccgtgattcgtgccatacctcttcccaacctccaaaatggcctcgtacgcccaatattgtactgcaggtgcgaagccatatgctgtgtatttgcactcgtgctgaacatccgaactcagcttcttctcgtagttggccttctgtttcaacatgtctttttgaagcgagtgcatgagtctggcgaatgagtgcttcccccaaggaatccggaagaagaactcgaggtcttccacatatctaagtatgtgaggcgtaatcagcgcgtttgcctcgcggcccagaagcactgactccacaaacaagcacaagccgagcttgtacaagtcttccgggttctggcagtttgtgaaccgaacttggagtgct

SEQ ID NO: 333665 - DNA, 1012 bp, Cannabis indica
tttttttttctaaatttacggttagtgtttctaaagtggtagcgctataggggtttctatctgatttgttgttgcaatttaagctgcagcgctagttgcaataggggtttctatatagaatttcataaaaatgattgttttgaagtgtaaaaacgaaaaagccccaagattaattgcccgtcggaaaaaattgagtacacaatttgtttactcttagaatttagaatttgggataaagtaaatgtatggaattcatctcaatatcaatttgtaatgggatgagtagcccattcagcgtaccatgttagaatttggaataagaggtttcctctcaaaatcaattaacaatgaaaagagtagtccattcatgtaacagaacttactctaacatttactcaactaaaaatggctaattaggatttttgtctcctgaattttgacatgacatgtaccaatcatgcccctgaatttttaaggtcgtgaaaaatgccccatgaactattgagtaggggtgttcgcggtgcgggtggtgcggtttttgactattttttcaaaccaacccgcacatgcggttttttcaatttcccaaaccgcacctgcagcgcgaaacttaaaaactgcaaaaaccacaccgcaaaaaatggtgcagtgcggtttatgcggtttggactatcactaaataattaaaatatcacaaatacaacaaaatttgagcaacacttgtcaaaaatacaataaggcttgaaaataaatatgaaaaaaaagtttcaaatttacacaatacaataattagtaggcttaggttgggccttcacatattagacataaataaatataaaaattggtatgtttatattatgcggtgcggtgcggtttgaaccgcatattaacaattcaaaactgcaaaccgcaccgcgcggtttaggaaaaattcaaagcgtgaccgcaccggaaagaatttcaaaccgcatttttttttttttgcggtgtagtgcagtgcgggcggtttgag

SEQ ID NO: 333666 - DNA, 572 bp, Cannabis indica
ctgagtcaaaagttatgaccaaaaccaaaacccggaaaaaaatacaataagctgccaaaaatggccgcgacggctgggtttaaaaacccaggaaacccagattctaaccacaaaaatgcatccaaaaacaccaatttttatgctaaaccagcccacaatcatagaaaactttcacctagcataaatcaaatatatagagatgaattatacctaattcactctccaacaacaccaaaaactagccacaaatttctaccccaaaattcaaccaattcagcacaaacccaaacacaatcattcaccaaatgagtacctaaataggcattaacatatataattttcatgcttaaataccaacaaaacacatcaaaatttcagattaaacaatataaaattcaaagctccaacttgagcaaaatcaccaagaactcataaagaagctacacaaggaaatcaccaaaatgaatcaaaattcagcatgtttttctaacccaaattcagcaactagaaatccccaaatttaccattcaaagcatacacaaaacaaaccctataattcacaacacaaccat

SEQ ID NO: 333667 - DNA, 835 bp, Cannabis indica
gctcatcgtctaaccgcagagcatgctttgccaagccatgggccgctaaattctcagagcgggccacatgggacaaaactgcccccggaaccaatttccttttttttattatgggaaactataccattttattgttttacaaaaaatattaattgaactttctattttgttaaataacaaaataaattctatatttttcaaaataataaatataaactctgaactcaatttataacaattttattttttaatataactaactttaagataatttttaacacaaacacatatagaaaatgtaaacagatttatcataacacatttagtttggattattattaaattttatttcgacaaaaattagttcaggatcctatttatactattttagaaaatacagtgttcattttgtcatttaacaaaacagagagtccaattagtaactttgcaaaacacaaagtccaattgataatttttgcaaccataatatttaccctagtagttattacaaccattctattcaaataatttacatttaaacctaaaaataagataaaaaatcagttgtactatagacaaaagtgaaccatattttcctctaaatatttatattgaaactcaaataaagttcaaaacttcaaatgcatattaatatataatgaaattctgaaagtccaaaacaaaatgctaggtagtagagagtacatataattaaggataaagattaatattattgagagcaattgacctcagtgcctgtgatctctcatgctgatgatatcccatcaaaaccatatgatagtaagtccaatcgatcaccctaaactcttcttct

SEQ ID NO: 333668 - DNA, 518 bp, Cannabis indica
accggtgccaacctcacctcaatcacaatatgaaaatgtgtttgaaaatacaagcaaaatcactctagaaatatgataatacaatagaaacctagagtgaaaagcaaacacactcaagatgaataaacacaaatttgggctcaaagtgtgtgaaaagtttgttggattttaaacttggaagctcataatctcacttagataggtcagttatttgacataaatgctcagccaacttaatttttgagtgaaaaatcgagtttatatagtgtttaagagaaaagtacccgtttatagccgttagcacgcttcccgagacaaagtcagccgtgcaccggaattctggattgatgaacagaggcaaaaaaatgccattttttgggactaaaatgcgcataacttcttactcgattatccgatttcagaaattctaactttgttctcttagttaaatgaaatgtgatttagaaatccaataaaaaaaaattgaactatcgtgtaagaaaacttgttgcacaagt

SEQ ID NO: 333669 - DNA, 1487 bp, Cannabis indica
atgtaattattcttatatagaggtatactttgttaatacaggacttagaaaatgtataactaattacaatttagatgttattcttatttataactggcccaaatcgggacttgatttttttataacaaattagaggttattcttgaatagagtattcttaaatagaggttctactgtattagttattttgagcttttaaggcttattctattattttgtatatttttatgtttgatgaccagttttttgcattattttttatggtttccgtattttttatagtttttgtgcaattttttatggcttgcccctaattgtttaaagtagatttgtgatgtggtcaatggatacgataaatattttattttgtactcatgccttctacaaacaagttttcagatttgagagataagtgtttcaagtcttgacatgataatatggattgttttaccatctttatttgcattagctattttttttttattaaattgtgttgtaatagagttttatgtattattaatctgtaagtcaattttaagaaataccaactgttacagagattttttactgataaatttattttaaatattatttgtttgagagttattatcttctaactattgagaatttcttttattaggttttaatatcatcacaggggattaattaattttttatcttattttgttttgtagatattttggggaccattcttgatatgttaatgagttgacttgtagtatttactaatacaagttaaagctctagctctttgggtgtcttttttgaggaagttataactttattgtcaaaattttcgggggtaattttattttatgttgctcgctggctttagcagttcatggtttgacaaagcaccctctagttagacgatgagctatccatgttcaaggaagttcctgtgctgtttgcggatgtctgtatcgtaaattcgtgagtaattttaatcactacataaaaaaaatagataattatataaaggaaaacttacaaaaatactggaatttgggttaatttttacaaaaatactgtcacacgaaaatcttttcaaaaatactgtgtttttataaaacaccagtaaaatacaaagcagaacaactcaaaacaacagtagaacaccagtgaaaacttaacacagtatactgcagtatgaaacttataaaaaaacacagtaaaaaagtaaaaaataccggctggcagtatttttgtaacaaaatagcaaaagttagtataccatgtaaatttcctttatataaaacattaatttttgtaaaaattttatatttttacgttcaaaattttttttttaatattttacgaacaataagaatgctacataaaaattacaaggaaataacattcaaacaatatcaaaataacaacaaaaattaacatacaaataacaaaaatatcaacaataaattaacaagattacaacataaaaatacatcaaaatattgtatttt

SEQ ID NO: 333670 - DNA, 538 bp, Cannabis indica
tttattaaaattatttttaaaaattgatatttagaattagttaaattttaaatattattattatgtatattcatttatttaaataagatctacctcagcttaattattattatgtagatgctgttggtatagttgtacctacaaaattttgacttaaaatatataatagttgactacaactgtatatctgtatacctacattgaatattattaatttttaaattatgatattaaaaaaaactaaaaactaaaataaaattaacatacgagacttggaacgtaacatctatctagtatatatatatgggtccggttttaatggaaactgaaatatatacccactgatgaaaccctcatttttaaccattagatcttaatctaatggttgataattactgactaggctaagttcacctttttacttttcaaacgtttggaagggcaacctgatggtgacctgctgacatggacctatatttaaaatttatttaataaattaaaaattaagctaataaagattcattcctagattcttttt

SEQ ID NO: 333671 - DNA, 1282 bp, Cannabis indica
aaaagactcattgaggacgagggtcgatatccgttgatagaaaaactcgcctactgcctcattctagaaataaggaagttgaagccttatttctaagctcatcctgttcgggtatataccgaccagctactacgaaaaatactgcaaaagccagatgcttctggacggttacttaagtgggcagtagaggggtcctcgagaagagaccttctggaggggtcattgacctttccgaggagctgattgctggaaacccttctaccccaaaatctgccaagtctaaggagtctggaccaccaacggttgggtctgaacttgtcaggagtactcctgagcgggtgcaggcaccaattccgcctttgcccgtgctgccagaggccaaaaagggcaaggagatgctggcttactatatgaaccggctggttcccgaggtcagtgagcagctgcctggtgctaataatgactcatctttggatgtgttggtgggcggagtcctgaaggagctcaccagggtaagtcttttttgatacttccctttaactttccacacttagctccatatgctcgattttttcctttgtgcatgccggttttaagtgggattacacttactcccaggctaaatctgtaacttccaagaatgcagctctgtccgacaccttgaaggcggaggcggacttggccaaaaaggaagctgaggaggcgagggcagaagttggagctattcggctggagttgggcgaagcccacaagaagctgtttgctgccgagcagaatatctctgtgctaacaaaggacctcaaagctgctgatggctttgaggagaccatcaagatcttatctgctgaagttaacagtcttcaggatgagaggacttctctgcggcgatcttcagatgaaggaggagaagaacgccaaggtggccgaggtggaaaggttcaaggagaaaggtcaatgccttggagacagctggcctcaagctattctttgatttctagaaggctaatccccgggccaattttgactacttgggtgaggcaaaggacatgtaccttgagtactgcgcagcccaagttgcttatggtgggaacgaggcggctgcttcaacctctggccaagctgcttcaacctctggccaggctgctgatgcttctcctgttcgaacaacagatcctcctactccagttggcccagaagaaccgaacaaacagcctgggactccatctatttaaacaattctcttattatctcctttatatatatatatatatcttattcggcc

SEQ ID NO: 333672 - DNA, 1510 bp, Cannabis indica
attataatggcaatgcttaaactgggaaattggtcatgacaacttccgtcaacatggagtttccatgtcagctcttcaggatttgactggttctcttactctcgcttcttctctggctcttggttttctcttgaatcttgagagatttcaagagatgagtttgtgaactcagccacgaactctgcaagggctggaccctttatggttgttctcaattggtatgtgatctcactacccaagctcgatggcccattagagtagtcgcctaatgctttaggtttctacaaaacctactgcaatggttgatcagtgtacaccttcatggggtgtgtctggaagtaaggccttagctttttggaagccaagagaaaattgtaattcagcttctccatgagtgggtacaaagttttggtgtcgattagccttttgttgatgtagtatacatggtgttgtatactgtcttcttctcttgtgaggatagcactcacaacatgttttctgattgctaggtacacacctagctcttcatagtctaggggtttggacaacataggtgcttgagacaattgtttcttcagctcttggaatgcattttcacattcctctatccactcaaattttcagttgccttttaaaactgttgaagaagggtacacacttgtctgtagagttgggcacaaatctacttaatgcaacaatgcgtcctgttaggctttgtacttccttgatagttatgggtgacttcatgtccaaaagggcttggatcttttctgggtttgcttctattccactagcgttaactatgaagccaaagaattttcaagagcctacactaaaagagaatttgagggggttgagcttcatgttgtagttatgaaggattttgaagcattcgtctaagtcctccacatgctcctagccttttttggacttaactagcatgccgtcaatatacatcccatgttcgagctgatgagatctttaaacataatgttcaccagcctttgatacgtggcctttacatttttcagcccaaagggcgtgactttatagcagtacaggctgagatctatcatgaagctagtgtactcctgatctggtggatgcatcttcatttgatgtaacctgaatacgcgtccatactctccacaagttggtcaactttgggaagcgaaaagcagtcctttggacttgctttgttcaggttggtgaagtcgttgcatactctccacttattgttggtttcgggcaccactactgggttggatacccatagttgataaaatgcctctattatgaagtcacgggttcgtagcctctcatcctcgtctttgagcggttaggcggactccttatccagcaacctcctcttttgttggacaagtcacattcttggatcaatgttaggtgcatgggtcattatagaggggtcaattctgaccatatttccatgtgaccatgcaaaaaggtccagattttcccttagaaatcttatcagtattgatttaat

SEQ ID NO: 333673 - DNA, 1236 bp, Cannabis indica
tagctcggtctaatgaatcccagattcaataactcttgcaattgtatctttaattctttcaattccgttggagccattcgatacggtgctcttgatactgggtccactcccggaatgaattcaataacaaattcaatctcccgtgtaggaggcaatcccggtaaatcttcaggaaagacgtcaaggaactcgcacaccaatcttgtactcccaggtccagatgtcacaggtaggctggtatccgttgctgtgactatgaaaccctgacaacctctgctcatcaggtccttagctttcaaaagtgatatccttggtatgcgtgccccctgaactttacccacgaacaccgttaggttagcactatcgggctcaaacaccaccatcttttgcttgcagtcgatcgttgccccatacttagataaaaaagaatccattcccaggattatatcaaaatcagacagttgcaattgtattagattggcagttaattcacaaccatcaatccagaaagacaaggaccaaatccacttaatggatactataaggtctcccgaaggtagtagggtaccgaaccccgaagcataaatatcacatggtttatgaaaactttcaattactctactcagcacataggaatgagtagctcccaagccaaacaatacagtataagaacaaccatttatagacaacgaacctgtcaccactgacggactagaatcagcgtcagcctgagtcatggtaaaaattcgtcatgggttctgagcgatattcttcttaggttcctctttcttggcctgaggacaatctctgatgaagtggcccaccatgccacactggaaacaagtcttggcttgacattcaccctgatggtgcttcttgcatttaggacactcaggataagatctgaatgaagattcgcagccctgacggccacctctgtttccccaaaactttctattacccctgatgttctagaagcttcagccttccatttgtgatcagggttgcaactgtcggaccccttactgatattaccagtagcatcacgattcaatgctgcgatgacatcctttgcagtctgctctttgattacatgttgcttagcctcctcagcaattaaggctagctctaccactttcttgtacaaagtgtcatgtgaagtggtaatattcaagtaccgactgatcatggcattcagtcctctcacataatttctgtttcttggtgaaatctgtg

SEQ ID NO: 333674 - DNA, 1227 bp, Cannabis indica
tagctgcagaaggggggttacgccatcagactttaatacttatggcagttccaatacgccttctcccatgcgacattaaatgcgaggtgactgttcatataggatttgatacctcccggaggtgctttgttatagtcttgctctccgggagtatgtgaacccttcgtaccttctccgagaggcatgttaaaggttgatccttttgattaagaagacttagtcgaattatctcaaagtcttacttcttccatccacgtgtcacagttggattggtccacgtattttggacaaaataagggaaacatttaccccccaagtcttgtttggtggaaagtaaatgaggcttgcttaggtgcctccggttgtcttattaacttcctagcatgtactttgggcgcgtggggatgcatttatgaccatcattactatagttatttgatatttgcaagcaacgagtcgtttcctatccatttaattaatacggtgcattaaacgggtgtcagtcgagtactcaaacgtttcctaccaccttgatgaacgcttgtcccaaccgttggatctgtagaatgcgaatcaattgatattctgacctacgatgatggttgatcacagctgtctcacacccgttctggcctataaaagccagccttctcacttcatttggttactttcaccattttaccaaattttcttagagctcccatagagaggaaaaatttcagacaccattgattatctgcttcttttccttcgacgttgccagtcttccctttaacgacgatcaacaccaacctccagtcttcaaacttcatgtaagttctcagaacactttacactcgtttactgtttgcttgtattgcatgtttagagtttctgggttgaatgttgaacttctgggaaatgattttgcctgagtttgttgtgtaatgcatagaatctctcttttctgcaccttggttgtttctctttactgcgttttcttttgggaatcacatttttctgtcgtaataacgcctttagggtttagagtggttcgtgttttctcggctttgtcttcttttccccctttctttttctttttcaatgtcactgcctttgggatttttgcactcgatgcttgtcagggaacatcttttgggactttccctatttggcaagcatccggagggggcctctttccagcggttaggggacccccactccttttttaaacattagggtttggtt

SEQ ID NO: 333675 - DNA, 1652 bp, Cannabis indica
actgttataaagtcatgccattaggattaaaaaatgcagagcgacgtaccaacgattggtgaatggcatgttgagaccaggttggacaaaaatagtagaagtttacgtcaatgatatgctagtaaagtcaataaaaaagtaaagatcacataaaggatctcgcgaaatgctatgatatacttagaaagtataatatgaagcttaatctaaagaaattttggggtttcctcaggaaaatttcagggcttcagagtaaatgcgagaggaattgaagccaacccagaaaaaataaaggccttgatcaagatgccttcaccaacaaagccaaaagaagttcaagctttgatggggagaatggcagcactaaacagattcatctcgaagtcaacatataaatgccttccattttttaatgttttgcaaggcaataagaaatttgaatggacagaagaatgcgaggaaacttttaaaggcataaagaagcatttgtcaacaccctcagttttggccaaacaaataactggagaaactttatatctttagctagctatctcagagcatgccattagtgcagctttagtgcgagaagagggtaataaccaacaacgtatttactatgtcagtaagaggttactgggggtagaattgagatatccacctcttgaaaaacttgcattatgtctaattcatgtatatcacaaattacgaccatattttcaggcgcatccaattaaagtcttaacaaatcaaccactgagacaagttttatcaaaacctgatgctttaggaagattgataaagtgatcgattgagttggggcaatttgaagtaacctaccacccgagactgtcaatcaaagggtaggctttggctgactttctaattgaaggaacaaacccaaaagaagaccgagatgttgaacgcacagcagaaacattgaaattatatgttgatggggcttcaaatgagaatggcttgggggcatgagtcataatgatgtcccctgataacttcaaattccactgcacattgagattccattgatacctcaaacaacgaggcagaatatgaggccttgttggttggtttaagaataactaaagcactaaaggtaaaaaaatcttacatgctttaatgacttcacaaacattgtcaagtatctagtcaagggagaactttcttcagacaaaacggaggcacgcaaactcttgtactcaatacctcgctatacaatagttgagggtaaattatataggaggggttattccatgcctctcttacgatgtgtgttgcctacagaagcaaataaaataattagaaatatccatgaaggctactgtagggaccatacaggtaggcaaagtctatttaagaagatcattcgtcaaggatatcactggccaacaatcaacaaagacacacatgaatttgttaagaaatgcgacaaatgccaaaggttttcacatatacctcgtgtaccaccaacagagttgagattgataacctcgccatacccatttgcaatatgagggattgatctgattgggtcattgcccacaatgcaaggtggagaataatacgtagtggtggcagtcaacttcttcacaaaatggataaaggctgaacctctggtttccataacttgcaaaaaa

SEQ ID NO: 333676 - DNA, 501 bp, Cannabis indica
ttcttcagccttctctggttcaatggtttcccagaccatcagcacgggcaggtgggttgcgacattgtaacactgccttgcttccccctggtttcctctcaccatcccgattctggcttcctggctaggaaactttaagcacaggtgccgaatggatgtgagtgcgccaaaatccaccaaggccagtcggccgaggatcgcgttgtaagcggtcgggcagtccaccaccacaaaagtgcattacttgaatctgctcttgggggtgtccgaaaacaaggtgactggaagtctcacttttcccattgggataagcgtcgttccattaaaccctgtgagttggacaccactgggtgagaggtctcggtccgtcaagcctattgcaatgaaggcctccttgaagagtagattcacggaacttccgttgtcaatcaagactctggccaccactttattagcaatgggggcctcgatgaccaacggatctgttggaattattttacc

SEQ ID NO: 333677 - DNA, 515 bp, Cannabis indica
gtttataaatgtattttgataattttgtaaaaattaaaagtacgaaatcccggtctatgtaaataaatatatatataagttaataaaatttaaagtttatcaaagttttaatctagcacaatttttgaggtaaaaccctttggttagcaaaggctgtatgtaattagaaaattactgtagcgcgtctaagtatcaaggcgttacattatacttcaaactatttagtgccatgatttatcactgcactggatttacactgacgtgataatcaatgataaaatttacttccacaatgatttgtggaatgtcctttccagggttttggcaaagtatactagtatttgatgtattaactatacattggactggaccgatattgacagtgaaaaagatatcataaacttactgtcttttctaagtcaatgtcacataattgatcttagatcaaaagatcttaattctgagatgattaggctttggcttaactgtacgacatgtgttctttgacttgttcg

SEQ ID NO: 333678 - DNA, 677 bp, Cannabis indica
cagccctgtaatgctagttgttgtgtattttctggtttatcaatggaattcgacttactactactagagagattgtacatgcttctatggatattggtgttatagtgagatttttctcacttagaaactcgagaccagactcctgtttgcaagacacgtgtactcaattttcccaaggaaagctgagatgtcaatgagagactcctcgagtttaaacctcgcctgaactaaactcagcgagacgatgcggttatgccaagtctagccgcatttgtacgactcgcattatgcaggaccaaggaacagatttaactcgcatataccaagatatatgcgagtatcccctcgatcctcatgcgataacatagagatcgattctctacgatgcgagctggtctcgatgacccaacagcctcgataaaccgatatagactcgcatgtcttggttctatcagctcgttatacgatgtccgtaaatgcgaggttacaagaacgcatacatcttaggctcaactaagtgttaggtgtattctaagtccacgagcttacgaaagaatatgaacagccaactcgcacattagaagtcgcatacgttgttgtatttagtgaatagaaactgttctttatttattaatgtttacgttttttagcttaattattgtaaatcaatgtacaaa

SEQ ID NO: 333679 - DNA, 827 bp, Cannabis indica
aaaacaacgtacatcatccagtctattatatcaacaaaagacttgttgaagctgaaggacgatacccgttgatagaaaagcttacttactgcctaatcttagcaacaaggaagttaaggcccaacttccaggctcatcctgtttgggtatacactaaccaaccactacgccaagtattacaaaaacctaatgctgatggacggttactcaaatggacagtggaattgggtaaatatgagataatctttcaaccccgaacagtaattacaggacaagccttagcagactttgtacttgagtgcacaggcaaagaggaaaacatttcaaaggacaacacggagttagtacaagaatcccagccaaacaacaatgaagatagacctacctagaaattacatgtggacgggtcagctatagatcaactgtctagtgcagggattgtttttgtcacacttggggggaaacacgtgcacggggcaatcaaatttggatttaaagcttctaacaatgaagtaaagtatgaagccctcattgttggtttgaaacttgatcgagagctacgtgccgaacacatcgatatctgtaatgattcacagttgatagtaaatcatgtgtcaggagagtacgaggcctgagggagaaatgatagcctatttaagcaaaatacatgatctgctcgcaaaattcaagagctacgctttcaagcaattttaagagaagaaaacacaactgctgatgccttagcccgacttgcgagcagcgacatagctgataaggctaacttagtcccaatttaatccttgaagaacctaacatcacctgtgcag

SEQ ID NO: 333680 - DNA, 582 bp, Cannabis indica
taaggggagggatttccccctgtgaatcccactctcttttggtgttaatctatttcgaactgaggttccttttcaaaaaaaaaaaacacctttaaaactcttacaaagattaccaatttcatctaagacaagactcaaacaaaaaatgagagaaattttgttcaccacttttgtacaacattcaagtaatccactatgctccttaaactattgttactactaaatcatattttttgaatttttttacccgtaaataattctcctcgaactatatatattcacaatgttaaaaatatatatgactcttgatcattttatctcatgtgtctaacaaaatattgatgtgattaatagatcattgccacataagcatcacaggtataatttaaataaaaactaatttgaaaattaaaaaatctattctcttatcaataattaaaaaaaaaattaaaattagtttatttgtattattgttataattaataagaaaatatattattttaattttaaattatacatgtagtgctgatataataataactaggggcggagccacatgcaccccaacaggggctgtggccc

SEQ ID NO: 333681 - DNA, 800 bp, Cannabis indica
cttgaaaaagctaaattaagaccttgcatggtaaatctttgtggatttactgtcactagtcaaggaataatcgagctcccattaactttgggcgaagcaccattatccaccacaataatacaagatttttcggttgtcgaactgtcatcggcttacaatatatttatgggtcgaccaacattaatcggactaagggcagttagttcgattaagcacttatcccttaagtttcaaacaccagtgggtgtggagcagtgcgaggtgatcaaatgttggctcgcaaatgctatcacatagagctgtagcacaggaaagttggtcaccaggtaatggcagtcttgactgaagaaggcgagaagaaagatgaagatcttgatcctcagattcaagatgaaagaaattaattgaagccaatcgaagaattggaagaggttgttctgaacccaggaagtcccacaaagtttgtttacattgggaataacctcaatgaacaattgaaatagcagccaataagttttttaagggcaaaccaagatcagttcgcctggaaccatgaagatatgatagggattgaccctaatattatttttcatcacttaaatgtcgatccaaattacctaagaaagagacagaagaggaggcccttagatttcgagagacaaggggcactcaaacaggaagtggataagttgttggtcaacgacgttatgcgcgaggtgttttacccctcgtggatagccaatcctgttctcgtcccaaaacccaacggaacttggagaacttgtattgatttctctaat

SEQ ID NO: 333682 - DNA, 571 bp, Cannabis indica
tctgcaaccgccaaaccccacttaagctctccttcctcgtggacttctttaggggtgtgcataaatcatccaatccaatgacaactgacccattcaattacaaccgaccgccaaacattggatatccaattgtgatcgaattgaattggatgttatttttgaatatccaattgaatgttggatgaggtgactaaaaattcaatacatccaacatccaatcgaattaattagtattttcatttagtttggatgagtaattaaattttttattattacacataaaatatatacataaaaattaacattaaaaatttactcttctttcttggattggatgaatccaatccaatatggacttaaaatattaaatggatccaatccgattcaaaaagtactatatctaaagtattgaataaactcaaattaaatcaataaatatatataaaaaacatcctacgtatagaatcaatttaatccaacatccaataaatgttggatcgattggataactaaattaattgaatcagatcaaatggtaaaatctaacgtctaatatataattagattgaat

SEQ ID NO: 333683 - DNA, 740 bp, Cannabis indica
tcgcctacaaaaacaaaggaagttcaaagcgtaactggttagattactgcactcaatagatttgtttcaaaaataacagacaaatgtgttccattcttcaaaatcctgcgaggaaataagcaattagaatggacagaggaatgcaaaaaagcctttcaagagctaaaaatgcaacttgcaaaacctcttatactctcaaaacctctggatggagaagaattaggaatatacctgggtgtcacggaacatgcagtaagtgtcgtactgatcagagaagagaacaatataaaacatctagtctactacatcagcaaaagaatcatcgaagctgaaggccggtatccattgatagaaaagctcacctattgcctaatcctagaaacaacgaagctacggccttactttcaggctcatcctgttcaggtgtacactgaccaactattacgtcaagtattataaaaactggacgcatccaaacgattactcaaatgggcagtggagttgggccagtatgaaatcatctttcagccccgaacaaccattaaagggcaggccttagcagattttgtggttgaatgaacgggtaaagaagagaacacttcagaaagtaacccagagcaagtagaagaacctcaaccgagcaatagtaaagacaagtccacctgcaagtaacatgtgtacgtgttggctacatatcaactatctggtgcaggaattacccttgtcacacttggggggca

SEQ ID NO: 333684 - DNA, 507 bp, Cannabis indica
atacttgtgagtagatctaagttcctggtaaaataacttccaacatatgccgccctcatatgaagagtagacaaaacagaatcacaagtcccgacgtcgatattataattaaagaaaacagaagacttactaaggttcaccttttggcttgatgccttctcaaaagtattaagcaactctaggacccgttgagccttttctctgtttgccttacaatagagaaagctgtcatcagcaaacaacatatgggaaacacaaggagcccccctagccacccgaaaaccatgaagccacttcctctcctcatacaactgaataagagcagacaaaccttccgcacagatgataaacagatacggtgacagcggatccccctgacggattccccgagatgggacaataagacccaaactttcaccaccatgaacaatattatacaaaatcctttgaagacattcatgatcatgtcaacccaagcctccgtaaagcgcatccgtaataaatagc

SEQ ID NO: 333685 - DNA, 579 bp, Cannabis indica
actccgacccgaactcaaacccaaactcgaactcagaatcgtaaatggaactagaaccgaagtaggactaggaccaggaccaggacctaaaccaaaaaccaaacccagatcaaaacgcagacagaaacctaaactcgaacccagactaggactcgaaccaaaacctagaccggaacccaaagccacacaataatcgggacctagaacttaaatctggatagggacctgggaaacaaaactaggactgggacctagtacccgacccagacccgaactttaacctaggacccagctcatgacccagcaccagaaatggaaccacactagattccgagattgggatttggatttagaccaagggattggacgaaaccggtagtcggtttctatattttggacccaaacctagacccaaaccctgacaaggacccgaatccacacccggacctgaacccagtcccaaatcaaaatgtggacccaaacctgtaccttatgacccaaaattggaaccaaaacttgaagttgactgggactggaactaggacttggactttgaatcataactgaaattggacctag

SEQ ID NO: 333686 - DNA, 580 bp, Cannabis indica
ttttatcgttgtatgcttcttttgctctattttttggtaattgttgtggagttttcgttttgtagactctaatttcgcttcaagatcaacatattgctgtttcatgcatattataattgtaaagtaagaacatcaatgtaataaattataagttttatgtgtttgtttaataagtataaatgtatatacctcttcggatttgttttgcttaggcaaataatcagaaagcttaggagtgtggagttcttgttcggaatgtttctcactcaatctaccaccaactttgattatattttctttttcatctttataatgtatcttgaaatgttgatctaatacgcattcattatacgttgttaaatattcttcgtccattgggggagttggaagtcccatgatgtcatcgtcatcactctccttaattccattaaatatggaaggtaagctatgtatcatgtctttatccatctataatcaaaattaaattaaagtattaataaacagaataaagaaataataaatttaatgataattaatttggaaaaaatatatatatataccatttgcaaattttgtaatg

SEQ ID NO: 333687 - DNA, 562 bp, Cannabis indica
ttccaagggaaccagggtcgaggaaatcgccagggtggcatcgaaacccgatacacttacccagagtgccccaattgtaaaaaccaccatctgggggagtgtaatgggcagggatgctttcagtgtggcatggcagggcattacaaaagagattgccccagcttagaactgaggcaccgaagactgcagtgaaacccactccagctagggtgtttgcgataactcaggctgatgcagaagccagcccttcggtagtaactggtcagctctcagtcaacatctcttatttctctgtgttatttgactctggggcaactcgttcgtatgtgacagccaaaatttttagtaaattggatagaccgcatgatagttatgaatcagggtttggaaccctactgcctggtggagagttagttatctccaaaaggtggattaggtctatgccgatcaaaatagaagatagagagttgagtgctgatttgatagagatgaatttagtggattttgatattattctgggaatggatgtaacgtccccgcttcaagcctctattgggccctt

SEQ ID NO: 333688 - DNA, 1123 bp, Cannabis indica
attaaaatattcaacgatgcgagcctcttcttttactcgcaattgacgattaaagagacagatttcaccacatatccattatgcttcaaccaacagaacaacaagacaacacctgctgaaatcccaaaaatcacatccacaacaacaccacatcaagaaaatatggcaatgcttgaaaacaacacagcaacaatagaatcatacacactcgaacaccaattagaagaaggaggagagtcagaaacaagagaatttgagaatgaaaaatttgacatagttgactatgcgaatctggttggtgaagaaatggtagaaaaacttaaaaacaatagtaaaaaactacatccagaaatcgacatcaacaacgtgaagcaaataacaaaaaaacaccaaccagaagttgaaaaaggtcaggcatacaaggacaagtaaacactgaagaatgccctcagctactacgcaatcaaaaacaacttccaatacaaagtgtggaagtcgtgctctcaagaatacagtctgaaatgtgtttacgaaagctataatttgtctctacgagcatccaaaaattggccgacaaatacattcataatcaggaggttctcaaaaatacacatctgcccaacaaatattaggtatgaagaccaaagtcaagcgatgtcaaaattgattggagaatgcatcaaaccgaagtttctgaacataaagacaaaagcaacaccgttggatataaaaggagagttgaaatacatgtttcgcatcaagatgaaatatatgaaagcttggagaagtaaggagcatgtagtaaatgacttaagaggaaacgctagtgactcatacagcctactatcgagtttcttgcacatggtggaaaaacaaacccaggatcgattgttgatatgaaaacagctgaagacaacaacttgctctttattttttatggctttggatgcatcgataaaagggtgggaagcatgtagatcgattgtagtggttgatggtacattcctcaaagcagcttatggaggaacattgttgtgtgcatgcacagaagatgtagcaggtcatatttttccactagcgttttgtttcgccgattctgagaatgaccaatcttggaaatggt

SEQ ID NO: 333689 - DNA, 572 bp, Cannabis indica
ggttttactaatctatagttgattcttggtgaattcattggaggtaatagcttggatacccttctctttacttttttttttttatgtttatggttggaattttgcatgacttgtgagttttgctactgtagttgctgctattgtttgaattgtatttttgaggtttaatcatggttagatatgttgatttaagctatttttgaaagttgttttgttggttgagcaagcattgagttttagaactcaagcttggctctttaatagtggattttgtttctgtgcgtgttgtagtgttttgttgccttgaatatgttctttgggatatatatagaacaggtttggaaggtttggtttgatttggggttgatttgagtgagatatgaaattttgaagttttcctgcactgaactgtttgatcagttcagtgggacctataggaaccggaattccacttagtccctaggaaaccccacagagccggaattccagttggggaaccagtctaccggttggggcaattttgagaaccctggtttttcccgtttttgtgatatttaggatattgccatgtt

SEQ ID NO: 333690 - DNA, 692 bp, Cannabis indica
gtggttgggaacatgttatacaacaaaagctttcctaacggatcaaatattagtttccttatagtgttaattatgggagtgcaaatagtaggaaccaaatctataataagttatagattaactgttcacattgaattaatggtacataaggattcgagagatcattagaagggtaaaacgacattttgaccaactctaattatgaactaataattggagggctaactgcttatattgattatatcaatggaccacagtaagaattctgtaaatataattttatattgtcaaagagtgtaatttcatatttatagtggagtaataatagaattagtaaactagattattctattgatgagattgataataatcttgggtttattggagcttcaaaatataggcccatggtccccgaaacacctctatacaacactgtacaggggaaggttttatttgatgaataaatttcaagtgagaattactttttatgggaaataaattcttaatggcaaaatagtaatttgtttattattttgattaattatggcaattataaactatataattaatagtatttaactatttagtttttattaaatggaactatattaattcgttaattataatattattactaaataatattaaagaaagaaatgtattattttagagaaaataatatttattttaat

SEQ ID NO: 333691 - DNA, 914 bp, Cannabis indica
taagatcgggattggaacttgggaatcgcagccagcctagaccaagaccaaggacgcgaacccacacccggagcatgatctggacctagacttaaatccacacccgaacccaaagtcagactaggactcgaactctgacccgaactcatacccaaactcaaactcataatcgcatatggaactagaaccgaagtaggactaggaccaggaccaggacctaaacccaaacccaaacccagatcaaaagacagagaccgaaacccgaaccaagactaggactcgaacccgaacctagaccgggacaaggaccaggacctaaacgcaaacccgaacccatatcaaaacccagacagagacttaaacccaaaccgagactaggactcgaacccgaacttagagcgagacccaaacccacacaataactgagaccttgactgagaattacgatggggacctggaaaacagaactaggatcgggacttatacccgacccaaacccgaacatgaacctaggacccaactcgtgacccggcacaaaaaatggaaccagactgggtcccgagattgggatccgaatcttgacacatggcttcgacaaaacctgtagtcggtgtctagatttgggacccagccttggacccgaaccgtcacaaggacccggacctgaacctagtccaaaacccaaaagcaaacttgaacccgaaccctgtgacccaaaattggaaccaaaacgggaagttgaccgggacctaggacctgaaccagaaccagaccgagacccaggacagtgatccagatcttgactaaggattctagtaatagggcctggaacagaccagtagttggtgtctagatctgggaataagactaggaacagaaccgagacgaaaaaccaaacccgaacccagacctag

SEQ ID NO: 333692 - DNA, 615 bp, Cannabis indica
tttcaaataacatagaaaaaaactaacataaaatttagtatacgtgtctcgcacgtagctttttgctagtatatatatatatatataaagcagaagtataagacggtgacatggcgctttaaaatcagttcaaatacttttatctattttctccttaaatctctcatttttttaatattttattaaatcataaattaataaatcaatattttattatttttctaattttaataatttttttttataaaatataaaatacttaaatatctaattattcaaaaatagaaaataaaaccgtaagtataaaaagtaaataatagaaaaaaattatatacttaaaaaaattcctatctttccatatgatattagttcttcattcattcctcactaaactcctttcattcattcaattgagggtttcaacattgctatcaatttattgttaaagtaaacgataatgatgagttttgtttgatttttgagctattccttagtttctataccattataaattaattcataatttgaatgaatagctttatcaacaaaagttttagaaatttttacactaaaaatacaaaaagctaactttattacatatatactacaacacgg

SEQ ID NO: 333693 - DNA, 1213 bp, Cannabis indica
ttggcttagggttattactcaagtaaattgttaatctgtaattgttatgccatgatatatataaatgtatattgaagtaaagggttatgtgttcaagatataatcgggttggactcggtaactagaaccgagatgaaccgttctacggccttaatgtaaatagacatgtgagcgtaacacgcaggtctatgccatatagacataaataggcgtgtgagcgtaacacgcgggtctgtgtcatacagacaaaaataaaatggcattaatatttatgtgatgtgtatttatgactatcgatatattttactgtcttgctgggcttggctcactggtactctactgtgcaggaaagggtaaatttgtttctaatcacccatgagtgtgggagctgggcgatgaatgtaaatgttcgggccacactagaccaagcgagttggggtctaccagcgttgaaacttttgtaactctgttttgctacttaggtcggctaagggaaaagacttgtaatattttgtaaaataattttgggatcccgaaacacgtaacttttgtttgtaaggttaaaattattacaaatttattttcattccgttttcgttaaaagtttaatttccacgcttattttattagtaatcccgtttggaggattagggtttcttaatcatcttgggtagcgtgcctaaatgttagggcgttacaaaacttgtaataatttaaactttataaactaaaaggttcatgtatcgtgatcccaaaaatattttacaaaataatattacaagttcattttcattagccgacctaggcggcaaaatagagtcacaaaatacatcactggtagatcccaacccgcttaatctagtgtggtccgaacatgtacatacgccatgcagctcccatactcatggttgatctgaaacagatttaccctttcctgtacagtagagcacccgtgagcgccaagcccagcaaaacagtataaaatattgataaacatatttaccacattatataaacaataatttcattctcatatgcatgtatgacacatacttacatgttacactcacatgcctatttatgtctacgtaacgcagacctacgtgttgtgctcacacgtctaaatacaataaggccttagaatggttcatctcggttctagtcaccgagtccaacctgattatgccttagacacataaccctaaatctcaat

SEQ ID NO: 333694 - DNA, 1131 bp, Cannabis indica
gacccagtgcttgaccgaacccacagccgctgtctgcatttggtaaccaaccgtggacctgaaccagaccaggacacgaacccagaaccggacctgaacccagtcccagacccaaacctatacccgaactcgtaccctatgacccaaaattagaaccgaaaccggaagtagaccgggacccgagaatgggacagaaactaggacatggacctggaaccgtaactggagctagacctagactcgaaaccgtaaccagactccaactcaaacctaaacacgaattgggacccaaacctggatcccaatccaaacctagactcgggacccaaacctgcaaccaaactcctacccaaacagggaaccagactctggacacaaaacaggggctgggacaaagaatcgcaccccagtctcaatcctgaacccaaactcggacctgggacctaagacatgtaccagagccagactgggacccgtgacagggatccaaatcttgacttgagatcctagaaatggggcttggaataaacctgtagtcggtgtttggatctaggactcaaactaggacctgaacccagaccaggacccaaaccctgacccagacctagacccgagacctaaaactggtacttaaacaagaaccgtcggaccaggaccctggaacaagacttggaccgtgacgaagacccagacccagacctagaaccaaactcagacctagccctagacccaaaccgagactagaactcgggctcggagacggtagtgtaactagacctggaccgataccaggagttggacctaaatttgggattagatcccaaacatagactcagacctagataggaatccaaataagaatttgaacttggacccaaaccaagagcgggattgaaactttggaccaaaatctagttcgagatcttgacccaaacccaaacctagacccacaccagggacccaaactcggacccgcacctgggactcgtactcgaaccttgaccagaacctagatccagacctggaccaaacccagacctagactcgaaacaaaactcatatcccgacccagaccaaaaatagatcccgaactaagacacagaatccgagtgtgggtcagtgtttcagtcc

SEQ ID NO: 333695 - DNA, 1993 bp, Cannabis indica
ttttacaaaaatagtgccttacgtaattattcctaaattttatctgaattgcctcttctttttctttttttttttaaaataattcatttgttgggccccattcttctaccttgttgggccactacctcaccttgactcccattagtatgatattgtccgctttgggcctaagccctcacggttttatttttgggcaccttcccaaaaagcctcatactaatgaagtaggtaaaatacttatgtacccataattcttctcattcctagctaatgtgagactttggttacattcccaacaatcctcccctcaaaccaaggaccacatactcttggtctcccctccagcgaaactaccttatgccccccgctatcaccaagggaactcgccgcctgaccatcagctttgtcaggaagactttcgacacaggtcctaacaccgatctccatcttgtaccgccgtaatcatcaacgggacacgccacctgactatctcaatattagacagactttcaatgcaaggcactatatagatcttcaatcgcgaggtcttcacattgagggtttcttccacacatcgcaaatgcagtccattatcctagcgctcataaacctttggctctgataccacttgttgagaaaaacggtaaacttcaaacacagcgaaataacaaaaaaacgaagtaaagcaatttactcagtttggtaaaattaccaaacccacaaagagagatatatttcacttatcacttcaaaattacatatactctctatttcaatctttctacccaaaacccaatacaccctttgcttctcattcactctcaccacataacaaactcacacacttctctttttcacaactcactattttttttctacacacatctcacacaaaacacatatttatagagttacaaaacttgggcaccaagacaacttggaggctaagacattccaaaacttccttaagaagacttttcaaaacttggcaaccaaaacattccttttcccataattaataattaaataataagaaataataatttgagtcaaattctaacaatctccatcttcactaaaattctctaaactcacaactcaaaccatcaataaaagtatatatgcatggaattcatattttcattgaacttcacttgaacatttgttgttatattcttaaccaatgtgggacttttgttgcattcctaacattatttgttattttgtcagctttccaaaatggggttttttcattaatgtacaacaaaaattaatatattacaaaaaatgtgcaaaaaaaacttaattataaaaactcatacattttaataacatatttactaatatttacatcattagatataatatttactaaacttactataaatatatatatacataatattctttaaacgtggattatggattaaggagcattaatgtgtagtcattataacatgtaattttaaattttattatttatgattattgatttgatacttataatagttactaatatatgtatggtataagtacatgatgaaaaaaaatgaaatttaagaagaaaactaattatagtaatttaattaaaagaataaaattatataaatttattatactaataaaatattttatttataataatatcattgttaatgtttaaattattataatttataattataaatataataatgtactatgtttattacagtaatgttttaaattttttaaaaaaaaaaaaaatttttttttaaaaaaaaaaaacacttttacacaagaaacatgcttttttctttaattgtaatataaatgtttagatttattttagtgtgatttattatatatttatgtttatttatagtgtatttattataaaatatacgatttatattatatatataagttgttttatgaaaaataaataaacatgttcaaaaaataaaattaaataaataataaacagtttaatataataaatatactatttttt

SEQ ID NO: 333696 - DNA, 963 bp, Cannabis indica
aatatccaacttggctcgccaaccccgtggtagttcccaaaaagaacggaaagtggagagtatgtgtagatttcactgatttaaagaaagcttgtccaaaggacagtttcccgctgccacacatcgatatgataatcgacgccaccgcgggacacgaagtaatgagcttcatggacgccttctcaggatataatcaaataatgatgcaccctcccgaccaatataaaaaatcattcatcactgagagggggacatactgttacaaagtgatgcctttcggactcaaaaacaccggggcaacgtaccaacgaatggtgaacaaaatgttcgcccagtagttagaacttactatggaagcctacatcgacgacatgttagtaaaatccaaagatggcgccgaccacgtcaaccatttgcgagaatgtttttcagatcctcctcgcccactcgatgaaacttaacccagccaaatgcgcctttgctgtcggatctgggaagttcctaggccatctagtaacgcgacgaggggtagaagtgaacccggatcaaatcgaagcctttcaagtgacaggacaaccccgcaccataagagacatccaaaagttgacagggaagatagccgctttaagccgcttcatctcaaaactctcggacagaagccttccattctaagacttattaagggggaaccgcaaattcaattgggatgaaaaatgccagctggccttggaggcattgaaaaaatacttgacaacgccccccgtcctttcaaagacagagcccggcaaaaccttactcctctacctttccttgtctaggtacgccgcaagttcggtattggtaagggagcaagggaaggcgcagttaccgatctattacactagtaaaactttctcgggggtagagggaagatacccaataatcaaaaaattagcatgggccttagtcacatcagcaagaaaa

SEQ ID NO: 333697 - DNA, 826 bp, Cannabis indica
attaattttctgtactacgatatatttaatactgctgtatatatttaaatgatctaatatatttatttatttttgttacaatataataatatgcaatactaaaaaaattatgtaacttaattttattattatatatatttttaaaaaaaatatgtgataaatgtatttttataatttttattagctaatttattagatttggcaattttcttaatttttttaaaaagtggacatttactaacttagttaccaaatttagggccattttgcatctcaaccctaatttaattgataaataaaccctttactatcttataaaaccacatatttgctgttaattttatttttgacatattagatggacaaaaatattctatgatttatatataaatttcgactgagttattttatttatttttatttacaaaaaagaagaacaacagtgctacctttagaagaaggttcttcaagctttcggtagataatttttcaaatcttacctcgagagaaagcaagtactcttcaaagtgattgaagggagttcaatttgagaatgtagaatatatcaagtttgcagcatacaataaaaagaaatctatttatacataagtcaattaatatttttgagatctatctaatagccctcgtgacaacctgcaaggataccacctataaaaatcttagtgcatgtttgacattataactaaaaaaactgttttttgtttttaaaaacagaaaattgtttttaaaaacaatttggcttgtttggccttgttttctaaagacagttttcagaaaataaagttacaaaaaacaagaattttga

SEQ ID NO: 333698 - DNA, 1109 bp, Cannabis indica
aatctcagtcatgacatcattcccactaaaacgggtcttgtacaaacctaaggtatccggaaggctgatgaagtgggcggtagaattgagcgcgtttgacatacaatacctacctcggacagctattaagggacaggcgttagcagatttcctggtcgagataactccagagcctgtcccgtctgagaaagaatccgccggaagggattggctgctgttcggtttcttctcccgtcgattgagggcattgggaaggtagacggatcctcaaatgtcagagggagcagagtggggatagtactgctatcgcctgacggagaaatgatagagcaatctataaagttaggtttttgagccaccaacaacgatgctgagtacgaggctctgatccacgggataaaattggttaaggaaatgggagctgaaagggtattagtccagtcggactctcagttgatagttcaacaagttaaaggagatttcgaggctaaagaactaaaaatggctaggtatttagtagaagtaaaaaagttgattacgacttttgagtacttccaaattagccaaatccctcgtgaagaaaatatgcatgccgacgccttggccggcttggggtcctctttcccctccacattacaaggacaataccattcgaatttatctcggaacctagtatttcagcggaggaagaagttaagtgcgctgaaatttcggcggacacatttgaagactggagacagctaatcctcgaatacttgaaggatgataagttgccatcggaccccaagcaggcgagaaaaattgtagtgagggcgtcaagatacactatacttcagaaccaattatatagaagatcttaccacgggccgtacttaaagtgcataacgaagcaggagggtaaactaatcttagcagaggtttatgaaggagaatgtgggagccactccggcggacggctgaccgcctagagggtgcaaaggcaggggtactactggcccatagtccaggaggattcgtcaaatcactcacgtgttgggttttatgccctaaataaaactccatttcaatgtaatatattttattcagcatcaataaagaaacagaagtat

SEQ ID NO: 333699 - DNA, 751 bp, Cannabis indica
gcaaggtctactctaagccctaacgtggtcattacacgtgatgaggatgattcctcagcgaaaacgtagtgaaagaaagtaatctaaacacaaaaaggaggaatttaacacatcattcagaaactcgaacaacaccaatcccagaagttcaaacatccaacccataaatcataaaaacgtgttatataaacgaacagtgagcaagtatacagtatacgaagaacttacatgaagtttgaaggctggaggttggtgttgatcgctggtaaaacgaagactggcaacgtcgaaggaataagagcagggaatcaatggtgtttaaagcttcttctctctctaaaaaactcttaagaaaaatttggtgaaatgctgaaagtaactaaatgaagaaataagggtggcttttataggccaaaacaggtgtgagacaactgtgatcagccaccatcgtatggtcaggatgccaatcgattcgaattctatagatccaacggtttgattaaacactcatcaaagcggtagaaaatgtttgagtacccgtctgacactcatttaatgcaccgtatcaataaatggatagaaaacgaatcgttgtctgcaaaaagcaaataactgcagtaatgatggtcattaatatgtcaccacgcgcccgaggcacgtgacaggaagctgataaggcaaccgtaggcatctaagcaagccttgtttactttttcaccaaacaaggctcggggggtaaatgttgcccctg

SEQ ID NO: 333700 - DNA, 818 bp, Cannabis indica
catccatccatctcaaaaatttgtgtctttattgtgtgaatgcattgcaactaacaacgcacggttcttcagtttggctgacttgacaaacgacctatctaagtctggctaactcaaaatcttctcccaagtctacatggggctcgccaattcctggccttgtctctccagcaaaatacagaggactagattcagtcgtggtgattgggggttgctccacgttggccattccttcagtacgaggcaccagctgagcatcctccctagtcggcaaaggttggccattaagaccaaccgggttggtagagtccacctgaccagttgtggtggctaggtttgtgatgcctgccgagatggtagagttggccacatccattggctttgtggagattccaattgtggctagaacacaaacatcaggatcagtcaccatagggtcttgaggaagaactgatgaggtagaagttgtagccagagttctccttgtgttaaccattgtgtttgataagataaattaacaacttgctcttaatgaaagcaccaaactgttgacctcagatttggccaactgacagcggagttgtaattattattgatgcttgccacgtgttacacaataagaatagaaaaggaaataagacaagattttatagaggtttagcccccttagttagcgggtaatgacttactctcctttttgttgtaatgatactagagataataccacttagatcacaagtgttgtggaatatggtgtggtcctcttaagattacaatgtgagaatcaagttggcaaatctcaagtgagagagagagag

SEQ ID NO: 333701 - DNA, 619 bp, Cannabis indica
tttttaataatttttttaattttcaaatgatttatttatgttttttaaataattatattaagtgtaccaatatatatgtgccacgtgtacaagagtgtacacacataatcagtctatgttggcacttaattgagataaatggatgacacctgaagtttattaatggttagtagtttggagaattttaccactaaaatttgaacttgcaaagttaagtacaagtaaaattatagttagaagggtttagtcgccaaaaactcttttaaaaaacaattatattgttggattatgttttaccaggatctagatttactagcatgtatgttatttaacatcctaaatatgaatttctaaaacaatgtaatttaaacacatataaagtttgagaaaccttatattgggtgcagcggaattaaatgtctcattccgctcagatctctaacccttgtatcctttttgtagcatagtatcaccaagatctgagtctgattctccttctcttgaattggaatcttcacagtcttacatactattattgagtaccacttgatgtgtgtgggcacttactctatcactatagggttcgaaatattgaagagagaaagagagaggaagggtt

SEQ ID NO: 333702 - DNA, 529 bp, Cannabis indica
cagctccatgattctaagcttcttgaaaataacttgccatttggagaaggtgatcacgcacgttctgatgaggaatcatctgtgcattagtgaattcctcgtcgcttcaaagcgagattgaattgatgccatcccgaataggtcagttaactggttcatgatttctgaagccgtgtcagtgttgacaaaccttgttttcaaggtgtcaaccatgctggaaagcacgaagtatcaagctttgttgttggcattctgccaacgctcctacttctcctttacaactttggtggcattatcacctggctgctcaggagacggttcagttaacacaaacagggaattttcaccaatgagagcaatattaatgttctctttccatttgggaaagttagatccattcagcttattatcagtcaacagtgacaccatgggattggtcattgtcatgttggatactacaaataacaataaatagaaatcaagtaaggttcaaaacaaaatctcattcagaaattattagcacatagca

SEQ ID NO: 333703 - DNA, 790 bp, Cannabis indica
tagggttatgatcgggtgtatgggcaccagatcataactctggttattggtatgttttatgttatgcttttcttactgagtctatcgactcccagtgctatctttatgtgtaggtaagggcaaggctaaagctaaggagccatgagtacgagcatgtgaagattgtacatgttggagcggttaggcatggagcgtacgatctttgggacattgaggcttttgctgtatagtcgctgggcgacaaacttttgattatatgtatagcaacgagctacacagtacgtttaaaatcatgttaaaacgcctatgctagttagggtgttacaatttggtatcagagccgtcaggttgtcttctgaagatcgtcacgacatgtacaatcatcatcaacactcagctcttttcacgtttcagtaagcttttattgcttagtagtttgttttctatagtataatttaagaaaggcttgttaggaaacatgttagtagcctgatagtagaataggcgcaagtttttaatttccaaataagcggcgttagtaagtttctctttgatcacaatctggctagactagctcttggttacgaaggctgttcagattagtatggacgtcaggcaaaatgctaggagtcagggcaactcggttggatctaatgctggtcagggagctcagattcccctaaatgtctgtggctgaggtagaggtcccaggggcagggcacgtggcctggatgatgttaattcgccacaggtagcccaagcggcccaagctgctcaggatgcccaaaat

SEQ ID NO: 333704 - DNA, 894 bp, Cannabis indica
aaataaatttacaaaatacatgtatatattttattaagatgtaattattcttatatagaggtatactttgttaatacgggacttagaaaatgtataactaattacaatttagaggttattcttatttataactggcccaaatcaggacttgatttttttaaaacaaattagaggttattcttgaatagagtattcttaaatagaggttctactgtattaataaaggtttttttttataagttttcgtagtatttaaaaaataatttatatatagttattttttatctagctagtttggttttatggggatagtttatagtttatgtttgtagtttgtgccattttttttgctagtttgtgccattttgttttggcaattttgtactatattagttagctagtttcgagtttgttgttagctcgtttacgcatggattcaacctcaaagagtgctattgtagattttcacagataaattttaaattttgcttttaattatattttaataagtttggaggaatttctttctatcattgtttttcgtatcatttatttattaggcaattgagttttgttacattttttgaaaaatagttaatttatttgggatttgatttatttagtttgattaatctcttaaatcttatgtatgttgtaggttatattggctagtatagttctaccttgaaagacttagctcttacaataaaaaggcttcaaagataagttttaaatttcttgttataataataattgcattttatctttaatttaaaaattcacaacattatcattgtacagtgtgctaatccacatttatacatctatttattttgtaggtagttttgatccaggtgtttgtttacatcgaatgcgtcttgaaggtggtctcaa

SEQ ID NO: 333705 - DNA, 598 bp, Cannabis indica
atttatattttgttatggtttttcgtggcgtcaaaactggtttcacaggatcgaaactggtttcacaggttttaactgttctgtaatggggttgctccagttttatgatgttattgtatattttttaatttgtataaaatcagttttattattgtatgatatttgaaaaacaatttttgttttattttaaataattagtttctgacacacataatattttattattttcataactcgtgttttttttttgttgttcataattgagttatgagtttcaatttttttatttgattatttcaggaaactggtttttatctatttattcttattttggttgttttactaactggtttctcacattttacttgttttatattttttttttattcttttatgggttttattgtatttttgtctctttaattttctttatttccttttttttcctctgattttagtttctgatcctctttgttatatttgttgcatattgtatgcttaaatcaacactagtttttgagcaagtaaatgaaatgttgacgcggtttttcgtcaacgaatctaagaagatcgtaaaacgagcaagataaacacaagc

SEQ ID NO: 333706 - DNA, 1936 bp, Cannabis indica
ataaataccccccaaactcattaaagaggggtcgagaattctgggtttcataagaactagaagagggaaaatctaccaagaacattctctgtaataaatactatcataaatacacagactcgttgactaaggctcattaacgccccaaccacataaaaatctctctcttaatttcttatagctttctaaattattattattatcttagttgccgaaaacctcggtcaacacacactaatacatatgagcccttaataaagattttaatccaacagaccaaacacccaagtgagatagaaataaaattacacaaatgtcataagaaaatgaccaaacaatggcaccccgcaccaacaataagaaaccaaaagaccatgacaaacaccaaacccaataacggcagacgcaaagggggaaccccaaaacaacaacaaaggcaatgccacaaaagacaggggcgataaacaatactaacggctcgcattttgtggaaaagtattgaacgagactccaagatgtcttgaaaaaatacttaagcctagtatatgaatagatgacctaactatttatataagcaatcaaaaatatacaaagtgataaatcattaaaagtatattcaagtttgcttcaaacaaattataattatttatgcgaagcagaattgataactgctcgcaaatgaaaagcatagcagataataactactcgcgcacatagtagaccactaactaattaaataatatcaaaggaaaatacgagcaatgaaaattcctaaagtattttaaatttgatccaaatataattgtacgaaacattcaatgaaaataaaataaaagcaaagttggccatccaaccttgcaaatttatctttacaaaagtgtcacaaggggcaaaccattatctcgaccttaaggccatttgcctagataaaacaaaaataaataaaaaccaagcttacatagtagaagacttggatagttcttcttcttctactgcctcgacatcttcttcttccttcttagtcttctcgcaaaaggcaaggatttcctcctcagactctcctaagaaactcgtatccatcctcggattcgccatccaagcttggtagatggaacgtaggccaacaaggttgcatcgttcaatggtttcggcttctttcccatcgagtgttaccttggctgcatcaagttccccttggagtttgtggcatgcattggcttgtcttttgcctccttagcagcttcaagctcagccgcgagggtcctcttcatcttctcggcttctttgattaggcgagtgttttctagcttggcatcattccattgcttggttacaacctcgcgctggtctatcaagttctgaatctcgctctccatatactttatttttgccatgcctcgccgttgggcgacaaaggaaatgaaagatgtttgaaaaccaacaaacaaaatgcatgagtattttgaaggacttgaaaaaaaaagtgagcagataaggataaggaaattttccgagaggctatgagatgcactccttgtaaacatctcccctagatctccattattgattaaatcccattcatagcggaggagagccttgaaatgacgccagaaagctgcaccaaactctgcagtgtactccaggccaatttttctagcctcgacaggcagagttttgagggcttggctcaaggaggtagaagcttgagtcatttttggaataggctcgtcgctacgtgcaagggcaggaggaggggttggatcctgagtcttagtttcagggaccttaagattagcgttctagaaggctcgcttcttgttagcagtagtcttcttgagcctttttgggggctctacgtcgacattgttgaaaattattttaccaaaaatctagatttactaccatgtatgttttattaacaacctaatatgaattc

SEQ ID NO: 333707 - DNA, 763 bp, Cannabis indica
ttgaagtatttttaaaatgcaaattagtgaaacacaacaatattgactaagttattatgacactttttggattatattgtgaaaattaccgatatttatctttaaatcctagtatttcacactagattaattactgtactacgcacatattgacattcacaatcaatgacgaaatagtaattaagaaatttttaatagaaccaacttaaatgcctacctttcctttgaattacgtccttaaaaaacataaaataaacatcataccacatacaatatctctaacgaaataaaagttggcaaatgatgaagaggcaaataaatataatgaaatataattttttaataatgttttcatggtgcatcttctctttctccaaactccttacttggtttcgcaaaccgagagtagtgtctgcaggttttttaggatgagcttgatcgatccaacaaaagtaatcacatcctcgactttcgttgttctcctgaatttaaaataagtacatcaccatatttacaaagcctagtttaaaatattattaaggcgttcgaagtcttacatagtgcggacatccaaagaagcgacgacccggatttgctctactgctagaagtccaaacataagctagatcaccacagtagcaatgggggtgtcccccaagtgaatttttccatgaagggaaatccctctcgaacccgtaggggtcctctccagaaccagccaccatgttttttttttaacaaaccaaattagggtgttagtgag

SEQ ID NO: 333708 - DNA, 520 bp, Cannabis indica
atatcaacaaggtgcatcttgtttttcagtagcccatcacgaaaaaaattcatatagttatggggtaatttcacgataggtgaactcctcgaaagttttttcaaaaagcgtgcgagtgaagaaaaagcatgctagaaacattcgtgttagtttgtagggccagtcatcactctatgaagcagccaaaagtaatgtacccgtgtataaaaaacatagtttggtgggtgtataaaaggcccaataaaaacttgaagcgaagatgttacaattatattaaccatttatattcacattcatttcaaaagtaatacattattctagtcacaaattaataacctatatgtctattctatataaagtgtgcctatataactgaattcttgcgtttatgagaaattcatggataactttttttttaaaataactttctattcaaaataatatattttttatttaagatgtatttaatatattttaataattaatatactttaatttaatcggttatgagaattatggt

SEQ ID NO: 333709 - DNA, 581 bp, Cannabis indica
gtggtggtccgacgtatgagacggagatgagagcgacaccgacgagaggtggtggtggtctgacaaatgcgacggataggagagggagatcgacgggatgaggggtgggtggagatcgatggatgagagagatgagaagaaagggagatcgagagagggaggaagatggtgagagaggagggcgatgctgcggatgcgtggggtggggttttggagagttaagattttcgttttaaggtatgggaaatggagaagaaataagtgggcatgtgggaaatagaaaagaagtaagtggacacgtgggaaatgtggcgagaagtaggtaacgattttttattgggctcttatacccgacagtttaaaactgtctcctatactataggtgatagttttaaaccgtcacctatactataggcgacatttttaaacagttgcctataaggaccaaacaaattttatgaattccaattaaaatcgtcgcctattcctgtaattactgttataaatcaccaggaatactaattttttccaacggttttaatcagttacttaatttttttagcgacggtctcccaaaaaaa

SEQ ID NO: 333710 - DNA, 867 bp, Cannabis indica
cctccggctttctttcaattttcttggtgtcatcaaccacattaactagataccctaagcacccacgctgcaatagttgcccagccttcattgccgaaataataggagtgcggggtttctttcctaccccctgaactcgaaagtctctccatcttctggtgtgaaaacaactttcttttgcttgcagtcaattgatgctccatatttggtaagaaaatccatgcccaagattacatcaaaatcaaataaatctaatacaatcaggtctacaaataattctctaccatctatcctgacaggtatacccctaagccaacttctagagattacaacctccccagatggtaacatggtcccaaaccccacagtaaataattcactcggtgcatttatatgatttacaattgtgctagcaataaaggaatgagttgcaccagaatcaaacaaaactttacaagtggtgttggccataggaatctgacctgatacaaccgaaggactggcctcagcttctgcttgagtgatggcaaaaactctggctggaacatacttgtcatctttcttgggttctgctctgttcccagtctgtccccacagtgggcaattgcgtttgatgtgtccttcttttccacatttgtagcatgcttttgcgcgacactcgccgagatgacgtttggtacatttagggcattctggaatgtttcgcccactgctgccattaaatcgttggtcgttatcacttttgtacctcttgtcttgacttggctgcccggactggtcctgtccccgtttcttgtggtcattagaattggctccacctttcttagattctctcctggcagcattttccttccaaattttgttttc

SEQ ID NO: 333711 - DNA, 709 bp, Cannabis indica
aataaaaattggaagctttttcctctcaaccttctctcttgttcggcctctttggagcagcaagaacctggatttttcctttgattttcaagccttttccctttcaatctaagcattcttcaaactttggtaaggtccctaacctctttctcttgtattttatgaagaaaatgtttaaaagatgattgttgcatgtgaattgttgtgatacttgctgctgtgctttgttgttgttttctaaggtttaatcttgctattttaagtagcttagagttagtgtatgcatgatggttgcttggattcaaactttgaagtttttagctcaagaacatgaatttttaaagagatgtgtgaatctgttatttgcttgctgtagttggtagatttcattttcagagggttatttatgcatgattgggtaggtttaatctagtatggatgcatgttagttgattctaaccaagtttgagttttggaactcaaagcttggtctttaatggtgttttgtgattctgtgagttctgggtggttttgttgcctttgaatggttatttgggtcatatagaacaggtctggaagatcttgtgtgatttgggttggaattgatcgagttatgaatttttgaaaaattcctgcgaggaaccggaattccggttgtgcaaccagaattccggatgagggtctaccggttggggaattttcagaaccc

SEQ ID NO: 333712 - DNA, 1166 bp, Cannabis indica
gaagcttggttgtataggctcatggtccccatactagttgagacaatactgcttgtaagacttagttaaatgattttaattaatcaattataattctaaaattagactatttctagtttatgaattttcactaagctagggctgaattgtgaagaaaagaggttctagggtttatttgtgaaataagagactttattaagtttaattaataattgtgttaaatgacaattttatttgataattaattttaattattaaataaatagtttttgcatttaagtggtggaattggaaaaatagtatttttgagaaaataagataaatagttgaaaaatagtgaaattgcaaagttggggcccacatccatggccggccacttatgggctattttacaatttattttatcatttttttaatgacaaataattcaaacctaaacctagttagattcctataaatagatagtgaatgcctcaaattcaaagatgatgaacacacttgccttcagtcaaaaatttgagccttcttctctatcttattcgaatccttcctctctctttctctcttcaaaatttcgaaccctatagtgatagagtaagttcccacacacatcaagtggtactctacatagtgtgtaaggctgtgaagaatccagttcaagagaaagagaatcagcctcagatcttggtgatactctgctacagaaaggatacaagggttagagatctgagcggaaggagacatttaatttcgctgcacccaatgtaaggtttctcaaactttatatgtgtttaacttacattattttagaaattcatatttaggatgttaaacaacataaatgatagtaaatctagatcctggtaaaacatactccaacaactgaccctagagctatgataatgatttactttaataaaatatggatttaaaatgatgtttgtgttgatttggatgatttcatgatagtttgatgattgtatggaaatcgtaatgtatgttataaaatattttttgctttgttctgaaaatatttttactgaaaagtagacaaaaaattaatgaatttacgctttttcagaactttattcggattttttatgaattagttatgattttttgaatttggataaaaatatctaaaactgatgcacacacgcgcgcac

SEQ ID NO: 333713 - DNA, 758 bp, Cannabis indica
attaaagctttgatttttttttgacgcggtgatcaaaatcacacatgattaacaaatcagcaatccacaattggcggcggcacctcctcgaaccaggatagctcattgtctaaccgaagagcatgttttgccaaaccatgtgctgcagaattcgcatcccgagccacatgggacaataaagctatgacatccactagtagaacacccagctcgttgaaaaagacccttcctttgtttatagctgtgactagagacaaagaataggaaaaaacctctttaacgtggattctgcatgagagagcccaattaggtccaaccaaaagggccaaggtctccgcttgtaatacagagatactacctgaaaacataacaaccagacaacaccacaatgataagctataagtagaaactatagacagaaactaccatgagaaacgcaacccaaataaacgataaaaccaacaatgcaaagaaaagataaatgaaaaaatgaaaaaactagccaaagggttatccctttggctagtgaaagaactccataaaacacaatacaaatattttctcaaaacggccaaagcatattaaacttgctacattctagcctgatacaaatgcgctcaaaaactaaactaccaatggctaactaatctatctaaaaatgtctatccacaatatataaacaccaccaagtactactcaatcacttagctagagcatattttaaaacttgttacgtcagacctcacccttttagaaat

SEQ ID NO: 333714 - DNA, 532 bp, Cannabis indica
aacaatttcatctcatttcttgcctcctctgcaaacacttgcgctcttttgttgaattcattaatatttctcactaggcgaccttgcaagtcatctcacagctcgcccttagctgttgagaggtcagtcgtgatccctgcttgaagggcagtatgttgaatactgtcattcaagttcttaactttagcagcagtagtgctgaaacaactcaggtaagccttaagtgacttacctggttgctgctttatattagttagagaggatgctttaggccgcctgtctcttgctggctgaaattgtttcttaaaatccttggacaattgttcccaagaagttattgaatgatgggtgaacttatcgaaccaactattcactggtccagtcagcgaggtggagaataaaatacaacgtaaattatacgagactttgctggctcgcattatggtattaaaattgttaaggtaagcgactgtgtaatatcccgataagcctaatggtaaataattagggtttatatttatattatgaatta

SEQ ID NO: 333715 - DNA, 1218 bp, Cannabis indica
catttaagctctcttcaactgtgcagttccatacctacacagtctcagaatcatcccacttgaccttccccaggcggtgcgggattacacagcttacccgatgttttcccttacggatcacgagactactgactgtcacaaatgattcaaaaattagagagagaagacaaaaggctcaaatttaactgaaaggctaatttgcatcatctatcaatttgagtctatcactatctatttataggactccttctaggtttaggtttgaattatatggcattaaaaattgataaataaatggctaaatttagcttaagtggccgacaattaggatgtgggcccaccaattacagctttgtcattttactcaactatttatccttttatttcacaaataccatattttcaaatttaaccatttaaatgtcaaacgtatttatttaataattaaaattaattatcaaataaaatttcttctaatttatttattaataagacttaataatgtctcttaattaataaataaatcataaaacctcttttctttataattaagtcattgtttagtgaaaattcttaaataagacatagtctaattttagaattatatttgattaattaaaattaattaattgagtcttacaagaagtattgtctccactagtacgggaccatgggcctatatatcacttagcttccaataagtagatatagaatttaccaagcaagtttcctaagttattaatttctccttacaccactatagatttggaattgtactttcaattatatagagcgctctatatgttccatgatatagatacactatgaaattatccatcattctaatcctaataatcaaagatcatctatagatgatttacattgagtaggaacaaatttaccgtttcacccctcaatgtatcatatccttaaaacacttaccttcttataaatgatattttagtaaactaatataattactaaaataaatgctcttccatttatctctataaaaccaagctcgaaggaaatcatcattttacttatatgtccaaatagattctatagattttgtatctatgatgcgctcccactcaattgcactttcatgttctcaaaatgtatgtgttcacccgtttgagtttcaatggacaactcaaataacataaataacactcttcagatcgaacctaaccatatcaggattaagatcttttg

SEQ ID NO: 333716 - DNA, 552 bp, Cannabis indica
aatctcaagtttactttggtggaatttctcaatcgattcctcttgctcaaaagataaacctttctattggagagttccctcttaagtatctcggggtccctctaagaccaactaaatggagacttgatgattgtggatcgattttgaagaaaatgaaactcaagctccactcttgggctgataagcacttatcctatgctggtcgaattcaattaatccaatctactttgattggattaaggaattattggatgagagtctttcttcttcctcaaagtgtgataaaagagattgagaaactttgtcggggcttcctttgggtttgaaggataatcgaactagagttcacttgataagttgggagagggtgtaccttccaaaagcctacggtggtcttgggtttaaggatagaacaaaatggaacaaagcttctttagctagatttatatgggacttaatgaataaaaaagatttgctttgagttaagtggattaactcggtatatctcaaagggagtgatttttggtcctataagatgagcatggatacaag

SEQ ID NO: 333717 - DNA, 1146 bp, Cannabis indica
tgggcgttgggcccacaaccaggtcaacctgggcgctgggctcagctttcaagtccttgaggtccttgttttcttccctagtttacttgtatcttagttatttctgatgatagaaaaaattcctgggacacttttttgggaaatttattagaaacagccaggttgacaaatgtcaacctgggcgctgggtctagttttaggccaccagatggttccatttgattcccaaaaatacttgtatcttaatatttaaccaaaaaagagaatatttttggaagacttcttggaaacactccttgaaaatggcctaggttgaaaaaatgtaaacttgggcgctagggcagcactaggtgttaacttgggctgggccctcaatctggcctccatgttgatctatttcttccctgaaagtacttgtttcttcctttttgatgaatatgaagaaaattcttagaatatttcattactttgatgcttggaagtgcccagggttgacaaaatgtcaacctgggcactgggtgtctgaggcacctgatgcttaaaaacaaaagtgctctaaatcttattctgacgcctcaaatatgtttgtgacatgtatagttcatgtcccagttcaaagattgatccatttgcactaagatggtcccagaaacagaaatcctagttgggttgccagcgtgggcgctgggtgaaaccctagacgcccaggttgactttcgaggtattgttttgtgtattttcaattcccaagccttggagtaggatgatttatgtcttcatggtacataatactaaaagatagtgagttggaaacaacttggcaaaatccaaacaccccttttggagttcctggaattaacttggggacaaggctagggacccctcccagatcgacttctatgactcatgactacacaactttagaatattttatttcttgtcacgtgccaaatattgatgtccacgtcatagggataagtttcaaggctaacacacacgcacacacatatattatatttgaagcactaaaatatagtaaaaaaaatttgatagaattcaattggagctcgaggtaactcgtcagggcaataaaaactaaggtggcgtttggttggtaggtaatgaaatggaatggaaaggaaagga

SEQ ID NO: 333718 - DNA, 547 bp, Cannabis indica
aacatattgaagaagtgtcaaaagtttgaatggtcggacaagtgcgaggaggcattcaaaaagttgaaagagcatatggccaagcctcctatcctatcaaaacccgttctcggagaggacctattcttatatttggccgtctccgtgcatgcagtcagcgctgccctagtccgagaagaagagaaaactcaacatcccgtgtactatgttagcaagcgcatgataggagcggagacgcggtaccccatcatcgaaaaactggtttttccgcctcctgatggcctcaagaaaattacggtcgtattttcaagtgcacccgatcaaggtactgaccaaccacccactccggcaagtcctccaaaaaccagaagcgtcctgaaggctcctcaaatgggcaatggagttaagtcagtttgacttacactacgttccctgcatctccataaaaggccaagccttggcagacttcatcaccgaatgcaatgaagccgaggaaaccgcgaatgtgccaacaccattgatccccacatggagagtgtttgtggac

SEQ ID NO: 333719 - DNA, 483 bp, Cannabis indica
tcctaacccaccggcacaaccactagggggacaactgagacataacccggacattcctccacttgtggaaggagaggacgtgctggtcatataaggaggaccacactttgcagggaccaccaatggggctcaaaagagatatattaatgagctcaagaacttagataagactcctttcacaccagaacaacgtgctcccaagcaaagtcgaatggaggaccaaaccataacattttccaatgtggatgttcatcatgtacaaagtccgcataatgatccacttgtgataacatctcaaatcgccaataggagggtaaggagagtcttgatcgataacggtagtagcgtgaacttgttatataagataaccttggagaaaatggggttaagtgtacaagacctacaaccatgcactaccaatttggttggatttattggagatagcgtagctagcacaggaagaatctgttggaaattatttta

SEQ ID NO: 333720 - DNA, 963 bp, Cannabis indica
gagtatgaccagtgaactgagtataggctgatactgtaatacatcagtaccggctagagtacgactaacagctggagtatgaccattgtaccgagtataggctattacttgtcaatagtaccgtcgtacgaacgttcgagattcagtatcatgtgggacacggcagttagggttatggtcaggggtatgggcgtctgatcataacccgagatttatgtattttttatgaattatgcttttcttacggagtctgttgactcacagtactatgtttatgtgtaggtaattgcaaggccaggactgaggaaccatgaggacgaggcaatgaagattgtacatgtcggggcggttaggcctggtgtgcacaatcctcgggacagcagcgcttttgtagttagtcgctgggcgacaagtattttgtattagatagtaaactttgtaaagtgttttgtaatctggatcccgagtatttttgtatagaatattttataagtttaattaaaaagcaaaaattttaattcatcatgatttccataaacctcgttgattagcaacgagctgcacagtacgtttaaaaaatcgtaatacgcctatactagttagggtgttacaatctctttctctccttccggtttggttaccaccgtcttagtcactatgattgaatacttgactttctatgtgtgggcatgtcactcattcacaaagggttcgaataggtgaagaacaatgaaggaggtttgactcactaaggaaggaactctctcatcttggttttgttgaatgcattaatttgacaaagtgtcaaaagtggatgagatgagagcatcatgttccttttatagtgtctcaactagggcttaaggttgaactatatggattaaaaaagaataaaatattgggcaatcaatcacttgttggtcgtacactttaaagggcaaaactctagttatatttttgcca

SEQ ID NO: 333721 - DNA, 638 bp, Cannabis indica
aaaaattagatttaaacaaacttttctctcaagttctctctctccttcgaaacccctagaaccaggtagggttgttgattttctgcttcaatccagtgatttccagcaactcttagtgttattcaagcaaaggtaaagcctttagcaaactctctcttaagtttcttaaatataaagaaatagattttttgcatgaaatggtgattttacctactattgttgctgtagttgttagatgttgttttcagaagttaaagtatgattttcatgttgatttatgcatgatttaatggatgttaatggatttaaccaagttttgagttttagaactcaaacttggagctttaatggtggaatttgatactgaccttgtagaagtgttttgttacgttgattatgttctttgaggtctaaatagcaggtcttgaagttattgtgatgtttggtgttgatttgaagttgtagggaatttttgaagttttcctacactgaaccagaattttggttcagtaggacctgtagtgtaacgtccccgcttcaagcctccattgggtccttacacccacggagtaatggctcttatacacgagttcgtcactctgactgcttcatggactgatgactgaccctacagacca

SEQ ID NO: 333722 - DNA, 637 bp, Cannabis indica
tacattgaatagagactaaattatcgttttacccttcaatatattttattcttaaaacaattagctacgtgtaaataatatttcgaaaaatataatattaccaaaatgagacctcaatcacttaaaaatgtttaggcaagctctaaggaaaatatcgtttaatttacttctattagttatagaagctatatatattccatatctataattaacgctctcactcaattgaactaccgagttccaaagatgtaagtattggaacgatctttttggtcagctttaacgaacaagttaaagaactcattgttatggtattttcaacacgcaagtatacatatcgttttacacaagtattactcacaaaagtgaggtcgatcccacgaggattgtagttaagtactttaaaattaaatttttacttctatttggctaaataaaactaagagagaaaattaaaattagaaaaacaagaaaaatagctaaagtaagaagcaaggaaattaataaaggaaattaacagtgaataaaagctagggctttcgatttcaagtgtatctattgattatggcctaatatgattatcttcctattaccaatttctatacaatagcaggtttactaaggtaatttatagtct

SEQ ID NO: 333723 - DNA, 815 bp, Cannabis indica
tcaatttctatcatccatttcattcatttttcacaaaaatataaaacactacccataaaaacacaaatccgaaaatgggtttccaccattgataaactcaatgaaaaacttgcaatcttacaataaaccatgcaataatcatccaaagaacaagataaacccattctaaaatatttaaactcattttatccgaaaataaaaaaaattcagatttgaaaaaaaaataaattaatgggttattccaaatattttggagctctaaaatcaagtattctagctcttgataccaattgttaaacattcacatagattatgaactatctaaacatacattaaacatcattgttcataatcattaaatccaaaatcaatactttatttagagcatcacaaatgtaaaaacacatacctcccatattagcattttctattgttgctaagacaccaaaatcttcaatgtgaataaatctccaaggtggtagaagaggagcctatgaaagcaaaccttttttcttttcaccacacactctcactctactcatactaaacacatattaacccttttatagccaacacttaaccccaaggggttatattaggcttattgggctaatgagtataattagtggtgatctataatttaatggttcaattatagttttagggtgctcccatgtgcctctaatacattttatttaatttattttttttttgtagggtaactatttattaattattaaccatctcattatggtagtgaataaataattgagcacatagttaatgattgtgattatggtattatattagtccac

SEQ ID NO: 333724 - DNA, 518 bp, Cannabis indica
aaggtgaggtccttagaggaaactcaccgggcaaacttggaatccagggccaacctggccgcggagctgaaggagctcaaagacttcaaagaccaagccttaaagaaggcaaaaagagatgagcttctttctcctgtctcctgcagccggtgcgccaagcgttttgatgatggcgtcttcatggcctggtctacaaatgaccagaacatcaagcttaccttctaccccaacccgaggagatgatcgcaaagttccgggagaagaagaaaaagcttgatgccatggtggaggcgcgcatcggtcctcgccttcctcctcgcattgattaggccgcttcgagtttgacccattacaaccaggatttcactctttttctctctttttttttttttatttacagccaattttcttgtatttaagacaatatttacatagctgtttcttttttatttaaaggggagacaatatttaaggcctgtccccgggccatttgtatatattttgacctgcccttaggg

SEQ ID NO: 333725 - DNA, 525 bp, Cannabis indica
cgggtttgggtccggtttcggtcccagttctcgatcttggtcccaatccttgtcgagttccagttttggtttcgattctgagttctcggtcggggtccaagtcctagtctaagttagggtccgggtttgggactgcattcaagtcctgagttttagtccaagtattggtctgggttcgggtctaggtctgggtcccaggttctgatctcagttttggtcttggtcttggtccgagtttgggttttggtttgttctacattcaggtcagggtcccgggttttgattcatctttgggtttgggttcgggtctaggtctgggtccctggttttgatccctgtttgagtcttggtctgggtccgagttcggttttgggtttgatctaggttcgggtcagggtcccgagtttcgattccagtttgggtgtgtgttcgggttcgcattcgggttctgttcaccgaggttttcggcaaccaataaaataatacgagtttagagagctgtaagaaattaagagagagattttt

SEQ ID NO: 333726 - DNA, 998 bp, Cannabis indica
gatgatcgatttttctttttttgaaaatataattatgttagtgcataattaattgagcgcttatgtactcacctatcgtgagtctaagcatgtcaatttcattaatcataaattgtgaaaattgtgacgtattgttgttaattaatttaatctcatacaaagccattttttatatgattatctttccataattttttcatatatatgccttttgtaattttgagattcttttttatgaattttattgttattattatgacattctttttgggtatatactacggaaaatgtgtaataaaatattgatcatgatttgtgtatttaccatacaaattgtcacgacccgatccttaagctgtggcagatatgtaatatccataacttgagtggtcaaaggtcacactttgaaccttgtaggaagataaagtttataaatgatccttttatttatattacaaaatactaatgtaaaagtaatggattaactcctatattaataagaaaatattagtaacaaaatcaggaccactcatcagtataaaagaacaataatatccccacagttatgtaatcaccaaatagatagatttaataagtcaataaaataccaaaataatacttagcatccatcattcgtcatttctaactagtacatagctaatttaagtcatatagaccatccattttttgcttaaatacaaaatcagtttcattagaacatttaagaatagaataagactaaactaataacgacttcctttcccaacggtaccatcctcatccactagcatcaaactgagttcctggaatggaaaaaaatagggggtgagcttataaagcccagtaggaaaacaactaatatcaaaggacccttggtttaataaaattcctgcatggttagctttgtaaaaataaaatatctcatcaacagtatcaatatgtacaaataaagtagagagaccacaaataatcacaaatcaaacgtcaaatgcatatca

SEQ ID NO: 333727 - DNA, 1001 bp, Cannabis indica
aaatgatgggtttgcattgtactctgtatttccaaattaatttcggttaatcatacatatatgcccctcaagtaattttaaggggtttatgctttataattacttgtttgagaggaatgattattttattcacaacagaagttcaaaatatttcatgagcaatgtgattaacaatcattaatctcataagaacttccccagttcaattatttattttatcaatcttccacgagcatctggttttgataaaacgggttttgacattcaaggtcaatccctaacatactcccacaattgtttcaatatcatgggtcaatccttgacatatcccggggttcgaggtgaagtaatcctggttttggttgtttgtctttgaattctcctagttaacgtccagctttccaagcgacagcttgatatggcaaccatagcgggtcgatatctactcacatcgcaattttcttatttacaaaatggctttaccggagtaactgtcccttgtattcttgtgactcgctccctctcgagataattgaggtgtcccttcctcctacagatgagggttataatccttggtcgctcgagttattgggcagatcgagctgatcatggacatcgtcctgcccctttacatatcattgaaagtgtccttacgatatgagaccttttatctcatctttcagctgacaacactcttccgtggtatgaccaatatcctcatgatattcacaccgtttagttggatcccttttatgcctcgcatgtttcataggttttggctcgctaaaaacaacttcctgtacatgcgcgaggtagatattttcttgagttttattgagctcggtatattaaccataaagagtaatatatttgttgtgtttcttatccttgggcaagcttttggaatcgtcttttctctttgattctggggcttccgaatcaaattctccaacagtatcatgccccagttgttgggttttatgccctaaataaaactcttt

SEQ ID NO: 333728 - DNA, 734 bp, Cannabis indica
agaactacggagcttggccctttgtcctccgcggacatcgaaagaatggttcgggagcttgccgaaccgcggacaatcgagatccgtgatagcgagtccacagtgtctgctcgtgaacatcttgttcacaccaggcatgctcctgatgctgaagttgaggagatgggtgaggactgggaggctccagattgcgagtgggacgaggaggaggacgcagaagggagcgggactgactcaatggacaacactcaactggacgagcccttctcatgcgaggattcagtttcgcgagtcaccaaatctgacctaaccacccttacaaggttaaatatgctacgccatagcaccatgcgtcctcgccctacccagagaccgcatctttcttttaccaatcctgcgataatacctacagagaatgtggttgcttctatacccattctccgctgtggtgtatcgcttccttttcatccattcattgctgctattcttaagcggtatgatgtatccccctttcaactaaccccaaaaagttatcgcgtagcccttgggttttatgcgatgtacatggagtacgcacataaggagccttcgatggaggacttcagctatttttatgacataaagagcgtgggccttcacaacgacttctagtgcttcagtaaatgggccacttctgaaatcaatggggtggaaggcatggtctccaatatgggagattggaaatcgaaatggtt

SEQ ID NO: 333729 - DNA, 760 bp, Cannabis indica
agtaattagtccaattccctgtggttccaactcacctgtgtgagtttactacttgattgcgtatacttgcgtagtgattataaatttcgtaacaactactcctgaagatattcctcttcctgctttagataatgaggcacataccactggtcaacttaatttttcgccgggttcggatgaaggaaagaaggtgaaaagaaagaggggaagaccaaggaaggtttcgctacttactgagaatcctggttcggacaaaagaagaaggggaagaccggttaaatcatatgaagcaataggtgttacccagaggagcctaaagagaaggggaagcactgctaagtatgggggccagtacagaaacatgtggaacacagacttaattgatatctctatagatttacaaaaccactttgtggtagttgacaagaaacaacagaacggccatcgctgtgtgatacaagaaattgatgatgatggaaaggcaacacattcggatggaaatttgacttctgaggttttggtgggagaatcaagcaaggtttttcaatttggggctgtggagacttgcccagaaatgtatccaaactcgccatgaaaatcctcgcttggaactgtcgcgggctctggaataccgcgacagttcgtcaactgatggccttgattctgttgggattttataccctaaataaaacccattacaatctaatatgatttgtcaacaataaaatattagatatcatttatgcttacatgttatatt

SEQ ID NO: 333730 - DNA, 941 bp, Cannabis indica
cctctgaaactgcttctatcatccttggcattcctttaaatcaatctggtggagttgattattggtattggattgcagaaaagatgggttctattcagttcgaagtgcgtataatttgcttcaaaagcttaaacaccattcggatggctctgaagtcaatgtattctggaagaaattatggtctctcatggtgcctctaaaggccaaggatctcgtgtggagggcggcttcagattgtctcgccaccaaaaggaacttgtgcatgaagaaggttttggccgatagtacttgtcctatgtgtggagtttttgctgaatcggaatggcacattttggtctcttgcaattttgcttggtcatgcttcggttttgctggtcttgctgctgttgagagagactcattctcttctctgctggtgtggttggaagctactgctaatcgggttagcagtgttgaattaggcaaagtggtgatgctatgttgggccatttgggctgcgagaaacgatttggtttggcggcagcgtgtgagaagcgtgagtgctgtggtgacttttgctacatcgagtcttgatcaatggttgaatgctcaaggaaagggaaatattcccttgttgtctcctctcaaagttggagatagtttagagcggtgggttaaaccgatttcaggaatcaaactcaatgtagatgctgccctttttgcttctcttcataaacacggctatggttgtgtggtcagaaactctgttgatgaactggtatcagtttttgcaagggttaagaatggttttgaagctcccgaactggctgaaataatgggcattcgggaagccttgagttggctcaagaacaaccagttttcaatggccattattgagacagatagtctcgtgtgtgcagcagcaattagaagtgcagaaacttttgcttctgctttcggct

SEQ ID NO: 333731 - DNA, 752 bp, Cannabis indica
agagtgactcactattgacagatcctgccttgcaaactcctggaaatacaaaggtcccaccaggaaccaatcctgggaagccaaacacgtaaccacctactgtgggccaaggtgtgacatcccctctggctaggatcacaccaggtgtgaaagagacttggaataccagttcaacagccgatcaaagcactcctagcactggaatcccatccacaaccaatgctcaaatgacagtaggagatgatactgagatttagaacctctgcaatgcccttggactcatgtaaggtcacactaataccttgcatcatgatcaggatgagctccgtgctgcaatgaaccttacgttcgaagagcagaggcatcaggtcattgagtggagggatagggagatggaaatattgaaggctcagcaagcaaccatcaatgatcgaacaagacaggccaccgtactgatacagagagcctatcaagctgctaatcagcaaccaactgatacgtacagtatcccactgggcgacacagaagagattcctgctgggcataccgcccagactcataatggttaattgtccagtccccggtcacaggttccacctatgggcctagcggtaggcagacaaaccctatctgacaatcttttaggtggagttatacctaataattccatccaaactgacagttctagccaacaaactggccaaaccagtcaatcactgaggcaactgttggaatttattttaccaggatct

SEQ ID NO: 333732 - DNA, 859 bp, Cannabis indica
aagcaccttctctagataagcttctggcccccaaaacccaacccgcagcagaccttgcaatcaaacccagaccataccgcccttggtcgtcaaaaagtgcaccatgcacattaactttgacaaaagggaaatcaagtgctgttcattgctccataggtagtacaattggcccgcttaagcttacatctgtggcattaaatttttgaacattaaaccaatcaacataatttaactgagccattgccaccacctcccccgcatcagggtgtttggagttccaaaccaaatcgttacgatgagtccaaattgaccaacaaaccataccagcctcaagaacctcagtcgtattccacgatgccaaacccgcttcaaaccaacttgagaacaacattgcatcaggcgccacagcagtaattggaaccttgctctaacaactttgagcaaaagagcatcgcaccagcacatgcagagtcgtctcaggagcagcaagacagaacggacatgttgcagcaattggaacatgttttatggaaaaatgaaaccgagttgggagacttttggtagaagctctccacatacaattaagaacttttggagggagctgtaactgccacaagagccgccagaacccagagctatctgggatatctctgtttgattttattgattgaagcagagaatatgcactcttaacagtgaaaacccctgacgcatcatgtaaccagtaccacaaatcagaactcatatgactacttagcagaattttccacaccaaagcttgatctctagcagtgagcactgttggaaatattttaccaggatctatatttactatcaagtatgtttgattaacatccta

SEQ ID NO: 333733 - DNA, 834 bp, Cannabis indica
gtcaggatgagagcattcatcaaatcacaagataagaattcttggagagctatacttacaggctagtcacaacgtactgaaagtgatgatgaatgtaatactaaggtaaaacctgaactcaattggactattgaagatgaaaaattgtctggttatagtaataaggctttacatgctattttaatggtgttaaggatttattaaattgatgtcatcttgggaatctgtaaaggatgcgtgggaaatccttcaaactcagtttgaaggtactgctgatgtaaaaagatcacgtaccatgttgtaaactagatttgatgaattgagaatgtcacaaactgaaaatttgtttgatttttatgaaagattatttgatatttctaatgagttttttgccttgggagaaaaattagatgaatctgccttggttcagaaatttttttgtgtgcttcctgacaggtttgacgcaaaattactagcaatggaagaggcaaaagactttggcaaaataaaggttgaggaactcatgggttctttaagaacttttgagttaaatcaacaaatcaagaaaaagagtaagcaaagttccttgaatgagaaaagcaaaggtattgcgtttaatgtttttgaaaatgttgtttctgatgatgaaaatgatgatgaaatgaccttgttgacaaaaaatttccaaaaatacatgaaatttgttggaaataaaaagaatttttcaaaaactccaaaaggtaacatttctgttaaccatccctctaaatctttttcatctaaaaaggttattcaatccagagagtttgaagggtatgtgttggaattatttta

SEQ ID NO: 333734 - DNA, 550 bp, Cannabis indica
tttatccataacaaaaattctaataaaaaaagtttagtatttagtaactaattataactagtcactacatatacttttatattgtaactaactaggtttctcacaattaattcatattaatttatacattactataattcttgttttattttaggtcatgttattaagttgcataagtggtaattaactaactagggtagtatttagttgattggaatggatttgggaatggaataacttttcctaaagtgaaaatccattcatttttttggtttgtcatttataattgcaaagtttatataaatgtgtatataattatttgtattatgtcacctaatttcttacaaccagctagtaattaactagttatttgtgttatgtacttttccttcaatatttatgcttttcgagtaaaatttatcctaattttaccaaaattttggcagaataacaactgtaattggacgttttcaaaaatacttaaaataaccaacaaaacaaataaaataacattaacattataaaatttatccacccatccgaccgcagt

SEQ ID NO: 333735 - DNA, 670 bp, Cannabis indica
tttattggttttattaaaacatgggttaattatatagttgtttgttgtgttagcccatattgttagtgataaatagttgatggacttttctagttaactgaagtctttgatgtgagcaggcctagtccaactagggttttgtagctaagtctcgtccctaactctataaatacatattgtctcatcacaattgtatacttttgataatcagataaataaaacttatttcgatttatagactcgagaaggaagacttgattgatagtattgcactatcaaattacaataattattatagatcaatcaagtacgcatacttaattattatttattattattgtattctatattaattttctaacagatggtcctatatatatattttttaatataataatttttataaaatatcaataatgaagcacaaaaagtcatcactggtgtgacagtcaatagtctcgtgtaagagaaaatattgggtaagctgtacaaatctcacattgccaggagaaggtcagtagtggatgattctgagacggtgtaggtatatgggactacacagttgaagagggcttaaatggatttattggtactacctatatcaacaaggtgcatcttgtttttcggcagcccataacgaaaaaactccacaattaagcgtgcttgactt

SEQ ID NO: 333736 - DNA, 891 bp, Cannabis indica
accaaaatccaccagggtcggtcagcacaggattgcattataagctgttgggcagtccaccaccacaaatgtgcagtatttgaaagtgctttggggtgtgtctaggcacaaggtgactgggagcctcacttttcccattgggataagtgttgttccattaaaccccgtgagctgggaaccgcttggtgaaagatctcggtacatcaggcctattgctgtgaaggcttctttgaataataatttcacagaactcccgttgtcgattaggactctagccacaatcttattggcaatgggagtcgctatgaccaaagggtcatgatgaggaaaatacattgtcttggcgtcctcttctgtgaatgtaatgggctgatccattagccgtggcctttgagctgggagttgagtaacctcccaaacctcactgtgtttcacggcccctacgtaacgttttagctccttccaggtagttcccccgatctgaggtcctcccgagatcatagccactctcccgttgggtcttggcggcaggccaggactatgctgggcatctccggggggagcaattggggccaatgctccggctacaccccctggtgcttcttgaggcaaagctcctgctacctgaaccagattgaggtgaggcaaccggttcttgatccattcatagagatgtcccaattggatcaagttttcgatctcgtccttgaggtttttgcattcattggtgttgtgcccaatgtcgttgtggtactcgcatcttttattgggatccctctgagagttgttcttgtacagaggaggcggtctccagtagtgcgtattttgcctggtagcgaaatacacacgctcttgtgagtccattagctctgtgtactgggtgtactgggg

SEQ ID NO: 333737 - DNA, 738 bp, Cannabis indica
atcagaacacttttattttttagtacctgaggcactaggcccgttaggaacctagtgcacccagcgcccaagttgacacattgtcaacctaaggcgcttccaatcacaaattatctcgagcattttattcttctccatctaaaatgaagaatcaagtgctttcgagaaagaaacgaattaacttgcaggccaaaatggggatccagcccccaggttgacctaggcgctgggcccagggcctaggttgacactttgtcaacctaggcaatttccattagcaattcaaaagaagtcttctgggcgaattctccatttttttcaataattaagatattgatgcttttagggaacaaacagagttatttgggagccagaactgagacccagcgcccaagttgacctaggtgctatgcccagtatccaggttgacctaggtgtttcccaatgcctaggttgacattttgtcaacatgagctattttcaatcagatttttcgagaagtcttctaggcatattctctgttttgacaaataactgagatatgggtgtttccgagaatgaaatagaaccaatcaaaagcaaaaatatagatccaacgcccagtagcattggtgttgggccaacacccaggttgacattttgtcaacctaagctatttctagtcatttttcccgaaaagtgtttcgggcatcttttttttatttttagaaataacgaagatacaagtgatctcgggga

SEQ ID NO: 333738 - DNA, 516 bp, Cannabis indica
acaatattatttaataattaatgctatagtgagatttttctcacctaaaaactcgagaccagactcctatttggaggacacgtgtattcaatttcccaaaagaaagctgagatgtcaatgagagactcctcgagtttaaacctcgcctgaactagactcagcgagatgatgcggatatgaccaagtctaatcgcattcgtgtggctcgcattatgcaagaccaagggacggatttaactcgcatataccaagatatatgcgagtatcccctcaatcctcccgcgaaaaacatagaggtcgattccctatgatgcgagctggtcccgatgacccagcaaccgcgataaaccaaaacgaactcgcatgtcctggttatatcagctcgttgtgcgatgtttgataaagcgaccatgaaggaacgcagacatcttagacttacttagtctcgaatgtcctgtaggtctgcgagcttgtacaagaatgtgaacagccaactcgcactatagaagtcgcata

SEQ ID NO: 333739 - DNA, 509 bp, Cannabis indica
ggttacgaagcttgtatgttcttaatttggaacgtatatttttatcaggttatatccagaatatgcgtccataaatgacataagtttgtgcccagcagttgcatccactaactggtcgatcctaggaagtggaaaacaatcttttggacacgccttatttagatcagagaagtcgatacaggttctccaagttccgttaggctttgggacgagaacaggattggctatccacaagggataaaacacctcgcgtatgacgtcattgactaacaacttgtcgctcttcgctgggtagtttgaatcaacatttaaatgatggcagataatgatagggttgatccctatcatatctccatggcttcaggcgaactgatcctggtttgccttcaaaaagcttattagctgctatttgagctgctcgtccaggttcttcccaatgtatacacactttgtgctatttcgtgcgtcgagaataacctcttccaattctttgattggttttagcaggt

SEQ ID NO: 333740 - DNA, 949 bp, Cannabis indica
atgtttacgtttttttagcttaaattattgtaaatcagtgtacgaacggattgacaatgaatgcaatccttgtgtaaattataggacacttgctttgtatataaaggagtgatccaccgtgaaatggacggatactgaatcctttgtaacagtggactaagcagaccgtgatctgactgaaccactatattccttgttctttgtatttctagttttttgttaagtacttgtgttcccggttcgagtactcgccgttctaggttgaatactcgcacttattcatattattattattactattattcattttgatgttgtaaaattccttcaacaacatttggcgccgtctgtgggaagcgagaagtactttcttgctaatttagaaggagaatcataatggctgaaaaccaagcaaacgaaggtcttaacaacgaatccatcgatatcagaatgatgaacgtttcattgtcgggaagcagagtgccccccgtagatgtcataaacggcggagtaggtcggggtaatgtgagatctctcaatctatttcctgaaactactggccctcacgccagggaaacgtctacaccggcagccacaacgggacatttcccaccttttactccagcggtggtatccgaaggtattatccagctgaccagcgatcaatacactgcaattcaagaccagctacgtaccctgcaggccgaagtgatggatagaacaggacttgacgtcctccccgcgtacccgctactcgcacagaaaaccctcaggtaactaactctagacgtcgtaataatcgtactcgcaaggaacggagcgccaatcaggagggacttgatttgaaccagtccgcgagaaacctcaatcaggaggcccagatggaggagaatcttgaatgacgtaatcctcgcagcagaccccagttgcgagacaacgacgttgaatc

SEQ ID NO: 333741 - DNA, 2160 bp, Cannabis indica
atatcaaagtcagagttgtaattcaattagattggtggtcaactcacaaccgttaatctagaaagacgaagaccgaatccacctagtggacactataaggtctcccgagggtaatagggttccaaacctcgaagcataaatatcacatggcttgtggaaaccttaaatatctctacttgacacataagagtgagtacctctagaatcaatcaacacagataataacatccattaatagacaactgacctatcacaactgacggactagcatcagcgtcagcctgagtcatggtgaaaaggcaccccaggttctgggtagtattcttcttaggctcctctttcttggcctgaggacaatctctgataaagtggcccaccatgcaacactggaaacatgcctttgctcgacactccctaggatggtgtttcttgcatataggacactcgggatatgatcggaatgaggacccgcgaccctgacgaccacctctatttagccaaaactttctattaccctctgatgctctggaagcctcagccttctgtttgtgatcagggttgccactgtcggtccccttactggcgttaccactagcaggtggattcgatgtcgtgacggcatcctttacagtctactctttcgcaacatgctactcaacctcttcagcaatcaaggctagctctactactttcttgtacagagtgtcatgtgatgtggtaatcttcaagtcccgactaattgtggcattttgtcctctcacatacttctgtttcctggtgaaatctgtgggcaccagatcaccagcaaacttcgacaaccgatcaaactcaagggtatattcggccactgacatctttccctgagtaagcttcacaaagtcttccatatgtgaagttctcacagcaatgctgtaaaaaatttcttcaaacagttctcacagcaatcccaaagtctgacccactatgtcccacaagacacgggcatggtcttgtaacatgaaggctggacaattcactctctcagttcctgtcaccaccatattatcgaggatacgaatattagtactcatccactgctcagcctttttttatatcaatacctcccagaaaagtcggaggctacagcttcacaaaccgctcaaacactgagtctcggtgcggcataatgtatccctggttacccaccactgacacaggtgctggtggtaaccctttatccactgggatagtgggttgccttaaacgttgcaactcttcttcttgacgaagtatgatacctcacatttctaggaacatctgctgccagtcagcaagtggattagcattaccagcccctgcattatcccccggattctgcggaggtgggggcagtggcggtggattagtttcgggagccccggggctctactttctcgccctgtggtctagatgattgtggagggtcaattattagtaccactgtaatcaacaatcccagcgacttaagcaccaataccacacttacgcacttattgccttaaatcctaactcatctatttacctcatataatatttacttaaacaaatagcatttaaagcatggtatcacataacacatacatgttggaaatattttacaaggatcttagatatactaacaagtacgttatttaacatcctaaatatgaacttctaaaacgatatgaaataaccacatataaagtatgagaaaccttacagtgcttgcagcggaatataatgtttccttccactcagatctctaacccttgtatcctttcagtcgcagagtatcaccaagatctgagatcgaatgtccttctcttgaatctggattcttcacaatcttccacattatgattgaggtaccacttgatgtgtgtgggcactcactcactcactatgggcttcgatttttagaagtgaagaagagagagagaaggtggcggctaggcttaggaagaaggctttcagttttctttgaatgaataagatgcatcatctttttcctgaagccatcactacctatttatagtcaaccacctagggttaggttagaattatttggcattaaaataatgaagaaataaatgattaatagcctacatatgtggccggccatgtaaaggataatgggccccacttttgcaaatttgctatttt

SEQ ID NO: 333742 - DNA, 535 bp, Cannabis indica
ctatcggcaatactatatgcgattggtttataattgtcgacaatactagtaggcgacgtatttaaagttgtaggctaattctcatgcttctaagttttacgcgtttcggatcagaatgtcatttcgccgcatcttaaatttaattttacttcctattttaatttatttccctcctttaagataccctaacccccccccccccctccaaaacaagtcatatctcagttttcaaagtttctctcctttgtgaccacgagtcacactggtcgtccctctcctttactctctctcactctgcccctttcctacgctctctcatggtagcataaaggtaagcacaatattctcttattttttgtttaaatttctattattcatgatttggtttgttcatattgatcggcatgtgtgttcgaactaaatccaaagcttgcaatgcgaagaaagtttcaaggatcgtcaagtgaaaagcaatccgaaacttatcaaagaaaattttgacgaggatgaatatgagcacaacaaccgtggagga

SEQ ID NO: 333743 - DNA, 570 bp, Cannabis indica
gaaaccaaaatagttcgaaagaggaagtgaagatggacctttctgctacatgggtcggtagtccttactatgtcgtcccaaaagtgttacggaagcattatggtccagaatgtgatgtttggagcgctggggtaatcatttatattttacatagtggagtgcccccattttgggatggtaaggatcttatgtttcatatcttgttgttttacaaattcattaatcatccatagttgtggacttatatcgattgtacctgctttttaatggatcaatcagaattggagcaaggaatatttgagcaggttttaaggggagaactcgattttatctctgaaccatggcctagcatatctgaaagtgcaaaggatcttgttcgaagaatgcttgtaagggaccctaagaagcggcttacggcccatgaagttcttagtaagttaatggtcttgattgattattatgtcaggtgacttaatttgtttagcatccatagtcatacattttatttttctattgtatagatgcatctttttagtctaaataagcaatatcatttgacactggcatgat

SEQ ID NO: 333744 - DNA, 754 bp, Cannabis indica
tcaaagataaactttgttatgcaagcccatttggaaaacaaattaaaacatcttttcattctaagaaagagatttcaactactacacctttgcaattgcttcatattgatttatttggaccttctacaatttctagtcttggttgtaaatactttgcatttgtaatttttgatgacttttcaagatttacttggtttattttcttgacacttaaaagtgatgttttggaaaatcttgtcaaattttgtaagagtgtgcaaaatgaaaaaggatattctattacctccattgggagtgaccacagtggtgagtttgacaatgatgccttagaatttttttgtgatgaacatggttttaaccataactttttggctccaagaaatctacaacaaaatggagttgtacaaaggaagaatagaacaattcaagaaacgactaggtcgatgctaaatgaaatctcactaccaaaatatttttgggtcgaggccatcagtaattcttgttatattttgaattgtgttttcattaggcccaacatgaataaaaccccgcatgagctttggaatgggagaaaacccaacattggctattttagagtttttaaatgcaaatgctaaattttaaacaccaaggataaccttggaaaatttgatgcaaaatccgatgttggaattttatagggaattaaactcatagtaaagcttagagaatatataacaaaagaactaattttgttgaagaatctattcatgtt

SEQ ID NO: 333745 - DNA, 825 bp, Cannabis indica
tcataaagtaaaagaaatatgcaatatgaattgttttatgatctagagttctgaccctcctttttaaaaattctaatggtataaactagaatgtggtgatttgagcattagtagtagcttttcccatttaaaatatgacgacttatagttttttttttcattccaaataatatgttcttctaacttaaaactaggcttcacatatttgttttaatgcttctattatgtcgtaggccacccttgggttcaagttggtggtgttgctcctgacaaacctcttgattccgctgttttatagcgcttgaaacaattctctactatgaacaagctgaagaaaatagccattagggtgagtatttatcagtaaactaaactatataattatagcagtttaagatgtgtacataaggttaatcattcattaaattactattggttagcttttttatttccatttatatttattgcaaagcacaagcatgtattgcaattaaggtacgattattatactacgatccatgtccatagagaaaaaatgtacattttgattatgtttagggtattctattctttagtgcatgacttgcaattgttgtccatagatgtcgataatagtggacagatcactcttgaggaactaaagaatggtttggaaaaggtagatgcaaatctcaaggattccgaaataagtggactaatgcaagcggtaagtaatgattctgagtaatgattctgattcagggaactgtaataaggcttgtaaaaattgtataatcaatcttgtttgctatttattgaaacctattccggttgttttgttaaaaa

SEQ ID NO: 333746 - DNA, 516 bp, Cannabis indica
gggttcgcgtcctgggtcttggtctaggttgggtgcgagtccctagttccaatcctgatctgagtctgggttcacttatgggtctaagtcctttgttctgatcctcgtctgggttcgagtttgggtccgggtctgggtctagctttgggtctgattttaggtgtgggttcgagttcgtgtccgagtctgtgtccaggtttgtgtctaggtctagaccccgatctgggtctaggtttgggtccaagtcaaaaatgctgtcccgactgcgggtccaagtttgtgtctaagtcaggatctcggtcaagatctaggtccagtatttcaatcccagtctgggtattagtccgagtccaggttcgtattcggatctctatctaggtcaaattctgtgtttgggatcgcatcccagatttaggtccaggtccgggtctcagttcgggtccgggtagacgaccgtgtccgagcccgaggcccagtctgagtttaggtctgaggctaggtctgtgttcggttcta

SEQ ID NO: 333747 - DNA, 665 bp, Cannabis indica
gtcgcttcttcagccaaactgggcgttttgacccgtttttcagccacgcgggtccgacggacgcgacccaaacccaattgaaaaagacaattctgacgaccaaaaaggtccaaatcaattccaaatgaatctaaatgcaaaaattaagacattcatatagatttcatgctttgaaaacacgtaaaacaaagactttaaaatcaccaaaaaatttcggtccgaaaaatattttccagaatattatgagatttctttgtttttcaaaatagagtttcatgcttagaacaatctatattaatatatgaatgtattgatacataatgtataatacatatataaacatatgtacatatatatactgaaaaaatatatgtagtatactgtatataatgtatataaatgaaatgtatatatgtatatatatgtatttagaatttatatatgtaaacaaataatataaaataatgaatatgaatataaacaaacgtatgaaaatgcatttatatatgaacgatatatatataaatatatataaactaaaacccgatcgtatacgtatatatatgaatgaaacttaaatataatcaagacagagataaaaccgctctaataccaactgttagactataatataatatatgaaatacaacatatatataacgata

SEQ ID NO: 333748 - DNA, 519 bp, Cannabis indica
tttatggagataacaggcaagtagggaacataataatggttctagtttatagtcattatttttttggttgtcccgtgtgaatcaaactaagtaccacaagcttggttactcctagttatcacaagtttggctactcctagttgctaatatttgttataggaagtttttcctttaatcttgatacgatactttgttgtgatctaacaattgtagtttctttatttgtgtgttggaatataaagggaaatcggaagggccttctgggagcacacagttttatctctccagtctcgtggtatcgaacatatctttcgggtacaaattactgaaggcggaaggctttacgactgtggaaccaagatatgttcatggaaggacatatccaggtgggattggcccacttttcgtttgttgagggtcccactgataggtctgtggtgctgacttggagtccatgtatccaataccaaaaacgcgaataacagttataatttagttcgcacgtcatcaaggccaaaa

SEQ ID NO: 333749 - DNA, 770 bp, Cannabis indica
gggaacttcatatgccccgcagagttctgttataactcccgccaaaccaaaaccacctcccgtggctccttgtacaatctggtcaatgctatgccggatgacttgtccaatatttatgttgtaccccttcataatggcgtacacatatttcaggcgatccatttggacatcggagaagtgcttatttggcaccaaccgagcacttacaaagtacagccatgttttcgccactgggtttaattcacaccgatataggatgtttggcgacccctctgtgccatcgttgtcgtggaacctcaaccctggaaatcccaccgtctcagccacatccaccatatcaaactgctcttcctcctcaataattcggaggcgttgctcttccctagaataatcttggacagagaacatcacattaaaagcatcagcagtagcgggaaccttctttccacgcacctttacctccccattccggtggtcgggccaattggtgagaaattcacaggccatagtcacattagcccggcaccgagcatcaacaaagcttccccacttctctcaatttgggctcgaattgtctcgaaccgtggttgacgtctcaaaggattttcatggaattcaatactccggtcttcaatataagccctatttttcagcctcatgaaacgattatgggcctcctcattaccaaaccgggttctatcgaaacccgtatttggtgggtttgatgacgaaccctcttcaacatgcctagttctttttggtgccatttt

SEQ ID NO: 333750 - DNA, 801 bp, Cannabis indica
cctttggtcgttacaaatacctcataagatcattaactttttatggagggctgcttcgggtgtgcttccaacttgttttcagctccaaaaacgtcatgttcccatcaatgttgattgttcgctatgtaacgctcatgtaaaaaccgtttaacatgcgttggtggagtgtgaagctgcttgaaatcacagcatggttgacgtcggggctggggctgcaacattcagcaactggttgttggggatcttcggcagaggacacgaaggtgaaatggaagaagtggttgtggtgagttgggctatttggcgcgcgcaaaattaatttatttggaaaaagaagagttggtctgcatcaaatattgttgcatcagctaggaacatgcttgatcagtataaatttgcttaaggaaggaaggatcttttgttgtctccgctgcataatgggggcgaaatcttaagcgttggattgcacctgagttaaacaagatcaaagttaatgttaatggggatttatttgaacaagaggggcgctttggcatgggttgtgtagctcggaattgtcatggtgctatagttgaagcattcaagaaggggaagattggttgtgttcaactcgaaattgctgagataataggcattaaagaagctttgagttggattgcaactcattcgtgggatagagtcataatagaaacagatagcttggtgtgtgtccaagcgattcctatcagtatttttatgccttcacagtatggtcttattattcaagatgttcgaaatttgcttatggctctatcttttgtt

SEQ ID NO: 333751 - DNA, 629 bp, Cannabis indica
aaagcatatggcataataaggtatattgagaatgaaagtaattaaaggaaacacatcaggctcaattaagtggttaaaattttgaaacaggctaaggctcaactttgggtatactaaggacaaaattttacaggtaagcttaaaaggctcaatcggtcaaaagaaaattgccttaatcattttccaagcaacaatcatcaaggatttggcttcaagagagtaagtcacacaagttctattccatgtcaagcaaacattccacaaactcaagtagaacaaaagtgatactatccaaagaacaataatttacatctatatgaaagaaattttttacaaggcatccaattcaatccaaagagtttatgaattaagcacgcggttgaaatttcaattcattgcacacataaacaatagcagttcaatcaatatattatcatcagctcaattatcaatacatgaaaactcaaaaactaaaactgaactaaactaattaacccactaaaaacaaagacaatgaaaacataaaaacttttaaatccctccccccaaactaaagagtcacattgtccccaatgtgacataatattcaaggtgagaaggacttacctgaacccccatcagaaggggtt

SEQ ID NO: 333752 - DNA, 679 bp, Cannabis indica
agacaactaccacatgcaattgtggagaggtcgcaacagaatgtttgaaactcgttggcatgatactaagattgaggggatagtccatgctgtatgctttgtaccctaggccaagtttgcctgagtgacatcgtaagctgcaggaggtgcttttgttgaaaggggagcttgttggcaggaatgtggaagtagtgcaaagaccgtcagattcttgttagtcacgacagaggtcgagagtcgataaccgagatggttcaaatgggatagacatgggatgcctcagttgctacattgtgtgtcgagagggacacacatggagaccaaggcaggcagatcccgcaatcgtcagagaatggttgtacttggaggtgtttgcatgtgacttgtatttgatccatatgaaagcgctgaggaagttgagtggaatgtgttggcttgttaaagcgccagagggcgtaagtcacacaaaggcatcaacaaagatgcggagttgcgcaatgaatgcatcaaagaagccagcagggctgagaagatcgagcgcaagcgttaagatggcgctagagtttgagtggaggccagagggctgtgccaatgagacttagtagtcatgtttacttgcgaaggtcaagaagtgtgctagagtttgcatgaaggccagagggctggatcattggaactt

SEQ ID NO: 333753 - DNA, 641 bp, Cannabis indica
aaaataatttccaacaacatcatatatcaggaattgtgccatgaagttatgctcgttggagcttgtccaactgtgaggggtaggcggatttgtcccagaggcgcaactccttgaccggagaaaccatagacgggctgaaggcatggacttaaatctttgagccggagccccatcttctcgtaagcagtcttaaacaaaatatttgaagaagccccattattgatcatggttctggacaccattttgtttgctatctggacttccatgactagcaggtacttgtgcggaaatcttatctggatagcatcttcatcgccgaatgttatggttggctctcctgctcgtggaactttgggattcctttcttccacggccagaatgacttcttcttgctcgtattgagctgtgcaggcatatcgttcccgagctttgcctgtgtctccatcgatgtgcgggcctccaatgatgacttgcaagtgtccatctattggcggaggcattagatcttaattgttctgaccttggttggccttgacatacttctgtaggtgcgggttgtttttcttgatcaaagttctatttcccgcttcaagttgtagcattcgtggtgtcgtggctgtagtttccatggaaccgacaaa

SEQ ID NO: 333754 - DNA, 704 bp, Cannabis indica
gtgtttgcaaaccttgttttcaaggtgttgaccatggtaaacaacataaagtatcgagctttattgttagcattctgccaacgctcaaacttttccttgactgccttggtcgcattctcacctggctgctcaagagcctcttcagtcagcacaaacagggaattttcaccaatgagagcaatattaatgttctctctccatttgataaagttagctcgattgagctcgttgtcagtcaacagtgacaccatgggattgttcatagtcatagtggatacaacaaatatcaataaatagaagtcaagtaaggtttaacacaaaatcatatttagaaattattcgcacttagcaagtaggaataacaagtaaaaatactaaaacatacaaccctaaataatttccaaggttttcaacaaactgataccagtgtcctgtttaggcgagagtcaaagataccatttattgaatagagtagtcaactcatctaaaataacaaacattctagcagccttttattcgatcaagataagaatctagcattgtgtagtttaggcgagagtcaacgccattctatcttacgagcttccaccattgtttcatacttttgtaagtcttactcttagcagccaccattagggtgatcagtactaggaataaaatacttaaaaataatacttatctttcgagattctacggcgttaaat

SEQ ID NO: 333755 - DNA, 1529 bp, Cannabis indica
ttagttgttcattgcacgctaaggactttcacggttgatacgtgtcgctttctccggtacctcgctattcacatttagcgatatatgatttctcgctaatatacaaagtgctagcttgtacattgattcctcgcctaacacctcacagtcagcgagttacaaatatactctgactcttatgtaattaatgagttattccataagagcgatcgcattgattcacattactttcatcttgacacgtgtccttcattgaggtggcagccaaattttgtgtataacactatccatacagacgtctacacagagatttgggaggcaaatgttatctcgatttttgcccacctgacatggcattgcttacgtggacaaatcaccgccatgtggcaatacaacttaccaacaagaaggtcaagttagcacctcagctaacagggactccaacactcagacaggacatcaagtgatagactagcttcctcacaagaactagtcggccacccctgtcaggccctatagtcggccaacctctagactatataaggtcggctgaccactctgcttcttacaagtgtcttgccggccatgtaaaggacctggcaggatattccgtacaattttacacatggactgtgagttgggctgcaaattgggccctaacagcccaataaagtagttagaaaatatataggtttaaggacattttagtcttttgtaattaatcaatttaatatactaatatctaagggtttcaattgtaaattagggttttggatctcctaaataaagagcctaaactctaacctaaagaacctaagtctaattctagcctccaagctattagttgctaagcctcattctaagtccaagtctctaagtctgataactctctcttcctaactctctcacacgcccatatagcattctaatcacttgatatttgccaacattaattcttactttgtatcctcaagggagctatataagatcccacctataatgatctaaatagtaactcggtatcaatacaacaaaaaggggagtaggtcgttacccactatctaagggggccaaacctctataaaattatgtgtgttctttactttctaattctaattgtgtaacacgtggcaaacatcatattcatatgaccccactgtcggttgatcactttttgaggtcaatacgatgtacattatctacagatgatctttaattatttagattgaaataatggataattgatagtctatctatatttggaacatataaagtgttctatgtaaccaggagtgtgattccaaatctataaatgagtcaggaggaattaataagttaagaaatttacttagtaaattttggatctacttattgagagcttggttacataagcccgtggtccccgcatcgtttgagataatattgtcttgtagactcaactaattggttttaattaatcaattataattctaactaagactatgtcttgtttgtgaattttcactaagcaagggcttaattgagaagaa

SEQ ID NO: 333756 - DNA, 817 bp, Cannabis indica
tgggctgcatatgagcaagtagagtaaatactcaccaagaacattttctgtatttataagggtgaaattctcccaagtatattctctgtattaaatacatccataaataacaaagactcgtggactaaggctcattaacgccccaaccacgtaaaaatccttctctcactttcttacagctcggtaattttataatattttattagttgccgaaaatctcagtcaacaggcttcataaagggatttggccatgaggtgcattctaagtcattggatctttctaatcagtccatttagctctaaatctaaatctaattaatccctataaatagaacattaagagttttgattcatgtagatgactctagactctctcttatctgacaaactgaatcaaaagcaaacctattattttctattattattttcgaattccgcttgagatttcttcatagaattttgtggtccatggtgaatttagagtatgtccactcatgtcaaaacaatacctaacatagtgaggatgacagtgtctaaccatattgaaggagagaaaatctaggttttagatctagataatgcttcgctgcagacataattcaagggttagagatctaaatagaatgagtcattatatttcactgccatcaatgtaagaatttcttaatcttttatgtgtttatttcattatttttagaaatttatatttagaatgttagattataaaattataatcaacatacatgtttgtgttagagagtctcacattgctaatgtgtggaaagaaaatagaatatataagaggaatggactactc

SEQ ID NO: 333757 - DNA, 543 bp, Cannabis indica
ttaactttcttccaaattactgtgattccttccaaaaaaccattaaagcttctactctcatcaattttttttaattaatttaccgaatttcttcaaccatttcctcctaatttcttccaaactaaggcaacaatagcttttccaaacgaaattgattcgaaccaaacaaaagtaacataactggttccttcaaaaaaaaaaataaatacatctgctccaaagaatatgaaagctttgttctactctcttacacttttttaaatttgtttgtagtaacatatcattttatttggtaaaattattttctaaataatttgtattttaatcaatattttttttactgttgttctatttatatatatatggtatataaatttaactgcaacgtatgtatattatttaaactctggtatatggtaattatttgtgttgtttttgatattattatgcaatatttcacatttcataaaataggatatatcattacatttgatatgtcatttctttgttttttttttatttcattcataatatattttggta

SEQ ID NO: 333758 - DNA, 600 bp, Cannabis indica
accgcataaacaaaaaaaaactagaaaagaaatagagtttaacacaagcaaatattaaaggaaaagtcaagcattgggagcagcaggaacagatccatccgcgactttgctgaccgcctcgttcttgacttcctccacctccgcgacctcagtctcctcgagaagattccccccaccaccttgagttggcgtaggcgacatcgcacgaaaagccttggccatttcagcggcttctgctctaaggattgaaaagtcgaagtctggaatcttggagagagtggtatagatgtagtctgagaccgcctggtcatactgcttttttccattctccttctcagttcccaagtcgcgagacatctcttcgcttttcgtcttggcctcaagctcgacttgctctttggccttgcgaagctcctcgagctctttgtccttagaagacacatcttgctttagcttcttaacatcttcttgaagctgagcaatatgtttcttcacgagttcaacctccttggacctagcagcaaaagccttcgagaacatggccataaactgcatagctagctccgcggagcgaggcagcagctcctcagtaggactctt

SEQ ID NO: 333759 - DNA, 655 bp, Cannabis indica
gaacagcgtacaacacccagtcaattacattagtaagagactcatcgaggccgagggccaatatccgttgatagaaaagctcgcctactgccttattctagcaacaaggaagctgaggtcttatttccaagctcaccctgttcgggtatacaccgaccaaccactacgacaaatactgcaaaagccagatgcctctggatggttactcaagtgggcggtagaattgggtcagtacgaaatcaacttccgaccccgaacagctatcaaaggccaagccttgtctgactttgtggtagaatgcacaggcaaaaaagaaggcataccagaaagcaatcccgagccactaccacaaccaagtaataatgacgaaaaaccgactggaaactacatgtggatgggtcggcaacagatcaactatctggtgcaagaattaccctcgtcacacctggggagcaacacctgcacgctgcagtcaagttcggattcaaggcctctaacaacgaagccgaatgcgagactttaatcggtggacttaagctagcccaggaaatgaaggccgaactcattgacatctacactgattcacagctggtggtaaatcatgtatccagcgaatacgaggctcagggagaaaaaatgatagcatatctgagca

SEQ ID NO: 333760 - DNA, 837 bp, Cannabis indica
tccagttcagttttgtcaactgaagaaaatgagcgctggtttaaacctgaggttggatctgtcaagattaattgggatgcagccatttttagtgtagtgtttgttggaagctgctggagggagcaaaccagggtgtgttactcccctgtttgcagaagcgattggattgaaagaagtcctaagttggatcaaaagtaaggttaatattgcaggctcttcgaaccagcttccagctacttcagctggtgcaagcaatggttacttctgttgatttactttctcctgctggtttactaatttcagattgtaaatgtttgcttcaaaatttatggaatgttgctatttctttagttaaatgatttgggaacaaggtggctcattaattagctcgttcttcatgttctagtcctgattgtattatcaatggggtgttgtccctgttgagttgaatgccattttgttggcagagatttaatgaagttgatttccttcatctaatgaaataaacagatatattccccattggagtacaccgattaatatcaccctttcatcaaaaaatttggttaaaactcttcctcaaactttcttctctactctagaagaactgttctatctatttgagtttctatctattttgtattctaattaatgtgaagtatactaataaaatgtctctatccaaggtagaaaccaaaataatgcatcaccaaaaccacatatatacctcaacaatttttaagcaagatgagacttgtaaatattgaaagaaggaaaaaaaaatgttgtaagatttcaacatatggagataaatttatgatatattgttaaaaacaa

SEQ ID NO: 333761 - DNA, 2026 bp, Cannabis indica
ttcatggaatccatttctgaatccatgccggctgaccattgtttctgttctggacttgtcattgcatgtttataggttaatgggtcgtcatcaatactgtcaccaacgaccatattgatttcaccattcaagccataacgagatggtttagtagaaactctcccactacgacgaggagcggtgaccttctgaacaggaactttagtggtagttctctcagttgtttcaactgagggagtgagattatcctctacttgagtagaagtggatggaacattagaaggagttatatctaaaagcatttcctccaacactactttgctttgtggtttgaaattcataatatagtcatcaaaatgggtaggtgggcagcaacgttataacactgtctggcctctccttggttgcccctcatggtccctatcccagcctcttgagtagggaactttaggcacaaatgcctgattaacgtcaccgcgccgaagtccaccagggctggtcgggcgaggattgtgttgtaagctattgggcagtccaccaccacaaatgtgaagtacttaaaggtgctttggggtgtgtctgggcacaaggtgactgggagcctcacttttcccattgggataagtgttgtcccattgaaccccgtgagttgggaaccactcggcgagaggtcccggtctgtgaggccgattgccgtgaaggcttctttgaataataaattcacagaactcccattgtcaattaggattctggccacaattgtgttggcgatgggagtctctatgacctgagggtcatgatgaggaaaacacactgtctttgcatcttcttctatgaacatgatgggttgatccattagtcggggcctttgagccgggagctgagtaacttcccaaacctcatgtgttttacgacccctacgtaacgtttcagttcctttcaggtagtccctccgatatggggtcctccagagatcataactactcttccgttggatcttggtggcaggccaggaatttgctgaggttcccctgggggagcgactggtgctaatgctccaggcgcaccccctagtgatccttggggaaaaggtcatgttgcctgaaccgagttgagatgaggcaaccggttcttgatccattcgtaaagatggcccaatcgaatcaagttttcgatctcatctttgaggtttttgcattcgttggtgttgtgtccgatgtcgttatgatactcgtaccttttgttgggatcccttcgggagctatccctgtacagaggaggcggtctccagtagtgcgtattttgcctggtagcgaaatacacacgttcctgggagtccgtcagttccgtgtactgggtgtattggggagtgtacccccttttttgccacttgtcctccgtccggttgctaccttttgaggacctcttgctctgagagccttgagaaggacctgctaagcttgcggtaggagcggagtgagacgggacttgtccatttatcccagaaggattcccataatgagaagatgcaaaggccaatgcctgattctgattatactctggggtagcggaaaattgtatgccgctcattggttgagtagttgctggtaaggttcccgggagctgggctccgggtacataccctactattccggtcgggtagtatcccccataagccactatataggcctcctctaagttgatgtacttttggactcttttctggaagtcttgaaggttggaggctccttcttgctgtaactcgttccagaacggagtccctgtacggatccccacttgaagaagcgcaagctgttgcccgtcatcaacttttttagtctttgaggccttttccttaaacctctttatgaaatttttcagcatctccgtgggtagctgcttgatgttagtcagagcgctgacttcaagattgacttttctggcggcgacaaattgcctccagaaactgacctgcagcttgttccagcagtctactgatcctggttctaactgttgggttttatgc

SEQ ID NO: 333762 - DNA, 647 bp, Cannabis indica
  modified_base (620)..(620): a, c, t, g, unknown or other
attaaaaaaatattaaaaattgaagagtagtgttaattacaaccgtctacacctgaaattatatgttaaaatatttttttcttagcaatattcgttatagttataatattattctagtaaattttttaaaaaaaattgaataatttataataccgaaaacagagtttatgatattctagtttaccacgagtgtttaaaaaacttcaaacttatttttcggtactctaaactatttgaaaattttacaagaataatattgtaactataatgaacaccgccataaaaaaatatttcaacatgtgtttttaagtacaaaaattaactaagagattgtaataagaggttaataatagcactctttaaaaatgagaataatcacattatatgctattttagagtgtttttattttagagcattatatgtttagctaacatgtaggtgccttttaatatttcttgcctattttgagcatgtgagtatttttaatacttttaaacttatttatttaaaattttttagaatttattattcatgttctatatttataaaatataatttattattttaaatatattttattaattgttttagattaattatgttagaattttatgatatnttttaaaaaaaattaatatatggtgta

SEQ ID NO: 333763 - DNA, 571 bp, Cannabis indica
aaaaaaaacatcctggagttgagtcatcccgagtcacggttgtcgacttcggagaagtccctaaccctgcccctaggttgactctaggaactctgaaatgggtttttggatctcgctaagttgtttccaactcactatctttcactaaactgtacatgaagacatgaagaatctaaatccaaggcctagaagatgaaaatacacgatataacaacccagaagtcaacctaggtgcccagtgcctaggttgacaattctactagggttttggtttctaggcctcttagtgaaaatgagtcaaattttttactaggacatgcgttatacctatcatgggcatatttgaggcattaaaatcaaaattggagcactttcagttttgagcagctagagcaccaagtgccctaagcacctagcgcccaagttgacatattgtcaacctagggaactttcgacaataatactaaagactatcctgagaattttcttcctcttcatccaaaataaggaaatgagtgctttcgggaaacaaacggatccgtctaggggtgacaataatgttggaaattat

SEQ ID NO: 333764 - DNA, 770 bp, Cannabis indica
taggttcgtgtccatgtcatgttctgaatcaaaatttaggttaggggattggtttgggtctgggatcaagtctcgagttcgggttcgggatcaagttcaagttgcaatcctagtctgggttcgggatcgggtctaggtataggtctgggtctgggtccgagcccgagtttcggggctgggttctggtctagtttcaggtcccggtctaggtctaggtcttggccacgaccccagtcctattagggtgttggccacgttctagtacaagtttcggtttcgtgtcttaggtcttggtcctagtccagcttcgggtccttctctgaatccaagtcctagtccagcttcgggtccttctctgagtactagattaagacaccgactatgggtcttgtccaagacccaatttccagatcccgagacaagatctggatgccaatcacgggtcccaatctggtttcgattcatttccctggtcccggtctaggtctcggtctagttccgggactgagacttgggtgcagttccgggtctcaatcccaattctgggtccctagtcttgttccttgttcgggtctgagttcaagtctgggttcgtgtctcgagtcctagttcaagttttttattcaattttgggacccaatccgtgggtgggtctgtgtccgagtccgggtaatagtccggttacaattttgggtctgggtccaggtcctggtcctggtccttgtcctgctcctgagtcccgatccacttctggtttcgattctagtttc

SEQ ID NO: 333765 - DNA, 619 bp, Cannabis indica
gatatgtatgttggctttcgtactatctgaaaatatcacatcggtacggctagagtatgactagtgtaccgagtataggctgatattatggtcgatagtaccgtacaatttgacagtatcacattggtatgatcaaagtatgactgacataccgagtataggctgatacagtatcacatcggtacgactagagtatgactaacgtaccgagtataggctgttactatgtcaaaagtaccgtcgtacgaacgtttgagactctatacagtgtgggacatgaggattagggttatggtcaggggtatgggcgtctgatcataatccgggatatatgtatgttatatgttttatgcttttcttactgagtctgtcgactcacattgctatattcatgtgtaggtaagggcaaggctaaagctgaggaaccgtgaggacgagtaggtggagattgtacatgtcgggatggttaggcctggagtgtacgatcctcgggacattagggtttctggtgtttgtcgctgggcgacaaacttttgaaaagtattttgtaaacgggatcccgtaatattttgtatgtaatattataagtttttaattaaataagcaaagtttaattatt

SEQ ID NO: 333766 - DNA, 508 bp, Cannabis indica
tgtttgagttcggctccgagtctatgtctgggttttcgtctaggtctggaccccgatttgggtctaggttcgggtccaggtccaagttcgggtcccgattgcgggtccaagtttgggtctgggtcaggatctcggtccaaatctttgtcaagcatttcgatcctagtctgggtcttggttcgagtccagtttcgtattcggatccctatttagttccatgtctgtgtttgggatcgggtgccagatttaggtccaggttcgggtctcagttccagtctgggtacacgaccgtgtccgggcccgagttccagtctcaatttgggtatgaggctaggtctatgttcggttctaagtcttggcccgtgtcctagtcacgctcctagtcttgttctagggtcctggtacggcgattcttgttcaggttctaattttttgtcccaagtctaggtttgggttcgggtttggttcttcttctaggatctggtcctagtctgagtcccagatctag

SEQ ID NO: 333767 - DNA, 1550 bp, Cannabis indica
ataacgggcccagctccgcatctttgacaatcgaggtctcctcttctgagatcgaggttgggatgaagctgtccacctagtcctggtcgccatcgaaagcattacctccagagccaagcatttggctgtccgacaaatcgctcatctgaaagatagaagatcttttcagtgtggtgaatatgcgaaaataatacaagtgacctcacccgcataaaaattcaaggtctccttggaaggctgattcggattctcgcgaaaagccaatcagccaaccaaggcataaaatcgcagttgtgcgactagaagaatgtctcaaaaaacggatgggagtttcccagtgacccaaggggcatgcgttttcgagcatgaccctgaagttactgggaaacaccaaccgtttcgaggaatctaaccaatcacaacgtgcaagtatgtcacgcatatccgactagcgatatacctcaaaaaatggctaggagttttccagtgacccaaggagcatgcgttttcgagcatgaccctgaagttactgggaaacacccaccgtttcgagcaaacttactagtcgaaatatacggttatatgggaactgggaacactggcatacgtcgcaaatggctgggtgtatcacagtacctcaaggaacatgcaatttcacgcatgagcattggaatacggtgacacacccaccatttgaaagacttcaccaatattccgacaacaaaatgcccaaaaaatataaaaccctaagttctaaacaacgggtaaaaatgataaagtctctagaaaaacctaaaggagacagatatgcgagtattcgaagtgttcatccgaatacccgcgagtattccagaaataatacaaagttcacggttatacaaatttcaggtctatctttcttctaagattaaccagttctaacagaaaaaataccaccctatgagtattccctacgaacatgcattttcaaacctctcaaaatgtgaaaaacccagaaagacagttttcttttttaaaatcagaaatcaaatacgcaagtggattcaaaactaacctttagtttttggtgattctccccgtgattggtttcgatcacttctgaaaccttagagatttaggaagaaaaagaaaaatttggatggaggatgagagtctctaaaaaatctagagaaaaaaggagaagaggaagttagaaacgagagggaaaatgaaagaatcattttgtatcagaggccttaaataccaatatccctcataaattgggattgtgacacgtggcagcaggaatgcctaaggtcatcccatccaacggtcagccataggcacgcctacacgaaaaccgaagagttttgtgacgtggcaccataaataagataaaatgaaataattacatccgtatttttcgaaaccctcgatgggacaaccgaaggtcacctcctcgtgacaacctttcacttgtctctcgcatatagtttccctcatgaccacacatatcaaatcgcgaaactaggggcgatgtgttatagtgagatttttctcacctagaaact

SEQ ID NO: 333768 - DNA, 588 bp, Cannabis indica
ggaagagacctcagtgccaggagcggtttgttcgatcgccgtactagtattcctagtttcctggatgcctagagtgaacccagccagaggggaagtcactccatggcctaccgtcaaaggtcgtgtattaacttgtctagggtttgtccttggtggatctcttgcgtttctaggagtctgtatgcttggatctatcattatcaggttgactggatcagtttgaattcccccacgagttacaaccatcctattaacctgtcaagactttaagacaaaagcttgtgtttttgctcttaatgaaagcaccaaaatattgacctcgcttctagccaacgacagtgagtcaaaataaagcgattaaataagataaataataaaaagaaaaaatagtaagtaaagagtacactgaaatttctagaggtttgatcccgtgagaatggtaatagcctactcccttttttatcgtattgacttgagaaacaaagaacaaagtgtcctctctctctaaagctcttacaatagatctctgagtaattctctcttagatcgctctttctctcttgaatgttctttctgaatcaaattttg

SEQ ID NO: 333769 - DNA, 442 bp, Cannabis indica
gttccatgcccacacatagcaagtcaagtgctccattatagtgaataagatggtagtaaccaaacctgaaggagagaaagagatccaagttcacatcttgataatgctctgcgacagaaaagaataagggatagagatcttaaattgaaggagtcatattattctgctgcaatcaatgtaaggttttcttaaacccttatgtatttatttcattgttttagagatattcatatttagggtgttaattcaacatacttgttagtaaatctagatactgataaaattatcccaacaactggcctcagagccatcgtaatgatttactttcatgtaatataaatttaaaacgatgaatttgtttattgtgttgatttgaatgtggtcatgttggtttatgtacatatttgatgattatatgtaaattataattttatgatgataa

SEQ ID NO: 333770 - DNA, 825 bp, Cannabis indica
acaatggtttatcctgatgatatttatcaagtctaactcaattatgtcttatacaaataactcttgaaatatatatgcatacaatatattcaacacatactatactgtatgaagttttagggtaataaccccaacttgcataactaatcatttacataatacattatagcatgctcaagacaatacatatatagggtaataatcctaattcaccatatatatataaatttagggtgttaaccctaattcataataccataattacttagggtaataaccctaatccacaatataagtacttagggtaatgatcctaattcacgacacatataacttagggtaatgaccataattcaagctctcatctaattaatcacataatatataatttcgctaccatgctatactctatgtgcataatttactgtcttacctgatttccatagtatgaggagaaatctcaatccacaggtgatcttgaccaagtgttggtatatccctagtcacaatcctcaagttttacacaataggttaatcctaaaattacatttcataatattcacatttgagactccaatactggacgaagtaatacagctcgaaacgagctttccaatgatataaagaacatctaaaatagagtttggagtcaaaagttatggccaaaataaattttaaaacaatctaccttgctaaacacatagcgggccgcgacactcaagaaccggatcatggctcctgggttaaaaacccagaaaaactcatttttgggtacccaaaaatgcaccaaactccacacaaaaataccataacttgacaacaagc

SEQ ID NO: 333771 - DNA, 514 bp, Cannabis indica
aacatttttatgttgcatggttcacatgatttatttcatgattatatgtattaacgttttaatcgtatacaagcagtcctatcgtaagagtatacaccttacatcatataataaccacatgatctaaaatcaatggtaaaaaaaagttccctaccagtagggaacttttgctaggtcctaccatagtcttgccctatatatatatatttataagtagttatttatctttatatactagttttctttttctcatttttaattattttttaattaataaaacaaaacaatattaataaactacctttctaatgaatataaataatttatataaattaaaaacataattattattaaggcacaaccatccaaataaatctatctatttatattataaaggaaaatacaaaaacatatgaatttctatattttttctttctattttcaaattttgtaagtttgatattagatgaaatttacatttatggccctaaaaaaagaaataaacaaaagtgga

SEQ ID NO: 333772 - DNA, 632 bp, Cannabis indica
tcctgtgtttagatctgggtctgggttccgaggcgcaggtcatggtccaggtcctaagctcccgatttgggtccatgttcgggtttgggtcctagtcccagttttgatttagattcagtgtttgagtttgagtttgggtccgggactggttggggtctgagtcttggtttgagtctaggtccgagtctgggtctaggtctgggtctgggttcgggtcaaggtcaaagtttttgtcttaggtgcaggtccaggtctgggtctaggtcaaggtctcagtatggatctaggtcccgagtttcgatcccgacgtgggtctgggtctgggttcgagtctaggttcgtatccggatacctatctaggttcgagtctgggtcttggatcgggtcccaggtctaggtccaggtccggctctcgctcccagtctgggtacacaatcgtgtttgggctcgagttttggtctcgctttgggtttggggctaggtccgagttcggttctaggtttaggtctgggtcctggtcacaatcctagtcttgttcaatggtcgtggttttgcagttcttgttcaggttccagttccgtctcacgggtctgggtcagggtctgcatttgggtcctggtccgggttcgggt

SEQ ID NO: 333773 - DNA, 503 bp, Cannabis indica
ggtttgtaacaaagaaggttttcggaaggagaaatttttgaacatgccagacaggaagaagcgaccaaaagaaataacacgttgtgggtgtcaagctgcgttacgaatccttcggttacaaaaaacaaatctttggcggtgtcaagaatttgtaccatttcataatcatgatttggtaataccatcacaaatgcaattcactcgggcaaaccgcgaggttcctgaagcagtagctgcacaagtaattagcatgaatagatgtggtatcaaaacttcttccgttgtagcacatattgccctacaatctggagggtatgacaatcttcctttccaactaagagatgtgtacaacaaagtggctagtttaagaaagcaagagaacatatcaagtgatgcagaaggtacattgggtttcttagacggcttatcatcaatggatcctgaattttacgtcgagtacaagattgatgacgaaaatcgattagcattccttttttgggctg

SEQ ID NO: 333774 - DNA, 1232 bp, Cannabis indica
gattagattgttttagattgtgtgtgcgaatttggatgttatactgcatgttcatcagttgtgtctgtttgtttaaacaatgttatcgatgagatatcgataggttatcgatataatgtcgaccaaacttgaaagcagtttgaccattagaattgtctgtgttgttaatgtatatcaataggatgtcgtaggtgtgttgataggatgtcgacacaataatttagttgattaagattattattttaaagaatttagttgatttatcgataggatgtcgtatgtgtatcgatatgatgtcgacacaataagcataaaattttttgacctaacatgtcgataatttgtcgacggtatgtcgatatattgtcgacaatgtgatttaattgctttctgtgattactaagtgtgataaaatcgaccgaatgtcgacgtgatgtcgacagtgtattgacaattttgttttgctgaataggtgtgatcatatacttagaatatcgataggatgtcgacaggatgtcgatatgttttcgacaatgtaatgtaattgttcactgtaatttctgtttgataattttgacagaatatcgacatcacgtcaacattgtgtcgacaattttgttttgctgaataggtgtgatcatatacttggaatatcgacagaatattgacaagatgtcaatatgttgttgacaatataatgtaattgttcactgtaatttctgtttgataatttcgataggatatcgacatgatgtcgacattatgtcgacgtttttagtttttttgacagtaatatttctttgatatataatttttcagatggctcccagactcataattccagcatccgagcattttactggccgcgtgacataagtctcggtttgaggagtacaattttaagaacacggtgaaagaaagcagtttcggcaacttttggaatgtcgtacccctgacatcttccttggtgttatttcaccaagtcatattgcacaagatgaaggttgatgttgaggaggatttgaaaattcaattttacattggtcacaagcaactcaaattcagagtggttgagtttgccctcattataggcgtggacttctcctcggggccaacaaaagaggagaaggctacggaggttgctcgcttagggtcagaccgattgatcaacaaatatttcaaccggtctgatagtgtgaagacagaagcactccaagataggttcacaaact

SEQ ID NO: 333775 - DNA, 615 bp, Cannabis indica
atttttgagattgacatccaataaccgatccaatccaattagaatctaacttttagcatccaatccaatccaattataattggatgtcaaactttttgtaattggattggatcggttcggttcaattggattgaatgatgcccacccctaatcgtagttatattaggaggtttgtccttattgatttgctttaataaaactaccatttaaaaaaaatgttagaaattttgaaggatttttatagtgattttgaaggattttagatcataaaatttctattaataattttagttctccaaatcttttgatgaattttcattttcttcttgtagcatagtatttttttttatttctatttttcaaattactttgttttagcatgggttttcttacatatatatactaaataaaataaccattttttagtaagatatataagaataaaccattaacataacattagtagagtaggtctcatctttcctaaaactatttttttaagtatatatatatatatatatatatatatatataaatcatactattttttttttttgaaagcacatagtatttaccttattatctatccaaaaaaattattgatagaacaaaatc

SEQ ID NO: 333776 - DNA, 1434 bp, Cannabis indica
cccaagatagtagaagcctcctgcagcatgcttcctcgcagggactgctttgactgagtaaaagcaggctatctccaaaggagtggggcactcccatcctaaaatatggtataggaccttcaggctcgcaaggatcctatacgagatggggttcagctgaaatggggaaaccccgaggtagttacagtactccttaagataatcactaaggggaaaggtttaccccaaccttgatgtgttcgaggctccaagctcaaatgcccaaggaattactcgtgctagacccactgcactcctcgcatattgccctttctggaggaaaacaactaaattccccaggggccacagaccttatgacacaacctttcctctacttgatgccacaggacttcaagatgccaccaacataggccccgatcgacctaaccttggatttgatgagctcaacctcgaaagtgacattgggatcctgtgcggtctttgattttcgaggcttagaagacataatgtcaaactcaaggtcacatggttcaaaagcaacagtgacttcaggtaaaaatagtggtctcgcgagtggaatagaagttaatactgtgggtttaggccaggctgcgtcttgcaaaaaatgacgttttccctcagaaatctcttgtaggaattgcctataacgtctggaaatttcttcttggttcaacttaatcagatggtctctaattttggcatcattcacttccaattttgaccgaggttggaaatttatgggtttatatgggaaggctaattgtttaggatattgtgtttccaaaaattctggagaaaaagcttttgaaccagattgggacatttctacaaaaaagaacaatcccaattcctggatgaaatttattaaaccagaggcttaaagaaaatgataagccaaaatcatgcctaaaccctaaaaaattacccagaaaacgtaaacccgaattgctaaaacaaaacggagtgacaagatgcaagataatcataacccagataaaacaaagaaggggggaaaaggatgagatacttactgtttgaagtcgaaaagtcaagtggtggaaaatcttgcaaacggagacgggatgaacgacgtgatgaattatttgaacacctgaggttaaaaagaaaatccgagtaagttcgcagaaagaatgtcaaagataaagagggcatgaaaggtttcaggcaaggtgggatgaaaattctcaaaaagcttgagtttttgaaaagacgaaaatggtgaaaatggattctttactttttgtactttgaacctagtaactgtaagatcaaaatatagaagatttaatggatagaaatggaggataagtggaaaagatggatcattaatgctaatgatgtccctcgaaaccacaaaactgccaaaatcaatggcatgcatattttcaaaat

SEQ ID NO: 333777 - DNA, 1114 bp, Cannabis indica
tatatgtgaattatgcaattttataatttttgctcggcaacaatggaaaatgcgatggatggttagtttgatcacatgggttggtctacaaccttatttcaaactgagatgtatgttggagaaaatagagtaccggggttgagcggggttatgaaatttaacaattttacccctagtcttgaaaatgcttaagttacgagaatgagggcattttagtaatttggttcatggcgagttgggcggctgccctagattttgacacctagcaaaaaaaatacttcagccaaggttaatttcattaacctttatttttcatttgaggaaattaaagaaaaatcagaaaaaaaaaaagaccaaaacaggaagaacctctctctttcccttctctctctttgaacttgccaaaagcctaagaatttgttgttgttctttgggttcagcaaggatttgaggagcttttaatcaaggtaagccctagacacactttggttgtgtgtttctcaaggttgtaattggttttaacttgtgatttttcagctttaggggctgttcaggttctattcttgcataatttgaattataaggttaatttgagttagttttagcttcttccagctcgttttagtgtattgtgttgagattgagcaagtttgaactttgaaactcaagtttaggtctctaatggtatgtttggattcagtttgtttttctaagatttactgattggaatatgatgtatataccctatttaggtactctggaaagtttggtggcaattggacaagttttgagcaagatttgggtttttttgggagagactggtataaacgggttaatggattcggatccattttggtgccttagttgggtgtttccctgtttcttaagatagtgtagtccctagtgattataatagtgccttgagttttggattcgggtttcccggattagggttttggacatgtgatttacccggttttaatatgtgattagtgttggaattaattttaccaggatcttagatctactcacaagtatgctgatttaacaacctaaatatgaacttctaaaacgataaaaaaacacataaaagttaagagtaacttacagtgat

SEQ ID NO: 333778 - DNA, 691 bp, Cannabis indica
gtgactaattttttagtcacaacataaatcttttatgactaaatgtgacttttggttacaacaaaaactacttgtgactaaaacatagtatttagacacaagttgtcactaatttacttttagtcacaactaaaaccacatttagtcataacaaattgtaatttttgtaattaatacctttagccacggactttttagtcacaacataagaataataattaacaattaatcacaaattttttacttttagtcacaagttttattgtgactaaaaataagattttttaaaataacaacaaaactgatattattgtaggttttcaaaatatggatcgagctatcctgacacacatgtatttacggctattggatccatcgacacattattcaacattttggtgggattcgcttctaaaaaaatagaagatgaataattaatatttaataattgtctttaggttacttaggatttttcccgaattttatgtattattgtgcctcataaattttacagctcgttaacaattgtcttcaaactatttagagtgttgtaaatcggtcattctaccagtttctcacatgtgctaaacaaaataatgaagtagttgtacaattgccacgtcagaaccacatatattctaaaaaaatatatatatttttaaaaattgttaaactaaaaatcaattaataa

SEQ ID NO: 333779 - DNA, 469 bp, Cannabis indica
tttttttttgtatattttttttacaacaactcttgtgtgtttttttatgtatcataatttttttgatgaattattttattattattaattgaacaatattatttgtcatcttaagatgtccaacactatataaatatgacacctaataattgcttagcagtgatcttatattattcattaaatcaaaatttgtgagactcaatattgaaatgcaccaataatagtatgccgccaataatggtatgccactatttatggtgttaattaagtacctcccttggtatttttcttatcatttctaatagatgatgtataatatttgagctaaaaaagtgagtcaatattatatttggctaaaattttataatattgctccaatacatttatattaatcattttagggtaaaattaattatttttttatagataagtgtaaaaaaatcaataaaagtattaaatttttattaaa

SEQ ID NO: 333780 - DNA, 626 bp, Cannabis indica
aagggaacttagaaacccataagaaaattaactaacaaaagcgataaactaacactaaccgcctcgagcgttttctctggatttttctttctgaaactctgaaactgtaactgaattctaaaaatctaagcttctatttatagaaggataaaaggactaatgcgcaattaaacttattacaaattgcatgtgggtaaaaatgtaaatacaaaaaattataatcggagtgccacgtgtcacaattggattggctgcctttgatgagtcggtgccacgtgtaggtcgccggttggctgaaaagagaacaagttggccaattttgtgccacttgtcacgtgctgaaggaaagaaggaaaagggcttttcaaccttggagagcaagaacaatgaagcccattctcggctgggcgagtggacgaaacacacggaccaggagggtccgtgcgcttcacgcgtgcgtgggcttcggaggagacaaggtgctgacgcgccttctgcagacgaaccggacattgtggctgtttgctggaagagatgaatttgggccgattctttgggtgttttggctcaaatgttgggtttccaaaatgccatttttttctcttttaccatttttatttctttct

SEQ ID NO: 333781 - DNA, 367 bp, Cannabis indica
acccaaataattcaagctcaaatggtaaacgttccaaaaacagcaacaggcaagggaatgggaagaaggcaaagttcaccaacaaaaccgagtaggatccctgggagaatcaagcaaagtacactgcatttaccatcttgactgaggatatagaaagtgttgaaatgcccactcagtcgctcgccccgtataagaagctcgggcccgtgaagaaatatgtcagcaaaagggacatgacaaactttttgatttcatggagactacggccacgacaccaatgaatgcaacaatctgaaacaggaaattgaattcttgataaggaaaaacaacccgcatttacaaatgtatgtcaagaccgatcaaaatc

SEQ ID NO: 333782 - DNA, 830 bp, Cannabis indica
taggataaaattacagggatggcttaaaaggcacaatcgatccaaagaatgcttaaatcactttcctaatcatgcatcatttattattttgcctcaaatagcaagcaaacaagttttagaatttttcaaacagttttccacatttcacaaagagaatacataaaccaattcaattgctagaaatttacttattatgattccatgttcctttaaatcacaaaattgaaattagtcaagaatgtaatatcaccaagcacaaggatttttcaaaaaataaatgaaatttccaaaccatgctatctacctacttttaaattgattcacatttataaaaattgactcaaacaacacaaaaacacacaaaaaagactaaactaaacaactaaacaatcaaataaacaatgaaatttaaaactaagtccctccctcaaactataagttcacattgttcccaatgtaacataaaacccaaggagagaaagaccgacaagttgaaagttgtcattgtaattgccttcaagattggcatgtgatgagtttgaaaccaaaaacagcgccaacaacacaagactttagataatgagcttggggagaagcctttcgtagctcgtagaggatataatatggtgagggtggtgttgatggaaaatatagatccattggtggcgtataagtcaatatcattgatgaatttgaatcaatgatgtcatgtgcttccttatcctccaatatcacattatctacactttcatttaacaacccttctttttgttgctcactctcctcttggctatccatgccttgcttgtgatttcatattcaataatttc

SEQ ID NO: 333783 - DNA, 1185 bp, Cannabis indica
aaacggtacatagatcactgaaagcgaatctatgggagagagataaggtagttttatgaaagcctatttctctgaaaaagaaaataaaaacatacttacgaaaatcctacatcaaaccccgacattaagagacagtaaaagtttttaccttagaaattgaatactgtgatagaggattcaatttatgctatgctgtaatttgttgtgatagtggctatgagagatttaggaattatctaagtggcgtttggttacaaagtgaaaatggaatgggaatgggaatgggaataggaataagaatggaatggaatttttattcttttgtttggtaaagactatggaatcaacaatggaataagaattatcatgtttggtattgtatggaatggaatagaacttttattattttgactaaattaccctttactcttcaaaaattatatttattttattaaattaccattattttataaattgaacaaataaataatattcttagcaaaaaaatatatttatcatgtgatggaaatgtgcacattcttaaacctaattattaaaaattaaaataataaaattatatataaatactaaataattagtaatataatggtaacatccaaaagggtgagaagtggaggaggattgatagggtaaaatagacttttgttagtatggaattagctttcaagtgattttatagtggaaaagtaaattctcagtttaggtgaattgtaatatctttggaatgggctttcaagttctaataaagaaaccaaacacttgattgagctttcttaaggaatagcaagtccattccaatgctcattcatgtgaaccaaacaccacgagacctaagtggagagaaagaagtagagaatgaaatttgtgttcatcgtttaattgaatggtaaaaccctaaagttaatatattcaaccgattagataaaatctaggaatttaaaatttaaactcagctataccttttttttagaataaaatattaattaattactaatataaaatttctcataatttaaatttaactaagtcaaatatcctaaactaacttcctcattctcacactctcacgtgtctctctctcttccactctctatacatttactactatagcctttacaaatatatatatatactagaaaaaaaattacgtgcaaggcacgtata

SEQ ID NO: 333784 - DNA, 758 bp, Cannabis indica
catagtgagtaagacggtggtaaccaaacccggaggagagaaagagatctaggttcacatcttgataatgctctgctacagaaaggaatcaagggctagagatctagaatggaaggagtcattatattctgttgcaatcaatgtaaggttttcttaaacccttatgtgcttatttcattgttttagagaattcatatttaggatgttaatgaaacatacttgttagtaaatctagatcctggtaaaatattcccaacacagtactattgaccataatattagtctatactcggtactctagtcgtactgatgtgataatgtcaatcaatacttatgccaaatatacactcatcagtatctaatataactctacgtatactgatatcactatttcaatgtaatctaacaggcatttcataaacatgcacgctaaatatgtaatcacatacaaatatcattatactaatcttaccttgattccgaattcaggtgttccggtcaacctaagtagaactaatgctcgacggttcacaggcccctaagtcacaacatacgcaaaactgataagttatacgctaaatcacttttcgaggacttaaacttgaaactaaaagtttccctatcgataaatagcatggcaaagccctacgtatcgaagaaacacgagaaaaacaacgaaacggggaaactactgttacgatttttatgtttattacgcaagtgtacggaatcaagtagtatctcacgcaagtgaggtc

SEQ ID NO: 333785 - DNA, 1219 bp, Cannabis indica
tattttggtcaaaccaactatcctaatttaaattgacaccactttctaaactagtcaggtaaatccccaagataactcattttttattgccttgacatttctgaccactctgtcgagtttccacggctactgaactcgaaaatattttatttcaaaaatagtatttcaatacccccataatttgataaaatctctgtatttaataaattacactttatttattcatttactaaatttacactaattaactcataattataaacttactccaatatcatataatcacatattgaataaaatatgtcaattaaatattaatatattttctcaagatattacaactatcgcctccttatagaaatttcgtcctcaaaatttacataaataagtcatgtcttttacgaattttggaaggcaaacccatcagacaattttgattacctcggagataccaaagaggcatatcttaattactgtgcgggtcaggcgaccaaagaaagccttgagacagccaattccacagttcctaccgactagagcactgacacccttactgtccagagtgtcgagcctcaggccccttccgatcaggtcgatccctacaaggagcctgggacccctactgtatgaaataataattttttttcttttttatatctgttcggcccatgggcctttattagagacaaaaatgaccagccaagcagttttttaacttggaatatttcattttattttgagactactagctgaccgggcagactttaatcccgggtttaggtcgtgctttgttatcttttttcaatgaatattttcccttgttttggtaattattcatgcaaactgttattttttttagcttgttatttacttttaccaatgctttgtactattatagttgccccccaagtgaccgagcacacttatgactcttggtcacttgcattttacaagtatgatttttgtctattcggtgctttgggtcgagcagaccttttgtacgtattaatggtaaattcataacttgctaatacaattgacacagttagaatggaaataaacatattcatttattggtcgaaacagttttgttactgtagtaacttacatttatgaaagctattacatgatctactctgatctttagctaaatttaaacataaaataattgcacttaaagaaaaaacaaaaattgcacttttaaaggtggtcatctgac

SEQ ID NO: 333786 - DNA, 751 bp, Cannabis indica
gtgcaaaataagtataaaaattcagatggatgagatcacaaggcacattaatgatgtactaaagaatgacccgactcacttaacattgttcaaagaatctccgtttggccactttctcgacatttctgactactatacacattttagccaattgatgtgactattactcattcgagaagcagattgttacagagatttagagatgtggtttgttgtgaatgggagaccaattcgattctcattgatggagtatgcattaataactggactgaaatgctcaaagtaccctaaaggttgggaatcttaagctgagtcaaaatcattcaaagatagacactttcgtgaaagaccttcatgcatcaccattgacgacttaaagaccaaattaaaacaattgtctgaccaaaaccaaaagaaaaaatcacggaagaagaatgaagttaacaatgaaatattaaagatggcttcactcttgttcgtctctggagtcttaatgcatggagacaaaaaacaagctaacatcgatccaaaattattgggattggttgatgatttggaaatgttcaacaaattcccttgggggactcattcttatgagtatacgttaaagcaactccgaaagccactaaaagaaaaagcaatatcagtgcatgagaaagcacagacgatgtccacgttcacctattcaggcttccctcttccattagcagtaagtaaatttccttaagtaaagtacaagaatattgaaata

SEQ ID NO: 333787 - DNA, 568 bp, Cannabis indica
tcatacaggtggtaattcccttgccctaaaaaatcatgcgacaggggtattactggcctaccttgcgacaagacgctttcactttcgcaaagaaatgcgacaaatgtcagcggatagctacatatgcccatcaacctccgagcaacttgcattccatcactagtccttggccctttgcagtgtgggggatcgatttgataggtgaactacctaaatgaaaaggcggagtcaagtattctgtggtcgcggtcgactacttcacaaaatgggctgaggccaaagcactagcaaccatcacagtgactaagttgcgcgagtttgtctacaactcaataatctgtcgatttggcatcccttacaagctcatttcagataatggaaagcaatttgactgtaaggagatgcggcagttatgcaacgacgtgggaattaaaaaagcattctcaacagtcgcctatccgctaagtaacgggcaaactgaagtagtcaataagataataaagcacaccatcaaaggaaaactcgaagaacgtaagggggtatggccagacgagctttcgcaagtttt

SEQ ID NO: 333788 - DNA, 1301 bp, Cannabis indica
taacctggtggagtcccgtggtctaattaacatgagcattcaaggggacatgatgacgtgggacaatcaccgctcgggagacagccacgtgaagtcggccctggataaaggcatcatgaatgacgcctggcttcacttgtttcccaaagctattctctgttcaatccagacgagtacttctgatcatagacctttgtcccttgatacggttgggaatgtgcccaagttcaaaaggtgcttcaagtttgaggaaaattggacgagggatggaagaagtaagcttgttgttgctaatgcctgggattcggtgcaccatctttgggcccccgcccgagtttttaaaaagattggtgccaccagggtggcgctccttcagtggaagagaacgcaatttggtaaaattgatgtggttataaaagatttggaggaaaaacttgatagagttcagttgttgcctgctggctcaagagactggagattagagtgtgacatccgtcagaatctgaatgaagcaagaaccagaaaagcagtttattggaaacaaagggcgagaattgagtggctcaaggatggagataaatgctccaaattcttctttctatctgctgcaattagaggaagaaggaattccatagactgcatcttgaacaaacataatgtctggctaaatgatcgagaactaattggtcaggaatttttggaattctttagaatatttttactggagctaactttgataggccgctggattgtggtcacctttttagggaaatgatttctcttgaggaccaggctagggcggtggagtgcccctcccggcaagaaattaaaagtactctgttcgctatgagcaatcataaagcccctggacctgatggcatgtctgttctgttcttcaaacactattgggagtctgttggagatgatttctgtgatgctgtcgctgatttctttgaaagaggtagaatgcacaagggtgtgaattctacgaatgttgtgttgattcctaaggtgcagaacccgaaaagaccgaatcaatttaggcccatctctctttgcaatgtgatgtataaggtcatttccaaaatcattgcaaatagaattaagcctatcctccccacgctcatttgcccaacacaagctgcttttgtcccgggtaggaatattcaagataataatgtgttggttcaagagatcatccactcgttcaataggaaaagaggaaaagagggtttttttgcgataaagattgaccttgttaaagcctatgataggctaagttggaagttcatcgatcatgt

SEQ ID NO: 333789 - DNA, 509 bp, Cannabis indica
gactaaaagtttcctcatagtccattccttctctttgggtgtaacccttggcgaccagtctagctttaaaagtttcgacttcacctccagcacctcttttcttcttgtagacccacttatatattattaaggatattgtgacattaattattaaggtagagcccaatacctaatgtcaaagtgaaaatataattttctatatttagggagtagtcacagtatccttaataatataaacttatatattaattaaaatttaccttaatagacataacttgtaattaattatataggtataataactttaccccacagggattttattatatttgtataattaattaggataatatgttaaattaaattctcttaatttaccccacagggagttatggggatttaatttaatagtgttatcacaaatttaataaagatagataataaaccttcattttcctaaactaattgtttaattaaatctatcataaggttcatttagttttattaaa

SEQ ID NO: 333790 - DNA, 549 bp, Cannabis indica
cctaattttcaacatcttgtgaaaaatgatgatttttataaagaagtttagattagaatatctaaagaatagtaatgaagatattattggagttttttgatggagattgcttcgaaaggagcacattttggacttgtttgaaaaagtaaagtatgaaagctacatatgatcaacacataatgatgtgcttgtgataaaaatatatatagaataaataaataaacaaaaatcattggctcactaattttagggtgaacaatattcaatccaattaaattgaaccgaagcgattcagtttaattcaattataaaaaattagatatccaattacaattaaagtagattgaatgataaaagttagattttaattaaatttgatcacttattagatgttaatttcaaaatctatttaaaaaatgatcaaatccagttatatttatatacattaaaaaaaatatttatattgattttatataataaaaaattgataaatatccaattacatttatatatattaaaaaatatttatattgatttatataataaaaa

SEQ ID NO: 333791 - DNA, 1529 bp, Cannabis indica
tgcaatctcatagattggattctggtagattttagcatagaaaagctcttacatggtatcagattgcccttgactacagtcaacaatggatcctcgtcatcctgaaaatccacctcgttcttccactcaaacacccaccatcgctgctcaagcttcaaccaatccaccatggaatccgttccagaactctcttcactcctctctcacggtgaaattagatcgatcgaatttcctagcatggaaatctcaagttatacccacagtaattggtcacggtctcgatgatatacttcttggaggtaattctccacctgaacgattggttactggccaaaccaatcctgaattcacaatctggaagagaaaggatcagcttctcctcagttggctccgatcgtccttgtccgaatctgttcttggctctctcgctcaattccaaagctcatactctgcctggcgtgccctggaacaaagatatgccagtcaatctaaggcccgtattttgcagatcaagtctcaactttcaacaattcagaaaggaaatctttccatttctgactatcttgacaaggtaaaaattcttgcggattctctttcagttgctggtactcctatggacgaaaatgacttaataatgcacttgctcaatggattaggccctgaattcgaccctgttgtagttcatgttactagtcttgtagatgatctttcctttgaatctattcaatctttattactaacgcatgagagcagattggaaagacattacactttagctgactctacaccaagatttcagcaaatcttgttgttggatctgctagatctgcaactgggtccctaaatcgatatcctacatcagaaagaggatcaaattctcaatacaacaatcgtgtccctcccagaaattttggtcgaggtgcctctactacaccaagattaatctgtcaagtatgtcacaaacttggacactctattgcagtgtgtcactacagatttgataaaggatttgttaccccaaaaattggtgactctcgtgccttcttgacagagattgatgacactgaagaacatcaggcctactcctcctccatgctccctgattatgccattgatcaagaatggtatgttgataccggtgctaccaatcatatagctcttggcatggaaaatcttgatcatgaacaaccctattttggacaagattctctcaaagttgctaatagtaagaaacttccaatctctcatcttggtactcactcaattcctattgtttctcaacctctaaagcttaattctgttcttaaagttccggaaataaagaaaaaccttgtcagtgttttaaaactaaccaatgataaacctgtttttcttgaattccattcgaaatgttgctttgttaaggacaaactactcgtcctcgagtaaaacactaaacaaacattaaacaagtcaatatccaaaacatgagtaattttcaagtagcttcaataacatgattatgaaaaaattcacttatgcatataatc

SEQ ID NO: 333792 - DNA, 817 bp, Cannabis indica
ttggaacctcggccttggccagccaaggttcccaagctcagagagggtcggctaggtcccatgacccgaccaaggaccagccagggaccctatggccaggcatgggtcggccaacttttcgggtacccccatatggtcggccaactcccatgatgaagacccatggacggctaggtcttgaacaaactcctatggccggccagggtgtgatttggatctaaacgtgtgttttttaggaacttaaacatgttctttgtgttcttcatgactcaaagagtcaagaatcacaaataaggtcaaaatcagatcttttttgtcaaaaaatcacacattatacatcctaagactatcacgcagatcaaaatactaaaaagattaaaatctaatgtggcaatcaaaaaatattcaaagcgaagaaaaaattcatgcaaccatggtaaaataaactaaaacaatgaatagcaggattaaaaagcttacccacgcaaaaagcatgggagttgaagtaatgtgggcattggcctctagagagaaggataagctttcaagagttacttttttagagagagaatgaaaagtgaaaagtgatgagtggttttcctcccatgagcttatataacttctatgggaccctttttttactttatatgcagtgtttaactaaaaagcatgcagaagagtaatgcaattaacttactgcaacaagtgtgattagacagtcaagagcaattatttcaaaggctaaatatgctgcaagatttacccagttaaggctacattagtcccaactaagttggaaagtccctatccgcacaga

SEQ ID NO: 333793 - DNA, 543 bp, Cannabis indica
atttcaaggctaaatatgctgcaagatttacccagttaaggctacattagtcccaactaagttagtccctatccgcacagacgtctgaagagggacttgggagtaaatgttagcccaattttcgtccacctgatgtggcatgtctacgtggccaacatcagtgccacgtgggagtacagctcgccaacaagaaggccaagtcatctactcagcacttcaaccaacgaggagtctgagtacttaagcgggacaacaaaatgacgaaccaactacctcaagggggctcaccatccaccttttgtcggccctatggccagtatcggccgactaagttctagacatccatggttggccatcatgcatcctgcatggccggtcagcttttgacttgataggattttggtgcacaacttcatacgtggactgcaagccagaccacaaattgggccttaacatcccacgaaaaataaagggaaactatctattttttagggacattttagtaatttatatattttttttaatttagtatgtaaataatag

SEQ ID NO: 333794 - DNA, 1364 bp, Cannabis indica
ttttggttagaggtaataaaatggaaggaaaaagaaataagttatattccattcttttgttattttaaagtattagattgtcattctaatagaatgcccattccaccattttggtggaatgaatattctattttgaaatggaaggaaagaccattatcatgttacacgagaaattttttaatgattttatcaatttttttttatgaattttaaattttattttattcaattctcattcccattcccctaaaccctaacccctgaaccctaacccctgacccctgatcccaaacccctacccgtaccccaaccctgcccctaactttaacctctaacccgtaaaccccaactccaaacccaacccatccctaaacccaaaactctaaacaaaaaccccaaacccctcccgacccattccccctcccattcccattccaattgccattcccattcccattcccattcctatccccattcccattcgcattcctattcgcattcccttcacattcccattcccattcccattcccattccaattctcattcctattcacattcccattcccattctcattcccattccccagcccattcacattcccattccccattcgcattcgcaatcccattcccattccctggcccattccaattcccattgcctggcccattcccattcccattccccgacccattccaatttctatttccattcctattcccatttccattcccattcctcgacccattcctatttctattcccattcccattgcccagcccattcccatttccaatcgccattcccattccccgacccatgcacatttccattcccattcccattgcccagaccattcccattcccattccccaaaccccaaaatcccaaacaccaatggcacgtttactatacagtattcagaatcggaataaattaatagagaaatgtaacggaataaataaaaagaaatacaaattaatatttgtaatatgttgtttactaaattgttttagaaatggaatagttgtgatttatcttgtttactttaataggaaacgtaatgggaatggttaaattgactaaattatccttttgagctaaactatattatatgatagttattttgtaagatatattttaaaaaacaaaattgtcattatatatttaatattaaaaaataaaataaaaataactaaaatccattacccttaatggcattccttacaaaattggtgggggaagttctccctttcttttctcctatatttaatcaagttttccctttcgttatttaaataatgtaagtaaacaaatctaagagaatgattaccttaccattgattcccattacttattag

SEQ ID NO: 333795 - DNA, 550 bp, Cannabis indica
gggttcgcgtcctgggtcttggtctaggttgggtccgagtccagagttccaatcccgatctgagtttcgattcaattctggttctaagtccattgttctgatccttgtatgggttcgagtttgggtctggatctgggtctagctttcggtctgattctaggtgtgggtttgagttcgggtctgagtctgtgtcccagtttgtgtccaggtctggtccccgatctaggtcttggttcgggtccaggtccaagttggggtcttgagtgcgggtccaagtttgggtctgggtccggatctcggtccaaatctaggtccagcatttcgatccaagtctgggtcctggtctgagtccaggttcgtattcggatccctatctaggtccaagtctgtgtttgggatcgggtcccagatttaggtctaggtccgagtcttagttccggtctgggtacacgaccatgtacgggcccgagttccagtctcagttagggtctgaggcgaggtctgtaatccgttctaggtctgggtccaggtcttggtcatggtcctagtc

SEQ ID NO: 333796 - DNA, 709 bp, Cannabis indica
agtaaaaaattttgtagtgtataatagttaatcactcctcatatttattaaattaaaatatatgctattgagtttttattttttaataatgtaatttcacatgatatatatcatatgttgttacttatactgttgtcggagaaatttcgacaacacctaatataaaaataaaaatgtaattatctaataaaaatgcgcaagtactcaacctagaatgtcgagtattcaaaggttttggtacacagccaaatgtgaaaactaatatagataatgaacacaagggaattataatggttcagccagatcacggtctgtttagtccactattacaaggattttttctgtccctcattcatattgttggatcactcttttatatacaaagcaagtgtcttttggttacacagaacttgattgattattaaaccgttttacattgaacattgtgcattaaattgtgaaaaacgtaaataaaataaataaggaacagtttaaatccgttttactaaatacaacaacatatgcgactttcatagtgcaagttatctgttaatttgctcgcacaaactcgcaggcttagggtgcgatctatcttaatacgagactaaagaatactcgttcttaggtatttgcgttctaatcgagtcatatatgtggatatcttgttagtgtagatgatctaggttgtgcgagtccttatctgatcatc

SEQ ID NO: 333797 - DNA, 640 bp, Cannabis indica
gagccttcgtgaaaaaaaaaaaaagctcagaaaaatcctccttgcatacaaaaaataattttcttcatggctgacaacggagagaatgttgacacaccacatgaagaaacccctcaccgtcctggaaaagagccaatgggctccaggaggccttccaactcacaatctaaacggaccactcgttccaggaggactcaacctgagggtggcccaaacactcgtaccactcgttctaggatgacccaacctgagagtggccctagtactcgtaccactccttccaagaggacccaacctgagggtggccctagtttacgaaccactcactccaggaggacccaacctgagggtggcccgaatacacggtccacacgttcaagaaggactcagcatggaaatggccaaaacctggagtaagggacaagaacccaatcttggaggtgctcagcccatggatgacggtgcttatgaccctacaaggtacatgcctatcgttgaattaaaaaactgccatctgaggcgctgcctggaggaggcaaaccagcagaatgctaaattggagcaagaggcagtcgcagccaaggcggcacaggggaataatactcaaaatcaacctgatcctagagtgagaagaccacga

SEQ ID NO: 333798 - DNA, 1016 bp, Cannabis indica
agatcctggtaaaataaattccaacatccttctcagcaaccagaaccttttgggcctcggccgacgccttctcgactttggacaactttccactcaaggaagaaagtttgtccttcgctgcctcagcctcagaacgagaagcatcacgttcttgcaacaaagtggccttctccaaattcaccgctgacagactagtctccagggaggctaccttgccgcttagagtccccttttctgactcaagggtcgaccgagtaaggtcccagctcctcttctctgactcaagattgtcggctttgctcttcaaaatcttaatgtcgacctccaaagcgctaattttggtaagagcagccgtcttcgcagcaacagccgcttcataattcttcttgtagcgagaatagcccttggccaaactctccctctccctatcagtttgtggggcgaacttcatagcatgggcacatctcaaagccgtctagcaaaaatagacatacgtatgagtaatagtaagtaaagcaaaaactaaaacggatcgaggcacatgcaaatagtaaaatacctttattcccgagatggcagtatcctttaaaatagaatcacgcccgtgggagatgtagaagtcatcatcacgttttctgacggtgtccaggagagttttgaaataattctcagccgattcttcgaacggaacatccttcttgatccggaaggcggtagtctcgtcccattcagccaacacccgcgggggatgactgggtaggggcggggagcctcggccgaaagaaaaggatgtagggagagttaaagcaggagaaagggcaagctgggaagtcgacggcacgccgaggagagaggctgaggtccgagcaggagaagaggatgggagacctggcgtagttgtcgggagggtctcaggcttagagaaaccttcccgattaggaggccctagattggaggctcccgtcggggccaacccccggattgccttcaccttcgcccacgcccgacgagacctc

SEQ ID NO: 333799 - DNA, 679 bp, Cannabis indica
gtcaacagtcaatactagctgagtacttggataagaaatccattccaagtataatatagaaattcgctaaatccatttctattaagtcagcactcaactccctaccctcaattctgatcggcatagacttaatccaccttttggagatgactaattctccaccaggcagtagggttccaaaccctttatcataactatcacgaggtctatccaatttgctaaaaatactggctgccacataagagtgagtggcctcagagtcaaacaatacagagaagtaagagttgttgaccgatcgctgacctgttacaactgaggggctggcttctgcatttgcctcagttaaagcaaacacccttactggagcgagttttgtaacagtcttctgttcttctttcttaagctgtggctagtctcttttgtaatgtcctgacaacccgcactggaaatatccttgccctctacactcacccagatgatgctttttacaactgggacactccgggtaagtgtatcgggtttcagaaccactctgacagttgcctcgaccctggttcctacgaaacctcttattctaacctgagccaccgggtgcagttggtgcctttcgtttctgatcggtggttgagccactaccacccctaccataaccagagtaccataaccagaggtaggagga

SEQ ID NO: 333800 - DNA, 964 bp, Cannabis indica
taagaactttatcttcttgtccttgcgctacgaaccattgaggttgttccacataaatttcttcttcaagataaccatttaggaatgctgacttcacatcgagttgaaaactcttccatttgttttgtgcggctagagctgttaaagccctaatagtgttgaggcgtgcaattggagcaaatgtttcgttgtaggcaactccgtattgttgtgagtatcctttcgcaactaaccttgctttgtgtttttggatagagccatctacgttgagctatgtcttgtagatccacttgactcctatagtatctttgtcttgtggacaatctataagctcacaagtctcattcttcacaatcatctttatctcttcattcatagcttttctccatacttcttgttgttgagctgcttcaaaactttctggctctataagtactaagttgcatgtcttgtagatttctgatagtggtcttgttcgccttattggtgagtctggaagagattctatgacttgtgcatgttgattctccatggtaggttgaattggaacatcattttgttcttgtcttggcagcagaggaatgttgattatctttctttcaatttcttgtgtctcctagttgtatgcagcatcttaatcaaattttacgtctcgattgattattagcttgtttgtttctacgctatagagtcgataaccttttgattgagtaatatagcctaagaagattcctttctcagtcctctcatcaagcttgcctcttttctcttttggaatgtgactgaagcatatgcagccaaagactttgagatgctttgctgatggcttacgtctgctccaagcttcgattggcatcttattctgcacagctttggttggacattggttgagcaagtagactgtagtgcttactgcctctgcccaaaatcgttttgggagacctttctctagcagcatggctct

SEQ ID NO: 333801 - DNA, 1099 bp, Cannabis indica
ctagatctgggactcagactaggacgagaacccagacgaagaaccaaacccgaacctagacctagacctgggaccgaagattagaacctgaacaagaatcgccgaaccaggaccctagaacaagaccaggaccgtgcccaggacccggactcagacctagaaccgaacactgacctagcctcagaccaaaactgagactggaactcgggcccaaacacggtcgtgtaaccagaccagaactgagatccagacctagacctaaatctgggacgctatccaaaacacagacttagaatagataggtatccggatacgaacctggactttgaccaagacccagactgggatcgaaatgctggtcctagatcttgacggagatcctgacccacacccaaacttagacccgcactcaggacacgagcttggacctggaaccgaagctagacccagatcggggtccaaacctggacacaaaccctggcacagagtaggacctgaactcaaacacccacacctagaatcagacccaaagccagaccctgacccggacccaaactcgaacccaaacaaggatcagaaccaaggacttagaccacgaattgaatccaaactcaaatcgggattggaacttgggactcagacccaacctagactaagacccaggacgcgaaccacaaccggagcaaaatctggacctagactgaaattcggaaccgaacccaaactcagaccatgactcgaactctgacccgaactcaaacccaaactcaaactcaaaatcgcaaatggaactagaaccgaactatgactaggaccaggaccacgacctaaacccgaacccgaacccagttcagaaccatgacagagagctaaacccgaattgagactaggactcgaacctgaacctagaccgggacccaaacccacacaataaccggcacatggacccagaatcaggatatggacctaggaaacagaactaggaccaggacctagtacccgacccagaaccaaacatgaacctaggaccaagctcgtgacccggcaccagaaatggaaccagactgggacccaagattgggatccggatctggaccca

SEQ ID NO: 333802 - DNA, 628 bp, Cannabis indica
aattcactctcttgaaccctctctctttctctttttcggctaggaccaaaaccaaaggagaatcaccttaattcaatagtttttctgggatttcagcaaggaattcaaggaggttgatcaaaggtaactctagttcttctttagttgtatttttctaggttttcattgatttcaagttatgtttttgctagatagtggctgttagagtgtgatgtttatttagtccgaatgttagggttcatttgagttaatctaagttcatagcagctggttttaaggtttattgttggttttatgcaacattgagctttgagttcaaagtttttagctttaatggcaacttgagttctaatgatttgttttgtgaaatactggctggaatgtattgtgaatacccatattaggtaccctggaaagtttggtagtgtttgggttggttttgagatcaaggggagaatttttgggtttccctgcgcagaaccggtcgaccggttctgggggacctgtaccaaccggtcgaccagttggtgtcccaggattggacttccagttggggccggtctgccagttgggggagtttttgggaccttagtttttcccaattttgagatatttagggtattgccat

SEQ ID NO: 333803 - DNA, 541 bp, Cannabis indica
tcgacctgccatcgacttacaacatatgttaggtcgtccaacattaagttccaaacaccagaaggtgtaggagtggtgcagggcgaccagatactagctcgcaatttctatcgcatagagctgcagcacagaaaaaccggtcatcagtttatggcgatcttcgcagaagaaagcgaaaagaaggacaaagatcttgacccccgggttcaagatgaaagaaacttattaaaaccaattgaagagttggaagaagttattctcgacccaggaaatctcacaaagtgtgtttacattggaaagagcctgaacgagcagctaaaatagcagctaataagtttcttaagggcgaaccaggattagttcacctggagccatggagtccttaaattcaacaatctcaatagtttaggggacatttttaacgaccttaaaagttcaggggggcatgatttagttacaattttgtttgtgactaatttgtatttttcgtcacaatatttattgtgactaaaactaaattagtgacaattgtatctaaata

SEQ ID NO: 333804 - DNA, 594 bp, Cannabis indica
ttgctcacgggtagcagtatttttcctgctatgaactttggtaaagccctcttcatcaacctgtggcatcttcctgttgtcctttttaatgatccattgttgctgcccccccattttctttttacaatctgttgcagcatgacctataccagaacaatgtgagcaagaaattggcttccattcatattttattcctactgatgtgatcgaaccaaattcattttcaaactctaagaaagctggcaaatcttggtccatctgcacttctattaaaacctgagggaagttcaatctctccctttctttagtcacattatctaccatgattggcttccctatctgaccaactatcttaaacaatgacttttggccccaatatttcagttccagttcttctaattggatccatataggcacactcttcatatcatcttttttgaatgattcatttgggtcccaaggcctcataactactggtcttctgttaaagaaaatgaaacccccattcaacacttgatccctatcctcaattgaatgaaaccgaatgatgaatataccataggataacaccttcactctgtccactttaccctg

SEQ ID NO: 333805 - DNA, 424 bp, Cannabis indica
aattttagttatataggcacactttatatagaatagaaatagatatataaaagttagtaagaaagtatttgaaaataaaagtgttaatgaataagtgtcatggtaggtaacaaaacaaaagagaaatagagtgattgagaaagtaaaaacaacactaactttagctagtgatccaaactttttagtacgacacatttgcgcatttgcctggtcttcaagacagtccgaccgaaaaagctgaataaaatgaggacaaggacactttacctttctcagggctcgtttggaacgtcgtattaggtcgtattgtattgtattgtattatattaaattgtattttatgtaatatttttatgtaaaactatatgtagtattaacttttatggacacttaaatatataatattttagtataaattaaagtt

SEQ ID NO: 333806 - DNA, 1372 bp, Cannabis indica
gacctcacctgtgtgagttttactacttgattgcgtatacttgcgtagtgtttataaatttcgtaacaagaagatgctgctacagacaacgataatacaacatcttccaatgcaccagaccaagtcctcagacgcaccagcagggtcccaaaacctcctgcgtatttgcgtgactatgaatgtcactctgtcatacaagacaaatcctctaccgctcattgtctacaaaaatttctatcatatgaaaaattatctgattctcataaagctttcatttctatcattacagctttgtatgaactagccaacttcaatcaagcctctcaatacaaagtttggaatcaagctatgaacaatgagttgtttgctctgctcaaaaataaaacttggacatatgtcaaacttccatcccacaagaaagctatcggatgtcgttgggtttacaagatcaagttaaatagtgatggctccattgaaagacataaagctcggcttgttgcacaaggatacactcaacaagaaggattggatttctttgacacattctctcccgttgctaaaatggtgactttcaaatttcttttagccatttccactatcaaaaaatggcataccttacaactagacgtcaacaacgcgtttctcaatggggatcttcatgaagaagtgtacatgcaacttcccaaaggacttgttttaccacctgaatttgctggcagatctgacatcgtttgcaaattaaacaagtcgatttatggtctcaaacaatcttcaagacaatggtacaaaaaactttctgatgcattaattcaagagggcttccatcaatctcaggccgactacactttgttcaccaaagggtcagaagacaatttcattgcattgttagtctatatcgacgccattatcatcacggggcccaatctctctctgctacatcagctacaatctattttgcataacagattctctctcaaaactctaggcactctcaaatattttcttggctttgaaattgctcgtgctaaagacggattggttctatcccaaagaaaatacactctacaactactagaagacacaagatatattggaagtaaacctaccaaaactccaatggatccgcgtctcaaactagatgatcaacaaggcgaagcccttgctgacccttctccttacagacagttagtaggcaaactactctacttgaccttatctcggcctgatatcacctttgctgtcaacattttgagtcaattcatgtcttcaccccgtactcctcatctacaagccattcaccacttacttcgatacctcaaaggaagccccggccaaggtcttttgtattctacctcttcatctctacaacttc

SEQ ID NO: 333807 - DNA, 601 bp, Cannabis indica
acaacacaggcatactatataataatatagtcccataagcacattagtaaattaatttcattattttacccttcttgggtcaaaattactaaaatacccctagctcaccaacgggctcttatcatagcataaatcatattaattcacatatattgaactatgtaataatacaattccttaattattcataattatctaattagagttttgctaatccatttcataactctaggttattataattaccccctccttatagaaattttgtctcaaaatttacctgaatcactccgcatatttctgtgcacatccgtctcgagctcccaggttgcttcttccactttattatttctccacaatactttcaccagtgcagatgtcttgcttctcaagactttttctcttctatcaattatctgcaccggttgttcctcatatgacaagtctggctgaagttccaatgcttcataacttagtatatgggacgagtctgagacatacttccgaagcattgaaacatggaacacatcatgtccagctgccagcactggggcatagccaacctgtaggctacttgccctatcctctcaaggatttcaaa

SEQ ID NO: 333808 - DNA, 678 bp, Cannabis indica
aacaaagggagataagggcaaaagcaaggcaagagcccacattattcttcaatgatgaggatcatcacaaatttgtcaatgacttctcttctaggaagattctcaaaggtaaaatttgtgatctccctagccttgattatgtagattttagtcatcattttgatactctaggttggacatctttcattcaaatcaacactccaatatatcctagactagtacaaggtttttatgcttgcattaaaccttgcttagaacctttaggagttaaaggaacccttagaggaatggcttttgaactaaatgtagaatctctcaatgaaatgttaggagcacccaatagtggcatattgcttgaacccaaactttctcttaaaaatgatgccatctttaactttgatgagtgttctagaaatctttgtggtgatggccctcttattatgagaccaaaaagacaccaactcactttagaggctaaaattctccacaaatttattgtagcaaatcttgctcctagaagtggacaccaagatgagatcaattccattgatcaattactcatgcatctcatcctagccaaaactacaccaatcaacctaggctatcttattttaaaattcatcattgatgtggacaagcctaatatgattaaggcacttccctttggttttcttctta

SEQ ID NO: 333809 - DNA, 578 bp, Cannabis indica
ttacatgtgtgttcattgtgaaatacagtgacctcgaagttgtcagaatgcatcttcttcctccccctcaatctccatttacaatctggagccttgcatgtaacgtacaacacatcaggggatgacttcttcaccatccactcaaaattgttattaagtgcaaacctacccactacttgtctcagttcttccttgttttcataaaaattaccaagctctatcacccctgcttccttactttgtaaacaagtagttagctcatgattttccattatatcttcctttgtccacataggagctttgaacttggtacaaacttcaaaagaggagaacgttgagaaggttgcatgacgagaaggagcatgttcttcagttctgccttgtcgactactgctagttccaggtgtagtgcgattttcactacggggttgtcgttctcgctgtgtaccatggttgctcggtacacactctaacctcaaggaaggtcccgctacggcttcatcgactgccaaatcatgttcatcgtccatattcaaatctacaataggatcgttattgtagaaggttgtatcgaactc

SEQ ID NO: 333810 - DNA, 536 bp, Cannabis indica
tctaattcttctaatcgtgcttgatgtacatccattcccgcagccgtaactaatctagctgacgacacagctatttcggcaagtaatactgcttctaatccataaaccaaagaaaatagtgtgaaccatgtagatccccgttttgaagtgcgataggcccatagagctaaatggataaattcgtgccatattgtaggactgtcgtgcaccatgcgacttaagacccgcaataataacttattgaacgcctcagcaatgccatttccttgtgggtagtacctagttgacttcccatgaaaaatttgatagtcttccaacaatttcttggttgctttttcagtaaatggagtgccattatctgataaaatcctttttacgataccaaaacgacaaataatgtgttctagaatgaaagtggccacagcttctgtagaagcttttttcaaaagaattgcttctgaccattttgtgaaacattctgttgcagccaaaatccaaatttttccttgagagggtggtgaaattggacctataag

SEQ ID NO: 333811 - DNA, 608 bp, Cannabis indica
aatctggtgtggcgtgcttgtcaagggtgtcttccaacgatggttcagttgcgaactaaaagggttaatgtgtcaacgatctgtccaatgtgcaatatgcaggaggagaccatttaccatgcccttgtagaatgcccagctgctcgactctgctggaatagagtcggtataggcactctgctgcaagataatgcagcgtttctggactggtgtttatcagcttttctggtgcttgattcagatcagaagaaactcttgattgctctttgttggtcactttggaacgcaaggaatgagaaggtttggaacaacaaattatctagtgcggaaagtatagtttattcggcaaaaacttaccttaatcaatggcttgctgctcatagttctactacaatttacccgtgtcctggcttgatgcaaggtgacggggctgagcagtggcagccaccaattgcaaatagtattaaggttaatgttgatggcgctatatttgctgacactaatcagtatgggttcggttttgtggcccgtaatgcacaaggtttattgatcgaaggtgttaccaagagttaccaagggacggtcacaccagaattcgttgaaagcat

SEQ ID NO: 333812 - DNA, 1314 bp, Cannabis indica
ttttttttcctgttatgttatgttatatgtgacttttattattttttaactgttttttaactggttattttgcttctagtatatatttgttttgcctgttatgtatgtgtttcttacggttgaccttggttttgtatattgttttaaccagttatttttttttatatatgtattcattaaaatatcgtgtaatgtatatataccattaatgcttatatacctgtaatgtgtattatctacaattgttattccaattttgattctgtgtataatttgttttgtcttttcagtttttcgttttcgattttaattagcattaatttttcaggttataaagataaggaagaggatcagaagcaattgaagaacttacctgaaaacgatcggaggtcgatgatcgttcctgaagctctgtcttcagtcgatgaaattttttggttttgagatcgactttccggagttgaagaagacgatcagagttggagaactttccggagctggagaagacgatcggaggcggcgattgttgctggttttggagaagacgatcggaggcgattgatctttgcgtttgagttcggtttgcaaatcgaattgcagtgatcaatcgcggctggtgattgtgcgatttcgaacgtgatgatcggagagaaaaccgcagagattagggagagagagatcgaagtgaatggattctgttatgttttcagtttggaaagtatgggtatttccattttaagcatatttatatattttttttggattcccatatttttcctttgaactaatttttttttccatgtctttttcatttatttttctctgccataaaaaagtaaatgacaacaaaaaatctcatatttatgaaaaatcctcttttcttttattcaaaatagaaaaatatcacattttttttaaattccagtataattccaaattatattaaaaaaaaagttagattcctgatatcaactccaaaatttttgtttaaaataaggattgttttaatttatactaattaatcaatccatttaaattaaattctataattaaaaaaaacgtaaaccaaaatcttataacaatgaattaaaccaattataatagtgtaactagtaagttttcttaatatttgattgttgttagtgtttttttttaatatataaatttctaaaataagtgtattatttttattttttatttattttatatataagtggccaactaaacaaataatttttaaactttacaagaaaaatagttatggtaaaattaactaaaatttgtattcatttatattttttaaaaaacattatc

SEQ ID NO: 333813 - DNA, 779 bp, Cannabis indica
gtggcccttttcgttgtaatagaaacattttccttttggctttccctcaggattagcaacctttttctgtttaacctttttcacagctttaacaaacttctagctattcttccaattcttcttgttgctgggtttcaaagcagaggtaatgtttgcctcagccttagccgtaccattagcactgccagaattaggagctttagttcctcctttctatggtcctccaatcaaattttcaaatgtctaaaggttattgattaactcgtgaaagtcaagctccaacttgttcatgacataatttgatgtagagggtagaaaagtctagagtcaaactgttcaaggtcaaacttacttgagtcgtctgatgtgtaacagctccatgattctcagtgtaacgccctaaataattaggcacgctactcaagatacttatgaaaccctaatcccctaaacgggattactaataaaattagcgcagaatttaaaatttaataacattaagaatggaaatagacttttaatattttaaactttataaagtaaaagttacagaagttgggatcccaaaaacaattataaaatattattacaagtccttttctttcagctggcctaagcggcaaaatagagtctaaaggaacaacattggtagaccccaacccgcttggtctgatatggcccggacatgtacattctttgtccagctcctgcactcatggctgatcaacaacagtcttacgatttcctggacagtagagcacccgtgagccaagcccagc

SEQ ID NO: 333814 - DNA, 1099 bp, Cannabis indica
gagatttttgaattgttctgtatttatttgtttatgaatttattaaaatacttgaatatttatttgttctgatttattcatacttgaatatttattttttattttattttaaattattatgtaaatttatgtaaattataaatcaataaataataaaagaacatatctaatataattcataatttatgatatgaacaaataaatatagttatgcctgcaaatcggcttgattaaattcaataggaacataggatagcattttttttctaatgacaaaagaaatactaatttacagaaagccaaaagttagaatttaaacccatttagacaatgcctattattgataatagaagcaaaaaaagataaaggtctttacgatgataaagagctttggagatgccaatacaatacaatacaataatcaattgccacaccaaaaaaaaaaaaagaaactcaacttacccagacattttgatgaagatgttcggattgggagctctgaaaaaattgaaataaacaaaacagaaagaaaaaaaatgtcaacaatattattttaaaaaaaaatagtatagattgcagaacgtaataatgacaattatatgattcaacgccatatattaatataataagaacacaaacttataaatactcatcaaatggataaccaaagatcacatcaacagtactacagaagtgaaataagtacactatctgataacactttctttgcaatttttaaattcagagacagatttatcacaaataccttttctcaaggaaaatcgtttagggtgtcaaagtacaaaaattcacattaatttcctagcttactttctcataaactaaacgaaaaattagttagtttccaatatacatattttctttcttactttccataatcccacaaaacaactcaaacgtacaagagtcgtagtaaaactgaccttcaagagggcgaagatgtcaaaacaaatccagaagctgcaacgatatttagggtttcaaacggagaactgacccggcttaaaggattaacagaggacttattcgtaaaatctcaaatattttacggtttgttagagatatgtggctaagatga

SEQ ID NO: 333815 - DNA, 672 bp, Cannabis indica
caacgactagttagtcaatgcaaagtatgagacaatttagtttattgttgatctcttcatgaagaatctaaaataattagaccatataaagttcatcaaggattcttcatcttccagagattatcaaataacagttcaattgtctccagaatagatcactatcataaaatatgagcaatgtactatatcaagtaacaatataaacatatcattgctcccactgatctctcacatagtattgactaacgataatgctttgaattaaccattttgagaattacaataatcactatcttgatgttcttcctcaaaaggaattaaatctattgaactcgggtgtccttttagttaccttttctaggcttaagcgagccatttaacaaggtatgatccttaaacaagagtttagctctcacatccttatgtactgatttccaaatagtcaccactttacaactcataacaaaactattgttatagtggcacacttagctgggtaaactcggtggtgcagatcgagcctagccaacaaccaacaacaacttctaggcgtaataggagctccagttgctccaaccgttctagtggacaagctttaatttaccttaatttgaccatcaagaaaaactcccaattgatatgggatttaagcctaaagctttcacatttgat

SEQ ID NO: 333816 - DNA, 966 bp, Cannabis indica
ctactttagaaaactaaaaaccgtaaattagtaaaaaaaaaaaaaaaagttaaaaaaatagaatatggggtaattctccaaaaaaaaaaatattttttggtggatatatatgatctgagaggagaaatatgtacgaaatattttttttgcatttttctttgactttgacttcgccattaaagaatttttgagtctcaacctctattttttttataaaagaatatcaaaattcttatttttgataagttatttttaagaacttttagagaaaaagagggagaagaaaaagagagaagtgaatcatagttttttttaagggaataatagtatttttaacaaataattatatatgtaaaaaaataaataaataaataatatttaatagacataaaataaaataatgacacatattaaaaaaaaaaaaactctacatgaagtcgtttttaatacctctatttaatcattatccaataatattatgtctaaaatgatatatctgttaaaaaataagattagttcaaaattctatacataccatatttattcatatcatttatttaatttaaagatttaataattaaaaaagaattactatttttaaaacgttcacgccaattaatattttagtttaattgaagataaaaaaaataagagccatatgtaataagtttcaatttgaactgtaatatttttttttaaaaaaaaaaaaaataacactttttgtttatagttacatttaatatcaaaaaaaacataaatatatcaaaatgagaaattttttcaaaaaaaaaaacactagagaaattattcgatatgttagtatgaaaataacttgtctttaatttaatttaaatctaattattatttttctgttatctaattgttttgaataatttatatttctttattacttaatttttttaaaaaaaaatattatttaatatctaaattaatttggggcttttt

SEQ ID NO: 333817 - DNA, 542 bp, Cannabis indica
aacgattgttgttgcggccttgacaattttcactaccttgaggttgtgttcgtaaatattgctggaggaactctcaaatcgcgggtcatacaaatcagaagtgttgtgtcctgatggaaagtgttcacgcaatctcttaaacatctcagcccatatactaacatcttggaaacgagtagaccttgcttgagattgactttgactttgacttggagagccagatgttgattttgtccccttctttcctaagatgtaaccaactccgtgcatatagtcactcctctcttcaaatatcttacccataaccttgtactggatgtcaagcgtcaactgtaaggatcaaaaatcactaccatattggctttcaagtatgtttttggccatctctacctctattttatgggtcgattcatcctaaccatagataaaaatgatttaaaatacaacaatgtcataattttatgaagaaaaaaaataaaatattagtgtaacgcacccatttttctttagcagcatcattgacccaagctttgtcctttttt

SEQ ID NO: 333818 - DNA, 538 bp, Cannabis indica
tatgttgggttaggtttagacaaatttaaaaggaattttattgtgtttttattctatgattgaactttgaaattaattgttaacgttcaagttcctgagcttgaagttccttgtgattttgcttaagttggagctttgaagtttaagttgtttaatctaaattttgggggtttttaccattggatttttaatgcatgaattgtgttttaagctcttgatttaattattggaaaatctatttgatggatttaagttttggttgtcaattgagttgaaatggatgagtttatgggctgaaattcattgttgaatgttgatttttggtgttgttggaaagtgaattaggtgtaattcctctctaattacttggtttatgctaggtgaaagtttggtataattatgggttgatatagcatgcaaattggtatatttggatgcatttttgtggctggaaactgggttttctaggtgaatatgtggaattcaaatgcccagtttataatttgtgaaaatggatttagggatcaaccctatactt

SEQ ID NO: 333819 - DNA, 588 bp, Cannabis indica
tccatttcatttaaatttgaagctctagttgtctcatcttcatcttcaatattagtttgatcacttgcacaataatctggattgtctctaattttctcaaaatgtcgatcacgttttgcatgccttcgaatgtaattatgcaaggtcattgatgcaatcactatttttacttgcttctggtatggataactaggcatatctcttaatattttccatcttttcttccatactccaaaagttctttcaataacacttcgaagagaagaatgtgcctggttgaatacctctttataaccagtaggtttgctacctcgttgaaattgtggaagatggtatctttggcctttatatggtcctaaaaaacctgtaatttgtgggtatcccgcatccactaaataatattttcctgtcaaataaaatataaaaacataattaaaaaattataaagactttaataatttataaatgtgtttagatggcaaccttggggtggttttggaaaatttgaagttgaatcacgtaaagctgaataaaaaattcttgtatcatgagcagaaccttcccacccagcatatgcatatataaatt

SEQ ID NO: 333820 - DNA, 810 bp, Cannabis indica
acagttttaaatatactatggtcgcacatggtcgcacagggtcgcaaaaccaatattaggatatactttgaaatatacttggtcgcacatggtcgcacatggtcgcacagagtcgcacaagatccataataagtactttaattagcataaattttacaaatagatataaataaaagtttgcatatatcaaacacaagaaacattaaatatataatttagagaactaaataataataaatcacacatgagttgtgcttctaccatctgatggcacttgtggacatgtttgcgaattatgtcctgactgtccacatgctccacaattatattgtttcttaagaaattcacctttggaagctatgcgattggttcttggtcttcctatagtcttgtcttcaggaggtgctatcacttgtactgcaagaatatcttcaggaatgtcagtccattgtgagtttggaggtacaggataaatagtttcagcatatgctaacaaccaatattctgatgtgtagtactgtgaacacatagaatatatgagttccccagtattttggggttgtgcctttcctgctgctgctattgcatggatacatggaagtttctcaatatcaaaaactttgcacgtgcaactctttgaccttaaatttactattgcatcgagttctccacacatcacattgtactcattctcatttaactggagagttatcaatgaaccggcttcatcccatctcttgcgtaatatttcttccctctttggtgttaatggagttgtaactacacatgcttcccgccgacgttcaaaaa

SEQ ID NO: 333821 - DNA, 1307 bp, Cannabis indica
tatgtccttcctttccacatttgcagctgcttttgcgcgacactcgccgagatgacgtttggtacatttagggcattttggaatgtttcgcccactgctgccattaaatcgttggtcgttatcagttttgtacctcttgtcttgacttgaatgcacagactggtcctgtccccgtttcttgtggtctttagaattggctccacctttcttagattctctcctggaagcactttccttccaaattttattttcacaccgctccgccgtaagagccatttcgacaacttgagcataactaaattgacccattgacacaatttccacatctcgagcaaccattggtttcatgccttccacaaatcgatgtgctcgcactctatcagtaggtaccagatctggagcgaatttcgccaatctatcaaatttttgtgcatactcagtcaaagtaaggctcccttggactaatccagtaaattcatcaaccttcgctgctagaactgctgaaatcatcccagttcatggtatctacatcctttgtttgttccaccacttcccaccagatacgagcatctttcctcagcatgtaagatgcacacttcactcggtcattcccattaacccttagcatcttcaaaattctttctatgcgacttatccactcttcagccaccactgggtctatgcctccctcaaactcaggtgggtgttgttttcaaaatctctctgctaacatctcatgtctagcctctgtagcaggatataccaccgcagctggtgggtctctattttctgcatcctgccttatttggactggaggctccggttgacgtctcagatgacgaagttcttcatcctgcctatgaatgattccgtccagtgcggcaaggcgctcttcccattcctgtggtgcttgaggtggctcattgctccctccatcatcttggcctctatctcggccttggccttggcctcggcctcgacctcgaccccgacccaatctgaatgacattctaggaggcatttctaaactcttgaaacacacagaccaaaacacatcaagaaggatcatttttatcatcaattttacatgaaaagaatattacactcccgcgtgcagaaattaaaggcaacttaattataagtaataaccacttacagtacagtgagtcgagctcgtctcatggaggtgaactttacatgttagggataaccacattctttaggaccgtgttgctctcataccatattgtaacaacccgatttaccgagatgtcacataggatagtccgtataaaacaatttaataa

SEQ ID NO: 333822 - DNA, 670 bp, Cannabis indica
tccatcttcgtccagcagtttgttttaaggtagaatgcttagcttctgggcctaacttgaacattgactgcaaaaattagcaataatagttagaatgggcaaaaaatattcaactacatatgcaaattaatcttagctattagcattaccttgatgtactcccataatagatttttaaattccattggaacttttctccaatcattgtatgccagtggaagatttcgtcttgcatacaagccaatctggctaaccagttcatttgcagtgtccccaatgcactggccccattggttgtactcgacttcgagaagtattccttcactcctattctttatatgcttcagacccttatatgcccccctaccatttttcttctttggttgtgaatcagggtcaggttccagttctggtgcagctggatcagattcagattcaccaccaatggattgtccccaaagggcaaaatcatcatcatagtcaccggggtcatccatagtcaatgtacctacacattaaagcaaaataataatacataaaattaacacagaaatttagattaggcgcaaaaaaatataaaataatataaaacaaaacacaccaatatttatagattgatagtttactcaatccataatccttcaccgtcttcccgagaagaaatgatttc

SEQ ID NO: 333823 - DNA, 1389 bp, Cannabis indica
catacttagaatgttatatgataaatgtttatttaattggaatgaaatagttgagttaggatttaaggcaataagtgcataagtgtggtattagtgcttaactcgctagggttgttgattataggggtacttgtaaaaatggacccttcgcaatcatctagaccatagggcgagcaagtagagcctggtgcagaccagacaatccaccagcaccgcctgcgcctccacagaatctaggggataatgcggggcttggcaatgctaatctacctgccgactgacagcaaatgtttcaagaaatctgaggtatcatacttcatcaagaggaagaattgcgtcggttaaggcaaccggcaccgactgcccctattgagcaagtgttaccaccagcttttgtgctagtggtgggtaaccgggggttcatgtttctgcatatagattcagtgtttaagtggtttgtgaagctgcaacctccaacttttctgggaggtactaatataattaaagctggacaatggatgagtacaatcacccgtatccttgataatatgggggtaacgggaacatagagagtaaactatactgtctttatgttataagatcatgcccgcatttggtgggacatagtggggcagacttggatgttagtgtgatgacgggaagagttcaagagtctgtttgaggaaaaattttgtaacatcgctgtgaagacctcacatatggaagactttgtgaaactgactcaggggaaaatgtctgtggccgaatacactctggagtttgatcggttcaaattttctgatgatatggtgcctacaaatttcaccaggaaacagaagtatgtgagatgactgaacgccacaatcagtcgggacttgaagattaccactacccatgacactttgtataagaaagtggttgaattaaccttaattgctgaggaggctgagcaacatgtaataaaggagcagactacaaaggatgccgccacggcatcgaatcctccagtaagtggtaatatcagtaaggggaccgacagtggtaaccctgatcacaagcggaaagttgatgcttccagaacatcagggggtaatagaaattttcaaggaaataaaggtggccgtcagggccgttgatcttcattcgaatcttatcctgagtgtctgaaatgcaagaaacaccatctgggtgaatgtcgagccaaggcttatttccagtgtggcatggtgagccactttatctgagattatcctcaggccaagaaggaggagccgaagaaaaatatgttggaatttattttatcaggatctatttactatcatgtatgttggattaacaacctaatatgaattctaaaacaataaaaataaacacatataaagttagaaa

SEQ ID NO: 333824 - DNA, 542 bp, Cannabis indica
acttctttccctgctttggataggaatctagtctcccaactttgtatcttcttaatcatcttctccttaaggaaccccaagattgcattcttgcttcgacccatcgtacatggtaagcccaaataggtactattttcagaagcaggagccataccaagtaagccacataactgagcccgtacattttgctgcatattgttactaaagaaaactgaagatttagcaaaattgattttctgacccgaagctttctcataagtactcaggagacaaagaacattagccccttcaatatcatttgctttgcagaagatgtagctgtcatcagcgaacaacatatgtgaaacaataggagcatttctagccacacgacaacccgatagccaattcttgcgaacaaataacttaataagtgacgaaaagccttctgcaaaaatttagaacaagtagggagataatggatctccctgacgaattcccctactgggaatgataggccccagaacatgacccccatgagtgaccttatatgttactgaaga

SEQ ID NO: 333825 - DNA, 723 bp, Cannabis indica
atggaagaagacgcaaggatggtgcgttttcctcaccatgatcctctggtcatcgagactcccattgccaacaagatcgtggccaggatattgatcgacaatgggagttccgtgaacttgttgtttaaagaagccttcacagcgataggtctcacagaccgagatctgtcaccaagtagttctcagctcacgggattcaatggaaccacgcttatcccaatgggaaaagtgaggttgccagtcaccttgtgtccggactcaccccagagtactttcaagtactacacgtttgtggtggtggactgcccaactgcctataacgcaattcttgcccggctgaccctagtagactttggcgcagttacatccattcggcacttgtgtctgaaattccccacccaggaggctggagtagggaccgtgagtggcaatcagggtgaagccaggtaatgttataatgtcgcggcccacttaccagtattgatgctctgtgaaggcatcgagccagaattggcagaagaagatgagttggatccccgtgtgggatctgaaaaaattgtagaacctatgcaagacatcgagaaagtgccagtatgcaacctcgaccccaccaaggtcctggctgggaaagagcctagaaccggaggaaaaagataaaatagttaaagcactaagggcaaccacaaatttttttgcatggtgccaaggagatatgaccggcat

SEQ ID NO: 333826 - DNA, 712 bp, Cannabis indica
ttaagtaaaatctctcgaccagaatgttttttaccctttgcccagtgaacatggatcactatttatagggctatgagcttggagaggaagtatttcccttctcgctacaatggatataagcaaaaagattgcataataaatacggaatacactgatcgtgggatttggacagcttgccatatctctgcaatctgatccccaagttatagggatttctttgatgactcacgatgcgaaagctaaattcgctaagtgttggtcggtctacgcggattgttgatctctttacttcgagcacgcatatgaggcatcctgtttggactatattctgtgaaaagatacttggaattgattccatgtgtcaccatcatgcgatgccacgtcagagtacaaaaattgggataaaattttccccctagtcagtacgggacttccgaagttgcgtgtaggcttcatccaagctgcttttgcatttggatgggtgacacgtgtcaagcgcatctgttcgcgactcgatgtgaggctgactgggcatccgttcgattttcgactaataaatgctttaacaattgatattttgaaatccaattttctctcaccacggttgacggctgcactagattatttttgattttctatattcgcttttaagggggaaccgaggcgtctgaggttcttttgaaatgattaccctttttcgttgtttgcctat

SEQ ID NO: 333827 - DNA, 799 bp, Cannabis indica
ttgatattttgaaatccaattttctctcaccacggttgacggctgcactagattatttttgattttctatattcgcttttaagggggaaccgaggcgtctgaggttcttttgaaatgattaccctttttcgttgtttgcctattaataccagtgaacatttgtacacaaatttattttcaccatcgttctttgctaagcaagttcagagcgaaaagagaggtttttggcttcaagtttactgaagtgccttcatcaaaactgctcgtttggcttggcgttacctgaatccagacatctgatccttgagtaagttctcgatttcctttatgtttactttgcatgtttaatttttgaatgcatcttcaactttgctgtaaaagatttgtaggaaaccctaagttaagaaactctgcgattctcctttgtcatgggttcatgcgatttcaccgtccgtagtgtttgctttctgaactgcataatgcttttctttcatcttgcttattctaagcctcatgaaattttttgccctaacttgagaaaatttcaaacttcctgagttttgacttttcattgaatattcttattctttactctgttgggtactcctggtcggcatatttgcttgtttaaacgtttgatattctgaccaaacactcatcttgtgtgttgtcttttgtagatgaactcaggtgagttttgggagagcgaacatcgaatcgaccaagacttgcttcaactcttacacgaggaccatcctcgtctctgttttagcccaccttcttcgagtgaaaggcattc

SEQ ID NO: 333828 - DNA, 942 bp, Cannabis indica
gtgcaaagcaccttggctgcccacgagtcaggctgcacgcagcctatcacgtgtgcgtaagggggctcttacagggtgatttgtcgagggaagtcggcatttgcagggtgagaacacgagatttgtaaccttttttgtgtctgagcgaggcgtgcatcgtgtcttcagatatgatttgtctgagcatgcgcgcgcggagaggcttccttgttttaagcacctggtgcgtgcgagcaccatgcttgacacccgtatgcacctgattttcaaactaccataactctttcaatttgaatcgaaatcgagttttgtaaaaactaatgttgcttaatttttcacaaggaatctaaataaattaataaaaatattttcatggaaaaattttgtaaatcacatacattcatcaaataacacataaactaacatgaactcgtccaaatcaacaaaattaacatattcaccgttttaaattcatatttcatgaaagtaaatcattagcatggctcagaggcgagttgttggaaatattttatcaggatctagatttactaacaagtatgttgaattaacatcctagatatgaatatctctaaaataatgaaattaaacacataagagtttagaaaacctgatattgattacagcataataatatgactcattccgctcagatctttaacccttattcctttttgtcgtagagtattatcaagatttgagcctggatctctttctctcttttgagtttggttaccaccgtcttccgcactatgattgagtacttgacttgctatgggtgggcatggcactttatcactatgggtgaattggatgaagaacaattaaggatgtttcgaaatcagtatagaaagtgcctctcatctaatagttattagagaatgaaaactaagttttgtttggttgaagtcaatagttggatga

SEQ ID NO: 333829 - DNA, 710 bp, Cannabis indica
accacatatatcatagctacaaccactgcatacaccacaactgctacaaccacatcgagtgtcagccaccaaaccctctagagttcgatgagaatgagagatgaaatgattttttgccttagttatagaactaaaagattacaattatattttttttctgtaagaattactattataatatatttttttttttttttaagttgtgttagttaataatattatatttgtaagaactatttaattttatcatgttattgtgctactatgttaatgaaaaaatttatatttgatattaattattaatttttattttatttgttattataattatttttttataaattaaaaattaatatttcaaataatatatatttttttaatttaaaaactattgtcccccctaaaagtcaaatataacaattttgacaacaccttttaggggcgacattttgggtattagggcgacattgtcgccactaaaagtaaaaaataacaatccgtgttttacttttaggggcgatagtgtcgcccaaattgacatgagacttttttgtcacccttaatggtaattttaggcgcgaatttttagaggcgatcttttaggagcgactatcgcccctaaaagacattagaggcgacttataggtgattttgtcgcccctaataaatgaatatgttgtagtgtaggaaatttcgataaggattctttg

SEQ ID NO: 333830 - DNA, 794 bp, Cannabis indica
ccgtttgtctgttctctgatggtctggtggagaagacccgaagaagctttaagtttgaggaagcctggactagggatgtgcgtagcaatttggtggttgattctgcgtggaaatcggtggatttcccttgggcccctgctagggtcttcaagaaaattggggctactcgggtcgctcttatgcattggaataggtcccagtttggtaaactggataccctcattagtgatctggaaagaaggcttgatctcattcagagtttgccagtgggatctcgacagtgggagactgaaaggaatttgcgcgctacccttaatgaagcccgtgtgaggaaagaggtgtattggaaacaaagatccagggtctcttggctgaaggaaggggacaaatgttcaaaatttttcttcctctctgctgccataaaaggtaggaggaatgccattgacagcatcctcaataaagacaatgtgtggatttccaaaagggagcttattgggaatgaattcatggagttcttccaaggcatcttcactagaacggacaatggcattgctcttaattgcaacgatttagtccgggactgtttgtcttcggaagaccaagccgatcttattagaagaccctctcttgaggaaattcgaactactctgtttgctatgagtagtaacaaggccccgggtcctgatggtatgtctgttcttttctttaaacactactgggattctgttgggtctgacttctgcgaagcggttgtggatttctttcaaacagggcgtatgcataaaggagtcaat

SEQ ID NO: 333831 - DNA, 987 bp, Cannabis indica
taaaataatttccaacacatccttcgatctcatcaagcagaattagatcaccaaaactgagaggccaacaatctaataagacagttcaattagagaaccaaccgaagaggctaggatctccttagagatctgttatagtgagatttttctaagctagaaactcgagaccagactcctattaagaagacacgtgtactcactttcctcgaggagagctgagatgtcaatgagagacctctcgagtatgaacctcgcctgaaccagattcagcgagatgatgcgaatatgaccaattctaatcgcattcgaatggctcgcattatgtaggaccaagggtattatgcgagtatcaccatgatcctcctaagaaaacatagagatcgattctctatgttacgagctagtcccattgacccaactgccttgataaaccgatataaactcgcatgtcttagttctatcagctttttatgagatgtccatataagcgactccgagagggcgtagacatcttagactcgactagtctcgaatggatcctaagcctacgagcttatgcaagaatatgaacagccaactcgtactatagaagtcgcatacgttgttgtatttagtgacttaagttggaaactgttcttcatttattgtgtttacgttttttggtttaattattgtagttcaatgtataaacggattgataatgaattcaatccttatgtaaatgataggaaacttgctttatatataaaggagtgatccgccatgaaataaagaaaaagaaatttttgcaacagtggattaagcagaccgtgatgtggctgatccactatacactcctgtgttcataatattttcagtttttgctaagtattttgtgtttctgattcgaatactcgtcatcttgggtcgagtactcgcgtatattccctatttataattatgattatttatttttggtgttgtaaaaattccttcaacaacatttgg

SEQ ID NO: 333832 - DNA, 571 bp, Cannabis indica
aagcaatttagtttttacggaactcaattccaataaaaattgacaaagttatggtggtttgaaaattggatgccttgggagtcgaagcttggtgcacgcatgcaccaggagcttcggacaagaccccttacgcgagcggacatgggacaaatcctatatctgaagacacgagcagggctgcgcttaaacacgactcacccaggaaccctgcatctgccctgagggagatgctgtagatgtcgagatttctcggcgccaaggactacaaattcccttccctgcgcgcgtgataggctgcttccagccaaggtgctttacaccaaaatgcaatttttatggatttttttccataaattccgaattttccgaatttcaaaccctaaaaatcaaaataaaatattatttttaatatatttaaacttaaatatcaattttaaattaataatatttaatttttgaatagattattattaattccttgatattttgatgtttaaatttaaaaattgattattttattttaaattatagtcagattttaaaattttgttaatttctttaatatttatat

SEQ ID NO: 333833 - DNA, 1010 bp, Cannabis indica
gggcataaaacccaacaagtatagtcttagcttagctacttttcgaccaatcctctgccgagtgaataggcatcatatttacagggctaggaagcttgaggaggaagagtttcctctctcgttacaatgcgtataaatagaaagatcgtgggattaatgctgaatgcaaggatcgtgggattgaggctgaatacactgttagtgggatcgtgtggatgccatatccacgtaaattgatccctgagttatagggattgagctgatgactcatgatgcgaaagctgaatttgctaagtgttggttgccctgcgctggtcgctgaatatcttgctctgggcatgccagcgaggcatcctgcttggcctgtcttcaggagcagatgttccaagtggactccacgtgtcactgttctcgtgatgccacgtcagagtgcaaaaattgggataacatttgcccccaagtctgtacgggacttccgaagttacgtgtagacttcattcgagctaatttttgcctttggatggggacatgtgtcgagcgtgaccgttcgagacttgatgtggagctggcgtcccttcggtttttgactaataaattctctaacaattaatgtttcgaaatccaattttctctctccacagatggcggttgcactcgattacttttgatttcccattttcgttttttaggtgggatgctgaggcatctcaggtttctttgaggcaattacctcttttcgtgacttgcctataaatatccatagcattagcacataaactcatttcatcacccttctttgctaagtaatctttagagcaaaaagaaaatttcttggcttcaaagtcgccaaagtgctttcgtacaactgctggttggatagacgttgctcgaacccacacacttgaatcttgagtaagtttctgatttcctttatgcttatctttgcatgtttacatttcgaatgcaacttttactatgctgtgaaaaaatgtttaggaaaccctagggtt

SEQ ID NO: 333834 - DNA, 690 bp, Cannabis indica
aaatttaaaagttagcaaaatatcttgttacaattaaaatatcttgattaaaataatgttattttaaattttaaataaggtcattttattaaaattatttaaataatttaaaatataaaatatctcaccttaaatttaaaaacaaggtaaaataatcaaattataaaaataagagaaccaactaagcaaatagatagatttttacctatttttaaggttcaaatatcactaatatcttaaattaattttaaaaaaaatattaattaatttaattctgataattagatttgaactatgaaaaataaaaatctatatacaaaattacacaaaaaattcgaaattaattccataaaaaagcatgaaaaaattggatttgatgcagatggtatgcattacattccatccgcgcaagtggaggtgtctgcccaaaaaacctcggccaaggaggctacatgcagccttgtaagcacgtggacagggcttcagacacggccctgaccatgttccttcggacaacaccttgtccaaatgcacgtgtgactgagtgtcactcggatctgcgcgcgcacgtgggtgacaccatccctaagattttttcaaatttcaaaaattcatcactaattcaaataaaataaaaattgagttctgtaaaaaagtgaattgcttaattttttccatactatccaaaaa

SEQ ID NO: 333835 - DNA, 900 bp, Cannabis indica
cttgtgagttctgaagagaatcacaagaactgattctggtttaagcaaccactcaaaatcgacattgaggtatggaagaaaaggagaagcttattgttgaggtcccaaagctaaatgaagtgaagacatatgcaacactagatgaatcatagagttcagagatagctaaagattataagcggtaggaccgatgcgagctaggatgggaaaggaacacaaaaatcgtggagacatcgatcttcttgttaggtcaggtcatttgtctacagtgtgttgtcagtaagggcaaagcttcatttaaacttggtcacctactttgaaatgaacattgcgggaaaaatcaaaagattttttaatggagcttaaaactaaaaaaaaactcacttaagcttaagaaatatctaagagtggtgagacactaaaattctacctatatggattagaggtggtgctgcctcttatgagcattaggagtatactctagaaagtccatgaaattaatattttttacatggtccattaacagtgcaagatcgagatataagaatctcaaagtgagcattagcaagggtgtgtgttatcaccgatttgagagttttacacaaaattaattatggaatccaaaactatgataatatagttgttgagaattggattaatactcatttagtttgaaaggagtaacaaaacacaaattttaagtatactgaaaactgtaccaacattgggaagagttctatctgatgtaactaccaaatcttcattattaatgaattttacacttatttatgtgcatataacaatcataagatgtgatgtgtgtgcattctaagtgtgatcaccaaaaatagtacaaggaggatttattcaatcacatagtttgagctcctagaatatggc

SEQ ID NO: 333836 - DNA, 750 bp, Cannabis indica
tgattttttttcaaaataaaatttaattataatctgatctaaaagtgttatgacaaaactgtttatactttatgtatctatttgtattaggaattgtctttaagttgattatatttaaaaaaaaaagttgtcaaaaattaaagtcagagtcttatttttactattttgaaaaatacaggatctattttgtcatttaataaaacatagagtctaatcgataatttttacgaaatataggatcctaaatagtatttacccaaaaataagtggttgtgtgtttaatcttgtaagccacaaatacaacacactaggacaatttgaaaccaaaatgaactaacagaacctggtttttaatcgctgaagcaagctaagccagattaagagagcattgctaatgggcacctaacactatctataggtgacgccctataaatagttaacattattccctaaaagttattttcttaagttatatgggatccgatacttaattacaccaataccggtattacaccgagtagggtgctaggcacccgtaatgcctttagcatttctcaaataaaaattgtatggtttttttttgcaaggataaccgttataggttagagaataaaatgtcgaaagacaaaagtaaaaagattcatgtcatccaaaaaagcttactatctattttaatgacatgctaaaccaattaatgggccacaacattaacactgtatcttacataaaaaagagataccatcagaaagt

SEQ ID NO: 333837 - DNA, 592 bp, Cannabis indica
aacttcaagcctgaatttgactatattctgattagattttggaaaaagtcaaaacataaaagttttagatctctcttttatctttccgggacatcttgaatcgccccattccgagcaatatcgagagagttatggtcaaaatactatcagtcgacgcagcagaaaaatcacttccaacacaggtcgcagcatggctttagcatcacaaaaatcgtatttttgtctcacgtgagtgttgggagtttcctagttcgaataggcatttaacatgtgcgtttttctatctttttagtccctgaaagcctatataaagggtgaattggagttgatttcagtcaagcaatttcagagagaaaaaaagagagaattcagatgcaaagtggagagatcaactgcaatattggaggcattcttcagagggttttcaacattcttctcttctctattttcatctcttttcttaaagttaatatgtgtgattgtgctctcataaacatgagtaactaaacactttattagggttagatggatattgtttaacattattttatggttttaatatgatttattttccccctaatttctatgtatt

SEQ ID NO: 333838 - DNA, 637 bp, Cannabis indica
aatcatttggtgacgcctaataagaaaacttactaatattcaatattgtggactcttaagcctcaaatgaggtgttttaaatgagattttttttaaagaaacacttctgcaatatttttgtttgatatatagtgaaacttggggattgaacattataaacacactggacatataaaactaaggttttaaatatatttggttgtacaattaattaatcaaatagcactaatttttttaccgcagtttgtatgattctgttagtatggcttttgataaatattattcacttgaaggttacttatgttgtatcagtatacatatcatttgttcaccaatcaaaatgcaattaaaaaaatcctaataatctatcacgcatcttttttatcatctacatataaaagagagaaagtgacatacatacacatcacattgatcaaacgaaaaatattgcagaagtgtttctttagaaaaaaaaattctcatgtaagacacctcatttgaagatcttttagtaaataaagcttaagggtcaatattagtaactttccttattaggggtcatcaaattattcaaaaaaaataataaaagtaagggacttttcatttttacatttcaaaatttagttttttttttttt

SEQ ID NO: 333839 - DNA, 610 bp, Cannabis indica
gcagtaaatcactttcgagtatttggttgtgtgtgctacgtattcgtgccaagccacctacgtagcaaattcgacaagaaggcgatacgatgtatctttgtgggatacgatagccaacggaaagggtggagatgttgcgaccctacaactgaaagtgttatacatcaaggaatgtggtctttgatgagacatcatcatggtggtcatcgcaaaaggaagcattaccagattctatagaaatggaagatgaattacagaagaaaatgggggagcaaattgttgagttacctacaactcaagatacagatgaagaagaaaacaccgaggatgaggcacctcagaatccatggcaaacgggggtgcatcaaagagaaggagatgatgatagtcaaccagaacttcggagatcaacaagagcacgaaagccaaatccgaaatatgctaatgcggctgtagctgaagaagaaaagttcagagaaccagagtcatatgaagaggcataccaaaactccaagtgactaggagctatgaaagaagaaataagtgccctagcaaagaatcaaacttgggagttggtgcaaaaaccaaaggaagtgaaacccaattcgtg

SEQ ID NO: 333840 - DNA, 685 bp, Cannabis indica
gatcattctgcacgactcgttaactattccattctgtatatgccagcaaggcatcctgctcggcatattgatccgaacagatgctctaagtagagtccacgtgtcaccattctcatgatgccacgtcagagtgccaaatttgggataacatatagttatttacaattacagtgatgccatcacattggaaagtaatgatgatcatatgcttcaaactatttagtcttgtgatttatcagtgtactagatttatattgatgtgataattagtgataaagtttacttgcacaataatatatggtatatcctttttaggccattagcaaattatactagtatcagatgtattggctatacattggactggaccgatattgacagtaaaaaagatatcataaacttattattatgtcttttctaagtcaatatcacttagttgatcttagatcgaaagatcttaatcttaagatgatttggttctggcttaaatgtattacatatgctctttggcttgttcgttaatgctaaccacttggatcggcccaatacttacatcttgggagtatggtagtgtaattgagtgggagcgtcaatcatagatatgaaatctatatcttctataattatttagaagtaaaatgatgattttctcatagcttggcttaacaaacataaatggaagagc

SEQ ID NO: 333841 - DNA, 731 bp, Cannabis indica
taaaacctaacctgaaatttattagttttctaggatttttgttagttcgcagtggctgtttatagtagaatatgttgaataagtttgggaatattatgaaattattattaaggttatcaaggactatttagaagtggtttgaattgttttgggtggttgtagcaaaagttatgcaagtttgagtccaaagaactcaaacttaacttggttgtgataacttgaattctgttgcaaactgggttaaggtttcttcatgaaatatattcattatgatgcgtttagattctctgaaaaaattggtaatttttggatccgcattggatgagttatgagatttccaaactcggacagggagtttcgggccatccgatttatgcagttttaggacggccatttagtttgatttttgttgagaatttgattgaggtttctgcataaaatatgttaattatgatgtttttaggttcctaacaaaatttggtaatgtttggatcagtattggatgagttataagatttccaaacttggacagggaggtttcgagccatccgatttaagcagttttaggacggccatttagttttatttctattgagaatttgattgaggtttctccatgaaaaatgttcattgtgatgtttttagatccctaaaaaattttgtaaggtttgtcttagaatttcaagagttatgtaagttttaaaatgggatagtggagtttcgggccatcc

SEQ ID NO: 333842 - DNA, 636 bp, Cannabis indica
atatactatttttttaacgtttttttaaaaaaattttaacggtttaggtttgatccggtggtttcttccaatagatttcatgtgggttgctaatacggattttggttgctccgttagttgctataagaatttctatgtggaaattctgtaaaaaatataaaaaaaaatgatttagaagtagtaaaaataaaaaaaaaatccaaaaaattaatataattaatatattttatgtacaataaaattattaaaataagattcacttataaattttgagaattttgagagcgcaaataaaactccaaattaagaggtttgtagtgggtggataacatctaatccaaatccaagcatgtgcatggcctcatcttttgggctttggctcttggtttggttcttatgtatcacaaaaacaccaaaaatcgccaacttttgaggacagccatgcccaactcccacaaagagtaaattaggtaaaaatcgattttttattgggctattttcaaaaatatgggaaaaattattaaggttatgataaatatggcataaaaagtaaatgccactaaatatggcattatctaatcaatcaaactaaaaatatgagtttttttctaaaaaaaaccatataagacattaaaa

SEQ ID NO: 333843 - DNA, 1699 bp, Cannabis indica
tagatctaagatcctggtaaaagaaattctaacaacatgtacattcatcgtcatagacaagctcgactgatggtgcagtaagtattgagagtaaatagtttactgtttgtgtgatcatttgtttaccgctttccatttaggcagtatgcaagcatctagagtatgtatgtgttacgtgatgccatgctttaaatgttaattgtttaagtgaatattatatgaggtaaatagatgagttagtgtttaaggtaataagtgcgtaagtgtggtattggtgcttaactcgctggggttgttgattacgggggtactaattatggaccctccgcaatcatctagacaataaggcaagcaagtagagcccggggctacccaaactgatccaccagcgctgcctccacctccgcaaaatctggggcataatgcgggagttggtaatgctaatcctcctgctcactggcagcagatgttccaagaaatgcaaagtgtcatacttcgtcaagaagatgagttgcaacgtttaacgcaaccggctgccccagttgatcaagggttaccaccaactcctgtgccagtggtgggtaatcaggggtttattatgccgcaccgagattcagtgtttgagcggtttgtgaagctgtaacctccgacttttctgggaggtattgatattattaaggctgactagtggatgaccactgttacccgtatccttgacgatatggggttgacgagaactgagagggtgaattgtgcagccttcatgttacaggaccatgcccgcgtctggtgggacatagtgggtcagacccgagatgttagtgtaatgacatgggaagaattcaagacactttttgaagaaaagttttataatgttgctgtgcggacttcacattaggaggattttgttaagtttactcaaggaaagatgtctatagccgagtatactctggagtttgatcggttgtcgaaatttgttggtgatctggtgcctatagatttcaccagaaaaacaaaagtatgttcaaagactgaatgctacaataactcgggacttaaaaattaccacatcacatgacattgtgtacaagagagtggtagacttggccttaattgctgaggaagccgagcaacaagtaattaaagagctggctgcaagggatgtcgtcacagtatcaaatccttctgctagtggtaatactagtaaggtgaccaacagtggcaaccctgagcacaaacggaaagctgaggcttctagagcattaggggaaatagaaagtttcggggaaacagaggtggctgtcagggtcgggggtcctcattccgatcatatccagagtgtcctaaatgtaagaaacaccatcctggtgagtgtcgagccaaggcatgtttctaatgtagcgtggtgggccactttattagggattgccctcaggacaagaaagaggagcctaggaagaatactacccagaacccggggcaacttttaaccatgactcaagctgacgctaatgctagtccgtcagttgtctatcaatggttgttcatatactgtgttgtttgattcgcgggctactcactcttatgtgtcgagtagagttattgaaagttttcataagccatttgatatttatgctttggggtttggaaccctgttaccctcgggagaccttatagtatcaactaggtggattcggtc

SEQ ID NO: 333844 - DNA, 1034 bp, Cannabis indica
gaaatatgaatgatgaaaatgatgaaaaaaaaaaaacacaataaaaagtaagaatgtgtttgaaaaaaattcagtgatgttggggaaaaataatagagatacctcctctcaatcttggtaaatgcgggaacattatggggttttgaaaaagaaaagtaagaagcgcgcttgtgggttctgtttgtgtgcttatgatatcttgagccaaaaccgtcttttgtctatttatgaatatctgagccataatgcctaaaccttgaaaagacctaatgattccaaaggatattgtcaacattagtggagaaaggtaagcatgcaagcttttgagttatcgggctgtggaactgttggaaagaataaaacttttataacaatgtttcacatatgaataaattttgtggttatacatagtgttatgaattgagcatatgagttaattgttagagttagtaggatcgaaattctagtttatgcaaggaagaaagcaaagcatgagtcagcagtgtagtgattatctgatagcgtagttagtattttttaccttactcagggacgagtaagaatctagtttgggggaatttttttaggttatatttagcctatgtttcgggtctgaaaagtaagcattttctcatctattggtgtcttttggagcggttttacgcttgattttcattgtttcaggttcccggggtgtcaaagttcaaattcagtcaaatggtgaaaagacggggaaaactggcgaaaaattggaaaaatctgctcgagaggcatcagtagtcgcgaccaccaatgagccaggtcgcaacccttttctgtggtcgcgactctggtcgcaactttgagattttggcagaacctctgattttcgaggtttgcctgtagtcgcgaccagcttaaaggctagtctcgactaggtacggacatcgtggttttgacctaattttgatttttctctcaattggaggcacacctttcatccctatataaggaatacgactcagaaggtcaacctaagcagaaatagacctaaa

SEQ ID NO: 333845 - DNA, 505 bp, Cannabis indica
aaaaaacccgatcggagtagagtaaaaaaggagccaccgaaaattcaaaaataactgatccgagagccaaagttaaaaaattcacttgtaattcggggatagtgagctaaaaaaagccacaaaaaatccaaaaataccgatccaaaaagtagaacaaaagagccacttgtgatcagggatagtgagccaataaaatagctactatctagagggatgatgttagagagtctcacattgataatgtgcggaaaaatagaatatataagatgaatgggctactcctcccattgtcaattggttttgagatgaaatctctcattcacaattctaacatggtagcagagtcaaactaaaattttaatgagtaactgatccaaatctaaaaatcagtccaaaaagacaagctaaaagagccacttgtgatcaaaccgtgcaatattgtgttagactttttatttaggcttacattaaattttattagttttattaaaacttgggttgattg

SEQ ID NO: 333846 - DNA, 986 bp, Cannabis indica
aactttggcaaaaatagcaagaactcagttttggctttactttctcttttccttcaaacaactaaagccatcaacttgttgataaatttcataaaacgagagatacccagatgccaaaaccactattccaagaagaaccaagctggaaaaacagggaattcgaatcaaaccaagtcaaatgggcaccatacgagctcagacaaagagcaaaaaggtgagaattttctcgagaaacaagcaacaaaaaaccttaagcctgaaattctgagatcctagagatctgaaaatgcagaaaacttattcaaatagtttatgggcgatccccacaaattccattatagaatggggttgctggctttttcctttttaccctcttgctctgttcttcctttccttactcctttagttaagattctacttcacattatcttctttctcaatcaaactctcacactcacacacgctcatgacacaaaatggtaaaaagaaaaactaaaaaaataaaaaagagagagaaatcccaaacacacaaaggccaaaacaaaatgccaaacttggtcacagatacagatgcagccagacccagttacgaaaaattattttgctttttacacaactataaaaaagtgaaaaaaaaaataataataataattttgtttgatatttaaaaaaaaaaaaagaattgattggaccaaaggagatgcgtgggattgaacagagaccatcatcaaaaagaacaatgggatgtcttatgtctctttgttaaagcaaagcagctaagttattggcaggtcacgtgcttgccttgtcttggcctctgtttgcttttttagctctctctatctcttttcaatcttaaatttattatataaaaaataaaataataatcactttctgtgaagctttatgcagaagttggccccctcccgctaaaatgcgcctaactttaaaaaaaaaaaattattctcttttccctcttatttttt

SEQ ID NO: 333847 - DNA, 692 bp, Cannabis indica
ccctcactagttgagataatactgcttgcaaactcaattaattggttttaactaatcaattataattctaaaattagactgtcttatttatgaattttcactgagcaagggcttaattgtgaagaaaaaaggttgtggggttaatttattaactaagagactttgtatggtctaattaataaataatataaatggcaattttattttataattaattataattattaaataaatagttttggcatttatatgattgaatttgaaaatatggtattattgaaagaagaataagttgttgaaatatagtggcaaaattgtaactagaaagttctctattaagtggtcggccattctagtaaactttacctaatattttattcttttttagtccatataattcaaacttaagccctagttgaaacattatcaaaggaacatgatgctctcatctcatccaactgaattattttcttcaaccaaataaaacctagttttctttgtcaaaaaactagcagatgagagacaccttctatagtgattttcaagcctccttcattgttctttatactcgagcctaaagtgatagagtgccatgcccacacatagcaagtgaagtactcaatcatggggagtgagatggtggtaaccaaaccggaaggagagaaagagatccagggtcagatcttgataat

SEQ ID NO: 333848 - DNA, 519 bp, Cannabis indica
tttcaaatttacggtttaggttgctcctgtggtttctatgtagattgttatgtggattttggttgcaatttaggttgctacgttggttgtcatatgggtttctatgggaatgtcgtaaaataccttatttataaatataataaaaaaaattaaaaaaaatgaaagagttatgaagagaataaatagaattacttttacaaatagtttttttttttttgtttggtagagataaattcacacctttgagtttgacacctattcatgctttaattgaaagttttttttagttttattagaagtgataaagtgatatgttatatataaatattaaagatagatatgtaattttttttacatacttaaagatttatttatttattatcattattattgagttatatatatttatggaaaaaaaagtagaaataattaatattggtgaaaaatactttttcattatacgtagggtaatttagaatatttaaatttggtaaataattattagaaaaaaaggtaaaa

SEQ ID NO: 333849 - DNA, 559 bp, Cannabis indica
caaccactgagagcccaccaggttgtttctccgtcatggttgacccctcatccaagcaccataaggctttatgagcatctcggctggtgtatcaaaaagcttaggacaaaatttctcagaatgccctattacaccacagataaaacaaaacgtagggagatattcatatttgaattctgcctagaacccatcctccattacagtctgacggagcttcctgcgccgtctcaagggagcagtgatgtccaatgtaacccgaacacgcatataatctctccacacattctgaaagttcttaggatcagccttaacatacgtaccaacaaaattacccaaattctccacaacactcgcagacctaaaccccggttggagaccatgaatttgcacccagatgtcgagattgttcagcactaccctttttggatcatctccccttctaagtttgtaaaaaacaaactgaaccctattaaacgtccatgggcttccctccaccaccctttctaaatcaatctcatgaaaaaattgaaatagataacggttggtgtcaatctcctta

SEQ ID NO: 333850 - DNA, 894 bp, Cannabis indica
gatgcgaccaaagtttcacgggtaacaaaagatggaaagttatccgcgatactggggggcatcgaagtcctcggcgaactttggaaggatataaggaagaacgggccggtagactcaatgagtgattttcttgaccgtactgccgaaggcttcatcaagctcgaagaagtcattcaacgagcggaaggtgaggaaaagcctggcaagccaaaggctccttctactggatcatcccccaatttccccattacccaaataattcaagctcaactggtaagcgttccaacaacaaccacaggcaagggaatgggaagaagggaaagttcgccggaaaattcgaacaagctccccaggaaaatcaagcaaagtacattgcgttcactatcttgactgaagactcaaaaagtatttacatggcaactcagtcgctggccccatataagaagcccgggcccatgaagaaagatgccaacaagagggacatgacaaagttttatcggttccacggagactatggccatgacactaatgaatgctacaacctgaggtgggaaattgaattcctaataaggaaaaacaacccacacttgcagaagtatgtcaagaccgatcaggttcagaggaaaatagccaagagttactacctccaccggtaaatgggcatctgcaagtcatcatcggagggccgcatattgctggagattcgggcaaagctcgggagaggtatgcccgaacagcgcagcacgatcaagaagaagttatcctagccatggaagaaaggaggcccaaagttccactagcaggagagcctaccataactttcaacgatgaagatgctgtcaaaattaaatttttgcacaacgacccattggtcgtgaaagtccagatagccaa

SEQ ID NO: 333851 - DNA, 534 bp, Cannabis indica
ttatgtcttattcacataactcttaacataaatgcatacccacaatttatactctagcatatagaatcttagggtaataaaccctaacttgcttactaaataatcactcatataacatattacagtatgctcaaaataacatctattgagggtaataaccctgactcatgtcttccctggatcaataatattaccatacatcatcactttcttacctttataatattttagggtaataaccctagaccacatttaattaagcttaaggtactagtttaccgggtctagcttatttatgccttaaacgcacaatttataatctcaatatacatacatatatcatgacatatcaatacttattaacaattcactagggtaaaacgtttagagtaataactctaatcccggtttctcgttactcatatatatcatattccgtacaagcaccaccgcgtataactctatgtgctagctactgtcttacctaatatcctgcaaatatgaagattccaaatccccgggtgctcctgacca

SEQ ID NO: 333852 - DNA, 554 bp, Cannabis indica
tgtttgggtctgagttcaggttcgggtttgggttcaggtcccgagtccaggtttaggttaggatccgggtccggctcccaattcgggtctaggtctgatttggagtccgggtcctggtccggttacggttctggatctaggtccaatttcaattatgattccaagtccaagtcctagttccagtcccggtcaacttccagttttggttccaattttgggtcacagggtacgggttcgggtccacttttgggtttgggactcggttcaggtccgggtgtggattcgggtccttgtcagggttcgggtccagggttgggtcccaaatccagacaccgactacgggttttgtccaatccttgggtccagatcaagatccgaatctagggtcctagtcttgttccatttctcgtgccgggtcacgagctgggtcctaggttcaagttcgggtctgggtcgagtactacgtctcggtactagttctgtttcccaggtccctatccttattctgggtccaggtcaaggttattgttcgggtttcggtcccggtctaggtt

SEQ ID NO: 333853 - DNA, 1080 bp, Cannabis indica
caagcattatgaatgatgaagtcccatgaatcattacaaaagaaaatcgtagagtttctaaacctagggttttctatatatcttctacagcaaagttaagatcgcattcagaaagtaaatgtgcaaagtaaaagtaaaagaaatcgagaacttactcaatgatcgacatctggattcagtttacgcaaagctgaacgaatgggttttgtgaaaatttttccaacaaacttgaagctaaaaatttctctttttgctctgaacttgcttaacaaagaaggttggtgaaagtgagtttgtgtacaatgctcagtcgtatttataggcaaaacagcgaaaaagggtaatcatttcagaaacctcagatgcctcggttctcccaaaaagtgaatattggaaatcaaaagcaatcaagtgcaaccgtcaaatgtggtgagagaaaattggatttcgaagcattaattgcattagagcatttattagccaaaaaccgaagagacgcctagtcagcctcacattgagtcgcgaatagacacacctgacacgtgtcacccatccaaatgcaaagacagctcggatgtagtctacacgcaactttaaaagtcccgtacaaacttggggggaaaatgttatcccaatttttacactctgacgtggcatcacacgatggtgacacgtggaatcgactctgggtacctgctcgcaagacaggccgaacaaggcaacttatacatttgcttaggggtgtgcagaaagtcatccaatctaattataaccgaacgatccaatcccaactgatcttatagaatcggatatccaatcataattggatcggatcggatgtaaattttgaaaatccaatcagatcggatcggttgttggatgggacatccgacccaatggataaccaacaaaacggatccaattatcatctaatggccataccattatatttatttatttttaaaatacatttataaatttatgtatttaatatattttatttagaaatatatattaattaatttaatatatatttaacacatgagattaaagaaaaaaaactttagatctaaaatatta

SEQ ID NO: 333854 - DNA, 526 bp, Cannabis indica
tgggcacattgtatggcttatttattttgatactagattacatactaaaatcttttttaagtcttagggtcttagtaagggatagtgatcctaagatgattatgaagtaaaatactagaatttagttgctactagccaaagggtattccctttggctagttctagtatttttatagggaggatctagttgtttagttcttggtgtttggttgattttgttcagcttgataattttttaattaaagttttttctggtattctgatgttcttttcaggtggaattttagtgttacaggctaaaactttagccttgttgattggactcaattgggctcatatgtgtggtcttccaattcatgcactttattcagattcgttagttttggtgacggctatcaacaacgagaagatgtatttcaacgagttaggagcattgtttgaggatgttatagctttattgtctaaatttctgggagcagttttgtcccatgtggcacgctctgagaatttagcggcccatggtttg

SEQ ID NO: 333855 - DNA, 778 bp, Cannabis indica
atagggaaacttttagttcctagtttaagtcaccgggaagtgatttagcgtatcacttatagtgttgtgattgttatggtttaggagcccgtaatccgccgtgcagttcgttccagtcaggttgaccggcacacctgaatttggaattgaggtaagattagtataacagtatgcatatatagattacatgtttagcatgcatgtaggaagcctgctagattacattagatatgtatgttggcttcgaactatccgactgtgtcacatcagtacagggtagagtatgactagcctgcatgttgctctctcaatcctttgtcctttggctctttgtgtaatccaagccaaggtttaatctctaacaactttctttgtgctttcttgagttggaagaaatgtatgatagttacatgcttgataaatttgatgttgttgctgctgtgtttatgtgatattttcaaaggttgaatcttgttattttaagtagattagagctagtttaatggatgatatttgctttgattcaagattggaagtttttagctcaaagttcagtttttaaagagaatttttgaaatctgttgctgtgattgttgcatgagcttgtgtttattttctgcagctttagtgagcatgtttaagtagttttgagctgttttgaatgcatgataggttgcctggacaagttttaagttttagaactcaatcttgaagctttaatggtgaaatgagtttctgtggttgaagcttggtttttatgctttggaattgttcctta

SEQ ID NO: 333856 - DNA, 531 bp, Cannabis indica
ttttaataggaaaaattaataattaacaaaatattgtattttttaattattttgtacttaaagcctattattacttctattgatttattcttttttcgttttctgctgaattctatagattttttagttggtagtttagtatagaaaatctgtaaaaaaaaaattattcggtgtgttatgtagaaagtctaaattatttttccttagtaatgatttccattgagttatataaatactaaataggaaggatctcaagccattttgaattattcataataggggtgttcgtggtgcgggtggtacggtttttgattattttttcaaaccaatttgcacatgcagtttttctaatttctcaaaccgcacctgcactgcgaaactaaaaaatcgcaaaaactacaccgcaaaaaatagtgtggtgcggtttttgcagtttctgtagtttagactattgccaaataattaaattatcacaaatacaataaagcttgagcaacacttgtcaaaaatactataaggcttgaaaataaa

SEQ ID NO: 333857 - DNA, 582 bp, Cannabis indica
tctgagggttctcttgagctgtcacctaccttctggtttgttagccgcgaggtctacctcgtggtcttctcactccaaggtcaggttgattttgagcattattctcctgtgtcgccctggtcgcggctgcctcacgctccacctttgcattccacctgttttcctcctccagacgatgcctgagttggcatttttctaactcgacgaatggcacgtatcttgttggatcatagttgccatcctcaccagttggcctaggatgggctctaccaatgttcatttcaggttcttcataccttgttcctggattctgggtcctccttgaacgtgtgggccgtgtacttgggccaccctcaggttgggtcctcctagaacgagtggtgcgtgtacctgggccaacttcgggttgagttctcctggaatgagtggtccgtttagatcgtgaattgggaggcctccgggagcccattggctcttttccaggatggtgagtggtttcatcatgaggagtgtcgacgttttctccattgccagccatggagaaaattgttttttttatgtatataaggagggttttttttg

SEQ ID NO: 333858 - DNA, 1056 bp, Cannabis indica
ttctcataccttctatgtgtttattttcatcattttcgaaattcatattaggatgttaaaaaacatacttgttagtaaatctagatcctggtaaaatatattcaacaaagatgccttctagaaactaaaagaacatttagcaaaaactctaattttgtcaaaactggttgaaggagaactgttttaacatgcatttggtcatgtcagatcatgctatcagcgacaccttagtgcaaagggaaggtacaacttctggtgtattacgtaagcattggacggctgaccatcatgagtttgggcggtatgcccagtagcatactcttctacatcgcttagtgggatactagatgcagtagctggttgtggattagcggcttggtaggcccttcttatcaatacggtggcctgcctcatgcgatcatcgatggctgcttgctgagccttcaaagtttccatctctctatctctccactctataaactggcgtcgttgctcatcgaacgtgaggtttatagcagcacggagatcctcctgatcatgatgcaaagcgttattatggccttgcatgagtccaagggctgtaaggaggttttggatctcagtatcatccccaaccattctttgagcattggtggtggacgggactcaagtgttaggagcggattgatcggctgcagagctggtattcctaatctcttgcacacttggtgtgatcctagccagaggggaagtcacaccatggcctatagtaggtggctatgtattggcctattcgggatttgtcccttggtgtcctctcgtattcccagaggtttatacgttaggatccgtcaccattgggttgctttgatcgaccagggctctgcgagtttgcaccaccattcatgcctattaagacttaagacaaacaacaaacttggcttttttctctcaatgaaagcaccaaaatattgacctcgtttttagccaacgacagtaagtcaattattaagtgattgagaatttaattaaaatagagcaaaaaaccaataaacaataaagaacaccagattttaa

SEQ ID NO: 333859 - DNA, 879 bp, Cannabis indica
tgaaacattaaggctatgtttggcaggagggatggatagtaggatggatggagaggttagagaggatggggagtaaaagggatagatatgattgttcacctcctttgtattgtttggtattaggggtgaggcgggaaggatagagaaaaatttaattagtaaaattacaaaattatccttttaaaaataaaattttatttttttaagggtagttattgtatttttcaaaatgtgttttgtctttttctacaatccttccaaatatgaagggattaaattttcaaagtttggagggagaatgtctccctccatctctcctctccctccttctctccctcttgccaaacaagtgatttagtctctccttccatcactctccctccacccctctccattcacccatcttcccctcctaccaaacatagtgtaagtatttatatcgcagtttacccttattataaatatctgttataacatatattttccctttttttttttctcatgggcgactgtcccacctctctcagtgggtccgcctaatacttttattattttattctgtatcacttccttaaaaaataaaatatgatacaatttttttgaaaaatatatttgaactacgatcgtaaccccaactagtttatatatataatatagataattaattggtttgcgattcaaaaattgtttctaaatatgtgattggttgtagtgtgatttaatggtttttttttgaataaaaatcataagatttattaattaataaatgcacttcagaggaacagtcttcctactgaagcacacgatctgtagagcaacaggagtctcttgccaagcaatgaaccaacttatttgcagatcgttttacaaaacacacat

SEQ ID NO: 333860 - DNA, 2302 bp, Cannabis indica
tctggagctgttggacatgtttggaggaagtttggctcgaatttgggggaagaaaacctaagtttttctggtctgccggaaccggtcgaccggttgccggaaccggtcgaccggttggttctggtgcaccagaacctgtcgactggttgccctgcagggagaattctcgggttttcttctggttcagttttggctcggggtgttgcgtggtacctgttttaagttgcttatgagttgtttgacctattttggagttgttgggagttaggttatgtttggtttagcattaaggttttgtttcggaattctggattaaggtatttattatgtttcgattgtcgtgacataggaccgggattgcctatcttgatttccactcaggttggctcgcacgcttgagttttgaattgaggtaagaaaagtattaaccactgtttatgattaatgatatgattgttatggtctcgattatgatcaagaccccgatatgtatttgttgtgactcgaccttgatcgagattgataatatgtatttgttgtgactcgatggtaatcgaggtaatgatgagaaacgattatttttgtttgtgaattgtttatgaatgagggaagaacactgttatcaccgttgttgtgaaagaattaagatacggtcattatcgttatgattacttactcttgaaaccgcggataggttttttacttatcgtttgcgttaccgggcaacgatagtgacatacgcagctcgtggataacgagtggtgaggattggtaacggtcattactgttatgagtaattactcattgaaaccgcggataggtttcttacttatcgttcgctttatcgggcaatgatagtgacatacacagcttgtggataacgagtggtaggggagctttatgaagctctgagaatatgtaattagagtgctttataaagtactaaaactatatgtttatggtaatgtataattagaatactttacaaagcattgagattatgtggctacatgttgaatgaatatctgtttgatgaaaggataaaattgttgattgtgagttactatgattttcttataatgagaagtttatgggttagtattgatgctaatcaaataagcattgaaaaatataagtattcatatcccaacataatgaacatactcgtgatgcaatacctattcagcatgcatatgatctggtaacttttcttgctgagtcattgtgactcacggatgctttgtggtacaggtaagaaggaaagaagttgtgttccgccatgagcctgaggtctcccagtaatgtacatatcagtcgtggtgtcttggcttccgggaagcaagattgacccattttctatgattagaaatgtaacctacttttgtaataacggttttgtaattaattgtaaaagaattttattagcaggggatccccatattatgatagaattttgaatgaaaggtttattttaaatttaaccaaatgttttaattaagtcacactttttcctaaatcgatagattagtgttaataggattgtaaaagcacacacgtggcgcccttgagtgtcaaggcgttacaacatagtatcagagtcaccaagttttaaagatcctgaagactggctcgatatgtacattggctgcgaagactcgttcgactcatggcttagtaagtgttgattgttagttaattagtaaaatatttattgattgtttgaattgtctggttatttgaaatgtgtaagttgttagagaagaatgataagttttgatataaagttgctgagtatatttatgcatgtgcagtattgcttattagtattaattctagttagaaagattctaactatgagcaaggaatcgtcgcgagtgtactagaaggtgtacttgaggcgatctagtaagaataattgcgagcctgctaagctcggggtaggtggtgtgggtatgaatcttccactaccattagaccgagagtaaatgcatgctatgaagtaagagattacctaagtgacaaggtagtagaacctgtatggttaatcgcgagcagcacagtgatggagaatgacactaagctagaccgattggcaaagttttatttaaatgcaacgactactaaggctgctaggaaggctttaaggtggaacgagtatatcgttcagaatgtagatattatggctaaacaactaggagttttctagttttatgctcaggtggttgagctaacccttactgttgagggtgcaaggattagatcacaaaggaaataatatgaagagagattcataaaagtaaag

SEQ ID NO: 333861 - DNA, 719 bp, Cannabis indica
gctgttccggacgtcacggttgctcggcattcatcccattatctgttcagccataagatgatggctcgaacaaagaaaacgatgcgtagggtcaacgcttctgaccctcatgtggctcagctcgccacattacccagcgccgaacaggatcttcctgtccaggaagagggggatcatgagggggacgctaaggtccaggaaattgaggaacaagacgatgtccgtcttggcagcccttccgaggctggggaagaggaagaggctgaacctccaaactttgggggatacaatgaggctggcgagccggtggatgcagatggagaggtcctagtcgaaggagtggactacgtcactgaggagcttactgctgcagttcctcacaagaggcaaggggccttaggtgccagatgggtgagccctccgtccaaggttaatgagacacgcctaagggatttggccagtctggctatctgggtgagcttgaatgttatgtccctgtctcaaaccaccgagcctcaaaccctaagaagaggatgtgtgcctggtcgggtgctcatacttaacaaggggcaatgctgcctttgcagtactttaggaatgtggcagattactttcgcctctgcccgacccagtttactccaaagggcattaagtatatgtctgcccttttcgtcctctaagccatccaaaagtgggtgtgccttctctgcatgaggtca

SEQ ID NO: 333862 - DNA, 1434 bp, Cannabis indica
gaagatgaagaaaccaaagttacttgggtagagtcaaagcagcctttcactaagtttaggaggccatttgaatctttggagttgtcagagaacaatttcaagcctcctaagccttccattcaagaaccacccgagttggagttgaagccgttgcctagtcacttgaagtatgtttatttgggagatggagagaccttgccggtaattatttctgctatgttgggtgcccaaagagaatgcttgttagttgatgtcttgaagaaatacaaaagagccattggttggaccatggcggacatcaagggtataagtccttcgatttgcatgcataagattctgttggaagatttgtgcaaccattctgtagagcagcaacgacggctaaaccccatcatgaaggaagtggttagaaaggaggtaatcaagtggttagactttggcatcgtttaccccatttcagacagttcttgggtaagcccagttcaatgtgttccaaaaaagggtggagtcacggtggtagctaatgaaaacaatgagttgatccctacaagaacggtgacgggatggcgtgtttgtatggactatcggaagttgaacaaggccacgcggaaagatcatttcccgctgccatttattgatcaaatgcttgatcgtttggcgggaaaagaattctattgtttccttgatgggtattctggctataatcaaattgccatagctccggaagaccaagagaaaacaacattcacttgtccatatggtacctttgcctttcggagaatgccatttgggttatgcaatgctcccgccacttttcaaaggtgtatgatggcgattttttcagatatggcggaaaacattcttgagatcttcatggatgacttctcggtatttggggagtcttttgacacttgtttagttaacttggagaaggttttagcaagatgtgaagacacgaacttagttctcaattgggagaaatgccatttcatggttcaagaaggaattgttttgggtcataaagtttctaacaagggcattgaagtggatagagcgaaagttgaagttattgagaagctgccacctcctactactgtcaaaggaattcgaagttttttggggcatgcaggtttttataggaggtttattaaagatttctcaaaaatctccaagcctctttgctctttacttgagcagaatagatcttttgagttcaccaaagactgtcatgaagcttttgtgactttgaaaaaagctcttgtatccgctcccattattgtagctcccgattggtcacttccttttgagctaatgtgtgatgctagtgattttgcagttggtgctgttcttggtcaaagaagagagaaggtgttccactcaatttattatgcaagcagaacactagctgacgcccaattgaactacactactaca

SEQ ID NO: 333863 - DNA, 725 bp, Cannabis indica
ttccgaagatcgtcacgacatgtataatcatcatcaacagttagttcgtttcatggttcagtaagcttttattgcgtttagtagtttattttaatagtatgatttaagaaaagcttgttagggagcatgttagtagcccaatagtagaataagcgtatgtttttaatttaccaaacaagtagcattagtaagttctctttgatcatgatctgaccagactagctcttggttacgcaggctattcagattagatggacgccatgcgaaataccaggagccagggcaactcgattggatcaaatgaaggtcaggagctcagattcccccttatgttcggggccgtggtagaggtcccaggggcagggcacgtggtcggggtgatgttaacccgccacaggttgcccaggctgggaaggatgcctagaattgggaaaacaggtttgcagaaatgcaaactagaatcaatgaacaagaagaagtgattcgatagttaacacagcagggtgctcctgcagtgcctgttccaaaaataccagtggcacccgcccctgctgtgcaagccgaaccggtggttggaatgaaccggatggaacctctgtatgaaaggttccgtaagcaggcacctccagtcttcctgggaggtccagatgttatgaaagccgagcaatggctaactgtgatcaccaggatattgaatttcaggggcgtcactggaaatgatagag

SEQ ID NO: 333864 - DNA, 500 bp, Cannabis indica
agttcctggtaaaataacttccaataatttcatgctccttgaaaacaacatctctactaattatgcactttctatagccttcttctaagcaccacagtttctatcctttcaccccttcagggtaaccaaggaacaaacacttgagagcccttggctctagtttttcttgtttggtgtgtgcaaaagctgtgcaaccaaacaccttgaggtgttcaattgtagggacatgtccagtccagtattcttgaggtgttttgaacttttaatgttgaaggacacctatttatcaagtagcatgcagttttcaatgcctcaccccagaatttcttatcaagtacagcacctttgagcatgcatctcactctttccaatagagtcttattcatcctttctgcgagtccattttgttgtggatcgttcacaacagttttgtgtctatcaatttcttctagttgaaaaaacctagtgaactcatcagaacagaactctaatccattatc

SEQ ID NO: 333865 - DNA, 505 bp, Cannabis indica
tcatctataattttaaaatcaagatattatcttaatagtgaaatgtgagaaagtgtgagggtgatatccaatatttatcaagcaatttggtaaaagaatggatgatatgtgaaatttaggcatccttggtgcctaagacatgagtataacttagacatgtttggtgtcgaaagttagtgtatatattttgatatgcttggtatcaaaatttgtgagaaatagagaaagtatgaaaatttatcttctatgattaagttttcaaagcttaagtatacttaaagagaaaagtggtcatgtaataatggacactaattttggcgaccaagattcgcttggaatcgaaaagtgtgtggttataacaaatcgcttaatctccgtacaagattaaagaataaaatttcgagggatcggacctaaactcccatagagttttactcattgatggtaacctagtttaacactagtaaaatctagtcttaagttcaataggtaataacaagtcaat

SEQ ID NO: 333866 - DNA, 918 bp, Cannabis indica
cttcgcctcggagatgactagccaatttgtctcccacctgacacaattcccagccaagagatacgcgacttgtgcctccatgaactccgtataccaggtgcaagacatcagctatgctctggccacggtgagtacttgtaatttcttcccttctcttatattttgtctaaggcatcttatttcattcttgtttcttttcccagattactgctgagaccggccgccattccaagaccctgatcgatcatgggttcgtcatgtctaaatttgggggcatagacgagggcgtgaagatcctgcggaacttgtctgccaaaaggagggcgttccaggaggaggctcaacaaagggaggcccttgcggaggcaaagtactgggaggaggccaagaaaagggaggctgaggcagaggccaggcaccgggaggagctgaaggcggagggcgaggctacagccagggccaagcgtgagcttcgggaagccagggaggctatggacaaaatggctgctaagttgaagtccttagaggaattgcatcaggcggacttgtagtcgacggccaacctgactgtggaggtgaaggagctaagagactttaaagatcaggccctgaaaaaggccaaaagagatgagctcctgaccccagttgtctccaagcattgcgtcaagcgctttgatgatggggtctatatggcctggcagtcgaatggccagagcatcaagcttgacttttatcccaaacttgaagaagccctcgctaagttccgggagaagaagaggacgcttgatgctttgctcgaagaacgccggtgccctcgtcttcctcctcgtattgaataggccaagtagtccaaccaattttcactattacaagtattatttttttttacatttacagtctcttttctttcctttcaga

SEQ ID NO: 333867 - DNA, 668 bp, Cannabis indica
tcaagcttgatcgccatccatcctttttttccccgcgtcttaagcttgatggaatgcgcgatttcctgggctataatgatgttgtcggagatgagtcggcccgggaggaaagcgcttgggtgaggtgagataagagaattcagaacgagtttcagcctattagctaaggtcttagagatgattttatatatgatattacaaagactgataggccgaaactcggagatacacttaggctggtggagtttgggaataagtgtgatgacggtgttattcagaggggccacactcgcatttccattgaggaagctggaggcagcttcaagcacgtctttcttgacaacatgccagttggccttgtagaagtgagaattgaaaccgtccgggccaggggctttgtcaaggggaagttggaagaaagctttctcaatttcgtcctgggaaaaaccctcgcttaagagggatttatcagagtcagagagagagcagctaattccttccaaagctatatccacatccgaatcggtggggtttgaggaggtaaataactgatcaaaatgagactcaatttctcgaataattccatcctcatcagagaccatgccaccatttgccgtatggagttggtgaattttattcgtttttttcctttgggaggcaaatcggtg

SEQ ID NO: 333868 - DNA, 1889 bp, Cannabis indica
aacagaaaacaacaaactaaaaagaaaaaatacctcgggagacggcggatcggaaaactaattttcattcccaccaacatcaatattatcagagcaagaatattcagccttctcctcacaatctttgggcacagatgaccccttcttgctcttcaatagttcaatcacttcatcaaatttaatattgaactcatccttcaaatttttaatacttaataaaattttcttttagtcgtcttgaatgcagaccaaagccttctccaaatttgaaaactgaaaacaaacaataatacataacaaacataaaaaaaacatataacaaaaaaaacaagaaactaaataaaaaacaaactctaacaacacaaccaaaaagtaacaaaaggcataaagaatgcatacctttccatcgaaaccttgaggtttctttggaagataaaccggttcaaactcatgttttgcaaagcagctttcttaagctcacggccaacaggataaaaatccttaacagtggcctgaaaaattggaaagaaatgaaaaaaaaaccagttataaatacactattaaaaaaaaaaaaaccagttataataattgaaagttacctcaggattattaaaaacttcagaaacaagttctgaatagcccccggtttttttcttatatgaactctcccaattcaacattcgaggatacgtattggcaatcctcttgcaataattaggagacaggcttggtagaatctcgaacaaccaaattaggaacgcaaacggaaacccttggaatttaaaagaataaaacttatccttctcttccttggccttctcaatcttgtaatatatattgtcaccgtccttgaatgccaaattcatgtagtggaatgtcctatcccacagcagtttaccgaatgcgatattccttaactcagacaaatcaccatcgacaaaaccaaataactcattgtcgactcgcttaccgttctcatacccatataaatagtgactcaacaaataaacaatcgccatcttcacagcgtcaacgtcatcatcaaaatctcccgccaaaaaccttgctctaacttgttcttgaatgactttaatagtcaaatcaggaaacatcttcttcttgaacgacatcttctgtttaaaatcgttcaagtcaaatgacccttccggacttaaccccgttatcaatacaaactcctccaaactgaaacggacaactctgtcccggattaaaaaccacttctctacatcctccctctcctagtgaacctccctcactaaagctaggtgaggcagggaaatgtgccacttaacattgcccatcttcaaaaactgtgaaaaaggcgtcgttaaaaataacgacgtttgagaaggtgtaagatttgctttgatctcctcaataacccatgggttattccaaatttagagcttacttgcgaaccgatgctccgatttcatctttaagtaaacatcctgtaaaaaaaaaaccagttataaaataagatttagcctgtaacaacaacaacaaagcacatcataaataaaaataactggttccataaacaaaaattaaatcacattaaaaataaaaacagaacatatatgtaaaatgaaaaacttaaagcacttaccacatccgaaaaactagtggattttttcacggactcttcaactatcgaaggactagggcccttcgatgcaacagatttaacgccagaacgtcttgtacgacgtaccggaggattgggaagatcagaatcagccactgcggcctgaaaaaaacaggaaaaaaaaagataaatataaataagaaaaacaacattcacaaacattaacaaagaacaataatataaacatataaacacctttttttttttccggccacgtgtt

SEQ ID NO: 333869 - DNA, 817 bp, Cannabis indica
ttttcttctttctttttttttatacaaggctctaacttttccctgttggctgttagattgctgcagaggctggttgtctttcaaagactttgatcgaccacagatttaccatgtctgagtttggtggcacgaaggaggtgatgaagtgtctctgagagttaaaggagcagaagaaggcaatctgggatgaagcccaaaggaaggaggccctcatggagaaaacccatcgggaggtgttgacggccaatgacgagattattgtcgtggccaggagggatcttcgagattccaaggaagaagttcaagaactcaatactaagttacgatctttggaggagctgcaccaaaacgacttaaaaatgacatctagtttaactgtcgaagtgaaagagctccgtgagttcaaggaacaggcccgcaaggaggcggtcaaggccaaaagggatgctctcctgtcccctatcacctgtcaacactgctcgaagcgttttgatgatggagtgttcatgtgctagaaggccaacaattttgaacctcatctccctttctaccctaagcctaatgaagttctggcctattttcgggagaaaaacaaaaagcttcaggcggtattggaggaaagcaagggtcttcatcttcctccccgagttgattaagtaataattaattatcttttattttatcctaccccctatttataagacaattctactttcttttaagggcagactttttatggttctgccctaagcctttacagtttgtcttttgaacaatctgtacgactttgagtttatttagccttttactttcttat

SEQ ID NO: 333870 - DNA, 538 bp, Cannabis indica
taaaaggaaataaataaaatagtccagtccattcttaaaccaaacacaggattactttcagcataatccaatcttgtccagtccagtccaatcctttttagtccaatccagtccaatcctgcgtaccaaacgggcccttaaggtaattaggaagaagaaatagggttatggttttaaaacattaattatatttgtaaaacacaaagtctaaattgtcattttaacaaaataaaaaggtcagtcaataaattttgtaaaatatatatctaaacttacacatctttgttatatatattatattttaatttataccaatagcgatatattgtaacaaatattattttaatatttagtgcatatatgctacatgtttatattggttatcatcacatggttatcaatgaatctcaatgagaaatttgacattttatgctaaaaaaattgacatggtgttattttatacacagaaaatatacatttgataataattcttaactttcaattttgttccaaaaataccccctcatttcaattcccc

SEQ ID NO: 333871 - DNA, 684 bp, Cannabis indica
tacattccgggtgggcttaactcctccaaagacaatgaaaatgttgggatcaatccatggacatgatgtggtggtattagtggatagcggggcgactcacaattttgttactttggatcttgccaccaaattggcgcttccagtcacaagtaccgaggcttacggagtgcaacttgggagcgggcaagcaattaaaggtacgggggtatgccgtggagttccattgactttgcaaagtattgatattgtggatgattttcttccgcttccgttgggcaatacggatgtgattttgggagttcaatggttgaatacattgcagaaaaccacacaccattggcaagagcataccatggagtttcatcttggcaacaaacgagtggttttacaaggggatcccaccttgcataaaacaccagtttctctgaagtccttaatggctactttacaaaccgagaagattggtgtttgggtggaattgggccattcggcagtcatggcagcagaggaagaaccatcggaagccatctccgccttgctacagcgctataatgccgtgtttgaggagccacggtctctaccaccacctcgacaacatgaccatgccatcaccttacgaccggacgcagcaccagttagtgttcggccgtatcgatacccccagatcacaaaggatgagattga

SEQ ID NO: 333872 - DNA, 1358 bp, Cannabis indica
tgtcgcattcttgcggcaacgttggagaaaaggccatgattggttcagccaattgcccgaggcatttatctcgacatgggagacctttgtcgactaattcctcacgcatttccaagccacgatgacctataggccgccctataccactctggctaatatcaaacaagaaactagtgagtctttacaggactattttaaacgctttaatgctaaggtaacaaaagtagagaaggctcacgagtcttcgctagtatgtatgttgataacaggtgtcctgccaagaacagatctcgggaaggaactacaagctcgaagacttgaatcattggtcgagttctttgccatggcagagctgcataagaggattgagaattatttggctgagttagagaagggcaaaggtaaacgtaagtcaccagtgccacggtcacgatcttgcagtcctagaaggaagaattccagaggaaggagcccgagaagacgcagtccacagagacagcgaagtttgaaattagccaagtcccctccaaagaaggaatcctccccgaaaaggaaaggtggtcctcgctttgtaaactatacagagttggcagtccctcgggaccatatctacgccattgaagaaaagaacggggtcttcaaaaagcctcccccaatcaggggaaaccgcgataaaagagaccctaaaaaattctgtaagtaccacaaagatattggtcacactactctggagtgttggtttttgcaggacgagatcaaagaactaatcaggagaggaaaattcagcaaatacaaaaaaaatgaggaaagtcatccccgagcgaatgacaaagaagaaaatcaaaatgcgagtggttcgaggactcctcacaatatcctgactatcataggcggaccccatatcgcaggagattccaggaagtcgcaggagcgatatgtgagagaagccaaagataagccgctcaccaatgtgaacaacttgagcgaacggccggagaagctgttcaaaagggagcgatatgcgagagaagccaaagataagccgctcaccaatgtccaccgcatactcgtagacaatggaagttctatgaatctcttgaacttctaggccttcaaacaaatgggattgcatgagaaggatctgcgacctgtgacatcaagtagatacggttttattggagatgtcatcgcattaaaaagaatgatcaaacacccaatcactttgggaactccacccgtaatagctaaaatcgatggctgacttcgcagtaaattgaccaatactcggcaatcaaatgctgtgatggtcgacctatcctaaaggagatgaagaatcgtgatgtccatctatcatctca

SEQ ID NO: 333873 - DNA, 1090 bp, Cannabis indica
tcatttgaaagaaataaaagataggtggctgccctaggtttttgacacctagctaggttgatttaagcaagggaaataggttttcccaaccatttaattcatttagtgaaattaagaaaaatcaaagaattgaagaacaactcttgtctccctctctttctcttcgaaggcagctagaacaaggggaaggggctgtgattttcttggatttcagccaaagattcaagggaaaattcaactaaggtaagctctagcaactcttagccctaattcttgaatttaagcttaggttgagtatgtgaaattgagtttcaggggctgttaggttttgaaaggtttagggtaaccatgagatccaaataggcaatgaggtcaaatcaaaggtactaggcaaaggtaccattgatgtgtttttcaactctggtaagaaagtcacattggtgaatgtgctttatgtgcccgacatgaatagaaacttgatttgtgatgacttacttggaaaacctgacattaaggctgtttatgaatctggtaagctcatacttaccaagtctaatatatttttaggcaaggggtactcttgtgagggaatggtgaaattatgcaccaacgatgtaacttttaatgttagcaataataaagcatctagttatatgattgagcatgattctttatttttgtggcatcttagattagcttatattggtttttctaatatgaaaatagttttaaaaaaatgtggcatgattgattgtgatataagaaattatggtaaatttgaaacttgtgtaaaagcgaagatgattaaaaaaccttttccaagtgttgtgagaaattcaaaattgttagatttaattcataatgaattatgtgaattaaataaatttctaactagaggtgataaaaggtatttcattacttttattgatgactatagtaaatatacttatgtatatttgttaaagaaaaaggatgaggcctttggtgcttttcagattttcaaagcggaggttgaaaatcaacttaacatgaaaataaaagtgttgagaagtgatagaggaggtgaatacttctctaataaatttactca

SEQ ID NO: 333874 - DNA, 728 bp, Cannabis indica
agatttacaggacctttcgagattcttataagaaggttggacaagtggcatatcgattagctttacctccaactcttttagcagttcaaaacgtattccatgtctctatgctaaggaagtacgtttcagaccttactcatttagctatgaaaatattgagctgcaaccggatatgtcatatgaggaatagccagttcagatccttgacagaaaggataaggttcttcgaaacaagaccatggctctagtcaaagtactctggagaaatagaaaggtggaggaagccacatggcagttagaatccgatatgagaactcaatatccaaagttgttcaagttagattttgaggacgaaatcatttttagggggagataattgtaaagaccgcttagttctaatttagaaattagcagataatcaggatttaattatataaattatttattaattttgaattattaatttacgatgatttatttgaattcaaaatgcattttatatgtcatatataatatttcataattttgcatgtttggtgcccgaaaatattggaacgtggtggttggctattagaatcacatcctagtattttagtatagcgagacaataaagttagacattggaatgtcgggattagtcgagattttaaaatttcccaaaatactcccaagtggctttttatgacttttagtgtgggaggggcaaaatggtcttttagcccatttgt

SEQ ID NO: 333875 - DNA, 954 bp, Cannabis indica
ggcatgctgagtcctcttcggtagagaatattatccatcatcacatatcgatgtgcctcatactgtagccttctggacagggtcctttcttgaggcaactcacctttggttatgtgtctggtgatggggtccatccaacttggctcttgcttaattgtaatcaccgtatctttaattctgatgctcggctctgtgagatgttcaacgggcaccacccccagtctctcgatctcgctgtttgatgccaacttggccaaacagtgtgcgtgagcattcttttctctggggattctttccactttgtacttcgtgaactcatggagcagttcccggacgatagctacgtacgcagccattttctttccacgcgtttgatattctcttgagacttggtttaccaccagttgcgaatcgttgaagacttctactcttgcggctcccacgactttcgccaagtttagtcccgcaatcaaggcttcatattcgacttcgttgttagaagctgggaaatcaaaacgcacggccgcctagagccagagtctgcttggcgatatcattgctatcccagcaccggattcattttcgtttgatgctccgtcaacgaatgccttccatgtcgaggttcgcggtgctggcacgcttgcgctagcctctgcttcattgcactatgttatgaagtctgctaggacctgtccttttatagaaatacgcggtacgtagtgtatgtcaaactggcttaattccatggcccatttgaggagtcttccagacacttccggcttctgtaagactttccaaagcgggtggtttgttagtaccttgaatggttgagcctggaagtagggtcttaacttccttgaagccatcaagaggcacaaaactaactcctcaattaatggataccgtatcttggcccctatcacgcgcttgctgacgtagtacacaggatgctga

SEQ ID NO: 333876 - DNA, 869 bp, Cannabis indica
aatcaagcatataaaaaaaaacttctttatagcaaaagataagtaatgagaactacagggaccccctatttttaaaatattacaaactagtttattagtacttttacaatataaactatgcaatcccaaaatattatcaaaatagagcatcatgttcactgggccgagccactgtggctgatatgtacatagttgctacgacctcgaactcatggttgctcaacctttgctttccccttacctgcaccataaagcaaccgtgagtcacagagactcagcaagaaaagtgaatcaaataataaccagtaatattcagcaattcaatctcaatctaacttttatacacatttacacaataatataaacacaactctggcactttataaagtacccatttttaccacttgttaaccacgagctgaatatgtcactatcgttgcctgatgaagcatacgataagtaagaaacctatctgcggtttcaagagtaattactcgtaaaggtaataaccattcccaatccctaggtcataacctaggctcaacatacttttaatcagaactacatatggtgcttaacacttttcttaccttagttcagaactcaaccgtatgggccgacctgagtggaaaacaagctaggaaatcccggtcctatgtcacgacaattgaaaactcaatgaataccttaactcaaaatttcggattaaaatcctaattcaaaaccgaatataacctagccccaaacaactccaaaatagattaaataactcataaacaaccaaaaacgagtaccaggttccaccccgagccaaaatagggtttggagaaaacccgagaatttttcccctgcaggcaaccggtcaaccg

SEQ ID NO: 333877 - DNA, 501 bp, Cannabis indica
cgccctaatgctaaggcacgctacagtgctttttcaattacagtgcagtctttgctatcaaagaattttcttgaaaaacgtgttaaattaaaacttttatattaattaataaactttataatataccaaactatttacaagttccaggctcgatcccgttttcaaacttttgaaacataatactccaaaacacatattatctaggtcgcacagcgactacaaaacacaaccccagatgtcccaagaccgaacactccaggtcgcgcagcctcaacatgtacaacctcatcctagctcaggttcactcctgttcagcttttgtctttcctttacctacacatggaagcagatgtgtgagtcgacaaactcagcaagaaaagcatataacatatcatataatatcttacttgtatttaggcgcctatacccttatttacaaggctcaacagatgagtaagaacgttccatactagggtatagctgttggattttgtgccctaa

SEQ ID NO: 333878 - DNA, 643 bp, Cannabis indica
cctgagttatagggattgtgctgatgactcatgatgtgaaagctgaattcgctaagtgttggtcgctctgcgcggattgctgaatactttgctctgggcatgccagcgaggcattctactcgggctatgcttcctgagcagatgttccaagtggattcctcgtgtcaccattcatgtgatgccacgtcagagtagaaaaatagggataacatagtgaaatattttattgtttataaattataagttaagaaaatgatattttatatcaatttacttattagaaatttttaaatagtattttaaatatttaaataacctagatatttttgtagaaatttgaaaaggcttaatttgagatattttgacatatggataattgttatttgtttatattttattattaaaataataattgcctaaccatatctattttaaaattggtttattttattattttaattttattaaattataagattagaaaattatattaaaaatatatatttagttcttttcaaattatttatcatattaaatatttaatttaatttaattaaataatttaaataaacctagataattttaaattagtttgaatcttacatttttgtaaaagatattttaggttgtttttaacaaccct

SEQ ID NO: 333879 - DNA, 622 bp, Cannabis indica
tttttaaaaaaaaaaataagtacggcgctatagcgcctgaggcctgcgctatagcgcccatgagatacttcccaaataacccacgtgctaatttttttttctaggcctgcgctatagcgcctaaacctgtgctatagcgcccaacaccatttttcttactttagctcgtttctcgactcggttgctccttgttcctgtcactcgaatagtattttagtcataacttcttcaacacaactcataattggacaattcaagatgttccgaaaagctaagaacgagatctaaaagttttatgttgagctccaagtccaaatcggcttctaaggtcgtcaaaatttgtaattaagttttgccttgtaaaattgagctcactgacttccactattttctaccaaaatatgctaacatccctctaaacgactctaaatgcatgattggtctttaaaatatccaaaacaattaaaagtacactaatcaataatttaacgaatcaatttaagaatattaatacataaattgatcatatttataagataaatatggactcatcaaattcccccacacttgactcttgttcgtcctcgagtaagttaatgataaaataaatgatacttaaaca

SEQ ID NO: 333880 - DNA, 875 bp, Cannabis indica
tcattaactattagtttttgatacatctattcattctatttttttcattacacatagaagctaaaaacaaaaaaattcaaatgagtatccaaattcaaaaaaaccactaaaattcaaaaatagttagaaaaaataaaagccaaaagaaccacatgtaattcaaaaataagtgaactaaaataaaatgatttttgatcaagttgtgcagaatacgatattgacaatatatgagaacctaatatcacatataagatacatgaatcactcatctaacaccgtactaatgtaataggttgagagtagttagtgaattcctatattactttataaattaactcatgcataagcatataattaaacctcaaattttaggaatatactatattaggaaaataaatgtagacatggggtcttctacctctccacagtcctttacccagttcttaacccgttgtcccttgagtctacccttgtttgtttccatttattctttgtggtctccctcctgtccttttattcgtagtgccctctctatctctctctctctcggttcctagtgtgtcgtttgtttgtctcttgttttttctccctggttggtgtcttcctttgaggagcttgtggtggtggggtttcctctgttttgacttttagtatttgtctgactagtgtttgtagtgttgtttttcttgtgttttgtcctctgtttgtgctttttcgggattgtgggtggagttttggtgtgtggtagtctgagtgtgattagtgtgtaccataagtcgtgtggttagtggtctttggtgtgtgaatctgttggtttttttatcctccttttggcctcttctcttgttggtttctttgtctttggtgcagtaatg

SEQ ID NO: 333881 - DNA, 656 bp, Cannabis indica
tatttataagataaatatggactcattaaattcccccacacttgactcttgttcgtcctcgagtaagttaatgataaaataaatgatacttaaacacatcggtctttatgaaaagtaattttggtttcaaaaattatgcatccacttataatttcaagaacatccaaacacttcaatcattagaattttaactcaagataattacttttcaaactcaatttgtgtgtgtgtgttcaatcaactcatcatactactaacattcaaattaattcatacatgccaacaatcaatgtttatctaaaaaaatgtgtatttcaataaaaattcactctaaaagcttaattatcaaactattctctactaatgtaattacacacatctaaagatcaataggactttataggcttataatgtaaggctagggtgaaaggtagataaagaaagttaatttaggctcaaatcacaccatagcatacatatacaatattctctcaaataattcccatttatactccccaatcacttccctcaacaatttaatattgtatcttttttttttcagcataaaactcattatgtccccacacttaaattggtgcaagtattcttttatttttcattgatttttttttttatgaaatacttacaacttacaa

SEQ ID NO: 333882 - DNA, 545 bp, Cannabis indica
tgttcatgaaagtcttgctctggttctaaggaagctgactcgttgaagatggctcgcgccttagaggtcgagaaggagaatgggaagaaacagtatgatcagacagtttctgattatatttacaccactctttccaaaatcccagactttgacttctctatcttcggagcagaagccgctgtaatggccgaggcttttcgcgccatgttgcggatgctgaggaagtcgagaatgaggccgttagcaaagtcgcggatgaatctgctcctgctgctcccaatgcttgacttttctcttctatgtttaaactatttttcttgaatttgctagttacttttttaatgcggtacaggggtattcgcactctgtacttagacatatttgcaatttactttggacaaatttatatcctcgcggggataattaacctttaacatttttcgtagtacacgggtactcgcgttttttaatatatatatatttgactttaattacagcttggtgtaataagtagaaaagtttacaagacttgacaaaatttgttt

SEQ ID NO: 333883 - DNA, 677 bp, Cannabis indica
ctcaggagaggcatagagaaactatgtctatacattatcccgtctaggatcatgtacctagcagtttttcttctcagttttcttgcttcattattgtcttctagcaagcctccagtttggaggtaagttgtgataggtgtcatccatgttggagtgtcatccaacctgttaacttcttttgggacaacaatgctaggttcctctaggaactgtatgggcaccaagtttgctttgtcagcaatggtgcctcttgccagacaagcaagtgcatctactgtggcattcttttctttggggatctacttgatcgtgtagcctttgagctgacttagcaagtctttgattttgctcaagtaggccaccattctttcgcctcaagctgtgtattcacccagaacttgattcacaactaattgaaaatcattgaatatgtccaggtggttagcccttacttcatgcaccagcttgaggccaactatcaaggcttcatattcaacctcattattcaaggctttgaagccaaatttgattgctccgtgcattttttgcccctaggtgttgtaagggcaatgcatccaccagacaaattagtcagagcaactttcgtcaacgtggagtttccatattagttgtttgggattttgttgctggtcctgctctcacttcttctctggctc

SEQ ID NO: 333884 - DNA, 565 bp, Cannabis indica
gtttaggtctctgtcgtggtttttatctgggttcgggtttggttttaggtccatgtcctggtcctagtcgtagttcgtttctagttctatttgcgattctgagttcgagtttgggtttgagtttgggtcggagttcgagtcatggtctgagtttgggtttgggtacagatttaagactaggtccagatcaggcttagggtgtgggttcgcatcctaggtcttggtctagattgggtccgagtcccaagttcaaatcccgatctgagtttggattcagttctatgtctaagtcgttggttctgatcgtggtcttggttcgagtttgggtcaaggtccgggtctagatttgggtcttattctaggtgtgggtgtttgagttcgggtcaaagtctgtgtctgggtttgtgtccaggtctggacctcgatctgggtctaggtttgggtctaggtccaagttcgggtcccgagtgcgcgtccaagttttggtctgggttaggatctcggtcctgatataggtccagaatttcaatcccagtctaggtctttgtccgagtccaggttcgta

SEQ ID NO: 333885 - DNA, 619 bp, Cannabis indica
cccaaaatagaaaaaaccccataaaaatatatgacagaagttaataaataaaataaaattacatcccttatatataattttgctaataaaaatcctacaattaataccagctttacatcaagttaaaagattatacaagctttccctcaacatgagtagagaaaaaaatggacccattaggcattaggtactacttggtagcagttaacccaaatttaatactaattagtagtgtttttttaataacaattaatagttaaaccaaacgtttagatactaactaatactcttttggataatgattagtagttaaactaaatatttcaataccaattagtagtttttttggatgataattagtatttgggcctagatagtaatactgaggaaaacaggatcacccagcccatttgtacaatgttagtccatatccatttaatgtaatataactagcttcttccctcagcccatttgtattttttgtgaaaattatattaaatatgggattttgtaaaaaaattataaaaatatgatatttataggtttgctacttttctatgacatttttttcacatttaaaaacttgttatggtatttgatatgtcatatttttataaac

SEQ ID NO: 333886 - DNA, 711 bp, Cannabis indica
tatacttatttttttaacttttttttttcaaattttacggtttgggtttctaaagtggtgcagcgcaagttgcaataaaagtttctatacgattttttgttgcaatttaggttgcagcgctagttgcaacaggggtttctatgtaagaaatttacgtaaaaaaaactaaaaaaaaaaaaaaaaaaaaaaaaaactaagttttagaagtgtaaaaatgaaaaagccccaaaaatatatatggtaaaactattaaaattttactaattagtacgctaaatcaagaatttatttaggaaaaaattcgccaaactttgattttgtttgtttatttattgaaataaaatattatcatattaatacaaagagtcacaatacaatagacattagagatagggttgcacacatgttacgtttttgggttgtcgggttcggggtttttgaatttcgggtgttttaaatgggcaaacgaatccgatttttgagtggtcgggtgtgacggagtttgggtcgcattttgcgcgtttaatgtggtcgggtttaagttttactgagctgagtttgaatgcttcattttggggctcaaataaaatttgatttttaaaaatgccatctttttttttttaattatttttaacatttttgggccttttatgtaacgccttaatgctaaggcacgctacaatgcttttttcaattatagtgctatctttg

SEQ ID NO: 333887 - DNA, 1354 bp, Cannabis indica
tttaagataagaaaaaacccaagatgggttacaaacttgttctttacgaaaaagccactaggggaaaaccattaagtcatcttcctaaacaaaggatgagagcagaagttgataaacttgataaaaaccatctgcacgtagcttggagaaagaccggctacacatagcttgagaaagaccgactacatgtggagagccttggtctctgcataaacctcattctcctcattagaggatcccattttagcagtcgagaccttattcctagcctcaggaaattcctcaatcccataaagaggttggcgcaaaggtcttctggtgcaggtttgagtcttgggttggctggattctctgatagaaaccacgccaactcccctcctagattcattcgaaaccatgccaaccttcttctgcgattccttgttaaccagaggaggacctctaagatcgctcacaagatctatgtctattcctatggagacgaagaaaaaaggtcaatggagcaacaaaaaacatacaaaattaatgatatgtataaactgactcaaaccaccattcacaagggatgatactcaccttttaggatcacttgtgaggatctcccatagcgggctacggaattcccctagtttggattggtcgtaagctcttcagccttggaatccatcattttcggttccaattcaggcttaaagttcttgggaacgaatggaaaaaggtttgtgcatcctggtattatgagtttgggagagtgaacttctgaactcagaagggacattctagcaggaaagagatgatccattctgaaaatggatctcactaaaaagcaagaggtttgtgaaaaatgacaagcttgagccgcccttttatacacaaagtccagtgacaagaaagctaaggattgggaaatttaagagttggagggcagaatatgaagggatgattcataatgaccctcgaaacggtacaaccgccagaatcaaaggacacatttttccaagaagggattttgacgaaaatgccctttgtaattaataaaaagcacttcttactaaaaaaaaatttaagggacaattgttatacctaaaattcggctgcaatctccatggaggacgcgtgtcacgataaggggaatatgaatcgatgcaatcgcttcatatggaataactcattaattacgtgagtatcaaagtatatttgtaacctgcagagtgtaaggtcttaggcaaggaatcaatatacaaacttgtgcttagcatattagcgagaaatcatatgttgctgaatgcgaatagcgagacatcaaggatagtacacataggaagacaaaagcgacatatatcaattgcgaaag

SEQ ID NO: 333888 - DNA, 586 bp, Cannabis indica
agagcaagaaggagagggaacaactttcttcctacataagttaaaggcagtgggtaagatgtggtggaaagtacgccaaccaaaatttttaattttaggaggaagtttttgattccagaaaaaattccaccatttattgcaaaaactagtattagaagaggaaggaggtaaggaagaagtattggcaagatgataggctgatttaactgtaaggagaccagaggaatctcctttccaaatgaggcaatctgctttgtcatgaccaccaataggaacttggagaatgttttcaacagtgtcatggtcaaagtaattagataattgatttacatcccaactgccattagcctgtataaaaaagcttactctgtcagaaggaggagatgtattatctttgcatctaagggtcctgagattaggaatccaagtatcctgcagggtgcaaatattctgaccattaccaactttccaaatgagcccattcttaagaagatctctaccccagaggagactagaccaggaaaaagaaggtgaatgacccttactggcttctaaaaaagaagaatgtcgaaaatacctggcttta

SEQ ID NO: 333889 - DNA, 633 bp, Cannabis indica
tccaagtccaagtcctagttccagtcctagtcaacttcaagttttggttccaattttggctcacagggtacgtattcgggtccactttttggtttgggactgggttcaggtccggttgagggttcaggtccttgtcatggttgggtccagggctaggtcccaattacattcaccgactacgggttttgtccaagccctgggtccagatccagatccctatcttgggtcccagtctggttccatttatggtgccgggtcacgagctaggtccaaggttcaagttcgggtcagggtcgtgtacgaggtccctgtcctagttttgtttcctaggtccctatcctgaatatctgtccaggttccagttattgtgtgggtttaggtcccggtctaggttcggtttgagtcctagtatcggttcgggtttaggtctctgtctgggatttgatctgggttcgggtttgggtttaggtccttgtcctactcctagtcctagttcggttctagttattctgagatcaagtttgggtttttgttagagtcaaagttcgacatctagtctgagtttgggttcgggtcccgatttcagtctagatccagatcagtctcagggtgtgggttcgcgtcctgggtctt

SEQ ID NO: 333890 - DNA, 647 bp, Cannabis indica
tgttttatgttatatacaaattgatcttgggttaattgttaatttatctaacaccaacaacatgatttttcccacaacctcacttggcaaatcacaaaatctagccctttcttttcgaaggaaagtaaatttaaaggttcatttttgatattgtgttcgatgcactgttcaaacgactcattaatcccgtaattagatgacgaatatggtgtgtttcatgtattggaatctatagtggtatgagattattttggttttacgttaaaaatgctgatgtgtcacgttagtacaagggcattaaattattcactgtcaattatgttattaaaatgtctattacgtatactaataaaaatttcttttttattttgttatgttattggtgatgtatgcactttattgatagatattggtgatggctcttattatgctatttcgtgttctgcgatgggaataatgtagttaggagtgtttataaaatattcaattcaatttgcacgatttaatttaatttaatccgcaaagtgcgggtatttgtacttatgagaatcagatattggattgaaaaattcgaaatccgcacttgtgcggattgaatgttgattgacatgtaaaagtaactgatccaatctaatcacacatatttt

SEQ ID NO: 333891 - DNA, 917 bp, Cannabis indica
ggtaccttctcaagtgggagttttttttttcccattttcacttatttattttgtttaagtgctaatgaacttctcttgcctcgtagatatggatgtggatttggagagcatgttcaagagtcctcccttagtcgacaagaagtctaagaagagagtctcccaagctggagaggcctcgggttctatcaaagaatccaaaaggagaaagaccacagccaacaagaagaagtcctcaagctagcttaccatcgagctagccaagtctctagagaaagggaatgaggtctctgttgcagggaacgccgaggagcaaccgactgggtcagtgcatcagatgaaattctttggctctcacctagagatggttctccttgagccctcctgtcccttaccccttgaggctgagactgaaggctcacaactttgctcgcagcatgctaccaacagtttgcgttgttgggaatattttactaggatctagatttactaacaagtatgttgaattaatatcctaaatatgaattctgtaaaataatgaaataaacagataagggttaagaaaaccttacattggttgcagcagaatataatgactcctttcattcaagatctctagcccttgattcctttatgtagcagagcattatcaagatctgaacttggatctctttctctccttcgggttcgattaccaccgtcttactcactatgattaagtacttgacttgctatttgtgggcacgacactcattcactataggttcgaatatggtgaagaacaatgaaggaggtgaaatcttgatagaaggaactctctcatcttggttggttgaatagtcaagtttgacattagtttgacaaagtgtcaagtggatgagatgagagcatcatgttccttttatagtgtttcaactagg

SEQ ID NO: 333892 - DNA, 677 bp, Cannabis indica
aacaaattcataccagcaagaattcatatacacaaaaccagattgcaaagaacaacaacaggattattctaaactcattatctatataatttctttgaaataactttatacatatacaattatgagttccatgaaggttgatatagataagcttgatggttcaggtgattatcgtatttggaggaagaagattagggctttattggctcaacacaaactgttgaaggttcttaaagatcctgtggcatggtcagctgatatgtacaaccaaagatcagcaagaagagtttctggaaacagcaaccggattgatcattttcaacctctctgatgctataatcagattggttgacaaggaagatacacctgctaagatttggaacaagttggaagaacgatttcagaagaaatcattgatcaacaagatttacttgaaggatagaattttcggttttaaaatgagtctatctaaatctctagaacaaaacttggatgagtttttgagattgcacattgagttagaaaactcaggggaaaacgaggccttaagtgatgagaatcaagaaattatcattctcaattcactaccggaatcctacagggaggttaagacagccattaagtatgggaaaactgagatcactcttgaagaagtaatctcagctttgaaatcaaaa

SEQ ID NO: 333893 - DNA, 1409 bp, Cannabis indica
ctttaaattttagattccaaatagaaattttaaatttcagtttcctagaatacactagacaatacagtatgactttcacatgttattaatatcaattttctgtcaatggatccaaactgtatgtttatgtatggaatatgagtttagtattttgtgaccaagattcacttggactattctaagaactctttattgtaactaaacctaagtcatcaaaggacacaaccacattttagtatctatgacatttgtatttgttcatagtggttttggcaaagatcattcttcggaaagagtcaatatgccaatatccacttgaaagtaggatcatctgtatttgcacacatggatgtacattcaagggtggatatgagttatcgttatattattaatatgatcactctagattttaccttatgcaaagaaatttgaaatgtttatgaaatttcatgaatttttagcaattttgaaaaatattaaggtaagtggttaaagatcttgcgagctgatacgggtggagaaatatttggtaaatatgcagttcaaaggtcattaagttgaattttgaattgtatccaaacttacttccccagaaattcaatttgcacaatgatgaaattaaaagatttatgattagtcactagctgttgcctgattccttctagggaaaaccttagtgatagaaaaatttcaaaatgatcgaatggttgtgtacttagtataaaccgttactagattcatggatgttctgatcgtgaccttaagaaaagctaggactgttaactttgcagttttgatagttattctatgtgattaggggtggaccatcacatggtcattaagataagaaagtatttgtttcaacaaatactacttttctaagaaaatgactaagtttgaaaatacagtagcaaagtagaggagatactttttttttcttaattccataagtgttctatcatcttattcgatataagatggtcccactacctctgttttcttgataaaaccgatgaggataataccacttagattcttagagggaaagtcacggtaccttgtcgtagtgggagggtttcaaggaactcacccagttatgacttggaagacacctgtgatgaaatccattgttagtttaaaaaagtaatggattgttagaataaggaactatgaagtaaagccaagagaactatggttaaaaccattcatatggaataactaaaaaattttattacaaggataagaaaggaaattttgataattaagtctcttcaatggactcaacaaaacttcctattcctagtattataggtttgagtttatctaaacctatggcttatggtatgcctggtgatttacttactctaatgcaagcaacatactttagtaagatgctggagcatttttct

SEQ ID NO: 333894 - DNA, 1090 bp, Cannabis indica
atggtcggagcttgtcgatggagttgggatttgattgcattttctaggttttattttagttgcacaattttttctttacttcattttgaaatttgtttttggattttttttttctctgtaaaatgtacaacattattgttcatataatttttcttatctaaattaatatttttttttagaatatatctaaattaatactaatgcttatagcattgctgtaattatcttattatcaaaaaatttgtttagacttttatagctccagatctatagtttttttgtaaatcatgtatgtatatatatatatttatatatataaattcctacttcacaactagaacttactaatatcaagaaccaattaacattatttggctcaaaaaatttattcggctacaaaaaaaaagaaaaaccaattgatattattaatattatttatttggccaaaataataataataataataataataaaagaaatagtgtacatatagtgacgtgttggaagggtcactattatttttatagtctgaaaaagtttgactctaaagtcctatagtgacgcgcggggagagaagctaaaaaggtttagtgacacactctgaagtgtcactaaatattacatttgcagtcacccacattagtgacgcccagtgaagtgtcactaaatgattttagagtcactcaatacatgtcactgaagccagtttttttagtagtgaatgcactctgcctcctttgaggaaccgcagcagtaagttcctcagtgtcgtaatccacgccctctaccaggacatcgccatcagcatcaactggctccccagcctcattgtatcccccaaagtttgggggtgcaacctcctcctcttcctcctcctcgaagggactaccaggatggacatcgcccagctcctctatctcctgacctcaggatttccttcatgatccccctcctcctgcacgggtggatcctgttcggcattgggcatggtcgcatgctaggccacgtgaggatcagatgcgttggctttacgcattgtttgtttaatacgagccatcattcttggttggacgggaaagttaaatcaaaa

SEQ ID NO: 333895 - DNA, 681 bp, Cannabis indica
ccgagagtgagcttctttttgggctgatgtgattttctttctaaaaattgcctttttggctcatttcttcaatattttcttcactttaatcccaatctttttctaccaaatacacctaaaaatacataaaataaataaaaaaaataaataacacataacatattatcacaaattaattataaaaatacacaaaaacctataaaaatacaataaagctaataaattcaaaaataattaaaaacttactaaaataattaaaaacttaagaactaagccaattttagttaaaaaaaatgtgaaaaataactctaatttctagagttatcaaacactctctatagagtccttgcttaagtgcataaagttaagtgttttttaacttgaacttaaccatagtgtaatcatcacaaattttattgaaaatttggttgacaaagcattgaaccaacttttctttataataaaacggttataacacgcacacctttgctaggttcacccaagacctcatgtctcgctttgcatcgttaatggccttgtgcacattccattcattgaccttgttaagaaaatatactccctatttctcatttagggcgacaccacccttaggtcaatataggtagaattcttatagtatttgttaccaaaatactgttttccaaactgaattctattaaa

SEQ ID NO: 333896 - DNA, 648 bp, Cannabis indica
aggaggtacatcagcagtctgaccggaagttgaagcagccacctcagtttcgccataggccacttgggacgcgcagaactcaaggtacatgtccgtagcatcacccaagtagtaaaaattggcctgaggattagccttccaaaaatcaaagaagagctcaagaccgactgtctccaaggcattgaccttctccttcaacctggccacctcggccgaaagctcctcctccttggcttccttttcctccttcatccgatgaagaacttcttgaagggaattcctctcatgctgaagactgtttacctcagcagataaggtctcgatggtctcctaaaaacggtcagcaacctcgagatccttagtcagctcagtgatcttcttctgagcgacaaacagcttcttattggcttcacctaactccaatcgaacaggactttcaccctggcttcttcagcatccttcctagccaagtccgcctctgccctcatggtgtcggatagagctgtgttcgtggaagtaggaaactaagcctgagagtaagtgtaggccaacttcagaccggcctgcacaaggaaaaaaatttagcatttcagctaagtatggaagattaaagggaagtatccagaaagacttaccctggtggactcc

SEQ ID NO: 333897 - DNA, 535 bp, Cannabis indica
aaaatatttactaacattgagtcgtggaggagaatgaagatgtgagaatgggtgatattagaaatttttgaagaaataagatatgattttgatttattgtgagttatgagattaagatagagaaataagatatccagtgtcatggggggtcgctctcgtttgagtgtgttttgtcgctctcgtttgagtgaatagtccttttgtttatgttattttttttctggttttcgcttatgcgatacgtcatggcttctagcagtagtaatggaagggatttacatgaaaagtgggctgatatgtgtcttgaggaagaagaagctacagaagttacttttgaggatgaagatgctgatgaaagggaacccgacttagatgatccctggtgtctgattgggagactattgactggaaaggtatccgattttctcatttttcaaaacatcatggctgatctttggaagcccggaaaaggaatgtatgtgaagatcctagaacaaaatcgattcctttttcaattttatcatgaaattgatat

SEQ ID NO: 333898 - DNA, 587 bp, Cannabis indica
aattaattatattaatttaataaaatcagtacaattgttaaaagataataatactgtaaaatcggtaaaacttaatcatgccccacaaggttataatccatattatgattatctatgtcgatcagaaaataatttttcacattattgaattgtttttgtctctcgattgccgaaacaagtaggagtatatcagtatatcacttttaaagatgtgcattaaaaatttatttttattaccacaaaaataatttatagtattcatatttaaatttacacataataaattaaaatgtgcttttacaatacactctctaaataaaagagttacccgtgtaatagacagtttgaactttattttcggtgtgttaaatttatccgaatatttttaaaattttgtaggatgtcttaaataagtataatgtacctactataaaaaaaaagtctaaaatttcgaaataagtataagtacatcagtgtacacattttaaaaaaatacattgtaatttaataaatacaattaataatataaacatatacaaaattaattatatatatatataaaaaaagtatgccgtgtgaacagtgca

SEQ ID NO: 333899 - DNA, 739 bp, Cannabis indica
aacagcagggcacgaaatattaagcttcatggacacttactcaggctacaatcaaatcaaaatgcatccaccagaccaagaacatacaagttttcgaatagatatgggtctctattgctacaaagtcatgccgtttggtctaaaaaacgctggagctacgtactaagattggtaaacaaaatgtttaaagaccagatcaggcaaaatatggaagtgtacgtggaggacatgctcgtcaaatccagaaaggctgggggcacatgacctagacgaatgcccgagagtttctaggcttcatcatcaatgcccgaggaattgaggctaatccagaaaagattcaagccctcttggatatgaactcgccaacaaaaatcaaagaagtgcaaagcctaactggttggatcgccgccctcagcaaattcgtttcaaaatcaacagacaaatgtgtcccattcttcaacatcctgcgaggaaacaaacagttcgagtggacagaagaatgtgaaaaagctttccaagagctaaaggcacaacttgctaaacctcccgtactttcaaaacctctggacggtgaggaactgggaatatgcttagctgtcatggagcatgccgtgagtgtcatgctgatcagagaggagagccacatacaacacccagtctattacatcagtaaaagactcattgaggccgagggccgatattcgttgatagaaaaactcgcctactgcctcattctagc

SEQ ID NO: 333900 - DNA, 641 bp, Cannabis indica
taaaaatgttctcactttctaacaggcactcttctggcagcaaaagaattataatgttgtgaatttaacagcattatatggatcaacatttcaagaacatttttcagagatccataataattattcctgtatttatttatttatttatttatttattgaccttttattgtagttgttatggatttaaaaattaagttattatatcactacagaaaaaaaaaattaaactcttattttagtaattggatggtgttctgtcagtattacaaagtagcatatgatttggctttcaattttatctcaaggattttatgtggaacaaattaactagtatactcaaggagataggcaacatatcatttttctttcaggtgagatattatagtatatatacatatatatatatattgtgtaatttatgttcaattcctcttgctgttgtggatccttctctgctgcaagacaatgtagagtggaatttcgataaataaattgtagtgacagctatgttttgctgctgattcttatatttgttccagttgttgtttagtattttgtcttttggatagtccttttgtctcgagcaagttatccccattcagtaagtatttattttttctttattttattgtcacgtgttc

SEQ ID NO: 333901 - DNA, 1540 bp, Cannabis indica
ctacataccaattaacaacaatgttatttgtgttaagactatattattctgacaagagagagatgaaaagagatgaaacctcgtttaaggatgtcatggcctcaaccacctcctttgtaaatgtctttcccactccagatgatccgattaacacagttggttttatagcctgacacatcaagagcaaaataatacgacgaatgttgagagaatagaggataaaaaaaattcccataaagattttttgaaattataacaaagacatagctaacttcataccttaacagcatcaattagttcctttactggttcatgctcatgagcccaaggttgcttaaaatgttgaagtgatccaatacgggatcttacaatcaatccctacaacataaataataatagtcctgttataactaactcgaaacaaattcaggccagtattatttcaaataaattggttgctacctttgagtccactagccaaatcttcttccgggtctcttccaacggtgcttttgtctgacaagatattgattacactattagtcacaagtgttaaactaagggctcgtttggtatcgcagattgaattggactggacaggactataattaggattagattggattatttttgtactacattgtgtttagtataatataggactaaatctaatataaataattttttaatacaattataatttttttagtaatttaaataatgttagatgattcatttatattcataaataaagtaaattatgttaacatttaataacatgtgtactaaaataaaataatatatataaaaatgtataaattattattaaaattcatgtacattataaaaaataaatagtaatggagtataatgtggttttgaataaaaaaaataaataatgttaaataagattaaaaaaaattaaatattttaatcattgaaaaaaaaaaaaaactaaataatttaaagctagatgtagacttcatagaacataattattatttttttattttttgtgcaaggtatagattcataatatataataaagtaccaaattgtataatgaataataataaatatttaattaacagaatattagacattctaggtggcttagtggaagtcgtacctaagccataataaatataaatcttatattatatattaaacaataaacaatatattaatatcttaatatacattaatgggtaacacattgtctccactccaccctattttttaattttaatttcttatcttaagatttaatgctaaatagatatttttggcaattaattgcagttcatttaattcatttttcttttctttcttaaatcacttatttatttgacttttttttttctaattatttttgagtttaggaagttgcggcaaataataataaagtgaagagttgctaactattcctttttttcttttcggaaattattcctatttgtataataaattattataataacattggaatcgataataagaatttccaatacaaacacataaaataaaagcaattaataat

SEQ ID NO: 333902 - DNA, 568 bp, Cannabis indica
agttcagggggcaaaaattctaattagcgttaaatgaataaagagtttttttgctcctaaacccactcaactatcactccacttgcacttaacccattcaaattttagcgataaaaccctccaaactactgaactagtagtaaatttaacgtgtaattcattttttacatttaactgtcaagcagtctatattgacagttaactgtaaaaaatgaatgactacttaaatttgctactagttcagtagtttggagggttttaccgccaaaatttgagcttagagggttgaatgcaagtaaaaggacagttgtgagggtttagccgcaaaaaactcaatgaatataaattgcatttttgttcatattgtggtgaccaccactagttgatgattcccaaatagagtttgttgcacttgaatcatctcaactatttttctactactttatagggttgtacataaatttttataaaccgcccaatttgaacaacccgcccaagttaaacagagataacccgatgaaaaatgcaaactgaaaaacctgacaaaaatataacccgcctaatcttt

SEQ ID NO: 333903 - DNA, 1549 bp, Cannabis indica
ggcataaaacccaacaatgtgctgtttttgattatagtgtatttgattcgtatgaagattggatttcatatttttagatttaattttatttgtacaaatatatatgaagtatggatcgattatttgaattaatcgtttttttaatattgatttattattattatttttaaataattaataacaaaataaaataaatcacgtttttatacgttttatctctctaacaaaaaattaaataaataaaataacaaattctaaagagaaaaagaaattttatgaaaaataaatatttagttttttttaaagttatatatataaatttttttatatatataagtttagtgtacacattgatatattaaattttaagctatatttgtaccatatgtattagattttttgaattattattattttttgatttagaaatctggactagacttctaagccatacttgcttgatagattgacgagaataaataagtagttaagtttttataagagaaacacaacaaatttatagtagttcacccctatatcgagatagtaatggggctacgtctactttggatttttatttcttacgagagggtaattacaacaatagactaagtgtcggaagctccaaattctagagggagaaagtttagagagagaagctctgaccttgtgggtaattttctaaatgtgaaaaatgagctaagtgagctctccttttataggcaaaggaggcccaacaaaaaaaaaaaaatacaaataagatgtttttgatcgttgatgatgatctaacagtaaaaattagctcttggtggtgatgaccatttttcaaagcccgacaggtgctgctgtaggtaacctagagcttatttttgtaactcccttgggtgaatcttgacattgatagcttcagaatcacgtctgtagtgtgagacatgacttgatagagcattgaattagcttcaaaatacaagttgaatcacatcaatcaaatcaaaattgagtgagttatgactgtttcactaaaggcagttcatggcccaagttaacatcccggcgcccatgttgacgtcaacctaaacgctgggtaagtgtaaaagtgtctaaggaatgtactttaaaatgtctaagtaatattttgacataacttagtcgatttatgtgttctggcgaagctggtcactggttctcagagatattactgttttgcggaatgagaaactcgaaactcttcattttcgggtgacctgaaaaatgagaaatggaaagttgtgaatttaatttctttgacttcatagatcattgtcattgtgaaaagctagatagacggtcaaaacgacatcagatttggataagcagaacacatcgcaccaggtcttttgtcaacctaggcgctaggtacttactcccaagctctcaagatttcgcttttgatacttccaaggcttctaaacttgaggacgaggtctcctaccccatttgaccattatagattcaatggtcccatcagatttggcatttgagcaattgaaggcagcgttccaagttgatt

SEQ ID NO: 333904 - DNA, 498 bp, Cannabis indica
ttctaaactcgatttctaactcacaatcaccttaaattcaacaagtaaacatcgaaactagtccatagctaccaaagaatgattctatgaagtcagagctccataactactctaaatcacaaagtcactatgtaaaaccaaatatttttaacttaaaacgaaactaatccttacctcaagcttttcctcttcaatgatttaatgtcctgctactaccggagcttgaattactaagttttagattgaaaatcaaagaaaataaattaagaggaggagggtttcgtcgcaccaaaggatgaggattttgttcgtacctgtttatgttttaaaacatagcatatatatatcatatacattttttttaaaataaactttattaatagtaataataatataataatataatattaatattaataagttctttattattaatagatatcttttcatttttttagccactaaaaaaaactctacttctagggcactaggtcaaat

SEQ ID NO: 333905 - DNA, 1257 bp, Cannabis indica
ggggttgggtggctgcctaggtgagtgacacttggccacttaatttcagccaaggttatggatgggaatgcactactcttattttggaaaaaataagaaaattcatgaaataaaccaaagaaaccctctctttcctttctctctctttgtaccacccaagccaagggaattcatcgctggattttgtgttttcagcaagggttggaggaggaatcaatcacggtaaaccctagttgctctctagttatggtttttctcaagttttagttggtttcaagaggtgattttgtgatataggggctgttagggttaggattgtttagagtttgattttttttagattcatttaagttgagattagttcctactaggtggttttagtaatttggattaggttttgtgcaagtttaagctttgagttcaaagctttgatctctaatggcataaattgattttgtatgtttttctgtgaaatactagttggaatatgttgtttataccctaattaggtactctggaaagtttggttgcatttggtggaggcttgagcaagaaatgaaaaatttggtgtgaactagtgcaaaccaggtaaccggttttacacgtccgtgcaaaatcggctagttttttggcggggttcctgaatgcttcgttttctcaattttcatccatttcagtgccgtggttgggtgcttccctatttccagagtttgtgtaatccctagaaagtatagtagaacctagggttatgggttcgggtttcccgggattagggttttgatcatgtaacttacccggtttcataatgtgattagggcatccatctagcacgagacttttcgtttaggtcgaccagcacacttaaatctggaaagaaggtaagaactgaatataatgtgtgatatgaatatctgaatgtatgtatatgttatgtgtatatgcattcttaatgtgttagttgcagtaccaacacttatgcagttaagctatagagtgcattggtatagtgaatgttatctgagagtacatttcagtgataccagcacaagtacgaagaagtacttagtgtgtgtggtatatcactcagtggtactcacggtatgaaacaaaccctaccaacactcgtatagtgaggtacgtagtgtatgtggtatagtggctatatccaagtgttgaacgttcttactcatctgttcagccttgtaaataggtgtatgggcgcctaaatacaagtcgaaaattatatgatatgttata

SEQ ID NO: 333906 - DNA, 470 bp, Cannabis indica
ttattgctttcttatatatattctcattacgacatatcgtttatttcttattaaaaagactcattgtcgttggctaaaagtgaagtcaacaaagagaaatctcatattagtagctatgttagacaaagaaggctacctcatgacaattaagaaaagtatcatgaagattcttaaagggtcaatggttgtaatgaaacactactataaaaatggtttttctcgatgtttttaagcagtcgtttaaagtatttccgctagtttctataatcgtcgcctatacgaccgtcacaaaacgggtaaaataaacgacggttaaaaaccgttgctaatgtggacttcccgatattttaaaaccgtcgcctataacagggtataggtgacggttttaaaccatcgggaatgtaaaaaaaaaagaaaaaaaaaaaaatttccccattttttcctgcatagttttataattttacctaaat

SEQ ID NO: 333907 - DNA, 690 bp, Cannabis indica
aaatattaccaacagttttgtctattggtaatataaacggtaatggtccccaatttatatcgtatatttttactcttgcaattgtatccccatcaccaagagaaaaagttttagaaaaaggttttgatgcaaattggaagatcaaatcatttaaaagtcgattttatggactccggtacgcttccgctattccttaatcatattatttgactctcatgaattaattagggctaaattaagatttacagtgttcttcacatgacattctaatacttgaaaatgaaactaaataaaagaatggaataaaacttgtttcacttccattccattccacttcattacatcaaaccaaacaccaccttagggttaatgggttactaagttttatgtttgcttccggtattatttgaatattagagtgtataattttttagggataatttcacaaatttaaacaacaaaaaaattataaaaatacggtttcacagaattttaaatatttttacgattttttttattttatttccagaaaatacaatctttttatgttgtactcttattaatttgttgttaattttttgtcatctgtatgttattttttgttattattttgatattatttaaatattattttcatattgcttttatgtagttttcttgttgtttttataaaaaactgtaaaaatgtaa

SEQ ID NO: 333908 - DNA, 633 bp, Cannabis indica
tagacacatgatagggaccccaattgtctatatgaatcaaatcaaatattgtgattggacacaaaaggcaacttcttttgcttagcaaaatgacaaatagcacaatgaaaatcagaacagccagagtattgaaaattttcagatctttattcaaagaatgagtctttacacaagaagcatgcccaagtctataatgccatatagtatcactactaattttcaaattagaaatggacaaaatagtaggggaaatggtcaaaacagtaggtaaagcattgtgtctcaagaggtagagttgtccaatacgttcacccatcccaatcacttgattcttggaaatatcctgaatcacacatttgtttggaagaaaaaaaatgaacagttagatgttttggaaagagatgtaacagaaagtggattacaatggaacttaggtacacaaagaacatttttaagaacaagattagataggtgtatagttccaacaaaagaaacaacaacatttctaccatcaggtaatccaacattactaatttttatgttatttcgcacgctgtgaaataaggtagggtcacagcaaacatggtgagtggcctccgtgtttattatccaagtagatttaggaacacaaaa

SEQ ID NO: 333909 - DNA, 752 bp, Cannabis indica
aataataattaccatatatatatatatatatattattttttaactattttttttaaaaaattaacaatttaggttattgctgtaatttttatatcgattgcaatatagattttaattgtgatgtagattgctccattaattttttatgtgagttgctacatgaattttcgtaaaaaataaaaaaaaattactttaatatataaaaatgaaataataataataataaataataatacacttcaaataaaaatagtgtgctattggactcctcgatcataagataggatttaatgtatcatttatttatttttaaaacaagtgattaataaatttattattaataataatacactatataaattatttcactttacataataataattaccatatatgtatattattttttaacatttttttaaaaaaaattacaatttaagttactccaataaattttgagtgtgatgtaaattgctctattatttactatgtgagttgctacatgaattttcctaaaaaataaaaaaaattactttaatacattaaaatgaaataataatacacttcaaataaaaatagcgtgctattggactccacataagataggaatttatatactttattcatttatttaattttaagacaagtgactaataaatttattattaataataaaattcaactgatattataaatataatagatcgaattaacagaaacagtgacaaacaggaccaccttcatttttacat

SEQ ID NO: 333910 - DNA, 685 bp, Cannabis indica
tactaatcttacctcgattccgaatttaggtgtgccggtcaaccttagtggaacaactgctcggcgaattaaaagctcctaaatcacatcaatcgtaacataggttagtgacacactaaatcacttctgtggacttaacttgaaactaaaagtttccctatcgataaataacatggcaataccgtaaacaacacaaaaatgggaaaaactagggttcccgaaattgccccaaccggtagaccggttcccctaccagaattcttgttttgggaaaattcctgatgccaagcggaattcctgttcctacaggcccctctgaaccagaattctggttcagtgcaggaatgaccaaaaattctataactcaaccaaaacaaccccaatccacatgaaaccttccagacctgttctaagcatcctaaagatcaatttacaagcaacaaaaccagtacccaaactcagaaacaagaaatgccattgatgagccaagcttgagttcgaaaactcaaagcttgctcatccaacaaactagccaacaaaacttgcgcaaactactctataataccataatatagctacagaaaacaaaatctaacaatagcaacaagaacagcaagtaaaacaacatttcatgcaaaactccattttcttacaattcaagcaactaaaaagattgaagctaaga

SEQ ID NO: 333911 - DNA, 849 bp, Cannabis indica
agcttgttaaattagcagtttgcttctgcttttcatcatcctttgtagtatcagaaacaacaggtttatcagtccttagaacataagcaacctttttcgtagtgaggaaaaataacatttttaatttccatcttttaaaatggtttccctaaaaacgaaaaggtttgtttatatcaataacactagaattctcatcgacagtcatggcagaaactaaacatcttaaaatttttagaaactagttgctgcataaattgaaaagaacaaagtaaccgaattcgaatctggtttgagtcgcggactaggtcgctctctttaagacgttcgcggcacaacccagatttgtgcaagcagactatcaatgtaaagaccgcttagctttaatttggaaattaccaataattagggtttaattatggaaattgtttattaaccttgtattattaatttatgttgatttatttgaattcagaatgcattttatatgtcatacatagaaatttcataattttacatgttttgtgcctggcaacattggaatgcggtgtttagctattagaatcacatcttagtatttttagtatagcgggacaatatagttagacattgtgaatgtcggaatagtccagattttagaatttaccaaaatacccctcagtgatttggataagttttagtgtgggcaagagcattatggtctttatgcctaatgagatttttgtcctttagtggactttaattgagtttaatattctgatattaggtttaatttaattagataaaattaaacctttttattcattttacattaaaaatcaaaataaaagaaaaacccacctttctctctcc

SEQ ID NO: 333912 - DNA, 795 bp, Cannabis indica
gtaatgggttttatttagggcacaaaacccaacaatcccgagatagggtttcgggtggaaagactagtgactttacagtggatgatacggaaatggtacagtttatgaaccgtgtttgtgtgcttatggatgatgacattaaaagagaaattttgaatgagtctcatatgactccttacttagttcatccaggaacagcaaagatgtaccaagatcttaaggccatgttttgctggccaggcatgaaaaatgatatagctgaatatgttgcaaagtgtttaacttgtcagcaagtgaaggctgaacatcaaaggcctgcaggtttgctgcagccactgaatcttctggaatggaagtgggaagacatttccatggacttcgtggttgcattgcctagcactacgggacagtacgactctgtgtgggtcatagttgataggtttacaaagtcggcgcactttttacctattcggacaaatttctctattgatcagtatgcagaactgtatgttagagaaatagttcatcttcacggtgtcccaaagtccattaattctgatagggatccaaagttcacatcgagattctgggagagtctacatcgagctatgggtactcaattgaaattcagcacatcatttcatcctcagatggatggacagtccaaaaggaccactctgatcttagaagacatactacgggcatgtgtattagacgttgaaggatcatgggtaaattacctcccctgattgagttctcatacaacaacaactatcaggcaacaattgggatggc

SEQ ID NO: 333913 - DNA, 469 bp, Cannabis indica
acatgatatatactatactggttactcacctatagtaatttagtattgcattcttttacttttaaatttttttttaaaaaaaataagtaatatttaattttgatattaagaatattaaattttaaaataaaataaataaatgtaatgcatttaggccctttacgtgtccatatttaatttataaattaataatggaagtggtaataacagtgtaagagaattgtaacattatgtatttttgccactaaaaataaatattaggtatttaagtgcataaaattaaaaatattaggtatttatgccacaatttacccttttagtaattctcattctgcttagagcattgctattgggctccagtggtgcccaccaccttttataggtgacgattgattagcgatattctctaaaaaattacttttttttaaattatatgagacccaatttttaattacaccaataacagtat

SEQ ID NO: 333914 - DNA, 1289 bp, Cannabis indica
ggcccacactgggacatggacccgaactccgacctaagcccaaagtggaaccaggactcagactaggactcgagacgcgaacccgaataggaaaaaaaattttgacccagacagggacctaagacctgaacatagatgggggacccagacccgggaatcgggcccccaaactgggagcaaaacttgggcctcaaaacttaaatcgggaatcgagactagaccccagacaaaaacctggacctaggacccacctcaggacctgggatccgggactcgatgcttggacccaacccgtagtcggtgtcaggatttgggacatagactagaacccgaacccaaactcgaaatcaaaccaggactcggacacatacccagaccctgacccacactcgccaactaaaaccaaaacttgaattggaactagactaggatcttggaatgggactgggaccttgacccggacccgaacctggaaacagaccaaacctaggaccctcaccgagaccgaaacccacctccctcgaaacccaaatcaagacctgaacccaaactcggactgaaactctacccgaacccgtaccctgtgacatgaaactagaatcgaaaccagaagcagatcaggactcaggagcaggaccaggacctggacccagacccaaaattgtaaccggactagtacccggactcggacacagacccacccacggattgggtcccaaaattgaataaaaacctgaactaggactcgagacacgaacccagacttgaactcagacccaaacatggaacaagactagggactcagaattgggattgagacccgaaattgcacccaagtctcagtcccggaactagaccgagacctagaccgggaactggaacatgaaccgaaactagattggacccatgattgggatccagatcttgtctcgggatctggaaattggggcttggacaagacccatagtaggtgtcttgatctaggactcagagacggacccgaagcaggactaggacctggaccaagaccctgacctaggacacgaaaccgaaacttgtactagaacgtggccaagaccctaataggattggggtcgtggccaagacctagacctagactgggacctgaaattagaccagaacgtagccccgaaactcgggctcggacccagacccagacctatacctagacccggtcccgaacccagactaggattgcgactcgaacttgaacccaaacccaaactcaagacttgatcccagacgcaaaaaaatcccctaacataaat

SEQ ID NO: 333915 - DNA, 528 bp, Cannabis indica
gcacccgtaagaaagtgagagggggtttcaccagtcgtggatcgagttgtattatacgaccatagaccttgtggaagttcttctggccatacacctttacgctctttgagcttacccttgatggtatgcttaattatcttatttactgcctctgtctgaccgttgctttgtggatatgcgactgctgaaaatgctttcttaatgaccaactcatcgcatacctggcacatctccttacagtcaaattttttttccattgtcagagattaacttgtaaggtatgtcgaacctgcagatgatggcgctgtacacaaactcccgtaatttagcagtagtgatagtcgcaagaagcttggcttcagccctttttgtgaagtaatcaacaacaactgcggcgtatttcaatcctcctttgccttttggtaattctccaatcagatttatgccccagactgcgaaaggccagggacttgtgatagaatttagttagcttggtggtttgtttacatatgtagctattcgttgaca

SEQ ID NO: 333916 - DNA, 728 bp, Cannabis indica
tttgtaacgtaacacattgtattcaacacgtacgtgtactatatagagaaatgctaagggatcttcaagtgacaaatatcataaaaaaagtgtcgtattattataatatggagtgttacatatttttatttaataaataacttaggataccgctaactaattgaaaaccacaacatcagcgtgggcttattagccaccaaaataacaatatacgtttacgtatggatacatataaatatatcacacaaagtggggcggagtaattgaatgtgtgaactaatttgatttagtgtacaataattttataaataaaatacatatataaattataaagagtagtaatatacggaggcccaactaaacagttaagctcctgtcaagcgcaggagctccacagagatgggggacgggggctctgtttgttcacgtgggcatgggagacgaggctttatttgttcacgtgggcacactgtggaagccccgtggtgcctcgctggaattctcgtgccactttttgccttttttgaatatcctagtttttatttatgactggaatgagagtattttttttatcaatattgcaaagttttgatatcatcctatttttattttataggtaaaaaaataaaatttgaccgtaatttatacgaaatattttaaatatatgatttattaagattttatttatatctttatatattaaaagtgcctatctaacggcatttctt

SEQ ID NO: 333917 - DNA, 1165 bp, Cannabis indica
tttgccttctcatattctccattctccaaatgtcgttggtctggtctaagcctggaatccgtaggatatataaaatagaaagacataatacatattgttgcccctgtcaccattaacataatacatgctttcatcccactttccaaatattgtagcaacttttttccccataagatcttcagcaaatccatgaacctgtatttgtattacatcatcagataagaacgaatctgttaaatatggtagagaattgaagagctagactgaaacatatatactaataagaaaattgaaatctaaacgtgaaactaacattagaaatagaatggagcagagaaaatgaagctgggtaagaatcacaatgtaatgattgactgctggttttcttctaatgaaacttcaattaaaaagaaaaaaaattcaaggctgctaatggcaagttttaaaggctgcgaaaagccaagacaaaagaaaaaaccaccacagtggtccatatataattttaaactgaattaataagttcactgcagaatctttagccattgttcataagttcatttactaacaagccagaagacaaagaatctccctaataaatgtcatgtgaaacgattaaaatcacttttggtacattcaaaatcccaatagatgatttcctaataggaaaaaattcaacaataacccagttatcaaaattcattatttcttaattttcgggtccaaattcatgaataaacataactctgttaataagtacctccattcttcatacatgaagaaagaaagaaagaaaaatcagacacccaaacacagagtcaagcaaagtaaaggaaaataaaaaggtagaaagagtaccccacgaataaggtgaggggaagtgagaaggcatttggcgctccatagaggatcgttgaggtccgcgccatggcgttcgagctctgtggcgagtccgccgtcgataacggcggcaccgccggacttcctgagaaactccgtcataagagatgtatccattcaacgatgaaacaaagagaatgcaaatgagaaaggaaatacaaacccaatacaccattgtcgatcgaagctctctctctctttactctgctgattttgtttctctctctagcttctgagaaaagcttctctccgagcaagtccgataatt

SEQ ID NO: 333918 - DNA, 570 bp, Cannabis indica
gtaaaataatttccaacaaatgtcccctataacacaccaagggagcgatgaacaaccttttaaattttgaaggagtgcctaagaatcacttcttttatttcggttaggttctccataaaaatcagtgaggcgccaagttggagaagtaaaagatatggagatttgcaaatcaatatgattatcagagtaaccccacaaaaagccatcatctttatttttccaaagcaaagcaataccacccgaagccccaatagcatcaaccacaaagacaccttcaaaattcaaagactgggccaggcctaccacttttgatttatgacactttgtttcacacaaaaagataaattcgggtctcttttaaaatacagtttcttttaggaattgaatagtccgttggttcccaagtccccggcaatttcaactcaacacattcataatacttggcggacttggaaaccagcacccgcctctatcaagttttttgatacttcgttttgggctgcaacatcattatcttctgaattagagatgtccatgtttttaacaccttgactatgattacttatccca

SEQ ID NO: 333919 - DNA, 727 bp, Cannabis indica
atagggacggtgaggggaaatcaaggagaggcgaggcaatgctataacgttgctgcccacctgcccgtattgatggtccgagaaactattgagccagaaatggctaaagaagacgagttggatccccgtgtgggatccgaaaaaatcgtagaacctatggaggacgtcgatgaagtatcagtgtgcgacctcgactccaccaaagtactccggctaggaaagagcctagacccagaggaaaaacaaaagataataaagagactgaagggtgccattgacgttttttatagtgccaagaagacatgactggcataagtccccacatcatcacccatgtcctcaatttcaacccggaaatgtcgccggttcagcaaaaacgacgtctcctcaactcagtgaaggccgaagccttagagaaagaggtggacaaactattaacaagtggcatgattcgagatgtatactacccggaatggctagctaatccggtcctggtgccgaagcctattgggacctggcgagtttgtatggacttcactaatctaaacaaagcttcccccaaggattgttttcctctgcctcggatcaaccagatggtagatgccacctccggattcaaactactatcctccatggacgcgtatgccggttataaccaaataaaaatgcacgtagcagatcaagagtgcactagcttcaggaccgataagggggtatactgctacct

SEQ ID NO: 333920 - DNA, 526 bp, Cannabis indica
taacagattgggcggtttgtaattttttcgggttatttcggtttgtaatttttatcggttttttcggttcggtttgggcgggttattcggtttaggcggtttacaaatttttttgtacaaccctactatttattaccaagtaaactcaactttcgtagggtagagcggatatttttattttagattggtaaaaattagatcatcgctctttggtggttcacttaatagtatatgattaaattgaaaagcgtgagatgataaaatgaagtagtaagtttcgttttaaagaagctcggtgtaaaaaacaaaggtcatatattttggaaattaagtggaggaatcttggggaaaatgggtcggctagggtaaaaggaaaaggcccttaatattgaaatgggtccccaaagtagtacgaactgtcttagcacttaggcacttttttcggttttccagtgtttgccttcgccagttcttctcaactttcacttgtccacattcagtacccccagttcagcgatctactgta

SEQ ID NO: 333921 - DNA, 596 bp, Cannabis indica
gtaggatcaaactgagaatagaaaacagagttttatgtcccattattttttaaactgattttctctcttatttttgaattataatcggtttctgagttattatatgttatttattttttacttattttattgtgcaactggtttttttttttaatttatgtataagtacttttggaattgacttcttgtttgtaaatgtttatttatttatttattttacttaattttaatagttttcaaatactttttatattagtttattttttttgcagccaacatatttgaatatagacccaaaccatgggtttgttagtaagttgcaaagatcgtgttgtatttattttctttcttagttagttttcgatttagttaaagattgtattgtatttcattggtgttatttcacagctagtttaaaaagaaatctcttaaaaatgcactagtttttgcgatgtggtatgatttatattactgttgcccctgattttacccaatatacgtggaccaaccaaacaaggacacgtagaccaagcaatgtacaatccaaaaaatatttgctaagtctttataccgtgaggaggcttccaggacgtagc

SEQ ID NO: 333922 - DNA, 495 bp, Cannabis indica
gacacatggcatgaaggatgatgccatggagttgagtagaccccagtcatagtagttaacctaggaggggaccctagccttgtgcccaggttaactctagagctccgagatggaagtttggacttcaataacttgaatccaactcactatattttagtattttataccatgaagacatggaacaaccaaaaagaatgtttgggagctgaaattacacgaacctacaacttggaaaccaacttgggcacctacggtttccacttgacgtgcaagttgacagcctcaactagggtttcagtttctgggactgtcttagtgaaaagtggtcaaaaattacattgcgacatcagcttgacataccacaaacatgtttgaggcatcagaatcaaatttagagcaagttgattattgagcaccgagcgcccaggttgacaatttgttaatttgggtgccttctaagcatccaatcgaagatactgttggaaatattttacc

SEQ ID NO: 333923 - DNA, 520 bp, Cannabis indica
aaaacatgccaactcgacaattttctgtattcaagcatgttggccgacccctcggtatgaggacagtcgacaccttacccatgcaaagcaagcgtaaggcagagtggtacattttgaacaattgcacagaggttgagccgtatatcaagtaagtataaattccataaacacaaacacacaatagtcgacttcatctaaaaaattcttaacttactaagtgcattatattatatagtgagcacaaggagttgcttcaagcaaggggtgtaggaaatactgaaaaagtgcaagagactgagttccctgaatggttcaaagctcgagtaagtcttgttgcctctcaatactcttaatcttgttctcaataactgttcaacttttcttaatttaatatttttcctgatatgtagattaatgaactacggttgagaaaccagggtgcagtgtcagatgagttgtatgctatcgctaacccagcgaatgcaaaaatttatttttatccagggtgcatagtgaacgg

SEQ ID NO: 333924 - DNA, 1254 bp, Cannabis indica
atttttgatgagttatggtcaagtatggagctttatcttgatgttggttaaatctgaaattatggtaatttaatgctaattttgagccttgttcttgtgtttcaactctttgtatgtatattgacgactttaatttatgatttgagagtttgattaagatttgagcatgaatttgtgtgtttaaacatgaatttcgatgctgaaatgtggatttttctgggtttggaacccaggtgccgcggcatggcttttgcatgtcgcggcccgccctcgtatttttgggtagattcgagtattaactttgaaaaggcataactttgtgatctgaattccattttaggagttctatatatcgttgaaaagcttgtttcaagctctatgtgattatctgtattttagatgccatgtatatattttataaatgaggaatcaggggttaaccctatttgtgtaaatcccggagttgtgactaggattaccggctcttggttaggagcacctggggatttggaatctctattattgcgggacatcaggtaagacagtagtttgcacatagagtttagcacattggcgctcatattgtacattgtggttgttattaattaagaactgaagttacggttattaccctaaactgagcggttatatggtctagggttattaccctagtaattaaaagattttgagtattatgccatgctaaatacgttcgaataaagaattacctaaggcatagttaagctagactcagtaaactagtaccttgagtttaacagtagtgcaggttagaaatattaccctagaatattataaaggtaagaaagcaatgatgtatggttatattgtttattaagtgaaggtataagttagagttattacccttaataaatgttatttcgagcatgccgtaatatggtgtagaaatgattatttattatgcaagttagggttatttccctaagattctatatgatttagtattgaatgcacacatgtatgtcaagagttatgtgcataagacataactgggttagacctagtatattactaggataaaccactgaaagaacgtaatgtatggatcacgtatatatatgaatagggttatgcgagcaaggcataaccaggttaaactcggtaactataaccgagataaatcctactaaggccttattgtaaatagacgtgtgagcgtaacacgttgatctatgttgttgggttttgtgccctaaataaaaccctttacaatct

SEQ ID NO: 333925 - DNA, 761 bp, Cannabis indica
ttcaaaccgtagggctgcctggagtcgaagtctgtttggggatatcattgctacccccgctccggatccattttcgttagaggcgccatccacaaatactttccatgctaggacttgcgttgtgggcatgcttacgttagcctctgcctcgtggcactccgtgatgaagtccgctagcgcttgtccttttatggaggtgtgtggtatgtaatgtagatcaaattggcttaattccatagcccatttgagaagtctcccggacgcctccagtttttgcaggacttgtcggagcgggtggttggttaatactttgattgggtgagctaggaaataaagtcttagctttctcgaggccattaggaggcaaaaaactagtttctcgataaccgggtatcgcgtctccgcccctatcatgcgtttgctaacatagtacacgggatgctgagttttttcctcttcccgtactagggccgcgctaaccgcgttctcggagacggccaagtataggaacaagtcttctccgagaacaggttttgataagatcgggggtgtagccatgtgctcttttagttttttgaatgtctccttgcactcttcggaccattcaaatttttggcatttcttcaggatgttgaagaagggaatgcacttgtctgtggatcgagagataaaccggctcaaggcagcaacctttccggttaggctctatacatctttgtgtttttgggggaaggcatgcttaggagagcttggattttctc

SEQ ID NO: 333926 - DNA, 802 bp, Cannabis indica
cccaatgaaggttgaagcggggacgttacataagcccatcctgggcataacgggctaggcctatgcctagggcccacctagcccaggaacccaaaaaaagtttctccttttgaaattgcatatttttttgttactatttttgaaaaatactatatttttctataaataaaagctcaaaatatttttttctatggcccactaaattttaaggccgaccttgacttattgcttgactctagatatggcagctgagaaaggtcataaatttataattgtgaaagcgattctagtctagtcatcaatactttttaaggagtaagctttagatgagagattgagaattatgttaagtcattgtaaaagtcttgcctcctatttgttagttgtttgttttttaatattgtaatatcttgtaattttttaatctaatatgatatattagaggtatcatttataacttataaatattttttataatgatagtgacctttagtttcgttattaatatatgaaaggtaatttgtggcaaaactccctatacttttatatttgttatggcttaattcccttactcaaaaaattatgtctatactccctgaactcaacaatcattttgctctgtagtcctgccgtccattttggtctgttaaatgtcaaagtgaactgccacggtgtagtgtacacatggcaaattttcattagtccacctaattttaataatttatatattaaaaaaaataaaatatttaaaaatcaggaaaaaattatttttttcttttctttttcttcttcttcttcgttc

SEQ ID NO: 333927 - DNA, 757 bp, Cannabis indica
cccagaaggcctttaaacatccggttcaccattcgttgatatgttgcaccggcattctttaatctgaaaggcatgaccaggtagcagtatactcccttattggtcctgaagctagtgcattcttgatctgcaatgtgcattttgatctggttgtagccggcgtacgcgtccatgaaggataacaacctgaatcatgaggtggcgtccaccatttggtcgattcctggtaggggaaaacagtcttttgggcaggctttgtttagattggtaaaatctatacatacccgccatgtcccgtttggttttggcactagtactggattggccagccattctagataatacacatctcggatcatgccactggtcaatagtttgtccacctatttctccacggcttctccctttactgggtcgagggggcgtcgcttctgctgaaccggtggccagtccgggttaacattaaggacatgggttatgacgtggggacttatgccggtcatgtccccttggcaccacacgaaaacatccgtggctgcccttagcgttttaattattttttccttttcctctgactctagactttttcccagccagaggaccttggcggggtcaaggtcacataccgatacttcatcgacgtcctccataggttctacgattttttggatcccacacggggatccaactcatcttcttctgccattcctggctcaataacttcgcggaccatcaatatgggtaggtgggcagcaac

SEQ ID NO: 333928 - DNA, 677 bp, Cannabis indica
ttataaaattaagatcctacttttaagctcgtgccacgaaggtattaaccaacgatcctctctgctaagtgcttcacaaataggaatcatccagaagactgttcaaatgggctatggaacttagccaatttgatattcaatatacgccccaggtttcagtcaagggataggccttagctgacttcatagtagaatctaggatgaacgaccttccagatgagcaagtcctgggactgctagtttggaaggtttatgttaatggaacgtctaacaaaaaggaaccagagcaggaattattttaatttctctgcaaggacatcaactccaatgtgccctacactttgagtttgcagccatgaacaataaggcaaaacttgagtctatgttagtaggcccgtaattggctaaggaagtaggagcccaaaaaatgaagtgtacaacaactctcagctcgtgataaaccagatatcgggagagtatcaaggcaagtgtgagaaaatggatacctaagtgacacgatctagaaaattattgtaaggtttcaaaggctacagtatctactaggtcttgaggggtcaaaactcattcgtgcacatgctagccaaacttgcaatggaatcagggattgtgcaatatggagtggtaccaattgtgttggaattattttaccaggatct

SEQ ID NO: 333929 - DNA, 1269 bp, Cannabis indica
agaagtattttccttattaccagaattagatttcttgaagttcttttttaagaatcgagcataattctttgccagaagggccagattagcatctgtaaaagattcagacaaatcaacttccttagagttctcttccttatggatgaaagcaactcccatttcgatcttctccttctcagaactcttggttttcttccctttctcccatctctcaagagttaactcataattttggagtgacccaatcaattcgtctagatcaagtgcttcaatatctctgctttcttcaatagacgttactttggacatgaatctttttggaagaacacctagtagctttctcaccaatttcttgttggagtaagttttgccaagagcataggattcattggaaatgtcacacagcttagcatgaaattctgagacggattcatcttcctccattgacagattctcaaaggattttgctagagatcgaagtcgagcctttttaacagcatcagttccctcattcttgattttcagcttttcccaagcatctttggcaacttcacagttcgagataactttcagttgattagtcgagacagcattgaagagggcatgaagagctttggaattgaaattagctcgttccatttcgtcagtagtccattcactggattttttgatcttgtccccttcctcgtcagtaacagtaggaggtgaccaaccttcggcaactgccatccagactcgttcatccacagccttcaagaaagctctcatctttgtcttccaatagggatagttagaaccttccagcatggggggtctggaagttgatcctccttctctgaacatttccatttcaggtagatctgcacacactcagcaaagaactttgttgcacaacgagatgagactcgtggtgggttagttttccagaaaattacagaataaagattgacagagaaacttaaggatgtgcagacaataggacaaatccaagatcgcaatttctttacttgaaaaagttagctctgataccaattgaaagtcctaattactaccagttcaaattgatgattcttagcagattaattctatgttatgaattagaaattaaaaacaatgaacacagaatttacaagcttcctctgcattggaaacgcattccaaccgagtagtgcttgggttcccttgaaccgggtacagtaactttcactaaacaatcaattcaattacaatttccagttctgattcttcaaatcaaacaatgtaatctaa

SEQ ID NO: 333930 - DNA, 873 bp, Cannabis indica
ctttccattttaggcagtatgtgagaatctattgaacaagtgttaccaccaccacttgtgccagtggtaagtaactaggggttcatgatgccacatagagactccgtgtttgaacggtttgtgaagctgcaaccttcaacttttctgggaggtactaatataatcaaagctcagcagtggatgagtacaatcacccgtatccttgataatatggggtgacgggaatcgagagagttaattgtccaactttcatgttacaagatcatacccgcatttggtgggatattgtgagacagactcgagatgtcagtggaatgacttgggatgagtttaagagtctgtttgaagaaaatttttatgacattgttgtgaggacttcacacatggaagattgtgtgaagctaactcaggggaaaatgtacgtggctgaatacactctggagtttgatcgactatccgaattttgctggtgatttggtgcctacagatttcaccaggaaacagaagtatgttagagaactcaacgccacaatcagttgggagttgaagattaccactactcatgacactttgtacaagatagtggtaggactagacttaattgtataggaggcatagcaacatgtaataaaggagcagattgtaaaggatgtcgccatggcatcgaatcctcctgtgggtggtaatttcagtaaggggaccgatggtggtaaccctgatcataaatggaaggcagaagcttccggaacatcagggagtattagaaagtttcagggaattagaggtggtcgtcaaggtcacggatcctctttaagtcatatctgaatgtcgaaatgcaagaatgaccatcagggtaaatgtcgggccaaggct

SEQ ID NO: 333931 - DNA, 637 bp, Cannabis indica
aagttcacttcttttatagccaaaaaaagattaaaaaaaatgctataaaaactattttgcttaaattagaagggtcgggccgcgacatgggatttccatgcctatgcgcggtacccccctttatttgggcagtgagttttcttttgcgttgactgattatatttttgtcataactctctcaatattgctcggaattagacgatacaaaatgttttcgaaagataaaagagagatctagaacttttatgttttgactttttcgaaaatctaatcaaaacatagttgaattttggattgaagtttcagctttatctttttacacaattttctctcttttatagttcatctttttgtgagatttttttatcttttttacatcttattcctcttatattttctaatcttcttctattttaattctgtaaaaataaaagataaacagcgtaaaattgctctaaacaagagtagaactaaattaaaaacacaccaaaaattaacctaaaaataataataaaaataacctaacaaattccctcaaattaaacatttactcgtcctcgagtgaaatactaaaatgaaaaataaaagtcaagcaagtctgtaacaccctaactaccttaggcgtattacgtgattt

SEQ ID NO: 333932 - DNA, 1252 bp, Cannabis indica
tcggccttcactgaatcgaggggacgtcgcttctattggactgatggcatgtccgggttgacattaaggacatgggtgatgacgtggggacttatgccagtcatgtcttcttggcaccatgcgaaaacgtcaatggtacccctcaatgtctttattattttttctttttcctccggatctaggctctttcctagccggagtactttggtggagtcgaggactcacaccgacacttcctcgacatcctccattggttctacaattttttcagatcccacacggggatccaactcatcttcttccgccatttctggctcaataatttctcggaccatcaacacgggtaggtgggcagcaatgttatagcactgcctagcctccccttggtttcccctacggtccctatcccagcctcttcggttgggaattttaggcacaattgccgtattgacgtgactgcaccgaaatccaccaaggccggtcggccaaggattgtgttataagttgttgggcagtccaccaccacaaatgtgcagtacttgaaagtgctctggggtgtgtctgggcacaaggtgactgggagcctcacttttcccatagggataagtgttgttccattgaaccctgtgagttgggaaccactcggtgataggtctcggtccgttaggcctattgcagtgaaggcttctttgaatagcagattcacggaactcccattgtcgatcaagactctggccacgatcttattggcaatggaggtctctatgaccaacgggtcatggtgaggaaaacgcaccgttttagcgtcttcttccgtgaatgtaatgggctgatccattagccggggcctttgagctgggagttgagtaacttcccaaacctcatcgtgtttcacggcccctacgtatcgtttcagctccttacgggtagttcctccgatgtggggtcctcccaagatcatagccactctctcgttgggtctgggtggcaggccaggaacttgctgggcatctccagggggaacaactggagccaatactcctgctgcaccccctggtgttccttgcagcaaagctccggctgcctgacccgggttgagatggggcaaccggttcttgatccactcgtagaggtgtcccaatcggatcaagttttcaatctcgtccttaagatttttgcattcattggtgctgtgcctaatatcattgtggtactcgcatctcttattaggatccctccgggagctgtcttt

SEQ ID NO: 333933 - DNA, 684 bp, Cannabis indica
aacattaaatgttatttctgatctatattaataaataaatctgattatattgaaatgagttttatttagggcataaaacccaacacttacgtcaacctgaatgctgggtaagtgtagaaacgtccaaggaatgtcctttaagatgcctaagtgatattttgacaccacttagtccatttataggttctggcaaagctggtcaccagttctcggagatgttgttaatttgcggaaatgggagactcgaaacttttcattttcgatagtgctggaaatgagaaatgcaaagttgtgaattttatttttctaacttcatagatcattgtatttttgaaaaactatacagatggtcgaaacgacatcatattcgaataagcagaacccagcgcaccaagccttttgttaacctgggcactgagccttttccaccgagctcccaagattttgtttttgatacttccaaggcttctgaacttgaggacgaggtctcctcccctattttaccatgtcaaattcaatgctcgcatcagatttgatctttgggtaattgaaggcagcgtcctaagctgattgtcaacctgggcactaggcccagtcataagtcaacttgggcgctgggccctatttccaaggacttgagtttgtggttttctccttgagtttacttgaatcttcattattttt

SEQ ID NO: 333934 - DNA, 847 bp, Cannabis indica
tcaatttcctttgcagatcaaagcttatgtgggtttgaagctcaagattcaatggctggaggtatttcgatccttaaattatagtgcatatatgatttattaattccgcactttatacttaatcatatatgtttcagtttatacatataaatgtctaacacatttcacttgtaattaatcctcgaattttaaattttagcggtaaaatcttccaaactactaaaccatagcaaatttaaggtgtcatccggttaacggccaccatggactgcttatgtgcatattcacatggaatattattatttgaaaattatttttaaaatttatttaaaattatataaataaaaaatattataaaatttgaaatattttttatttttttaaatgataatattaggtatacaaatataaacatgtcacgtgtataagagtgtatacataagcagtctatgttagcagttaactgtagaaagatgatgataccttaaatttacaaatagttaagtagttttatcgtcaaaatttgagtttagaggattaagtgcaactagagtaatagtttagaaggtttagccgcaaaaaattcttttcatatatataattgtaagaatttaaaatataatattttgaaaatataattggattttttaaataagatatcaaatgtattttaaaaaataaattaggtctattttttagaagataattatatttttaaataaataatagtaaaaatattaaatataatatttttaaaagagaaatttaagactcttttgttaaatgatttttggattattcacaccatatactgaaatttctaattttttaactttttactgtcgga

SEQ ID NO: 333935 - DNA, 1027 bp, Cannabis indica
cccatgtgggcgatcagggtataaacactcaccataactcgcgtactgtaccgactgcgactactgggatcactatcccagcgaacctcgccgcagtagttgcgactcatgcagtcgcagcagtcccgactcctgtggctggagggattgaccaaagcatgctcctgcaagctttgaaaatgctcgagcagcaacgaaagcccatatacaagctgcatgggacctctcctttcactgcggaagtgcgacaagcccaacttcccaagggatttcgtctatccgaatccctaaaatataaaggtacctctaaaccctatagattatctcgaaaaaattttaatactataatggaagtggatcaggtaccacagctagcaaaatgccgcattcttgcggcaacgctcgaggaaaacgcccatgattggtttacccaattgcctgaggcttcgatatcgacatgggaaacctttgtcgacttattcctcacgcacttccaggccacaatgacctataggccaccttatacaactctggccaacatcaaacaagaacccgatgagtctctacaagactattttaaatggtttaatgcagaagtaacaaaagtcgagaaggctcccgagtcttcccttgtttgtatgttgataacaagtattttgccgaggaccgacttctagaaggagttacaagctcgaagaccagaatcgctagtcgaattcttcgccatggccgaaccccataagagaatcgagaattctctggcagagttggagaagggcaaggataatgttgtataccgaaatggtacgttttacatttatcaactcgcaagcgcacgaatctttattgtagtatggagattgtgaagaacgaggtcgaacccatgggaattgcgtgagatcgaagaaaatactaatttaatctaagctaataaaactctaacctagtttcgaaaatggtgaggtttttggttacaaaataaaaaaagtatttaaacagtaaaaatgacagtaaaatgacagtaaca

SEQ ID NO: 333936 - DNA, 668 bp, Cannabis indica
ggcttttgttgttagtcgctgagcgacaactattttgtaaatgagtagcaaacttttgtaaagtattttataaacgggatcccgaagtattttgtatgtaatactataagttattaattaaatagcaaaattttaattaatcacgattttcattaacctcgttgattagcaacgagctgcacagtatgtttaaaatcacgttaacacgcctatgctagttagggtgttacagcctacgtgataaaaacttagaaaaatccctccttaccaataaaatttgtccatgctaatgataatcaaaatgataatagtcatcctgaagaggctagtcatcgtcctaggaaagaaccaatgggttcacagaggccacccactccagcaacaacacgttcgagaagaagccaaggtggtcatgatcaaaacccagaaatcgggaatgaggaaaccagtactgatactggttatgttcccagaagtgaggatgcctatgatcctattaggtacgtaccgttagttgaattggaaaatcgataactctggcaacgtctggccgagtctaaccaacaaaacactgagttagaaagagaggcaattgcagccagggcgactcaaggaaacaattcacaaaaccaacctaatcctggagtaagaaggccacgaggtagacc

SEQ ID NO: 333937 - DNA, 556 bp, Cannabis indica
attataaataattaagaaaaataatcaaatgcatagaaaaaaatactaattattggatatcttactgggcaagattgaggctgtaatgactgcttaactttaatatgagaagcagataattagggtctaatttcataagtggacttttaattattatttttatgattttgaagatatatttgaattctaggtggtttagagagttgaataacgatttaggattgaattgagatgcttgtgaggttttttgggggttcttacactaaatcgatcgaccggttcagtttggtcctgtagaaccggtctaccggttcccccaggcagaactcttagaactagtttttcggttaggatttattttaccggttggggcaatttcgaaaaccctagattttcatgttttagcgatattttgggtattgccacgttatccattgatagggaaactgttagttttggttctaagtccccaaaaagtgatttagcgtatcattcatcaattttaaaaatattgtgacttaggggcctataaatcgtcgagcagcagttccactca

SEQ ID NO: 333938 - DNA, 983 bp, Cannabis indica
cgtgatggaggaaatcgctccactacattactcgtccactgggatccccacatggcgattgcctccttgccttgcctaagaccctggctcgttcgtgccttctccttctatttgaggccttctaatgttcacattcccttttctaatggtgggtgttgatgggtctcgctccgacgcgatcaactggtttccatcaaggtgaatctccatgtactaatgacgacgagagcatctggtcattttgtagtgattgtgtgcaaaaaaacaacttgacttgagtttgtcgttcccacagacggtgccaaaattttgacaatgagaactcgtcaactaacttcgtggccagaaaatttaagcaaaactcaaaaataagatgatgatgaagatgaaaggaaatacaactttttatggataagagatttctttctatttcatttaatgtctaagttacaccattgattttataaccctctctctcgcacttgagaatgggacatttattggctctaatggcctgagttacatagttgtcccaaattgacaagttgtcattttcaggcttcaaactgcaggtgcaaaaggtggtcttgcacctcatgcctttgtctagtgtcaggtggttcccgatcacataggtgatggatgcagtgaacccttggtcgggtcctcagaccttacaggtgcattcactcaactagttgtacttccttactctcaaagcttccaggagacgtggtggtacacttttctcttgcacgcctcgtcctttaattcctcctccaacgatattctcttcaacgcatatttgaatttcaccttagatccacaaaatacatacactacactattcacccaatgcaacataacacacacccgcatgcatgaatgcatgactcgcatgtgagccccccacaaacacaacacacacacacacacaatggctcgcatgcgacgcccctcctcgcacacaacacacacatgca

SEQ ID NO: 333939 - DNA, 855 bp, Cannabis indica
taatctccgatcaaaaagtttttcaacaaaatacccagaagttgtatttatacccagctaaaccaagaaacccaaaatagagagctgttaccgtctaaacaattaaaacctaaaatatatttgctgacgtggactaacactaatagtacgaactccagacaaaacactacgagtcccagacgcaactggaatgcaactggacataatttgtcaaataatggttcttacaatcttccccttgacaaattattgtcaatgacgacaataccagtgcaaaacaaagcaaccatcaaaatataacaaagtctaaacaaatagaggcacaaacactttgaacaaccaaacaacaaatgcaccactttccacaaaggataagtatttctcccccttcattgagcataatccatgtcaataatattgtcctaaaccgaattctccccctaataaaataagaagtttatcaaagatctccccctgaatggcaacaaaaaatgcaacatagactcctcattgcaaagaaattccaaagtatctattacaaaattatagaagaaagtcaaaccatctcataacacgacctaaaacatatggatattagatataaacaaatgagagattgaccgcaaaataatcagatcaccacgatattacgaatgatgctacaaatgagattaattttcatttcaatcaaaaacatgccaaatgatatatctcatgaattcacatgttcaacttgtaaagaggaaacacaatgaatggcctaatcaattaacaagtgagcaatgatcatttgagcaaagaacaaattcattcaacttcacaatgaaccatacttaataaaaagatgagacaact

SEQ ID NO: 333940 - DNA, 1270 bp, Cannabis indica
cgactgaaagaaaaggacttgtactaatattttgtgaatgtttttgggatcccaacttctgtaacttttatagtgtaaagtttaaattattacaagttttattttaattctgtttataattaaagtttaatttccacgctaatcttattagtaatcccaattaggggattaggatttcgtaagtatcttgggtagcgtgcctaattatttagggcgttacaatttcgtatcagaacgccaaggtttttaaacttcctgtagatcggctgaacatgtacattcatcgttagagacaagttcgagtcatggtgcagtaagtattgagagtaaatactgtactgtttgtgtgatcattgatttaccgctttccattttaggtagtatgcaagcatctagagtgtttatgtgttatgtgatgccatgctttaaatgccatttgtttaaatggatgttagatgagttagggtttaaggcagtaagtgcataaatgtggtattggtgcttaattcgctggggttgttgattataggggtactagtaatgaaccctctgtaatcatctagaccacagggcgagcaagtagagcctggggctgcccaaaccgatccaccggcaccacttccacctccatagaatcagggggataatgcggagcttggtaatgctaatcctcctgttgattggtagcagatgtttcaagaaatgcgatgtgtcatacttcgccaagaagaagagttgtgacgattaaggcaactagcactggctgcccctgttgatcaagtgttaccaccaacacttgtgccagtggtgggtaaccaggggtttgttatgccgcatagagactcaatgtttgagcggttcgtgaagctgcaacttccgacttttttgggaggtattgacataattaaggccaagcagtggatgagcacaatcacccgtatccttgataatatgggggtgacagaaactgaaagagtgaactgtgtagccttcatgttacaagatcatgcccgcgtctggtgggatatcgtgggccaaacccgggatgtcagtgtaatgacctgggaggaatttaagaatctatttgaagaaaagttttacaatattgctgtgagaacttcacacatggaggactttgtgaagcttactcaagggaaaatgtcagtggccgaatacaccctggagtttgatcggctatctaagtttgctggtgatctggtgcccacagatttcaccaagaaacagaaatatgtgagaggactgaatgcca

SEQ ID NO: 333941 - DNA, 536 bp, Cannabis indica
ccagcagttttttagaccaaacggcatgactttgtagcagtagaaacccatatctgttcggaaacttgtatgttcttggtctggcggatgcattttgatctgattgtagcctgaataagcgtccatgaagcttaaaatttcgtgcccggctgttgcatcgacgagctgatcgatccttggaagtggaaaacagtctttagggcatgctttgttgaggtctatgaaatcaatacagactcgccatttcttgttcggcttgggcacgagtacgggattcacaacccaagccgggtaaaaagcttcaattatgaagttgttgttgcgcaacttttcaacttcatctttcaggcctactgctcgttctttatccagcaatcttcgtttttgctgaactggccggatgttaggatcaatattcaggacgtgtgaaataatagaagggtcgatttcgaccatatccgcatgtgaacaggcaaaaacatctaggtttgctcttagaaattttatcaactctgattttacttcgagtaacaaac

SEQ ID NO: 333942 - DNA, 534 bp, Cannabis indica
ccaaatatttcttgagtaattatctttttcttagaccaccactaccaatctaactctaaactatgttgcctatagtaagcatatataagtaaaagattttctaagattgaggatttatatcattacaagatagaatatctaaaatgtagtcatctacgccactcaattttatagaagaaaatacagtgacatcattagcaaatgatttgtaaaccttctgtccaatgatatactttctaagcaatttgttaatgaaaaagctaagaggaaaaattaaaggataatttcgattaaaataagaatccaatgatgtcccatttaggtgagagttaaagttattcttattttataagcttcttcattgtttcatattgtaagcactagtctaagttttcatctttagggatgagtcaactagaggtcgcatttacaaaatacttatttatgagatctaacattattatgtttgtctaacaaatgacaatcttttgaggattgttccactaaaaacaacaaaccaagttagaccaacaa

SEQ ID NO: 333943 - DNA, 959 bp, Cannabis indica
agcctaagatttacattgaattaattagaggaaaaggaattaattaaagaaaatcaacaaattctctctcttttcccttctctctctttgaaccaagcttgaaccaaggaggattgctgctaaattcttcattttagtaggattcaaggacctctttcaaggtgtaagattgagtattagcttgaggtaactctaatcgtctttatttaaggatttattgtatggtaagcttgcttttagtgtgtaattttataaattagtagctgttagagttaggttaatttgtaattgagtttctaagtttattttgggttggagatgagttctggacattgatttttttttgtgtgttgtggtgaatgacaaagttttagtttgaaaactcaaatacttagatcattaatggcatgttttgattttggatgtttttctgagttctattgcttgggttatgttggttgatgttgttataggtgttctggaagttttggtgaggtttggacatgttttgtgcaggttttggattgtttggggaaacctggtgcaaaccggttaaccgttttgtcaagtcttgtaaaaccggttaaccggttctgggacaggtttcccgaacaatccatttcgtcgattcatgtccatttcagagccttggttgggtgattccttgttgcttagggtattgtagtttcagttatctgtaacaaaacctttacttggaagtttgggtttcccagattagggttttggcgcatcatttacccatttatattatgtgactaaggcatccatccaacatgaggttatctgttcagatcagccaactcacttgaattcggaaacgaggtaagaataccgtgaaacatatgatatatatatgtgcgaatgtatgtatatatgatatatatgcatgttgtgtttatgatatatttgtttgggtgatatcatagcgacacaaccat

SEQ ID NO: 333944 - DNA, 994 bp, Cannabis indica
taacggccaaaaaagttcagagggcatgatttagtacatgtcaaagttcaagggaaaaaattactaattagcctaaaaatataacatttacaaatttaatatatctattagttctcttcaatataaatatgtaggaagaatatatttgaggtgtaatgtggaagtgtactattattaaaattttgtaagaatagtttctttacaacttagagaattcttgaaagaattctaaaattatttttgaagaccatataaaaaaaaaagttagatctatcatatccatggagaagttgaatacttcttattcagagtaagtttatttcattttgataactaaaaggtaaatatctttaatatactattttatatgtttaatgaatttttggttttgtaagaacgaagttcttttgtagcttcttttttggtccaaatatagaaaatgacaaacacaaatatgataccaggaaatgagcattcttcacattgaggaggaggtcggcggtgtaataaaaatattaataaatactagtaaaaatacatattcatttttttcgtgtatataaagttaatgtatattttaatcactatcatatatatcattttaaatttgtgacaaaaaaatatagaaatttttacatgaaaaatcctttttacacactttattacaaaattaccctcacacgcctattactacatttctacttacaaagttatttttattacacatttaccacttactcatcataccatgcatacacgtgtgctctccccatgcatcatcaatcaaatcatactctcttccctctcttttttcattttgttttcatttcattttcgattcttcatttctgttctctaagttcattttgaattcaagtaacctccattaaccacccataatttatcacgtttttccctcttatttttggttcatccacgaattttcaacttcctcttagcccacgatttagcaactgtttttccctctctgttt

SEQ ID NO: 333945 - DNA, 629 bp, Cannabis indica
tatatatatatatttatttatcacttaataaatattaatcactacaaattctccaacaaattctagctataactagtttcaccaaacttctatatatactaagtccatttcttagtactagacgttcccaaaattcaaatttcaaaatttgaattgccttcataacatatatacctatgaaacttactttaagtgatatattgctttaggtatagactagcatgcacactttatgtaattaaatattattcctcatataatatatcatttgaaatattgagaccaacccaatcccatatatatgtcattgtacgaccttagtactactactatgactactctcttacaatttagagtgatatgctactatctttaatatttacttaatactaacttgtgataataacagtaatgttacatcctaattctataagtccaacacctaatggactaagccaataatctataaaagtctaatttatcaaaatgacaaaattttcataatttaagaaaatactatttaaggaacacataacttattctaagcaatcaactatttccacatcgagttaactaatgataataataaaataaatatacatataacatagtagaaaataataacaaaa

SEQ ID NO: 333946 - DNA, 703 bp, Cannabis indica
aagtttttggcgccgtttccgggtattgaaactaaaaattgtgtattatcaactattttacaatttattttctggtttgaggttctaatgccattttggtgcgctgtatttttatttttttaggtgtaatctagtgcatgaacgagcaagaagaagaccttgaactttctcctattgaccccgaaattgaacgcacttttagacaaaggagaaaagaacaaaaggctaaaaaatgctgcaatatgaccaatgggtttgaagttgggggtgctcataatggtgccaatcctgttgccttggccgatgatagagcctgagcaactagagagtatgcagcccccatgttcaacgagcttaatccgggtattgtgagacccgaaatccaagcacctcactttgagctcaagctcgtcatgtttcaaatgctccaaacgatcgctcaatttagtgggttaccaacggaagatcctcacctccatatattcgctcatttttggaggtgagtgactctttcaagctagaaggagtaagtgaagaggctttaaggttgaagttgttcccattttccttgagggatcgagctagagcatggctcaatactcttcctaccgactcagtgacaacgtggaatgacttgtgtaaaaaattcttgagaaagtacttcttccaacaagaaatgcaaagtttcaaagtgagatcatgt

SEQ ID NO: 333947 - DNA, 565 bp, Cannabis indica
tccagcagagggagcttttggctggataggtttaagctcggctttttctcactgaatggcctcttcaagcttgatgaagccatctgaacgatcaaggaagtcactcatagaatctactggtctgtctcttttgatatccttctaaagttctccgagaactttgatgcccccaagtatcgcggtcaacttcccttcttcagtcaaccgcgtaacctttgttgcctctgtcataaatctgcggatgtaagcttggagaggttctcctggcctttgcttcacttcaaggagaattgtgcatggaattccgaggagaaagccttccaagagttaaaccttccgggcgttaacttgaaataccactgctgggcggcttctgtgagggtggcaggaaaagctctgcaacatacatgtcctcatactccttgtaggtccattttcatttcaaaatacttaagatgtgataagggatcttccttcccagtaaacatctgccaggtcggcatcttgaacttgtgaggaaactctaggacattgatctctagggagaaaggggatccacgtgctc

SEQ ID NO: 333948 - DNA, 641 bp, Cannabis indica
aattgattataaaagtggtatttttcaacttacatttcttcttttagacaccttatttaaaaattaaatttttacaaaaatattagattttgaataaaaatttacaagtttactacattgaattttttacaaaaatattgtattttaataaaacaaccgtaaacaacaaaacatgacaattaaagcagcagtagaacaactaaaaaataattgtggaaccaccgtggaaacttaacacagtatacagcataaaacttgcacagtatttttttaaaaaattctgtcccatagtaaaaaaattaaaaatttcaatatataatgtaaaaactcctttaaaaatcctaataatatgtttacaatagagtacatagaggaatactttacctgttgggaaatggaaacctctaaacaaaatcctaataatatgtttacaatagagtacatagagaatattttatgttagtataaaatatatattttttccaataacaagtgagtacaaaatattgaatctaaaaaatttgaaccattttgagttttgaggtgaatttttttttaatattttcattataatacatatattgatgtgaagtgattataaaaaaaaaaaaaaaaaaaaaaaaaaaaaaaaacaaaactaa

SEQ ID NO: 333949 - DNA, 569 bp, Cannabis indica
tataatagtatgtgtatttgattttatgagtatttccattccttccgtgcttctgcctcggggagttgaggattgattttgaaggtactcgtatcacgtgacgatagagacaaccctaaatcaaaatgtatgtgttaattgaatttttgaattttcgcttttaataaaattagagggtatatgattctgttatatatattggaatgaaaaaagagagagaagagatgagatataactaggttttgggttgatgacatatattattattctcagctagctctgatataaattagaataagaatgtccaaattataataggaaaaggaatacatagatatttaatttttaaattctttatggcgaactaaataagatggatgtgttaccttttattatcaattggttttaaaatataactttattcatcttattctaaactgaataaccatttttcaaaaggggctcttgagtcttgtcgtctaaaatttacaaatttcctgacataaaaaggtgtattagagttagtaataaactatcatatatatatatgaatgaataaaaaactcctt

SEQ ID NO: 333950 - DNA, 617 bp, Cannabis indica
aaattcaagttaaataataaaaaatcaattgtaattaagttacgctgattccgtctgtcatacaatgctcccgtcgatgacttttgaactgaaatttctaacctggttctctgagacggtcagttgaggcatgacgatcatttcatgattctcgaataggctagactgtagaatcaaagttgggaataactcttcccacaatgtcaagtgactcttcaattcatttggagaaatcgatccaaggctcgagtcaaatatgctcaatatccaacgatcaaggtctgcctctaatgtcacccaatgcttatccaagaagagggtcatatatattctctccttattcttccaactatctaagtattgggcattatcccctcaaatcaaatctaatatgtcgtcatcccactgaaagttagtgtggtcatcacccgcagctttccaccgaccaataactcttgatgggaaaatgtgaggcatgatgacacatctatttgggtacacctctggataaaagtattgtcgcctcctcattaaatgaaatgccgcatccaaatgctaaaacatgaaaattaaatatgtcagagattaaataaaaaaagttagataaagtctttaaa

SEQ ID NO: 333951 - DNA, 409 bp, Cannabis indica
agatcctggtaaaataaattccaacaagagccacttcacggaatatccaataccaagcacccaaattagtgatcatggatgggaagttgtatagaagaggattataaatgttgtatctaaggtgcataaattaaactgatataagcgttgtcatttgtgaaatacataaaggattttgcagggatcacacattcagaccaagtctttccaagaaaatcatttgccaacgttatctgagttggatatattttaccaggatctagatttactaacaagtatgtttcattaacatgctcatatgaattctaaaacaatgaaataaacacatataaagtttagaaaaccttacattgggtaaagcggaatataatgactccttcggttcagatatctagcccttgattccttt

SEQ ID NO: 333952 - DNA, 537 bp, Cannabis indica
ggtttctcatactttatatgtacttaactttataatcgttttagaagttcatatttagggtgttaatcaacatacttgtgagtagagctaagatcctggtaaaacaatttccaacagctgtcctggtcaagatcctatagacggtctcagtaacctttgacggagggctcaccccttcatgctcctcctcctggacggatggatcttgttcagcgcttggtaaggtggcatgctgagccacttgagggtcggatgcgtcgactctacacatggtcttttttgtgcgagccatcatcctatggctggacaaaagacttaagctagaatgcctgtcactcgaagaagttgggctagaacaaagacgaggatgatcttcgtgcaagagttgaagcagatcctagtcgatttggtgtttgcttccctaaaactcacctgggttcatctacaaaagacaacacacaagatgagtgtttggtcgggatatcgaacattaaacaggaaaatatgccgaccaggagtactcaacagattaaggaa

SEQ ID NO: 333953 - DNA, 2111 bp, Cannabis indica
aattagaaaatatggcattattaaaagaaggataaatagttgaaataaagtggaaaaattgtaactagtgagtcccacatttagtggccagccacttagttaatttttgcccattatttttttcatttttaatccatataattaaatccgaaaccctagttgaaatactataaaaggaacatgatgttttctttctcatccaacacaactcacttcaaccaaactaaacctagttttcattctttgacaactagtagataagagactcctttcatagtgatttcgaatccttattcattgttcttcatcaattcgagccatagtgatagagtaccattcccacacatagcaagtcaagtagtcaatcataatgcggaagacggtggttacccaagcctaaggagagaaggagatctaggctcaaatcttgttattactctatgacagagagaaacaagggttagagattaagtggaaagagtcattaatgttctgatgcatcaatgtaaggtttctaaactctaatttgtttaattacaatgttttagagaattcgtatttagggtgttaattaaacgtacatgttagtaaatctagattttgataaaataagttccaacataaataagcatccctcaccagaagaaacctaactacaatttcagtctttaccatagagggacactcacatcacctaatcagatgcacttgtatatcacattgcctaatcaggcaaacccatgccatagtctggcatccatatatcacatcacttaatcatgtgggcttgtatatcacattgcctaatcaggaaagtccataccataatatagaatccatacatcacatcgcctaatcatgtgagattgtatatcgcattcgcattatcactgcctaatcaaacagtcgataattatgaaacatgtcatgccatgtggtacattatacttttcttacctttgatacagattcatgcatgtcggtcaaccaaagtgtagaaacctccccaacgatctcggccttatgtcacaacaatagtaaaccaataggtgtttatatcaaaatacttcttaatatttgcaaaggataacctaaggtttcctacaaaaccccgtgatataaatacacttaaataaaacttatattttggctctaagacatacactatattgtagatgtccttgcaagcttcgaaacagtatataaacatccaaaacagacgcctgagtgaaaagttatgacaaaaatacaattgccgatttccctaaaattcctagaagcggtaaatcggttgggaaacgttttaaccgctttcccatgaatctattaaacggttgcaccaagtgatggaccggttcgcagcactagggatcaaaaatcctaaattttgcacacaccgaaacaccacttaaacctatccaaatcattccaaacttcacaggaaacatgtatactataaatacaataattcttatgcaacaaaaattacaataaagctcttcaatggaaaatgtcattaatgttcggacttaagatttataaagttgcgaactcaatttctaactcaaaatcaccttaaattcaacaagtaaatattgaaactagtcccatagctacccaagagcaattctatgaagtcggaatctccaaaaccattctaaattacagagccactatataaaacaaatcatttttaacttaaaacgaaacttatccttaccttaaacttttcctcttcaaagatttactatcccgatactacaagagcttgaattactaggtttcgggttgaaaatcaaagaaaattggatagtggaggtgagggtttcgccgcaccgtaggaagagggtttcattcataagtttttttaaaaaaaaactaaaaaaacacgatatatataatatatgtattaaactgataagaataacgttattaataataatattaataatattaataaaaactttattgttaatatttatcttattatttcttagtcactaagaaatctataatttttgggtatttggtcaactctgagtaccccaaaatactctggtaaatctaaaaccaatttatcttaataatctcatcaatattactaactaaaa

SEQ ID NO: 333954 - DNA, 649 bp, Cannabis indica
tactcactgaccaacccttacgctaggtgctacaaaaacccgatgcatcggctattaaagggcaggccctggctgactttgtagccgagtgtaccggggttccaaatgtcgatgttgagataagggcgcaagagggcgaccaaccaacaataatcagtgacacccaaaggcctgacccgagcgattcacctgaaccacacgtccctaactctaagaaaaatgaaaaccaagatcacctaagtgaaacttggaagctacaagttgatggttcttctaccgatcagtcatcaggagcggggatcaccctaataacaccggagggacaacaaattcacacggccattcccttcggtctccctacctcaaacaacgaagcagagtatgaagcattaattgtcggtctgaaactagcgaaagaggtgaaggccagacacttagacatttacaacgactcccagctagttgtaaaccaagttttgggagagtacatggctagaggggaaaagatgatggcctaccttagcaaaatacaagacttgcttgcccaactggaagggtacaacattcaacaaacacgagaagagaatgctactgttgatgccttggcaagattggcaacgagtgaaaagatagataaagccagccttgt

SEQ ID NO: 333955 - DNA, 1589 bp, Cannabis indica
tatatcgtggaacatatatagcgttctatgtaactgagagtgcaattccaagttctatggtggatgcaatgagaaattaataagttagtgaatttacttggtaaattccagatctgcttattggaagctcggatatataggcccatggtctccatactagttgagacaataccgcttgtaagactcagttaattgattttaattaatcaattataattctaaaattagactatgtctaatttatgaattttcactaagctagggcttaattgtgaagaagagagattctaaggtttatttgttaattaagagactttattaagtccaattaataaatatattaaatggcaattttatttaataattattttaattattaaataattaaatttgacatttaagtggttaaattagaaaaatagcatttttgagaaagtaagataaataattggaaaaattgtaaaattgcaaagtggggcacaatatccttgttcggccacttgaggagcaatttaccattttattttttcattattttaatgccaaataaatctaacctaaccttaagtggtttcttaataaataggtagtgatagcctcaaaggaaaagatgatgcaaactctttcctttagtaaaatttggagccaccttctctctacctattttgaaaccctctctctctctctcttcctctcttcaaactgaaccctagagtgattacagtaagtgcccacacacatcaagtggtactcaatcatagtgtgtaaggctgtgaagaatccagattcaagagaaggagattcgggctcagatcttggtgatactttgctacagaaaggatacatgggttagagatctgagtggaaggagccattataattccgctgcacccattgtaaggtttctgaaacattatgtgtgtttctttaatatcgttttagaagttcatgtttaggatgttaaaaacatacttgttagtaaatctagatcctgataaaataatttccaactatctcgatggaatggttgaagttcctcatctgagtcatatccagattgttttccttgctctctaacttgatacctcctaaacttatcctccaactcatctattcgcaattggattggatccccttgctttggaccgagttgttggaaaatatcaagttttttctagttcaagtgttctcgcacagttggttataattgctaacagacctcgtcctactcacggacttggtcctactcactgatctcgtcctgctcatggaccttgtccttgagtaactttcagttttactcgtgcttgtgctttctcgatcattgttgcgacaagtactttctcctcctcgcgttgatcgactgtggattcttgtacgccttgaggtaacactcgcctcttcacgtcccgtccttctcccttgggtgtggttcgttgtgtgccctgtgctgggatttgtatgtgccccttccttgttggtttaagaaggacattggtgatgcctcgttggtgaccttcgtgtcccaggttaagtcccaggatttctctcatttctacgagggatttcctgttccctggtttctagtc

SEQ ID NO: 333956 - DNA, 458 bp, Cannabis indica
ttagttaatcaagggtaatatcaacttatacatgactaaaaatctgatttaaataagtttaataaaactcataaaagagaaagagctaatggggcaaaatgaccattttgcccctcccacactaaaaggcataaaagatcactacggggtattttgggaaattctaaaatctcaaccaatcccgtcattcctaatgtctaactttattctcccgctatactaaaaatactaggatgtgattctaatagccatacaccacgttccaatgttgccggacaccaaacatgcaaacttatgaaatttctataaaagacatataaaatgcattctgaatccaactaaataattaattcaatactaataaataattttcataatcaagccctaattatctgctaatttccaaattaaaactaagcggtctttacaactatcacccttaaaaggatttcgtcctc

SEQ ID NO: 333957 - DNA, 745 bp, Cannabis indica
aatggtggaagctcatgaaatagggatgaccttgactctcgactaaaacaaagcaacgttggattctcttttcgatcgaataaaaggttgctagaatggtttccattttagatgagctgactactctattcaatgaatgatatctttgacactcgactcaaaacgaagcattgtattagtttgttggaaacctaggaaattatttaagatgtgtttgttttgtatttttacatctttcttacttgctacttgtatgaaaatttctaaatctgtatgaatttatatgttattttttgttattaattgtcgtagtttaattttgaatcttgattgttggcctaacttagcttgttatttttaatgggacaaatcccaaaggattgttatccgttagacaaacataatagtattagatctcaatagataaatattcgtaatgcaacatctagttatatatccaaagatgacaacttatactagcgtttactgttggattttgtgccctaaataaaacccatttcaatataatcaaatttactaattaataaaagataagaaatcattttatgttgcatggttcatatgattcatttcatgattatgtttaatgtataaattctattaagtctagacttatataaatatgtatacatttgttcatgattatagtgtcgtcaggacagtggaatataatcataattatatgttcaaaagtttaattctcatgatttgtcagttcactgga

SEQ ID NO: 333958 - DNA, 603 bp, Cannabis indica
gaactaatttcctctttattttttttaattataaccggtttgagttattatgtattatttgtttttattcattatgttataaaaccgattctattttaattataactgatttgagttatttcgtgttatttatttttattcattataacacttttagatcagttatattttaattgtaactgatttgaattattattttattcattatgttataaaacctgtttgagttattattatgttatttgttttaattcattatgtgataaaatcaattctattttaatttatatatgaaacatctaactctgataacttttctgatagtaataacaacttcggtaacctttccgacaacttttcagaaacaatgacttttccgacaataattattactataaattttaccaactttatttatgatattttatttagtttctcatattttaattattatttattttttattcccatatttttttcattatttatttttatcatataaaaataaactttaataatttctctcatatctttatatattaaaagtgcctatctaacgacattttttggtttaacagaatatacttaaaaataaaagaatat

SEQ ID NO: 333959 - DNA, 512 bp, Cannabis indica
ctaatattttttttttattttgtctttggtccactttgatttaggttctaagccacaatagatcaaaagtgggatatagccaaatgttatataagaaaatttaattttttaatgttgttatgctgctaaatttattgtggatgattttatgtttctatttgattccttaaacttcagaaaataagtcaacatgaggaatgcataatcaaagagaaaaacaaaaatcttaaacaatgagaattattatgatgtcaaatttcttgttgagaatttttatgttttcctttgattccttagattttagaaaataagtcaatatgagtaggggtgttcatccaatccaatccatactattttactcatagtgcatccgatccgcactaagtgaggattccatttttttgaatccaattgaatccacacaatagctcaaatccaaaccgcaaaagtgcagattggatcagttattttggattggttactttttaatatttatgaaaaaaatatttttt

SEQ ID NO: 333960 - DNA, 555 bp, Cannabis indica
aaggagaccctactcgagtaatagaagctcaactgggacgcaaaccaccacccatggagtcagtcgagcaaaatttaacatattggcatccttaatgaagggtatcatgactcctaagttgtctaaatttgaacttgacacaaagcaacacccaccactctctgaatgaatcaaggctcttcctattcctccaaagtttaagaacccttcttggcatcaatacaatgggaaggaagatctattatctcacatccactacttcaaagtatagactgatctacaaggtgtgagagacgatgtcaggtgcaacatcttccttgccacactaacaaacctagctcaatggtggtatcttaagctatcccctggatcaatcgactcatggaaaaatctagtggatgcttttggcaactgattcactctttcccaacaacaccatatcaaacccaataggggtgaaaatcggtcggttatggtcggtttttaaaattttataaccgaccggtcggttacggtttttattttacgaaaaccgtaaccgaccgtttagaaatt

SEQ ID NO: 333961 - DNA, 644 bp, Cannabis indica
aaaccaataaaatatataatgaaaaaatatctaatagatagaaccaatctaatccaatccaacattcaatggatggttgatcgattagatgactgaaattaattgaattagatcggatagtaaaatctaacatctaatatataattagatcgtacctagataagtcaatgattattaatataattaattatttttttcttattttacatattgtgtattagagtacaattgttaatagtgggctaaattaatatgaattcattttttttttctaaatttagcacaaattttttattttccaatttgagatggtcttatgattagttgattacttctccttcatgtgtttggtgtaaaataatattgggttacgcatgtcacttaaagggaactcgatcatttggttggattatttttttgaaagatcctttggttggattatattggtaaatgtacatattgagaattcaattcacaccccattaaaaatggacggctacaatattatgtcaattgactaaaaccatattaataataatagtattaaatgtctatttctctgtgttccaagctccaactccaactgtcataattttttctattttcccaacaaaaaaaaaaaaaacatttaattaaataatttt

SEQ ID NO: 333962 - DNA, 779 bp, Cannabis indica
tgtgccagtactccaagtatttataggcaaaagggtaactgtacgtaaaggaaccttagacgcctcgacttcccgccttgaaagcaaatatgggaaatcaaaataatcgagtgcaaccgtcagccgtggagagagaaattcagattttcaaaatattaattgtcagagcattaattagccgaaaaccgaagggacgcccagtcagcttcacatcgagtctcgaacggtcatgctcgacacgtgtcccctttcaaaggcagagccagctcggaataagtctatacgcaacctcggaggtcccgcacagacttggggggcaaatgttatcccaaaattggcactctgacgtggcatcacaagaatggtgacacgtggcatcaacttagagcacctggtcggatgaacatgccgagcaggatgcctcgctggcatgtccatgatggaatactcaacgagccgtgcagaatgagcaacacttagcgaattcaaccaagcacttcgtgagtcaccagctcaatccctataactcagggatcaacttgcgtggatgtggcatacacacgattccactatcggtgtatacggcctcaatcccacgatcctagcattcagcaatgatcacacgatctttgtgtttatgcgctttgtaacgagagaggaaactcttcctcctcaagtttcctgccctataaatagtgaggaatgttcactgggcaaggaggacgaaaagatactattgtaagagctataagaaaagaaatcttcttccttattcttaa

SEQ ID NO: 333963 - DNA, 949 bp, Cannabis indica
tcgcagtgctttttccaccatcttagcataggtggtcttttcgtcgatagtaatcatcaagtcatgtttaatcttcacattaagtccatccaaatacttttcctttttacagaaatcggttgtcacgattctcgaggccaaccttgccaatcgatcaaactgcgtcgtatactctatcacactcttattttctttctcggtcaggtgagtgaactcttttctcttggcacttctaacggcctcattatagtacttcgcattgaaaagttcctggaacttttcccaggtcatcgtggtgacatcgtgtatcatagacaccatgtcccaccataccaatgcgtcctcttgaaactaaaatgtggcacacactactcaatcattcccggtgacgcccatgaaattcaaaatcttagtgatcacagttagccactgctcggctttcatgacgtccagacctcccagaaaaactggaggtgcctgcttgcggaacctttcatacagaggttccattctatttaccgctactactggttcagcctggacaacaggggcaggtgccactggaacttctggaacaggcactgtaggagcaccctgctgtcttaatccctgaatttcgttatcttgttcttcaattttggcttgcatttctgcaaacctatttcgccagttctgggcttcctgagtggcttgggcagcctgtggcggcttagcatcaccctgaccacaagcccccaacatttgggggaaactgagttccctaaccttgatttgacccgaccgagtttccctgactcctggtatttcgcctggcgtccatctagtctgaacagcctgcgaaaccaagagttggcatatcaggtcatgatcaacgagagcttactaatgccgcttaatttgaaaattaaaaaaaaacatgcgcctattcaactatcaggccactaacatg

SEQ ID NO: 333964 - DNA, 1364 bp, Cannabis indica
gatcatttgatctaggatcaactaggcgatattgacttgaatagatatttacggtaagtttaataaatactaagtcaaagttcaatatcggtcccttccgatgcatactccatgcatccaacctgagctttactttaaccaatgctctggaaagaacatagtatttctccaaatacaagtaaactcttgttgtagattatcatatcagtaaaaccctatgtctgataaatctaggaaactttattcacatagtcatgtttactttccaatgtgttgacgacacaataaacaggatcaagtatgtgaaaagggtttcagatgaatttatacattatgtacatataatcatgaaataaatcatgtgaaccatgcaacattaaatgttatttctgatctatattaataagtaaatctgattatattgaaatgagttttatttagggcataaaacccaacattagaggcataaaataacaataatttattttattttattgttagttatgtaaaaaatatatttttttttaataaatatcaaataatttaatattgaaaagtaacaaattcaaaataaccgatctaatccgcacttttgtggattagattaatgctattgtgcaaattagattgaatcaaaatataaaattaagcacagtgcagatcggatgcactatgagtaaaatagtgtggattgggttagatgaacacctttagtttttactaacatatttgtaatgccctactagattaggcacattatcgtattttctaattattgtacactcctttgctaatcaaaggatttattaaaaaacatgaataatttaaacttttgtaaataaacctaaacttaaaataaatatatacagatacatattttgggatcccgtttaaaaagttacatttgtttacaaaatacttgtactacaaaagttatcacctagcgactgcgaaaataagacccaactgtctcgaacatctgaacactccaggtctaactgcctccatatgtacaatttttatctaggctgaactcactgttattcaacctttgtcttgcctttacctacacatataaacaatagctgtgagtcgacggactcaataagaaaaatataaacataaacatataattagattataactaggctccccatacacctaaccataatcctttctcagcactctagttgatgttctcggtactctagccgatgttctcgaacttggtgaaaccgtcaactctacttagaaactcttgaatggtgtatagatttgagtttcaagtctttccaggatggactctgtaagcccaagttcttgtctaacctatctttttcatatttagattgattttatcttga

SEQ ID NO: 333965 - DNA, 689 bp, Cannabis indica
tcttggccggaggggaggcgctagaacttccgcccatcctcttccttaaagcatcgagcatctgccgagacatgtctgcacagaacaaaaatagcgtggttagcaaaaaccagcagaaaatacaaagcatgaaagtcaagaagctgaaaaagaagtaaagcgcagagtgactgcccgcccagaaagtcagaagtccatcatcaccttacatcgagtttatctcagacataacagccttcccttttccagcaaagggatgagatggccgaacatgtgaaatgggctcccttatgcgaagtgcatgttgaacaggccttggcgtggccgggagtttcttcttcctcttcaacggggtcacctgctcagcctcagcctcgacttcatcttcaagatttataagctgctgagcatactgctttgcccgggcacctcccttcaacttggcttcatgcttaagttgaatgagctcatcctccttattagctcgttcgggctgggcaatatcatatttccccttcttccccaccacggacttaggagaaaagtcctccgggtaaagcccgtattgcaccagattctcattggaggtcaactggatgagtatcctgcttcctccggcaactgggcaagtttttgagctctatccctaagagcaagagtgaggggaggacggtgatatgtcagaatct

SEQ ID NO: 333966 - DNA, 896 bp, Cannabis indica
ctaagcccatcttcatttggatgacacttgtgataggaactttagaattcaactgagaaagtaaatctaaccattcatatggatgaaaataacttatcagaattatgaggataagaaaggagaagtttgcaaagtctattcgaatgacttaggcaaaatccctagtcctcatgaaattttatgtatctctaatgattacttaatcttaagcaagtattgtgttaatactagattgctatgttgatgacttagtctaaaaggaacttacagtttcagactaagataatatgtcacaacaagatgtccctgagaaacaatgtaagaggttaaatgtctttctatgtacaaatttaactagactcctactattgagtgggagccatcttagatgtaatcacaaggaacattaggagacaatcaaggaagatctctgaaagtgaccaatatgttagatgatagggatgtacattagaatccttatatctacaccaactcataacctattcgagatggtggttactcttggggtggaggaattattctagaaggatgtaaaaacccttctataataatttaagctccatcagtgaaaatacataactttgttgtttttgtaaagcactagaaagttattcaactgaagaaagttcttactgtgatatctctattccatttttagatacaattagagatatgtcttctgttttattcagatgcactttataagcagtaaagaattcagtatccttagatgagtaatgcatatagaaagatgatgttgcataatgtcttataaacacaaaggaagtaatggtggagaaagcagtagcttaccacagacttacaattccagtaatttgggtttagtcaaatatactaaacttgatttggatatc

SEQ ID NO: 333967 - DNA, 462 bp, Cannabis indica
acttcccctacgtggccaacaggtcgcaccttcaatggtttccacgatgcctaattaaaatcctagttcatgtccatctctaccaacacaaacacaaagagaaaccaagctttttgaagcaaccagctaataacccagaacaaaaaattgccagagttgcattccaatcgacaaatccctaaggtttatatacatgcatgcacctatgaacctcaaataactagaaaaatacccagataattctagcctccttttcatagaaaggtgattctcagacagatatatcccaaagctgggaaaatttctcacaaagctttcttcactattcaacatgtataaagtcctaactgctggaacttattttacgaggatttagatatactaacatgtatgttgattataatctataatctaacatcctaaatatgaattacctaaaataatgaaataaacatataagag

SEQ ID NO: 333968 - DNA, 752 bp, Cannabis indica
aaaaaagtaatctacacaatcttaaaccaacttacatagagagttaattttttcagttcatattgtgagtgaacaagacaaattttgcaagaactttcactggaaatgccacattatactagatattataatgtacaataatatactaaataaataatatatttatactagagttaatcaataatatgtatatcccatttagtgcaataataaaatattataatgtacaataatatactaaataataatatatttatactagatattacaaaaccaatatcacatagaaaaagatatcaaaaaatatctgatttgtttcaccaagacccaagttatccttgcaaaactccacactttgatcctatatatgaggcaaggcaagcattcccatgttcaatatcccatagctcacactgcattattagtgccaactctcttccaaagtgaaaaaacccaaatagctagcattctaattaatatctaaaggatacaaaagttgtcaagaaaagatgaaagagaaagacatgtagagaatatcaaaagtaacatagacgcgagcatgggcaatgtggatgagtttggaagcagtgacttcgccattctttcagctcgttctgttgtacagccataggtccgccgacaatggattctttgatgcagcttctttggattcaccttgagttttcttagcaatcaatggtggagatgagtaactgaggctacgaatgcaattggattgataataagggttt

SEQ ID NO: 333969 - DNA, 1386 bp, Cannabis indica
ggcataaaacccaacagttgataactcataaccagatcttgagtgtgttccaacaacaaatgatctaaatggccagcgccgttccaggatttaacataccgaagatgctcccaattccaccaattccactattttagcctcctagccatagttggttcctcctcacagactgccccctggtgatgacgacgatgacgttgtcgatttttagttttttttagtttgaagtgtagataatattactgttgatgaactcaaaatacttttatttaatttgtaaagaccgcttagcttaaatttgccaattagcagaaaattagtgtttaattacagaaattatataataattctaaattattaatttatgatgatttatttgaattctgaatgcattatatatggcatgtatagatatttcataattttgcatgttcagtgtccggcaactttggaacgcggtgtatggcttagttgaatcacatcttagcattttagtatagcggggtgatgtagttagacattgggaatgtcgagaatagtcgggattttaaaatttcccaaattaccccttagtgacttttagtgtttaagggtcaaaatgggcaatttgctagctgtattttgtccttttgggggaggtattaaaatagattttttagttgataataagctaaattagctggtgtaaatcaatattatctcattaattggcaaataatagaaaattacccaagaatctcattttctctctcaaactcaactctctccttctctctctcgaaatccctagagccagctagggtttgggatcattcttcagcaattcaagctctccagcaagtcttacgtgatccaagccaaggtatagtccttagcaaccttctttttgatttcttgggttttaagctatggtattatgcatgttttagggattttagttgctgtagttgctgctagtgtttgttgttgttttcagtggatgaatcatgcttagatatcttgttttcagcttgttgtgttagctggtttgttgtttgagaaagctttgagtttttgaactaaagcttggctcattaatggtgtaatttgattttgaggttttgtagttgttttattgcttggtttatgttctctcggttgcataaaacaggtctggaaagtttggttcgaattggggttgatttggttgagttatagaatttttggtctttcctgcactgaaccggaattctagttcagaggggcctgtaggaaccgaaattcaagttggggaaccggtctaccggttggggcaattttgggaaccttagttttccccatttttgtgttatttagggtgctgccatgttgtttatcgatagggaaacttttagtttgaagtttaag

SEQ ID NO: 333970 - DNA, 735 bp, Cannabis indica
gagacaagagagtagatcgcgtatatcgaatatatgcgagcatcctccccttgtccttgtataaaccaggagaacgattctctgtaaatacgagttggtcttaagaaccctgtagcccttataatgcaatatagactcgcatgtctaggttctatcagctcgacatacgatgtctacaagaagcgacaacctaaggacgcagacatcttaaatgtaatgataaccctgcgagcttaacattggaacatgaacagtcaactcgcagatgcggaagatgcatacgttgatgaacttagtaactgtcattcatttattaatgttaacgttgcttagtttaaattattgtaattcaatgtgtaataacagattaacaatgaatgcaatccttgtataactgattggacacctgctttgtatataaaggggtgatccaccgtgaaataccacctacgaatctcttgctatagtggacacctgattggacacttgctggtaaagtctgtatacgtacagatgtctgcacagggacttggggaaaatattatcccaatttttgtcctcatgacgtggaatgcatacgtggatagaacttgtaatatcccgataagcgtaatagtaaataattagggtttatacttttattatgagttaatcgagtaataagtgggattatgatcctactaatttatttcaacataaaatttaaattttgctataagtgagtaaataatcgta

SEQ ID NO: 333971 - DNA, 663 bp, Cannabis indica
agtttgtacactaaggactttcacaatcgatatatgtcgttttcgtcttccaatgtgtactgtccttgatgcctcgcaattcgcattcagtgacatatagtttctcgctaatatactaagtactagtttgtatattagttcctcgcctaagaccttacagtctataggttacaaatatattctgatacttacgtaattaatgagttattccataaaaagcgattgtacagatccatattccctttatcttgacacatgtcctccactgagatggcaaccaaatttcgagtataacaattgccccttaaaaagtactttcttagaaaaaaagagctttttaataattactgagtgcatttccgtcaaaatcccttcttggaaaaatgcgtcctttgattctggtggttgtaaagtttcgaggatcattatgagccgtcccttcatattttgacctccaaccgttagatttccctagctttcttgtcaccagactttgtgtataaaagggtggctcaagcttgtcatttttcacaaacctctggctttttagtgagatccatttttagaatagatcatctctttcttaatagaatgtcccttctgagttcagaagttcaccctcccaaactcataataccatgatgcatcaaccattttacattc

SEQ ID NO: 333972 - DNA, 516 bp, Cannabis indica
tatcttgaaaaaatgaggagtagtagatgaaaacattgtcttcttactatccttacaagacagacaaaatgcagccaaaatccaagatcaaagaaagattaaactccaaagtttcgttcttccttctgtgaaaacttctgatggtgcatgcaattggaaagaagccttttcttttctactacggtaaaccttttgtttggtcttttcagaagaaaactatatgtgttgcaccatcaaagtacttttgatgtaacaatagtcattctaaaagattatgtttggatttctttcaacattaaacagaaaaatgacttagttgtaattgggggatattagcaaaacgacttaagtttctactgtgaaaatttataagtttgataaatatataaacttttatttacagctaaactactaaaataatgatatattatttatgggatattggcggttaaaccacttcaactttacggtttgtaacagttaactacaaaaaccgaaattttggcggcataacta

SEQ ID NO: 333973 - DNA, 614 bp, Cannabis indica
tatgagcaagaagagtaaatactcaccaagaacattcttctgtatttataagggtgacattctcccaagtataaattactgtattaaatacatccataaataacaaagaactcgtggactaaggctcattaacgccccaaccacgtaaaaataccttgtctcactttctttacagctcaatagtataatcatattttattagttgccgaaaacctcggtcaacagttacggaactagtaactccgatacactacacctaacttgactaaatactttatgtcatgggacccctaaacatctacagtaatagtggcactactacgagtgtacatcggcacaactatgtagaaccctatttcagtatcggttagtgatttcgttaagaaattggtgactccgatacactacacctaactttattacagactatacacctaacgagtgtacatacactacacctaacttgattacagactttgtgtcacgggacccttaaacacctataatgatagtgtcaatactgcgattgtacatcgacacaactaagtagaaccctatttcgatatcggttagtgatttcaatacgaaattggtgactctgatacactagacct

SEQ ID NO: 333974 - DNA, 980 bp, Cannabis indica
tagtgaagagagtgttcaactcattgtaaagattatagtttttcttgaggccttttattgagggtgctctttaattgtataaattgtttgttcggtctaatacacttgctgatttaccaaaaaaaaacaacctatttaagacaacaaatgagaagatggggctccaacttaaagatttaatcctctgtacccaacttgtatatggtttctctggccagagcgttgcaactctggagcaaatccgtgtacccctcactgttggacaagctccgaggatcataactgtgattgcataattcttgataatcgatgtcccatcagctttgaatgtcatgttaggctgaccgaccatatatgacttaaaagatggcaaattagtttttcatttgtgcatcaagttcccaacaacaaatggggtagggtgcttaaaagggaatcaaagagtaacacaggaatgctataaccttgcccttgttggattatggttttaccaggatctagatttactaccatgtatgttatttaacatcctaaatatgaatttctaaaacaatgtaatttaaacacatataaagtttaataaaccttacattggttgcagcggaattgaatgactccttccgcacagatctctaactcttgtatcctttctgtagcagagtatcacaaagatctaagcccgattctccttcacagcaattggattcttcacaggcttacacactatgatttagtaccaacttgttatgtgtgggcatgtactatatcactaagggttcaaaaattgaagagagaaagagaaaggaaggattcgacagtagagagagaagagaaagctcaaaattttgactgaaggcaagtgaattactaagcttccaattttgagaccataactatctttataggaatccaactaggtttttgtttgaattatttggcattaagaaattgataaagtaaatggtaaaatagacccaagt

SEQ ID NO: 333975 - DNA, 808 bp, Cannabis indica
atatggttaggttcaacttagttgtattatttatgttcttcaagttgtttgtggaagctaacttatagttcttgccgatatttacatcttagaaacatggtagttcaattaagtgggagcgctaaacatagatatggaatctatagcttctataaatatttagaagtgaaacgatgatttccttcgagcttggctgaatagaaataaatgattgggatctcatttcagtaattatattagtttactgaaatatcatttatagtgttaacgcaaatctttgttaacgaatatgagcctatcttcgtaataggtttagcacagaatttataaaagattgaagaaaaatagcataaacaaatctgacaccggctttttacgtgattttgcagttaactctgcatagtccacgagtcaatcttattcagacttttctggtacataactagggttctttacaatcagtatattcttttttctctcaagaattttccatccctttctctttgtaatttgcccctatttataataacataggttgacagttaattaaattaaaattcaaatcccccaacaatattttcccaaaattgtgggccttaattacgctccacataaataaatgcagttattatttgagaatcccactactgtgatttaaaccgcttttaaagggtcaacgctaacgttgattaagatacgctgcaaaacgtatctcgctgcggcgtctcgcttggtacatgaatagcttggtttattcataagtcttccagcaatgacatgagcaccagtgtactgagcaaacttaaga

SEQ ID NO: 333976 - DNA, 647 bp, Cannabis indica
aaagggattggcatgaacgccgcctagaagctttatgggcttatagaaccacggtaaggaccgcgactagttgcacaccttataacttggtgtttgggcttgaggcagtgttacctttggaggttcaaatataccttcattaagaattgctactcaactaacagacccagatgaaaatgtgcaagtctgtctagccgagcttgaagcattagatgaaaagtggcttgctattcaacaaaagctcgaaatttaccaagcccaggtagctggggcattcaacaagaaagttaaatttcgatctttttcgattggagttctagtgcttactgtgaaaagaccaattgtcataactagaaggatgaaaggaaaatttgaggcaaaatgggaaggaccttatgttgtcactaaggtcttcctaagaggggcatatgaacttttaaatttagacggccgatgcatttatccgtgtgttaatgggaagttcatcaaaaagttctacacttaaacataaaggtatttacccatggtgtagacagcgctcttaaaaaaaacgagtgtgcaatgaactacgtaaggcttgatcccattccgggtacgtaggcaatctaatttataactagctccagccacacaaaataaaattttta

SEQ ID NO: 333977 - DNA, 619 bp, Cannabis indica
atattatatgtacccataaaaaataaaacatatatatagatattcattttttttttctaaattaaacattaaataacaacaaacaattaaataacaatgaacaaataattggacaacaaccccagcgtaaagtaaaaaattattagacatcaacacattatgtcaagtcaaatagaactgaaaaacaacacactaataatttaaactaaaaacaactacaaaatacttgtgcaacaactcaaaaatatatgtacccataaataaatacttatatacttatttttctattagttaaacaactaaataacaactaaaacacaacaagataacaacactacttaaatatatgtgaattaatttgacataaacaacttaaaagatgaacaaccgggaaaaaacataaacacaacacatacacaaccttaatacatggagagataaattctaagtataaaaatagaaactgaaagttgttcattacaaaaataccagccaaggaaaacggaagcctccatcttcttcgtgacccagctgacgaaccccaacaacccattctcaaccattttccttccaaaaccaggaaaattagatctaaaaaaaatgtagatctcaagggaaa

SEQ ID NO: 333978 - DNA, 1231 bp, Cannabis indica
tgttctatgttatatacaaatagatcttgggtttattattaatttttctaacaggctcgccagccttccttgggcttaggtgtggcttggctagggtctgtgattttgttactgcgattagatttttgcaaatgtaattagttttgtctctgcgatatgattttgagtgtcttttgtttaggttattgcgattagtcttgtttctgtgacatggttttgttttgttttatttgttgttggttcctcttctttgttctttgatgtgttgccatcaaattgttgttagtggttaaaaataaatatttgtggctaaaggagttgttagtagtgatgttacgtaccttgcacaatagttgagtactcaagttaaagggctgaataaactgctgcaacagatctattgttgtgtcttctgaacggtggaggaaattgaatataggtgttcttaaggttaactgtaatgttgtaatctttttcatttgactttatttttgtttcttttgtcaaaacgatatgagaatcaagcggtaattagttggctcatttttctgattctaatactgattgtgtttttaatgggattgggttgtagactattattttaattgattgttattaataaaattggatgatttcttaaaaagtaaaaagattaattatatttaggtaatagaaaaaaaatagtagggatctaggggaggagtaagcaaatagaattaagaatcgtaataaaaggaactagtggcacgtttaccgtccagtattcaaaatcaaaataaattaatgaaaaaatgtaacagaataaatgaaaaataatcggaatcaatattcgtaatatgttgtttactaaaacttcttggaaatgaaatgatagtgatttatcttgtttactttgtcaagaaacataattggaatgcttaaattgactaaattatttttttgagttaaactataatcagggtcggccctaggtataagtgggctaagctcgtgccaagggcctacaccttttgggggccaaaataaaagaaaattattaggcttttatttaagtaatattaagtgtattgtaaataacaaatattcatagtttagttagttaaggtgtatgacatattatataatatcatgggttcgaatcccataacactctttttaaatatttttttggaataattacataagacaccattttttgtaaaatatttacatttttacgttcaaagaatat

SEQ ID NO: 333979 - DNA, 554 bp, Cannabis indica
tctgagcagcatttgctttcgaatgggtgacacgtgttaggtgcgtctattcgtgattcgatgtgagtctgactaggcgtctatttggttttcggctaattaatgctctaacttaattagtgccttgaaacccggtttctttttcattctttgacggttacacctgattgtttttaatttcccaatatttgcttttggcgggaaaatgaagcgtctaaggtattttgaaatgattaccccttttcaccaaattgcctataaataaggttggaatttcttcataatttacttttacaaatttccctactaaacaaactcagagcaaaaaaggatttctactccatgtctgtcgtgagatttccaccaaagccatccgagcagcttcgtctggacttcgtttaggcttcaggcagtgagtaagttttcagtgttctcctcttttcactttgcatgtttaatttctgggtttccattgaagaaaatgcatttgttcttgacttgttgtagaagattcatagaaaatctaggctcgaaacttcgtagttttctctgta

SEQ ID NO: 333980 - DNA, 717 bp, Cannabis indica
tattagatgctttaaatccaaacttcattgcagcgtgcaggtgttgcccccaaggcgtgacaagggaaattcctgcaccagatagctcatctatagctgatccatctacatgtaatttataggtcgggttatcttcactgttacgtggctggggtatttgtaccggctttgggttgctttctggtatgctttcttccttgcttgtgcattctaccacaaagtctgccaaggcttggcctttgattgatgttcgtggttggaaagtaatttcatattggcccaactccaccgcccacttcagtagccgtccagaggcgtttggcttttgcaatatttggcgtaatggttggtcagtgtacacccgaacaggatgagcttgaaaatacggcattaactttcttgttgctagaataaggcagtaagcaagttttttctatcaatgggtatcggccttcaacctcaatgagtcttttacagatgtaatagaatgggtgctgtatgctgttcccttctctgattaggacggtactcacgacatgctccgtgacagctaagtatattccaagttcttctttgtccagaggttttgagagtacgagaggttttgccagttgtgcttttagctcttggaaagcttttttcacattcctccgtccactcgaattgcttgtttcctcgcaggatattgaagaatgggacacacttgtctgttgattt

SEQ ID NO: 333981 - DNA, 528 bp, Cannabis indica
caatcaagaaaggagaaatagcaattatcattaactaaagataatgtcaatcaacaatcatcatctccataaataggagcttagttcataacatccataatcaaatccataattaaaattgaaatagaaaatagcatagaaaaatgaaagagaagagaaaagaactagttgaagcaattgatccaggtcgccacaagccgctcttcaagtctcctcctttgtttctagggctcgcaatctgaataataatcacttttcacgaacttccatctaaataaaccaagccttctcattaaaatttgtgaaattacaaaattatccaaaaattgggtcattaaggcttcgtctcggcgaagctttttccgcgtcgcggcgaagcttttccccgtcacggcgggatttggcagcaagcaaagaactttgtacattttctttcaactttttcatctcttgtcctctattcttgtaaatacttcctttaaacatccggggacctaaaaataaaagaatcaagcgtaaaatagccct

SEQ ID NO: 333982 - DNA, 525 bp, Cannabis indica
aactccattgactttgaaagtctcacataattccatgaagtttgacaagtccagattgggggcttcagaagggagtccaccaaactggactgaagactgcaccattttaagtatggcatgctttatttcgaagttgttagcatcaactgctggtggtctgatgcatgactgaaccccataagagttgggagaatataatctctcaagctacagccatttgcttgatcttcaacggcacctccattattaccgttgttgcctccattattcgcaacattagcgttatcagccatgatttctggtgtttcagcagttgctgaaactctctcttgccttttgttccttctgtttctcctacaagtcttctcaattttaggatcaacgggcaatatgactccttgtccttgacggcgcatacacttaaaatccctgaaataaatagagacaatattgcaagaaatagattagaaaatagcaagagaaatagaccaaagtagaatttagtataattttatgtaatattaa

SEQ ID NO: 333983 - DNA, 345 bp, Cannabis indica
cctggatcaccggatctgtggctgtttgaggttgagcaatattgacaccaccatttgcttggtacctttggacttgctcaggtgggttcactatgttggagccacgattgtctctatttctgttgagggcatcccgcaagtctctaccccccaggggcctacccgttcaaaaactgacccggttcttggcctttctccgacattgtgactgtcaacccttccatcagccgggggtggtacttggtcattcctaccccttaggggtggattctcaggttgatgttgcctattaggggcatacgggcctctggcttgataaccccctaatcaaagttcaatatcggt

SEQ ID NO: 333984 - DNA, 832 bp, Cannabis indica
atatgagattccatgggatttccctgatagtgagcccaaacaccaaccctataacaaatgtcagaacgataaagcaacctacccatcatactttgatacaaagtaggatctatcattactccttgtttatctttagataatttcaagattgtgctcttaggagtattatcatgtttggctctctcaagaccaaacttcttcaccaagttctttgtatacttactctgaaaaacaactgcacccatgctcattttaaactcttgttgcattttttggacaaaaacctgcacttcagagttaaaagtagatccaaaaacaagatcatcaacatatgaaaaaataatatcaaattgaatgtgtgtgatgaactgtgttttaataacatttccttttctataatcatgagagtgtaaaaactcagatagacgctcataccaagcacggggtgcttgtttcaagccatacaaagcctcgtctaaaacatgatcaagaaggtgggatcctcaaccactccattttgttgtggagttttaggagtagaaaaattatgaaaaataccataagatttacaaaatttaccatacacagtattttcaaaaaaatttccatgattactcttaccacgaactatcttaccaatgttgcaatctttttgaacttttaatttcaagcaaaaatacttaaaaacatcaaaagtatcaaatttttctctaaaaagttctacccatgaaaagcaaaagaaatcatctatacacacaaaaaaatatcttttaccattcaaactttcaacctgaattggaccctttaagtccatgtgtaggagttcgagaac

SEQ ID NO: 333985 - DNA, 1105 bp, Cannabis indica
atttgttccaccaatacaacaactttacaagaattataaaaaaaaaagcttaggtacgggtacagctgcctagaccagcggcttcaagaaaagtaatatttcttttttatttatctaatatattctgaaaagtggaagtctccctcccaacaacgatgaacgatgatataatcaagattcgacatgtacgctggacaacaacgaatctaattttttttttttgaagaatatgtttgttatgcaaatgattataagttaaaagctcatcagaatttttttcaattcaactttaacattaacatgtacttaaattatatatttgaatttgcctgaaagttaaaaattgagattgttagaataaaggatttttatttaatttcatttaattttactattttagtaattgtttatatactaaatcatgctctacagattttgatatgtaacaaattatgtctctcgaattttgacatgtattaaattatagctcctgaacttttcgatttttttttactaaaattagcaaaaaaatccttaaattcaacaatctcaatagtaaatgttcaggggacatgatttgatacatgtcaaagttcggaagaaaaaaatcttaattagcctaaattaaatttttttgattaattaagacatcttgaactttgatatttattaaataatttttttttctaaattttaataagtatcaaattgtgtctccaacctaaaaaattcagaaagtataatttaatttaatttaatacatgttgaaattaagagtattcatggaaattatactaagcatagtaaatagtttttctaacaaaggtatagttaatgtgtaaatttgtgtgtatcacctatattttttttgtgttttttaatatgcaagtcacgtcctaccataaaaaaatttagatcatattgtgtctatgccaacatttttaaaggataattacgatatttttatgtcattcttaaatgggtaaataccattttagattctatattttataaatattatcgattggaccatccgttttgttaaatgataaaatagaccgtgtattttctaaaatgataaaaataagaccctaagtttaatttt

SEQ ID NO: 333986 - DNA, 694 bp, Cannabis indica
cgattgaaatgttgtaattattgctataacatagttgttgtatgagattgggttgctaacaaagtttctatatgagagggttactaacatggttgttatatgagatttgctaatatgattgttgtatgagattgagttgttgtaattagtattgctaacattgttgatgtatgagattgggttgttataactgttgctaacatggttgttatatgagattaagttgctataaaagttttaacgtacttgttgtctatgatttggttgctaacattgttgttatatatttgagattgggttgctaatatggttgttttatgagataaaattgttccaagggtttctaatatgattgttgtaagggttgcttaaatgattgcagtatgtgattgatgaattattatttactctatgggttgctaaaattattgttgtatgagattgattataaattgtctatcaagggtgtacatcaaaccgctcaaaccacccgcaccgcaaaaaaatgcagtttgaaattcttcgcggtgcggtgccgtttgcggttttgaattactaaaccgcgatacaaaccgcaccgcaccgcatgttttaaaattttaatttttatatttatttaattaagcccatacatatgagcccaacccaagcacataaatcttagggcaaaatccataactcttcacaaaccctc

SEQ ID NO: 333987 - DNA, 532 bp, Cannabis indica
aaaaagagttgttgaccgagagctgacctgtcaccactgaaggactggcttctgcatcagcctgagtaatggcgaacaccctagctggagtgggtctcgccagagcctttggtgcttctgttctaagttgagggcagtccctcttttagtgtcctgacatcccacactggaagcacccctgccctctacactcacccagatggtgccttttacaactggggcactctgggtaggtatatcgggtctcagaactaccatgacgactgcctcgattctggttcccccggaacctcttgttctgacctgagccaccggttgcagtggatatcttcctcttttgaccatggccgaagcactacctcccttgctaaagcccgaagtaggaggggtaggagccccgacaaccactggagtcctagcagactcagtcatacaaccaagtgcgccctcagctcgcagtgctttttccaccatttcagcatggtggttttgtcgtcgtagtaatcatcaagtcatgtttaatcttcacatt

SEQ ID NO: 333988 - DNA, 784 bp, Cannabis indica
aaaaaaaacaaaaaaaaaaaaagttaccaaaaattggtacctgagtgtctgtttcctgagtgtctggtacctgagtatctgcctcagcctctgtgtcatccacaccatcatcaaccaggttttccacaccatcgtaagagatggtcctcacaaatgcctcctcttctgtccgtggaagtagccccttcaccacttcaagattctatttatggttcaaaaaatatcaaaataaaaccattagcatttattacaagcatttatgttaaataattactctgaacataagtaaaattcatacccgtctagaaaataatgcactgacttctttcttcccaatatcacccttgctcgtccagctaagcatcttgggaaaccgaatcccatgattcgtgccatacctcttccctacctccaaaatggcctcatacgcccaatattgtactgcaggtgcgaagccatatgctgtgtatttgcactcatgctgaacatccgaactcagcttcttctcgtagttggccttctgtttcaacatgtctttttgaagcgagtgcatgagtctggcgaatgagtgcttcccccaaggaatccggaagaagaactcgagatcttcgacatatctaagtatgtcaggcgtaatcagcgcgttagcctcgtaacatgagtctggagaatgagtctggagaatgagtgcttcccccaacaaacaagcactggccaagcttgtacaagtcttccggttctgacagttgtgaacctatcttggagtgcttctgtcttcacacta

SEQ ID NO: 333989 - DNA, 700 bp, Cannabis indica
agaaatcatctatacacacaaaaaaatatcttttaccattcaaactttcaacctgaattggaccctttaagtccatgtgtaggagttcgagaactctggaagtattcacatcaggaacacttttgtgagagtttttcagttgcttactgagatgacatggtccacattttccttcaacttctttacccaatttaggtaatcctcgaacaatccctgcaatggataattctttcagttttttgtaatgaatgtgttcaagtttttcatgccataaatcagtggtgttatcaataacagagtgacaagtagcataggtagtgatggtgtaacagttatcattagatctgaacccttgcaagacaatttcatcaagaatattatacacataacaatgattactatcaaagctcacagtataaccctgatcacaaatttgactaatgctaagaagattagcttttagtccatcaaccaacatgacattcttcagtctaggaagcccttcgaaattgagagttcctatccctatgacttttccaacaagaccgttaccaaaagtaacttcttcacattgcattggtctaatgttctcaagatattctttttcacctgtcatgtgtctagaacacccactatcaaagtaccacatgttagtagcaatagttttaaaacaagaagaacctattgggttttatgccct

SEQ ID NO: 333990 - DNA, 893 bp, Cannabis indica
tcttcaactactcttactcgtcagggggaggatgataatttgttggtatattctatcacatcctctacgcctcatacatgttctgacgagtctcttgttcctttacctacctcggtcataactcccacaatgcctacacctccaccactccctcgacctcatatagtgtacactaggcgtccccctcctccacctcccatttattgtcctgcacccgcatcttcgtcatcaaatctggaactcaaagataatcttcccattgcactacataaaggtaaacgccaatgtacttgtcctatttcttcttttgtttcttataatcatctcttctctttttcttgctcttttattgcttcgcttaattctatcactattcctaaaattattcatgaagcaatgtctcatcctggttggcttgctgcaatgatagaagagatgaatgctttagttgccaatggtacttgggtcttagttaatttaccttcgggaaaacaggccatagggtgcaaacaggtgtttacggttaaattcaatcaagatggaacaattgctcgcttaaaggctcatcttgttgccaagagttatgctcaaacttatggagtggactattatgatactttttctactgttgttaggctcacatctatttgattgttcatttccatggcagctactcagcattggcctttgcatcagcttgatattaaaaatgcgtttcttcatggagatattgaggaagaagggtatatggagcaacctcttggatttgttgctcagggagagttagggacaatttttcgtcttcgcaaatctttatatggattgaaacaaagcccttgtgcttagtttggtaaattttgtcagattgttgagaaatttggtttgttgaaaag

SEQ ID NO: 333991 - DNA, 1141 bp, Cannabis indica
ttatatacaaaatgagatcttgggttcattattaatttttctaacagcagtcccatccccgacgtccaccatgctgcgattccaagcaattttcgcaaacgaacattcaaccaacgcatgtcgaatagtttatgtactaaaattgcacaaagggcattctgcactgacgggaacgtgacacttttaaagttgaaagcaagttggaagcacgcccgaagtagctcgccatataaaattactgaccttaggaaatttttaatgactaaagctgcttccaaaaatcagtattggcatctcaggaccaagcacccttggattcttgcaagaatttataggcacttttaaccgaataattctcacaagtctcaagtctccaactccaaccatcattagcgaccgaatcactaagctgaatggacataataagatcctgatcataggaaataaacaaatctcacacaacatcctcatcccaaatgcgagtatcgacttgaaagaggcagctaaccgacttattcacaagagcagggtgccgtgagacaagatagctgttagagttatgaggaagtcaaggatcattaagaatggagacattttccccattagcaatagttctttgagcacaggcatggattagatctttagcttcaagaatgctacgccatataaaactagaattgtctcccaattcagcagatgacagattaccactagcataatattttgctttataaagcctactaactaaagaatcatcattaaccaataaacgccaatattgcttccccaaaagagccaaattaaagtctctcaaactttggaaacccaatccccctacatgtttatggcgacacaaccgctcccagctcatccaatgaatacctttaccactactcgaatctgattgccaccaaaacttagccataagtcgctttaactccttgcacgtgtctgaaggcaagagaaaaacattcatagcataattcggcaaggcttaagtaataaatttcagcaaaacctcatttcccgcacgagataaaatacgcccttcccacccttgaattctctttcgaagcttatccttgagaaaaccaaagatagcattcttatttctccccaccgaacacggaagacccaggta

SEQ ID NO: 333992 - DNA, 964 bp, Cannabis indica
ttgtctctccactcagtaaacatacgtctttgttcctcgaaggcgagatttaccgcaacgcggagttcttcctgatcatgatgtagggaattggcatgaccttgcatgagtccaagagcataatggaggttttgtaactcagtatcatatccaatggtcatttgagtgttggtagcaggcggaacaactatgttatgaatgccctggttgggtgctgaactgttattcccagtctcttgcacaccaggcgcgatttcatctacatgagtcgttacaccgtgacccacgttcgctggttgttcaggaataacaactggcagaacccttgcgtttcatgggttctgcaatgcaggatccaccttctgtggattcgctagatcaaccaggcccctacgagtctctaccaccatcgtacttgtggttagattttgaatgaagagcgattcttgattctgctgtcaatgaaagcaccaaaatgttgacatcgcttttagccaacgatagtgagtcttatttagtaagagataagtaatttatagcaattgatatgtaataaagcgatgtaaagacaaaagaattttatagaggttcagccccgagtacttcggtaatagcctaatcctcgttatttgtattgactcaagaacaaggagaaaggttccttttcttatagctcttacaacaatatctttgaatatgaattcttagataatatcccttaggtaaaatcttttgacctctttgcccagtgagcatgcatcactatttatagagctatgaacttcgagaggaagtatttcccttctcgttacaatggatataagtagaaagattgcatgataaatacagaatatactgattgtgggatttggagagcttgtcatatctctgcaatctgatccccaagttatagggatttctttgatgactcacgatgcaaaagctgaactcactaagtgttgat

SEQ ID NO: 333993 - DNA, 1396 bp, Cannabis indica
tgggcatcaccggtaatgatagagtggcttgtgccatattccagtttcaagaagacgtttcagggtgggacatggtgtccctgacctgtgatgttactacaatgacctgggaaaatactataatgaggcagtcaaaagtacaaaaagaaaggaatttactcaactgactcagaaagaaaatatgagtgttactgagtacacaacacagtttgaccaattggtatgattggcctcaggaatagtgccaaccaattttagtaagaaagaaaaatacatggatgggttgaagtcaaagataagacatgacctgatgatcaccactgatgacaacaccacttatgctgatgtggtgggaaaagcactgcgagctaagggtgcagccaagtgcactcaggagtctcaagggactcatgccgttagtgggactcctactcctcctacctcaggcattagtaggggaggtagtggcttgaccactgaccaaaaaagaaaggcaccaactgcagaccgcagttgtaacaggccagctctcggtcaacaactcttaattctctgtgttatttgactctaggccactcattcttatgtggcagctagaatttttaataaattaggcagaccgcatgatagttatgatatagggtttggaaccctactgcctggcaaagaattagtcatctccaaaaggtggattaggtccatgtcgattagaattgaggatagggagttgagtgttgatttaatagaaaggagtttagcaaattttgatattatacttggaatggatttattatccaagtactgagccagtattgattgtaaacggaagatggtaatcttccaaccagagggtgaggaaccgtttgttaaggcatctcggataccagtgatttcagtactaatagctagagaagttgttacgagagtggatgtttagggttatggtcgtggtattggataccatacggcatgagacaattcggccagaagacattagaatggttcgagaatgtttagatgtttttcctgatgaacttcttggtttaccaccgtagagagaaattgattttattattattgattcggcacctggagtagaatcaatttctaaggccccttatagaatggctttagcagaacttaaagaattgaaaattcagcttcgaggcttgcttgacctagggctctcatagcctagtgtgtcaccctagggagctcccgtattatttgtcaacaagaaatatggatctttgtgtatgtgtattgattatcaggaattgaacaaactgacattcaaaaataagtatcatttacctaggatcgatgatcttttttatcaacttcacgggatgacagtcttctcaaagattgatctccgatcgggctatcatcagct

SEQ ID NO: 333994 - DNA, 2042 bp, Cannabis indica
aaatagatgattaaataaatgaatgaaccaaattaagatttaaaattaaaacttgacgctgagatgaacaaaagtaagaactatactgccagatgaaactacgtaacccacagatggatccatgaaactaaatacgtaaattacatggttaaactcagttaattataagtctagttcatgaagaaaaagcactaggtcttcttccttattgcttttaagattgaagtttcagtaacctagtttacacaacgagttcttaaaactcaaccctcactaatacataaaaattctctcaaaactctcatggagaaaacactaaatctcaagaaaaactctcatgagaaacactcaactctctttgagagactctcaactcacatggagaaaacttggttctctaattttcacactcattgaaatcacttaagttggtctttatatagaagccaatacccaactaactttactaaacattcttgacaaccactaatattttgtcacatgtatatgtagcttcaatcattcccaatgttggaaaataagaacttcggagagaatacttgaatggaagtagctatattttatatctcaacttgtgtgatttgtgacttggtacaaaatgatgggattacatctctatttataggactctatggactaatctagaaacattattaaatgactatagcttctacatttctacataattctctctactaacacaagtgaaagataattctagaaaattcaagagtactcaaacaaacaagaaaacgctagacactttagtaattgtaagaatagtctagaaactttcctttttagcatgttgcaagccatgttgagtatggttcgattcttcctttctgccactccattttgttggggggatcttggcactgttaatggacaacgaactccttgatactcacagtatttgttaaactcatttgatgtgaactctcctcctcggtcaaatctcatggccttaataggaagaccactttccttttcaactagagctttgaatttcttgaagttctcgaacacttctgatttctccttcaagaaataagtccatactttttttgaaaaatcatcaataaagaggaggaaatatttactcttaccaaatgaatttggtttaattgggccacagacttcagtgtgtacgagctcaagcggctttgtggctcttgataatgactcctttggaaaacttcttcgggattgctttccaagaaaacatccttcacaaagttgatctggttggttgatacatgaaaggcctctcaccatctccttcttctctaagagtttaagcccgccaaaattaagatgtccaaagcgtagatgccaaagccatgatgactcattgaagcaggcctttaaacacttcgaaacatcatgttgaatgttcaagagaaacattctactctttgtcatgggaactttggcaataattttacatctcttaagaaaaggtaattcctttaagagaaaatcataaaccttctctactaaatgacccaaacacaaaaaattatttttcatgttgggcacaaagtaaacatttgagatgaattgatggcctccatttttcaagcgtataagaatcttacctttgccttccacgggtatttttgattcatctccaaaagagacattcccttttaccatttgattgagctccacaaacattcatctttctccgcacatgtgattgctatttgctagccgcagtgtcaagataccatttattttctagagcttcatctttgtctttgcaagcaagcaacaaagttccttcttctccacctttgtcttcgacaaaattggctctttcttcgaccatccttgatctacattcggagccataatggccgtacttgttgcaattgtagcacttgatgtgagatttgtcactccttgacaatgagttgcctcttctgtgccctcttggtgcttgtgaatttcggcttcgttctccattgttgaaattattattattatagctcccccttccttctcttcgttgtcct

SEQ ID NO: 333995 - DNA, 755 bp, Cannabis indica
atcgcatagacatcgttaaagccagaaattgcatatgaatctcaaaaaacaaattaaaataaaatcgcacaatgtcgcacacacatcgcatacaaatcgtgcacaaacagtaattacaaatatgagagaaaatcgcacaagaatcacaacaatgtcgcataatgtcgcacacacttttaaaaaatccatgcatattgttaaatattcaagctatagtcgtgttaaacaacaaccagcaatacaacacatattcatttaaatattagatacaccgttcaaactcgagctttgcatgtagctctgttgtgccctgcaccgtgacatagcgagcagtgatgaggttccactaccacctgaccattggacggtcgacgcttcatcggtcttctacctgcattgctcttcctaggccgacctactagttttttctccactggtaccctgattcttatgttcttgatgtgttccggtagtacccactcatcctcctcgccaacaatattaattgtggcatcgtagatcttcttccacgtttcttttgtgtaatatggagaacaaagtgtgtacacgctcacattctgactaactgctgcggcacatgcatggggacaagggattttgagcgtttggaaaagtccgcaagtgcatgttctctccactaagttcacatcaccacctctctcaccttcaggactcgtaccaacgttgaacaattgggcaccattacgaaggacactcctaaacataccatcttt

SEQ ID NO: 333996 - DNA, 660 bp, Cannabis indica
aagcagatttagaattcaccaagtaaattctctaacttattaattcctcattgcaccactatagaacatagaattccactctcaattataaagatagctctatatgttccaagatatgattacgctattagttatccattgttataattcaaataatcaatgatcctctatagatgatttacatcgagtagggattaatttactgttacacccttcaatatattttatccttaaaacacttagcaacctataaatgatatttcagtgaactaatataatcacaaaaatgagcgctctatcatttatctcttttttagccaagctcgaaggagatcatcgtttcacttctatgtccggatagaagctatagattccgtatctatgattagcgctcccactcagttaaagtatcatgttcttaacctatacgtcacgggaagaacaatttggtgaactttaactaataggttaaagaacacaaataatgcaaccaaactaattcctaaccatctcaggattgagatcatttgatctaggatcaactacgtgatattgaattgaatagatattacggtatgtttatcatatctaatccaagttcagtatcggtcccttccgatgcatactccatacatccaacccaagctttctttaaccaat

SEQ ID NO: 333997 - DNA, 793 bp, Cannabis indica
cgttgtagtattctgctcgtctgctccccttcttctgttcaggtcatcccgtaggtcacggggtgttcccaacctttcgaacacagaaaaacctggctaccttagcgagtggttcgcttggttggaaagtggaatggctccattattttgagtggatccatcgagcatgactccccttatgaattcctggacaaggtctgtctgcctacctcttggcccacgagtggaactcgtgaccggggattgcacggctgaccgttgtttgtctaggaagcattcaccgttgggtcagcctcggcttctcaaggggaatgacgctcggcgcctactggcctatagtctgataggctctctgtatcagcacagtagcttgccaactacgatcttcgatttctgcatggtgagcccttaatgcctccatctctttatctctccactctgcgaacataagcctctgttcgtcaaacgcgaggtttactgcggcacgtaactcctcctgatcgtgatgcagggtattgttgtggccctgcatgagtccaagcgcagtacggagattttgcaattcggttgcatcttcgatggttgtttgggcactgatgcctggtggaacagtcatgttatgaacatcctggcggtgtgcagaactgttattttcggtctcttgcacaccaggcgcagtttcagtaacaggagttgttccatcattcaccatgcttcccgtctgaccaggattgacagcgggtggaaccgtcgaactccctgggtccttcaacatcggatccagcgtctgtga

SEQ ID NO: 333998 - DNA, 602 bp, Cannabis indica
actaggaccagaacccagacgaagaacaaaacatgaacctagaccttgacctgggacccaaaattagaacctgaacaagaatcgtcgaacaaggaccctagaacaaggctaggactgtgaataggagagggaccccgacccagacctagaaccgaacacagacctagcctcagacccaaacttagactggcactcgggcccagacacggtcgtgtaccgagatcagaactgatacccggacctgtacctaaatttaggacccgattccaaacacagactttgaccttgatagggatccggatacgaacctggactcggacgaagacccagactaggatcgaaatgatggacctagatctggaccgagatcccgacccagacccaaacttagacccgcactcgggacctgaactttgacctgcacccgaaaactagacacaaatcggggtccagacctggacacaaaaccggacacagactcggactcgaactcaaatacccacacctagaatcagacccaaagatagacccagaccaagacccaaacaaaagcccagaccaggatcaaaaccaaggactcagatcgggattggaacttggga

SEQ ID NO: 333999 - DNA, 1338 bp, Cannabis indica
cagaataggctaattatcgttaacaatatttgcgttaatcatgggacatcatcttttgaagcatataatcataattaccttccactgtgttgacatcactgtaattgtgaataactatatgttctggacttaacaaaaattgtatacattaaaccataaacatgaaatctacatgttaacataaatgacttttaatcttctattgataacaaatctagttatattgaaataagttttatttagggcataaaatcccaacaaactcccacttgcacgaacataaaacaagtagtgcatttcaatcaatccattgtcttgatatacagatcaagtgtagtgtacttgactaaacccaaataataggaattgtaagtctgtggtaagcaattgctttctccaccattacttcctttatgttcataaaacattatgcaacattattttttttatgcattactcatctagggatactgaattctttactgcttattaagtgcatctaaatatacagaagacatgtctctaattctatccaaatggaataaagataaaccaattaagaactttcttcagtttgaataactttctagtgcttttcgaaagcaacaaagttatttagcttcactgatggagcttaaattattatagatgagtttttacatccttctagaataatttctccacccctagaataaccaccatgtctaaaattctgagttggtgtagatataaggattctaatatacacccctatcatctaacatataggttactttcatagatactttcttgattgtctcctaatgttccttgtttgattaaatcttagatggctcccactcaacagtaggagtctggttaaagtaatacacgagtttacatttaacctcttactattttttcttagggacatcttgttgtgacatattatcttagtctgaaactataagttccttctagaataagtcatcaacataacaatataggattaacatgttggaattattttaccaggatcttagatctactcacaagtatgttgactaacaacctaaatatgaacttctaaaacgataataaataaacacatataaagtatgagaaacattacagtgggtgcagccgaataatatgtctctctcactagggaattcgaaattgtatctctcttctattgttttgtattgttcttccagaagaagaagagatgggcggctatatatagagaaaatggaagctcaactttctgaaagaggcagtttcctgaattacagagtaattgcttaattgccttatttggtgcgagccaccactttccatttatagataactgctagg

SEQ ID NO: 334000 - DNA, 597 bp, Cannabis indica
ggcccaccaatcacaaattaacttcactcaaaaggaagttgcatgaccgaagaccgtagggaagagttaacaggcgcctatgcctactaaccatctcgagggtaggagtaggtctcatcaaaagagctgttagaagaaacaaaacattagtcacaaacttgaaaaagaaagactgatgtaaataagtaagaagagaacaatcacttatgaagtttgcaaaacgtggttgtgccgatgggggagagaccaaacgtccaaaaaaatttattcttaaaggaaactttatttggcaagtctacaataattttaggctcactcgaatgagtaccgagatagaaaaagcccactgcagtgttcttcctcgatggaacagccttgactgagtaaagatactcaatctctacttgagtgggacacctccaatttagaattttgtacaaaactttcaaactagcgagaatcctgtaggagatgggactcagctggaatggggcagctctgatgtggtttatatagtctttgaagtagtcccgaagacgaagggtggcccctgcactgatatgctcaaggctccaggtgttgggctttgtgccctaa

SEQ ID NO: 334001 - DNA, 554 bp, Cannabis indica
ataggacaatcctaatatatcatatttctactatgagatgcatgataatataattgtgtgagatttttatgtatggcatattattcactaatgcatgagcatgatattaatcaactattaataaatatttatttaaaagcaataaataaacaaggatgatgaactcggtaaatattttgtatttttaattttataacctttgaaatcagaaaataaattacaaaactaatctccatcgctgcaatggcattttgtaattttgtagggtcatcgtaagtcttaaaattaatcaaaataattataattaattattattaaattaacttttaatttaatataacttttaatcatattaattaattaacataattttaattgattaattcttaaataaatcctttatttaagataatttaattatctttaaagctttgtcttaaaataataatatatttttttttatttttgggttaagacaacttttgtcttaatttagttttaaggtgttgggttttatgccctaaataaaactctttacaatctgattagttatc

SEQ ID NO: 334002 - DNA, 540 bp, Cannabis indica
cttgatttcgaagttgttagcatgacagaacccccgtaagagttgggaggatataatctctcaagctgcggccattagcttgatcttcaacgacacctccattattaccgttgtggcctccattattcgctgcattagcgttgtcagccatgatttctggtgtttcagcaggtgctgaaactctctcttgccttttgttcctcctgtttctcctacaagttttctcgatttcagggtcgacgggtaatacaactgcttgcccttggcggcgcatgcactcatgatacctgaaatagataaaagcagctttgcaagagacaggttagaaattcagcaagagaaataaaccaaagtagaagttagtataattttgtgtaatatcaatatttatacaattacccgacaagggcgccaaaaacttgttgctaaaattataaacactacgcaagtatacgcaatcaagtagtaaactcacacaggtgaggtcgaaccacaaggaattggattaactactactaaactatacctataattctattt

SEQ ID NO: 334003 - DNA, 1761 bp, Cannabis indica
tggatcctcgacttggggacccaagcagcaatgttggacctgtggaagagttagaagagatcgagatcgatccagatatcccgaccagaaagctatagatcgaaaagggttgttgctcaaagtataataagaattcataaaatttctgagagcaaacctagacatttttgcctggtcacatgcggatatggttggaatcgatccttctatcattttgcacattctaaatattgatcccaactttcggccagtccaacaaaagcgaagactactggacaaagaatgagcagtagccttgaaggaagaagtagaaaagttgcgcaacaacaattttataattgaagctttctacctagcttgagtcacaaatcctgtattggtggccaagccgaacaagaaatggcgagtctgtattgacttcacagacctcaacaaagcatgtcccaaagacatttgccacttccgaggattgatcagctcgtagatgtaacagcagggcaggaaatattaagcttcatggacgcttattcaagctacaatcaaatcaaaatgcatccactagaccaagaacatacaagtttccgaacagtatgggtctatatcgctacaaagtaatgtcgtttggtctaaaaaatactggagcaacataccaaagattggtaaacaaaatgtttaaagaccagttcagacgaaatatggaagtgtacgtggatgagctcgtcaaatccaggaaggctggggggcacattgacgacctggacgaatgcttcaaagtcctcaaaaaatacaatatgaatctaaatccctcaaagtattcctttggagtcagcttaggaaaatttatgggtttcatcgtcgatgcccgaggaattgaagccaatctagagaagattcaagccctcttggatatgaagtcgccaactaaaaccaaagaagtgcaaagtttgactggtcggtttgccgcactcagcaggtttgtttgaaaatcaacagataagtgtgtcccattcgtcaatatcctgcgaggaaacaagcaattcgagtggacggagaaatgttaaaaagctttccaagagctaaaggcacaacttgcaaaacctcccatactctcaaaacctctggacggggaagagcttggaatatacttagctgtcacagaacatgtcgtaagtgtcgtgctaatcaaagaagaaagcagcatatagcacccactctattacatcagtaaaagactcattgaggctgagggccgatacccattaatagaaaagctcgcatactctcttattctagcaacaagaaaattaaggccttattttcaagctcatcctgttcaggtgtacactgaccaaccattacgccagatactgcaaaagccagatgcctctggatggctactcaagtgggcggtggagttaggccaatacgaaattactttccaaccccgaacagcaatcaaaggccaagccttagcagactttgtggtagaatgcacaggcaagataaaaagcataccagaaagcaaccccgagctggtacaaacacctcagccaagtaacaatgaagataagctgacctggaaactacatgtagatgagtcagctacagaccagctatctagtgcaggaattgtccttgtcacgcctagggggcaacacctgcacgctgtagtcaagtttggattcaaagcatctaataatgaggcctagtatgaagccctaattgctagattaaaactagcttgggagatgaaagccgaac

SEQ ID NO: 334004 - DNA, 565 bp, Cannabis indica
ctatcccttgccaccaaaccgatgccaacttgatgtggatccgaaaacagagccgcgtctacattaaccttaactctaccaacgcttggggcaaaccaatgctcagccgcatctcccagtatcaaaccagaaaaaagtggtctcaatggcagtttgaggtctagtgaaaggtaaaaattatcctataagactacctaaaaacaaataaaaatattaaatatgatttttgaaaacctaatttatatatagcatattaaatttcataaaaatacttaaaaaaaaaaatgtcatataaattggtcaaacttaaaagtgccatatttaacttaacaaattttaaaatcccacattgagtgtaaattcctcttatttttattgagctgaacatcagacgggtttactgggtttcaggtttgcgggtttgcgagtttcgggttcaaaaaaatgaaaccgaacccggacccagataggacacgggttggcgggttttggttggccgagttgatcgggttggtgggttgacccggtcaactctttaaaaaattaattttttattcaaataatt

SEQ ID NO: 334005 - DNA, 1163 bp, Cannabis indica
gtaaaattcatagtaaatgtgcttttatattattaaatgtaacaaaccaatagatcgattaggagttgactaaattaacatgttttattctgtagtgactactggatgacaataatgatccatgtcaatactcaaagtgttgcatatctcgactcgacaaataactttatcccgactgatattatgaattatatcaaaaagtaagtgttataattttttaaatttagattttgcagtacacgtgttgacagcagccaaatggagtacaattatgttatgaagattgtctagagtttcatgacagttgttaatcctgcaagttttttaaaaaatcgcgtaaacatgaataactcttctttatttagtttttattttaattatacttttgatgtaatgataatttttttttatcttttattttacagattaagtcaaacgctccctacagtaatgaggagatcaatgcagtaagggatgagcgagctgaatttgtcaagtttttgattatagattaagtacaaggttactacttttgttataatatatgagtaacaagttttatgattattgttaatttttgcattatgtaattagtttatagttagtacatggaatttaagttttaggatcgtttttattaacaattttggtattatgtaattagttaatagaatcgataactaattttatatgttttataaatgttattttaactttttttgtattatgcatttattattatataaaatcatttcaaaatttgataatgtaggtgggaaaatagcatgaaaatttgcaattttcccttacctacatttttgccacaatcaatttttccttatttttaagtcgacgcaaaagataaaaaagaagagtgcatattttgtatcagtttttaaatgaagataattattttttgcgtcatttctaaaacaacgcaaataaaaaattatttgcgattatggtatatacgtcaattttctaaaccgacgtaaattctttaaatgacacttagaaatcgacaagaattatattttttgtaatagtgctgatctcactattacatatattagaatttgcggtcctaaaaaacgatttttttttgtgaccgtcgctaaagaaattaagtaactatttaaaaccgttgggaaaaatttagtatt

SEQ ID NO: 334006 - DNA, 1723 bp, Cannabis indica
tgaacccacaagcatcattcttcctgagatttttgtgccgttttgacgatccaagcttcccgccttcttcttcaacaaaatcttgtagtgggtaagctttttattcccgctattttacttgatttgattgattttgccgtagatgcatgaacgctattctttgctttgaacatgctttgattcttacattagattgttgttgtaatatctcaaaaatttatatagtatttaattggacatattttattaaatatgtaattattttggtaatgaagtaagattatgatcttacttatggtaatcagtgaggatttattaaatgattatataaagcgtaatttattaattacgaagattatattgagatgtgtgggtatcgaggataccatatttgaaataaaaatatttttgggctcgacgactgtggaaacttaggaatgtggtcagaaatgtcacgacattaatggataaattattttggggatattccagactagtgtagaattttagaatgtcgatgtgatggattagtaaaattaccataatgcccctaggttattttaaagtttgattttttttttacttgaagggtaaattagtcatttttgttaatatgtattttgactttagtttttgtgggctgattgtattttttttttaaaaagaataaagaaaagaaagaaaacctatatatgagataacttaggaagcaagaaaaccaaaagcttctccttcgtgcaagccaaaccagttcgccttgaggattttcttcagccttcttccttcatttcaaagctggttcttgccctaagtcaacctagaagagctttgaggtaagttcaacctttttggattgaagactctagattttgaggtaaggtttttgcgtttctgtggctgtatgaattaaactaggattggagtatgtttagggtaggtttatgagtatattgggaatggttttaagtggtttctatggctgcttgaattgaatttggtttgatgaagccaaagttaagttttcttcactttaatgtgtgattttgattaaatgattgaattgttgtgttttgaagcttaggatatgttgtattatagttattatactattctggaaagtttggttaggtttggaggagttttgggttgaaattgaaggagagaacccaaggaattctggtctgccagaaccagtcgaccggttggttctagtgcagcagaaccggtcgaccggttgccctgcagggagaattcctgggttttcttcaggttcaatttttggtcacgggagttgcgtagtatctattttaggttgtttgtgggttgtctaacctattttggggttattgggggctaggttcttattcggtttcaaattagggtttcattccggaatttcaatctaaggtattcatagagttttgttgtcgtgacataggactaggatcacctagcttgttttcccactcaggttgacccgtacgcttgagttctgaactaaggtaagaaaagtggtaagcaccatatgtggctagatgttagcggttgaatgattatagctttgattattatcaagattctgattaaatgtttgttgagcctaaattatgacttagggttgggaacgtttattaccattacgagcaattactcctgaaactatggataggtttcttacttgtcgtttacttcatcaggcaatgatatgttggaaattatttta

SEQ ID NO: 334007 - DNA, 502 bp, Cannabis indica
gttatccataattacaacgacattaatttttaaatttcatatattttgtaaatatagtagacatttaataattttcttaataatttacattttcaaaaataatattcaaacagttaaatacacagtttaattttttcttttattatttatgacaaaacaactaaatcgtaaataacagtttcacataacttgatttttgtatagtaataaaaaattaagaaagtccaatatatttgatatgataaataaattaaaaaataataactaaataaaattattaaaaaaaatagtattaatatcataaaagtaacttcattctacttaaaaatacaattataataaaattgggagaaattctataatgtacccccttaaaagtgatacaccaatacatctctatctgttttagtatccgaaataattttttagtcaaattttttcgtatggtcttgtaaattatatttatttaagaaatcctgcaaaattttaaaaaattttgaaa

SEQ ID NO: 334008 - DNA, 482 bp, Cannabis indica
acctttctctgtaaaggtaatgccgccaaatcttcaatgcaaaaatgcagccaacaatagatcatgagtcgggtatcgctgttcaaaatccattaactgacgggaggcataagcgataaccccatcagcttgcatcaacacacaccccagaccctgtctagatgcatcgcaataaaccacaaatttctcttagtctgaaggcaaagctagcactgaagcggtaatcaacctctgtttcagctcctgaaaactagcttcgcacttgtctgaccagacaaaccgctgattcttctttgtaagtttggttaagggtgttgaaattttagaaaacccttccacgaacctacgataatacccagctaaacccaagaagcttctaatttctgtcactgtcttcggtctcggccaatccctgacggattctatcttcccgggatccaccttgatcccatctttgctaacgatgtgccctaagaaggaca

SEQ ID NO: 334009 - DNA, 1090 bp, Cannabis indica
tatttattataataataaaaaaagttaaattagccgcgcgaagagtgattatattacctagtttagatatataccaaacattcaaagagctccgttatcattcttttttccacccaaacagataaacaaaacaagccaaataattaagcaaaatcgtttagtagcaaattaaaataacattttgactatgaaagaaaaactcaaatatgaagactacctctacctctaccacatcctctcatggttgcaacttctctacggtagccaaagactacaatggaagaatcatcgaatacgttctcgccaagatggaggaagagagcaacgagtgccacgaccacataaccttgctcgccgtactccgaacccatcgcaaattagggctcgcgacaaagtcatagccatagcacggtcatggtcatcatcaccatgttcatggtggtgggtgttgttctggtggtgaacccaagagtgtggaggctaaatggttgggggttgattgtttctgggatttgggagaagaagaagacgacaaactgtaggggtgtgcagaaagtcatctaatccaattacaaccgactgatccaatagaatcagatatccaatcataattggatcgaatgtaaattttgaaaatccaatcggatcagatcggttgttggatgggacatccgatccaatggataaccgaccaaaccgatccaattatcatccaatggtcatctaattatatttatatatttttaaaatacatttataattttatatatttaatatactttatttaaaaatatatattaattgatttaatatacatttaacacatgagattaaagaaaaaaaaactttagatctaaaatattagtttttatctttctaaacgctaataaaattgtcaatgcatattgaataaattttattttttagcggttttattatgagatcatgagaattaggttggattaaactaatgcttattatgtatattggattataaagttttaaattatattttttttatatatattttcctttttaataaaattaacttaaatgatagctaaaatagattggatggatccaatccaat

SEQ ID NO: 334010 - DNA, 2174 bp, Cannabis indica
tttttaaatatttatttacgtgacccaataatatggtgtcatgtgtacactgcatccatgtagacaatactctatgtacacatggacaacaaacttggcagttaactgccaaaaatggatagaaatgttagtcctgaaaagcctgcgaatacatacctaattattaataaagaattgcacattttgatatatgtatgaatgttaaattattaatatttattattgaataatatatgtaaatatcaggaaatttgttattcatatatgaagttgtgacttgtagttgtatagagagaactaagatcacttacctataaataaaacagtcagcaacatattaaaattattaatcaatggttgctagtacggctcattgatgcccattcttcaatacaagtaatatcaattcagattattgatgtagtataacatctatgtgaaggtgttgtatattaattgaaattatatatgacaatgacctatatgaataaagttgtctttatcaaacatgtcatttactataaaaacttaattcgtatcttaatgataatcaatggtaaatcgacctaaatcctgagtaatcatgaactcgtgttcttgttactagtttctttgattcattcgttaaagtttctcaaagaagatgattcttacaacttctattttgggaatctaataatgtgaatgactggaaatatgatctacaattatggaatcctaactttcttaacagatagaatgttagttccatttttgtgttaattctagaattgaaaagttgctcgcaaatttagatgggctctgaattatactttcactagtgaattaatggtattaaaggataaagaagtaattagaagtgtaaaatggtaatttgaccaaaactaattacgaaccaacacaaggaggattgattatattaatggacgctgcaataaaaattagtaaacataattctttaattactaagagttcaattccatatttatagtggagtaatcatggaactaataaataaagattctttagttgatgagtttcaataaataatttagtttattggagcttagaattataggtccatggtcctccaatcgcctccttgaaatactcttaagggtaaggataaggagttgtataatattgttcaaaaaatctattttaaattggaaaaatagtaattatttatttttgaaaaataaataatttttcaaactaattaaatagacaaaagttgttaagacaaaatttattgagacaaaagttatcaggacaaaagacaccatcattgtcttaattaagacaaggcaggttcagtcattctagctgttcgtaatccactaactattcttgcagacggtcagattttttttttgaatatgctcttgaattcattcgagacgtgagcaaaactgagattggagaagaatatgcccatgggttccatttattggaactctatttttatttatttttgtttcgaatcggtcaggggctcttttaccttaaaaaatcatagagttacctcatggtaagttagccgcacccacaaataatataagtactaccgttgctttagctttactcacgccagtagcatatttctatgcgggccttaggaaaaaaggattagggtattttggtaaatacattcaaccaactctaatccttttacccattaacgtcttagaagatttcacaaaatccttattgcttagtttttgactcttcaaaaatatattagatgatgaattagtagttgttgttcttatttctttagtacctttagttgttcctatagttgtcatgttcttaggattatttacaagtggaattcaagctcttatttttgcaactttattctgaattctatgatttcaataaactcccagcacatgttcgtcttgaacaagatctagaactaccctcaacagtttgtgtagccataaagcctattttctattcattgagatctgttgactttgtataccattccattataaatgaatgatcttagcatagatctattgtggtcttttaataataatggaaacaacaatcattgttaccataattatatctggtatacttgtatgttttactggttacgctttatatactgcttttgggcaaccctctcaacaactaagagatccattcgaggaaaacgggga

SEQ ID NO: 334011 - DNA, 625 bp, Cannabis indica
tcttctcatcaagctttcctcttttctcttttggaatgtgactgtagcatatgcagccgaagactttgagatgctttgctgatggcttacgtccgctccaagcttcgatcggcgtcttattctgcacggctttggttggacatcggttgagcaagtagactgcagtgcttactgcctctgcccaaaatcgttttgggagacctttctctagcagcatggctcttgctgcctccataacagtcctatttttcctttcagatacaccattctgttctggtgcgtatccaacagtgagttggtgctccatcccttcatcttcacagaacttgttgaattcattagaagtgtattctttgcctctatcacttctaattgtcttgatgtagtgaccgctttgtctttcgacacgggatttgaactttttgaaaatatcgaagacttgcgacttttgttgcataaaataaacccatgtcattctagtaaagtcatcaatgaagagaatgaagtacctgttttggtcatttgatggagtgcgcattgccccgcagacgtcagtatggactagctccagtggctttttggctctccaagctttgccagatggaaaaggttgtcgatgttgttt

SEQ ID NO: 334012 - DNA, 1045 bp, Cannabis indica
acaatcaagacactgattgtcaatgcacaatcccttgtgcagcaactgagctcctcttcaacatgtcttcaatctgaaatcccttcagatctgatgatgaagatgacactgaaatcccttcagtttgaactcaacgattccagattcagatcattccgccattgacgaaccctctcaagcttcaagatctaacctgtaatcacaatcacaagaaacaagatacgactatctctctaaaaacaaccgaaataactgtctgaatgattaatggataaccactttactaacagaaactgattatatatatgaccacaacgataagtccaggtggcactaactaacacttaaaaagactctcgtaaacaaacgttagtgcagatataacagtctaaaattccagacacgactagacattgaacagaacatacactgtcacaaaataatgacactaacactttcacttcttcttctttacagccgcatctagtattagggtttcttcaagctctcttcttcttctcactctagtggcagctagggttatattgttctaatgggttctcttatcttctccttttactgaacacgggtagggtttctagggtttttatgttttcttttctcttcttattttccttatagcttctacctgaaacaagatcttcttgctcttctcacttcttcccgaaaacaataacttagaaattcccacaaccccttagccgaatatcaacacacataacccaaaaatagcaagaacacaaaacacacacaaatacaaatataaacaatatagagattaaggtgagtaatacaagcagaaataataaagatggagacaccaatttgatctcggaattcgcccaaaacagccggctacgtctctgtcaagccttcaaagcttgaatccattaatcatcaacaagttacaatctttgatttacaacttttgatttctctctgtttttcctctcttttgatataacaaaactcttttttttcttttacatgaacacaccaacaacactcttggaggagctctctc

SEQ ID NO: 334013 - DNA, 842 bp, Cannabis indica
gggtatttatagtgtttttctagggggattcctaggaatggatcacttgtctttctgtgttagcttcataggggcacatattcctagtagatacaaaataggaaatacatgacctataccgtaggtatcttaggagttaggtggatataatcttttatcccctcttgattgatgtgattcctcataaattagccgtcactagactcatccattgttgtgtaatcagcgtaaggagggcatacaccatctgtcacgtcttttatggaggttccaatacattttcccccatgcgacattaaatacgaagtgattgttcaagtaatctctctacctcccggacatgccttatcatggctctagcctcccggagagtaaggatgtatctcttttccgggaggcaccttccctatggtgttcctcttttgtcgaagacttaattgattttcgtgagtgatgttgctttcagatccacgtgccacctttatccgcatccacgtattttggaaaaaattagaggcaacatttacccccaagcctcgtttagtgaagggtgaacgaggcttgctcgatgcctccggtttgcttgttgacataatggcacgtgctttaagcgcgtgagctgcatttatgacggtcatcattaatattgatttccttttgtaggcaacgattcgcttcccgtccattgagaaaccgacgcatttaatccgagtgtcagaagagtactcaaatgttttctacctccctggcacccatcaatctcacgcgttggattcgtagaatgcgaatcgattacaatttccaccgtacgatggtgtctgatcacagttgccttacacccc

SEQ ID NO: 334014 - DNA, 540 bp, Cannabis indica
tgtgaaccgtatttcaggttttggtgcaatcctacgtgactctgatggtcaagtggtggctgcaatgtctaagcctcatcctggttgtttcaaacctgaagttatggaagctttggctcttagatatagtttgcaatggcttcaatcaatgaatttacctatacactacattgagactgattctctcttagtggttaaaggattgcaagctcggagtcttaatgtttctgattttcatagtgtcttaaatgacatttctattcttatgtccaatttccctggagtgcagatctcacatgtttttcgatctgctaacacctttgctcatattttagcaaagtatgctctctcggtggacaaagaatgtatttggatggaggaaattccacctcctctgatgactattgtattatgatttcattttaatataatagttttcttatctaaaaaaaaagtaaaccggtttgtaatttttagatttttttattaatgaattgttttttatacagataaaagggtgtaaaaagtaattttcttcat

SEQ ID NO: 334015 - DNA, 840 bp, Cannabis indica
atgaggaagtggcctcaagagttaacgtgggctctggggtaggagaaggaacccacggcgatgagtacaaaggaaacttcgacgagtacgacgcctatgacgaaggtagttacacagaactagtgctcttgagacaaaaggctgctgatcatgaagctgagatcacagcccaaaaagagcaaaacaaaaagatgcaagaggtgatgcttgccatgcagaaagccatggaggcggcagggatccatgtacatcccaaagccatccctgcaggacttggagaaacaccagaagagttctcaccaagcacccaaaagcataagtccagggaacctaaagccctatacggtatccctctgaaggggaccaatagaaatcctacttccactcccgggaaaaagaaaaaggtgcaggacccgtgaaaggtttgctcagatttactgaaagggaaaggtctgcagaggggcaaactccaaaaagggagtcttggccctcaggatcgagaggactgaaaaagcgtttctgtgcaccaggaacccggagggagaggaagaaggagccaaagataccctcccatcgatctgagacatcagattaacggaaaacacactgacctccgggatcacctagaccagaagaaacatacgccagcggtctccacgggaacgctgaacgaaggaatcatggctgagcttgccatactatgtaaagatattgctcgggtctcccgaagacagaaaggcgatgactctgactgtgaggaccgggagccatgtgccacgcacatcctgaggcagagcttcccaaaaaattttaagatgcccgaaatggcagcttataccg

SEQ ID NO: 334016 - DNA, 648 bp, Cannabis indica
aataaaacaaatctcattagtatttgaactgatatttgatgctaattatttgaaatttgaaaaatatatttatgaaattatatatttaattgatttttgccaggctaagaacaattgatgcggttataattactcattctcatgctgatgcaatccgaggtctttggattgcgtactttctattcttgagataactaataaattagtgatgatacgataaaaaataaccatgtatcatatatcatataatattttttattgctacggtacattcaataatatcactaggatatccatatattgctatggtatatctatctctctctcatatcactcttttcttctttcatcaacctagcaatttcttcatcaactaaattaagcgagaggatatacgtacgtattgattcagtacatattttattttataattaattaattgttaatcaattttttatgtatctctataatttctgtttcctttattaatgtgaaactttatgattaattagttcccttctagcccaataaaattaagtcagatctactttttacttccctttcattatattttaatttgatttttctttacgtgattctttatatattctctatatatttctttatatatttagtcattgttattat

SEQ ID NO: 334017 - DNA, 1480 bp, Cannabis indica
aggtggactccacgtgtcaccattctcatgatgccacgtcagagtgcaaaatttgggataacaataaggaagacttatcaggcgcctgtgccgactgatcatctcaggggtaggggtaggcctcgtcaagagagctgtaaaaacaaacaaaacactggttagaaaactgaaagacagggattgatataactgagcaagaggaaaccaatcacttacgaagtttgcgaaaggtggttgtgctgttgggggaaagaccagatgtccaaaagaagttgtctttgaaagacactttatttggcaagtcaacaatgattttgggctccgtagaataagtaccaaggtagtagaagcccactgcggcattcttccttgatggaacgaccttaaccgagtagagatactcaatttctactggtgtagggcattcccagttcaaaattttatacaagactttcaaactagtaagaatcctataggagatgggagtcagctgaaatagggcaactcaaatgtgatttatttagtacgtgaagtagtctcaaagaggaagtatggcccttgcactgatatgctcaaggctccaggagcccataccagtcgagccactagtactagtctcaccactggtccctggagtactgcttgaaaaacgcgtaggagggaagcaactgaactcaccctctcgtactgatctaacttggcatgattgcccaagttcaattccacaggtcttcagtatatcgcctgtgtagcccgagatagatcacaccttggattctatcaactcagcttcataggtgactctggggtcctggggagtctttgatgtacgtggattgggaggcattatttcaaaatccaagtcacctagttcaaaagcaatcatggcgttaggtaaaaacaaaggcttttccacaagaataaaggacacgctgggaggttctggccaggctgcttctcacaagaattgacattcgccttcgaagttttcttacaagaaacgcctgtaacgactagcaatatcttcctgatcggttctcacaacgttttctctaaccctagcatcgttcaactctaatttggaagtgaattttgaaggattcagtttatacaggatgacagattctgtaggaaactcaaattctaaaactttggacgataaattcctgaactagagtgggacattgctacaggaaaaaagcagtccaaatccctagagagaattttatcaaacttgaaggtgatgagttggagattctgaaacaacctacatatttcctgaaccctagtatggactgaaatacaatttaaccctaaaaactaccaaaaccaaatgagatgacaacgatacaaacaaactaagtagcaatttaacgcaatctagcaagcatgtgaaggaagaaagcaacttactgtttggagttagggcttggggcaatggctggttattccatctacaaatcttcgaacgtagcaagga

SEQ ID NO: 334018 - DNA, 739 bp, Cannabis indica
attttaatagttgccgaaaacctcggtcaacagaaagtaaaaggcgtggaactttgaaagactgtaaaaaaacacgaaaaaaatggatgtgagaaaatttgtgcataagcattagactacaatcggtccatatatcggacctatggggccctaacaaaaaaatatattcaatatggcaatcaggcccactatcgggccctatgtcgtgtctatcgaaccctcaccaaaaattatgaaagaaaataaacatcgggtcaaacattgtaccctacatcgggccaatatcaggcaacaataaaatattaaaatccaaaattaccatcggacccacaatcgggccctatgtcgggcctatcggatctaaacctaaaaattatgaaagagaaaacacaccgggcctaaatttcgtaccctatcgggcccacatcgagccataacaaaaaaacttaaattctaaataaacatcgggctactattgtaccccatattaggcccatcggaccctgatctatcgaagagaacactaattgaacaccatcgttgtaacgcccgtacttgaaaactaattaattttggatttatacacattaaactaattataaccatttaaatatatatttataatattgccagcatcccgtgttaaaaaccacgctcttaaaaatatatataccatatatatatatttacataatatttttttttacaagccacaagacaatatcaaaaagggcgactc

SEQ ID NO: 334019 - DNA, 594 bp, Cannabis indica
aacctgcatgatccccataaaaaccttcattaacttctctgatgatttcgttcgcttctgtagggagaacacaccgaagtagaggcatcaaataacctcttttatatagtttgccttcaattattgtgcagcgaggcattgaatacaagagttttcacgcctcgtttttgtccgttagaagttgtccgtcaagtagatagttgattataggagtcatccatgtaggagagcaatctatatatcatctctacatcttccgtttcacatatacttggctcgcttaacatctccaccaaaactaagttcaatccatccaagtcgttctgcgaggccagttttgccaaggcatcagcgttggagttttgttctcttggaatttgctcgattttaaagtaatcaaatctttccaagttcttctgaaccttctctaaatactttgccattctcaagcctttagcctggtattccccgagaaacctggttcacaatcagctgcgaatcactatggaaaataagatttttgacctctagtgctcagctatctttaagtaccacgcaatcaaggacgttctatattctagcctccgttgtttg

SEQ ID NO: 334020 - DNA, 718 bp, Cannabis indica
aaaacgggtcaaaatcgacccggttggcagaagaagacaaccccaaacgacgtgtcatttttcatgtatattgcaaacaaccgttggtgaaaaatgacatgtcattttttgtcttgtgaggcagcccttcggtgagtaaaacgacgtgtcgtttttacgtgtgttcaccccttcagaatgaaaaaaacgatgtgtcgttttgctttttgcaaaaacaacatgtcgtttaggcagtgcctttttccaaaaaaaaaataaaatataggaaaaattccaaattttttataaatttgggatattaataattttcctattttgtgttaatttagtcaataaattacatttagtcaacttttcatttttatttagtacatatatttagtataaattgaaagtagaaatttgtttaattttataatttattacatgatttatttaggcatgtaactattgtgctaatttgtataattgtgcatttaactatatattaccaaatttatgcaatttattgtctaaattaataaattttgaaaaatctgccattaattatatattaaggaatttgcatttaattaattatcatacattaattgtatcaatttgtatttatttggcagatttgtttttaatacaattaatttagatttgtatgatttaaatgttatacataaattccttttatagtgctaggtatatttagaaatattcaaacattaag

SEQ ID NO: 334021 - DNA, 1638 bp, Cannabis indica
agggtttagggtctagggtttagtggtttattatttagagtttagcgtatagggtttaggggtttagtttttagtgtttagggtttagggtttatggttttgggtttaggattaagggttttaagatttcaatttagggtataggatttaggatttatggttttgggtctaaggtttggggttagggtttagggttttgtatctattatttagggtttatggttagggttttgggttttggatttattgtttagggtatagggtttagggtttatggtttagcgcttaggggttagggtttaggcgttagggtttggggttgagtgtttagggtttagggtttatgttttatggtttagagtttacagtttagtgtttaggatttatggtttagcgtttggggttttgggttttgtgtttagggttcaatgtttagggtacaaggtttacgtttatggcttaggggtttgggtttacggtttagggtttagagtttaggctttagggtttagtgttagggtataggttttgggtttagggtttagggtttaggatttagggtttgggatttaggctctagggtttagggtttagggtatagggtttatgtttttggggtttatggtttagggtatagtatttagagttttagggtttatagtttagagcttagggataaggtttcaaggtttaatgtttagggtttagggtttaagctttaggctttagggcttagggtttagtgtttagggtttaggttttgggatcaggattaagggtttagggtttagggtttaggatttagggtataggggatagggtgtggggtataaggtttagggtttagggttttgtgtttaggtttagggtttagggtttagggtttaggttttgggtttaggatttatggcttagggtttacagtttagggtttaggatatagggcttagggtttaggggttaggtttcaggtttcaggcttttttgggtgtagtgtttaggtgtttagtttttaggatttaagctttatggttttttgtgtaggattacgggttttaagatttggatttaaggtataggattaggattttttgtttaggatattaggtttagggtttagggttttggaggtttagggtttaggttttaggatttaagcctttaggtttaaggtttcgagtttaggggtttagcctttagggtttagggtttaggatatggggattatggcatagggtttagggtttatggtttaacttttagggttttgggtttaggggttagggtctagggtttagtgtttatggtttatggtttagggtttagagtttaggatttagggtttagtgttacggtataggttttaggattagggattaggttttagggtttacagtttagggtttcgggtattcggttaagggtttgggggattagggtttagggtttaggagttagggcttaaggattagggtttagagtgtaggggcttagcctttagggtttcgggatcaggatatagggtttatggcatagggtttaaggtttatggtttagcttttagggttttgggttttgcatttagggtttagtgcttaggggttagggtttaggctttaggctttagggttttgggtt

SEQ ID NO: 334022 - DNA, 766 bp, Cannabis indica
tggaaaggacatagcacttatataaggtgcaagtaaaatatgttgtagattatcgtatcagttaaaaccctgtgtactgataaatctaggaatatatatttaatcacataatcttgattactttccactgtgctgaccacacaataaacaagaatattaatgtgataagggtttggatgaatttataaatcaaataaacatataaatgataacatgaactaaatgacacattaaataagtgatgaaaatacttctgtctctttattgatatttaaatgatagagattacactgaaatatagatttatttaggtcataaagcccaacaaactcccacttgcactaatataaaataatcagcttatttcaattaatcctaaattctgacggtgcttttcaaatggagctcctgccaaaactttggtgaatggattagctaggttttcctctgtgtccactttctccaccagtatatcccctcttgccacatactctctgatgatgtgatatttcatttctatgtgtttgcttctcttctggcttggaggccctttactgttgactatggctccagtgttatcacaaagcaaaaccagtggtttttccactctaggaacaacacctagtcctgtgaagaactttctaagccaggcaaattctttagcagcctctgcagcagctatgtattctgcctccatgtagagtctgaaattgcggtttgtttagcacttctccaaaccactgctccacccccaagagtaaacacc

SEQ ID NO: 334023 - DNA, 869 bp, Cannabis indica
ttcttttcttcttcgttttttttttttttttttttcaaacgaatgctaaaaaaaatttgagcagcacctccccttaattttctatatcccaaaaattgaaaactcaccaattaatccacacaattacatccacaatcccaaatcacactataaacctaacaattcctatatcaatcaataattctaacaaaaatcacaaacaatgctcaaaatcctcatgcaacttttcaaatttaatagagaataatacttacaaacccgaagacgcattactccacctccattgttgaatatctttgaatgttgaggttgaagatgaagaaccaatgtattttcggatttggggtgaaattgatgagtatttgggttgtttttgatggaaagtgtagattgatgaaagaaattaggttttaggatggattgggattgagaaattatagaaaagatgaaaagattgaagattggtgatgaaaaattgaatttttgagagaaaaggggtagggtcggctgagaggtgtttgaaatttgaatttttggtgtagggttgaatgagggggaaaagtttgaatttatagaaaaatcgcgagcaagtcgcgacttggcctagggctagtcgcgactagcttacgattaaatttcagccctctctggaaaatagggaagtcgcgacttggaaaataggtcgcgacttggccaaaggctagtcgcgacttcaggaaccaaaaaaaatacacgagtctctgttaaattctaggtcgcgactagggtcgcgacttgaaaaataggtcgcgacccaggaaccaccaggtcgcgaccactaggctccagcccgaaaaaaacttttttttttcacgattttcacgattcaa

SEQ ID NO: 334024 - DNA, 777 bp, Cannabis indica
cgaccactggaaccaaaaattttcaggagtttctgtaaaagtccaggtcgcgaccagggtcgcgacttgaaaaataggtcgcgacccaggaaccaccaggtcgcgaccactaggctccttctcgaatttgttttttcaactaaaaagaataatgtcaggtactaatctaaaaattgaaaatactaaaaattctaaagcataaactaaaaacataatcaaagagtctgaaagaaattaaagaaaacacttgggttgcctcccaagagcgctgtctttatcgtcatatagccggacgctgagccttgttcttcgaagtggcgccagaatcacggcggacttggcttggtcaaattgacctcccaagtagagccttaaacgctgtccattaactttgaaagttactggaccatcaccttttaactccaccgctccataaggaaacaccttgaccactgtgaatggtcctgaccaccttgactttaattttccaggaaacagtttcaaccttgaattaaagagtaacacttgctgcccaggttgaaactccttccttactagaccttggtcatgccacttcttagttctttccttgtagatttttgcgttctcataggcttcatttcgaaactcctctagctcgttcaactgtagcagtcttttctcccctgcagcttttagttccatgttaagagtcttcatggcccaaaaagctttatgctctaactctaccggtagatgacaagcctttccaaacaccaaccgatatggagacatgcc

SEQ ID NO: 334025 - DNA, 742 bp, Cannabis indica
ggaaaaaaaacttttttttttcacgtttttcacgattcaactaaaaagaataatgtctggtactaatctaaaaattaaaaatactaaaaatactaaagcatagactaaaaacataatcaaaaagtctgaaaaattaaagaaaacacttgggttgcctcccaagagcgctgtctttatcgtcatatagccggacgctgagccttgttcttcaaagtggcgccagaatcatggcggacttggcttggtcaaattgacctcccaagtagagctttaaacgctgtccattaactttgaaagttgctggaccatcaccttttaactccaccgctccataaggaaacaccttgactactgtgaatggtcctgaccaccttgacttcaactttccaggaaacagcttcaaccttgaattgaatagtaacacttgctgcccaggttgaaactccttccttactagaccttggtcatgccacttcttagttctctccttgtagatttttgcgttctcataggcttcatttcgaaactcctctagctcattcaactgtagcagccttttctcccctgcagcttttaattccatgttaagagtcttcatggcccagaaagctttatgctctaactccaccggcagatgacaagcctttccaaacaccaaccgatatggagacatgccaatcggtgttttgaaagcagttctgtatgcccacaatgcatcatctaattttcttgaccaatcttt

SEQ ID NO: 334026 - DNA, 500 bp, Cannabis indica
tttccagtaggggtctgtcccttctggtttggaagctattttgttagctgatttgctttattgaaagttgcaatctttgtttacaaaaaaaaaaacaaatagcgtgtttggcttattgtaattttttaaacatgtgtctagtcttaaattcttatgaaaaaatctaatagctcattccttttcccttaaattgttttaaatatcaattaattttaatgaaattttcttcaaatttttaagtttatataaaaaatttagtgtgtaattccaattacaaaaataatccaatccaataagaggaaattacactctataccctttttatattgtcctcttttatttttaccctcttttttaaagtatcatttttacctctttttaaacattgtaccaattttgcccactgtcacttcaagatactctccatgtgactctcttatgtcagggtattttaggtacaatacatataaaaagatgtatgtttcaaataaatataaaat

SEQ ID NO: 334027 - DNA, 648 bp, Cannabis indica
ttttcctgcttttactgggtctagaatgtcgtgtgttaaacacgtctttaattgttgaatctggagatgtctccacagaaacttgattttagtgatcccaatagcgagctgggactattcttctttttgagatcgacaatggatgtcttgcgtcgatcgcgggtatacagaaatcttctgacctgccacggttatgagcctcactcctgttagttggatgaaactataggaagtttaatcatagcgagatggtcatctcgcatacttgttcttcaagtcgatctaacttttacacttagtttgctcattgcaagctaaggtatgtatcacttttcttcgttgcctcgctattcacctttagcgacatatggtttctcgttaatacactatgtgccagtttgtacattgattccttgcctaagaccttacagtcagcgggttacaaatatactctgatcttacataattaatgagttattccataaaagatattgcaccgattcacattccttttaccttgacacgtgtcctccagccaaatttcgggtataccaagatcctataaataatttgtaacaggtaaattgtgtatttctttccaccgtgtaaacctagaaacatgatagggcccatccaaatcaatttgac

SEQ ID NO: 334028 - DNA, 788 bp, Cannabis indica
atgctgagtcctcttcgatagagaattttgtccatcatcacataacggtgcgcttgatattgtatccttctagacagcgccttctctttgggcaactcacattttgttatctattcgatgatggggaccatccagctgggctcttgctcaactgttgctatcatatttttgactttgatgcttggctccgccaggcgttccacaggtaccaccctcagtttttcaatttcactgtctgaagctaacttagccagacagtctgggtgagcgttcttttccctggggattctttctactttatagtccgtgaactcgtggagcagttcccggactattgcaccatatgcggccatcttttctccgcgtgattgatattctcccgacacctggtttactaccagttgcgaatcgctgtagacttctactcttttggcccccacggttttttcctatcttagtcctgctatcagggcttcgtattcggcttcattgttagaagctgtgaattcaaactgtagggctgcctggagtagcagtccgttcggggatatcatcgcgacccctgctgcggacccattctcgttggaggcgccatccacaaataccttccatgctgggactggcagtgtgggtacgttagcgttagcttctgctttgtggcactccgtgatgaagtctgctagaacctgcccttttacggaagtgcgtggaatgcggtgtagatcaaattggcttagctccatggcccatttgagaagtctcccagacgcctttggcttttgtaggac

SEQ ID NO: 334029 - DNA, 541 bp, Cannabis indica
aacattgaaaagttcattgttaactgcgattggtattttcgatcttaaaacataaagcccttgttccatgtaagcaacacataattgaaatccattacgagaaattgtgcaaatagaactcaaaaaattcaattgataaaattgtacaaattggagggtggccccctcgaggtaagttccgttcataagcacgcaaatctgcttctagcttgtccatgtcggatgagttaaaattgttgatcatttaagatacaacaaacccattatactcatgaggaagactattaagaatgaattgaacccgttgttatctagataaatcaattcccaacaaatttgctttttggaacttcagattcataattaacaagtgtgaattattgctctttccaggaagcattttcacactatagagttcatttgcaaaggcatttactaagagatggtcggggtgtgggttgtccattttgacactacaaatatcaataaacagaaataaatcattttgttttataaattcatacacaatttcagaaaataa

SEQ ID NO: 334030 - DNA, 322 bp, Cannabis indica
aatgacctccccggaaggcctctttttcttagtagaggacccctcaccgcccttagacttcttggccagaggagaggcgctagagcttccgcccattctcttcttcagagcctcaaacatttgccgagacatgtctgcacaaaacaaaaacaatgtggttagaagacagccatcagaaacacaaggcatgaaagttaagaagctcaaaaacaagtgggcggggcctgaagtttcttcttcctcttcagtggagtcaccagctcttcctcagcctcatcttcaggattcaagggctcttgagcatactacttggcccttgcac

SEQ ID NO: 334031 - DNA, 734 bp, Cannabis indica
catgcaatctgtccacgcgagcgggccgcagtgcccaaaagctaggccgcggcgcctgggttgaaaacccagaaactccattctagcagctccaaaaatcatccaatctcaccccaaacatgcatatatctcaaaatcatttcccacacaatataactaacataatagagagctaatacacacatttaaaggtcaaaatcaaagctcgcatgcaacaaaatcatatttaaaaattatacaatatagactctaaacttgagtaaaatatcaacaaattcaagctcaaaccttgaatcgttaaacgcaaaacacaagctcaagctcaacaataaaatcagagttgtataaaagaattaaagcaccaacttaacctcaaaaattatctcaaaagcacaacacaaagcatcctacattaatctttaacacaatcaagcatagagtatcaaaattaaactaattccaacacacatgcatcacaaggatctctacaataaaatcatgcttaaatcaacttcaatttcagcaaccaattcaaattaagacagtaacaaaactacctccaaatcctcaacaactcaagcttcaaagattcccacaaaataagcttgaatccaagcaattctctacaaattcaaagattagagtaaatgagtttagagagagagagaggagggggcggtttgggtaaagcgaaatgcagaaaatgcttttcattaatcaacattcacttgtca

SEQ ID NO: 334032 - DNA, 1234 bp, Cannabis indica
aattaaattaatttcatcattttacccttctcgggtcataattactaaaatgcccctggctcaccaacggggtcttaacataataaaattcatataatttcacatatattgaactatataataatataattcctcaattatacataattatctagttagggttttgctaatccatctcttaattccggggtattacagtacatatctggtggggtcataagcacccccactcacagatccgccaacgtctgtgttgggcacttcattcccagtttttgggtattggtcaccttcacgttggcttctcctcgaacgtattgaccacataaatcgtgttgtccgtgaattgggaggcctccatgagcccgccagctctattccaggacaatgagtagtctcttcaggttgattattatcattttccctgttgttagcaatggagaaaaaaatttccttttggttatgagggtttttttttagcttttttcacgtaggctctcaatgaaatcaccaaactgacaacgcatatttttgttaacgataataagcctattttcgtgataggatcagcatagaaattagtataaatctaagaaaaaataaaagatcaaaaataacaccaaatttttacgtgattttgcagttaactctgcatagtccacgagtcaatcttattcagatttttctgatacaaactagggttcttttctctcaacgatttttttgtcccctttttctgtacattctacccctatttataataatatagttggcaattaattacattcaaattcgaattccacaacaatctttccccaaaattgtgggccttaattacgctccacgtaaataaatatagtttattatttgaaaatcacacatctgtgacttaaactgcttttaatgagtcaacgctgacatggattaagacacgctgcaaagtgtatcttgtcggggcatctcactaggtacttgaacactcgatagcaacaataaccctaacatcgagttggagctattcccatgtctttctgaggttgaaaacataacgctctatctgaaaattgtagttcttgatgccaagatgaacttcaacaaccaactgttgggttttgtgccctaaataaaacccatttcaaaataatcagatttactaattaataaagatcagaaattattttttgttgcgtggttcacatgatttatttcatgattatatttaatgtataaattc

SEQ ID NO: 334033 - DNA, 754 bp, Cannabis indica
aaaaaaaaaactaacttttagtaataatttttagtcacaacataattttttgtggctaaatatgatttttagtcacaacataagatacttgtgaccagggctgaccctgagttgaaatgggttataggaatatatatatatttttaaaaaagtatttttttacttgggcccctaaaatgactggccctaggcgcaagcctcgcccgcctatacctagggcccaccctgcttgtgactaaaactaagtatttgaaaataacttgtcactaaatttgttttagtcacaataattattgtgactaaaaatatatttagtcacaacaaatattgtgattcttgtgactaatacctttagctacggaccttttagtcacaacataaaaatgataattataattagtaataaatttttcacctttaatcacaagttctattgtgattaaaagtaagatttttgtactatatacgtatcgttttccatgtaatacactactagaaaatagggcttattagatgcaatttttaaggtcgttcaacgtcaatttttttaatttactaccgacgctgttttaggcgacgataaaggggtatgaaataattgtcgttataggaaccctatgacgtagattattatgaaataaccgactccataagggcttcctatgattttttttcacctttaattaacacaatttttttaacttttattaaaaatctaaaattataaataaaaattaaagcataaataaaaatt

SEQ ID NO: 334034 - DNA, 637 bp, Cannabis indica
tatttataattacatagtggacaattaattactgattgactgtaatatgtttacaacaatcatccctaaaatcatgggatttgattacatatcacgtaatgtaaacgcggttatgactttaaaatcatatagttgtgattttctcgcttttactgggtcaaaatgatcatattttaaacacgtccttcattattgtatctggaattgtctcaacagaagcttggttccaatgatctcaatagcgagctggggccatttttccttccgaggtcaacgatacatgtcttttgtcgatcgcggctcttatttacaaagagctctttgaagctcatttgaatgttagcttctgtcttgccggggtcgtaagccttgctaatgctaacgggatgaagttataagaagtcttcccatagcgagacaggcacctcacttacttggtcttgagccaatccggctgtaacacttagtttgtacactaagggctttcgaaattgatatatatcgcttccgtcttcctatgtgtactgtccttgatgcctcgctatttgcattcaacaacatatggtttctcactaatatacaaagttgtaaaagagaagttcgagcgttggcataatgctaacaataaagctcgtta

SEQ ID NO: 334035 - DNA, 657 bp, Cannabis indica
ttcttatattacttttaaacatttgtttaattaagtaatttatcttttcgaaaaagtaaaaataaaaataagaattgatttgccacttccttttaatgtaatattatattatattgatagaaattgcacaatagaaaagttaaattgaaaagtcaaaataaatttaataatatatatataggagggagctatagcatattgtatatatgtatatatttcatagaaagatgagggagccatggcccctgtacagcagaacacccttccacccctgcccttaactatgtctaatccaactatattactcagtgcataaaaaaacaaatgaagaagataaatcttattgatattatacagtaaaaacaataaaaaaatattttgatagaatattttattgggtgattttacaatgcacccccttaaaatggatgtattgatgcaccctctacttatttcggcatccagaaaaattttttagtctaatttttttcttattcatgtaagttgtagctatttgagatatcctacaaaattttaagaaattcggaataatttacaatatagaaaataatgttcaaacagtctattttacacgcgtataaaataaaatagtcacgcatgcaacacactacttgaacgcaattttcggcgtgttaa

SEQ ID NO: 334036 - DNA, 604 bp, Cannabis indica
ccccaaccggcagaccggttccccaaccaaaatttcggttttgggaaaaattcttggaagccaaccggaattccggttcctacaggcctctatgaactggaattctggttcagtgcaggaaacactgaaaaattcacaactcaaccaaatcaaccccaatccacataaaactctccaaacctgctatttagaccataatgaacatattccaagtgataaaacaatcatccattcacagaaacgaatttcaccattaaagcttcaagattgagttcaaaaactcaaaacttgactaacccttcaaacagcctctaattcaagcataaatcaacataataactcatatttaaacctcagaacacaacaataactaactacagcagccacagcaaacaaaacttcaaagcatccaaaatttcatttcctacaacttaaggaaattaagagaaagctacaagaagcttaccaagaacttgagaccactaaaaccttgctaaaaccaccttgaaatgcaaaaaatcaagccaaaccctagctgctctgagggggccgaaagagagagagagacgagagaaaatatgtttccttccttactttgattttt

SEQ ID NO: 334037 - DNA, 612 bp, Cannabis indica
tttgatttttttcttgaaaatgaaataatattcttttgcttaattcaactaatatcagcataaaacattaaattactcaaataagctacgtccactaaaggacaaactaccaatggcaaaaagactcttttgcccacacttaagccagaagtcataaagtcacttaagggtattttggaaaaactctaaattcccgactaatctcgacattcccaatgactaacaataccgccccgctatagtaaaataccaagatgtgattctactgagccatacaccgcgttccaatgttgtcgggcactgaacatgcaaaaatatgaaatttctatatatgacatataaaatgcattccgaattcaaataaatcatcataaataattattttaatattaataaataattttcataattaaaccctaattatttgctaatttccaaatttaaactaagcggtctttacagttggaatctaaaatttaaagtcaaagacttaaatttataccaaatatacaatgagtaatgattctagcttggactaccactactaatttaactctaagtctaatttgcctaaagtaagcatatacaagtaggagatttctaagatcgagg

SEQ ID NO: 334038 - DNA, 958 bp, Cannabis indica
aaatggttagaattggaaaattggcatttttgggaaaatagaaataaaattgtggaaactgcaaaatccaagtgaggcccatcacacctttggccggccacttgcttgtgtttcccaattattattttcaattttttaattgccaagtaattactaacctaaacctagcagctatctattaaaggaaagtggtggatcacaccaaataaggcagttaatcaattactcagtaattgaggaaactgtttattttggaaagttgagcttcccttttctctatatatagctgccctcttctcctcctcttggaacacacgatcaacacaatacacatgagagagagaatttcgaattccctagtgagagagtagtgcccacacacagcaaacagtaccttaatcatagattggaagactgtgaaggatcacaaccaactgaaggacattccagctcagatcttgattattctacaacagaaaggaatcaagggttagagatctgagtagaaggagacatattattccgctcccatcaatgtaaggttttcttaactttacatgtgttttctttttatcgttttagaagttcatatttaggttgttaatcaacatacttgtgagtagacctaagatcctggtaaaataaattctaacaactggcaccagaaccatggtaattgatttgctcgcaagaaatttggacttaaaacgatttgtttgtgatttggatggtatcatgttgtttgtgtgatgattggttgatgtttgtgaaattcttagaaaaataattgattttctgtttctggaattatttttattggatagtttggaaaaaaattaagcaatttagttttttacagaactcgattttttttgaaaatcgggaaaaatctgggtggtgatcacccttcccacgcgcgcggaagggctgcttgcagcctcccagtgccgaggaaact

SEQ ID NO: 334039 - DNA, 667 bp, Cannabis indica
accgaaaaacaagatgcaccttgttgacataggtagtaccaatcaatccatttaagctctcttcaactgtgtagtcccatacctacacagtctcagaatcatcccacttgaccttccccaggcggtgtgggattgcacagcttacccggtgttcccccttacggatcatgggactactgattgtcacaataagattattgtctaaagagagagagaccagcctcacctcatgtacaacaagaagtaactaataatatttatatattagaattttaataattagataaatattatattttcatataagaaaattttctcgcctttcttatttaccaaaaaacataaaacaatcattcaaaaaaaaaaataacataaaacaaaatattttttttactttcctttaataatttttacatccctcttattttgtttcgtttttaccaaatatgtgatttttggcccaaaatggttggcccactcatctttatggactatggactataaggggttgcttatggagttgcatgagttccatggacatgcatccacaataaaggagtttctctcaattaaatcccaaaaaggatcacaattaaactaaactctcatcttcttgtttatttgtgacaatcagtagtcccgtgatccgtaaggggaaacaccgggt

SEQ ID NO: 334040 - DNA, 796 bp, Cannabis indica
aaaatttaaacgtaaaaatataattttttttacaaaaaatggtgccttatgtaattatcttttttgtttatgagatatatctcgctctagcatttatgttggaaaattaaaaagtttaaaacaaataacaaataatagtaatgacaaggtcacaaactttataactaagaattagagataaaatagcttagaatagagtaattaaaaccagaaaagattaaagcaagaaaatagtaaaaacaacacaaagatatatattggttgaagtcttatagatcgatgtgatctatgactctactccagttttgacacatcgccaaaatatctttattgattgagcaagaacaaatgtacattacagtaaagatcgatcctctattagaattctctcaaaaattttatctctcacactcttacccaagaagctccttcatctacagatgcttcttcgtacaaatccctaaacttaatctctcttttctctgtacctctcaatttcactctcgatctctgctctcaaaatcatctactgtgtttttctttctaatgatgaggatggtggtatttatagatttaggaaatgaatcccaaagtcggtggttgcaacaactaagttgttaagtcagttactacttcatagactttagtagaagaagtttctaatttttgtgttgagttcaatattaatgtgataaatatggatggtatgtattgtgctcaagggaaatcacgatgtagagctccaaagcttacaaatttttacaattttcgtattgattttttcaacagtgtgata

SEQ ID NO: 334041 - DNA, 613 bp, Cannabis indica
cataagtaattttttgttgtaaccaaaaatattcacatttagtaaaaaaaattatattgtgactaaaagattgtcctaaagataagttttttaagtgtatgaaagaaatagaattaataatgctggcttttagagacctatgaataggggtgttcattggatcacatccaatgaatttggacccatccgatccaatccaattatttattggattttgccatccgatccaatccaattgaattgagtcatccaatccgattcgatccaatggatgtattggattggatcggttccatccattggatgctttaactggttttttattagattggattggatccatccaatagatccaatggatgaatccaatccattttagccactatttaggctaatttcattaaaagaaaaatttatgaaaaaatataatttaaaacctaataatccaataataaacaatagtttaaccaaatccaacctaatttttatgttcccataataaaatataacacaaatctaacttaataagcaaaagtcttgataacaagtccaatacatcaaatgcaaatattatataaaatattaaatcaatgtgtgcaggtgcacaatgaaa

SEQ ID NO: 334042 - DNA, 892 bp, Cannabis indica
ttaggccacaaaacccaacaattcgaacaggtctgaccaatcgagaggtgggtctgagctagtgcaaacctctactccacctttgccggtgcttccagaggccatgaagggcaaggagatgctcgctcattatatgaaccaattggttcctgaggttagtgagtagctggccggtgctgacaatgactcttctctggagttgctggtgggaggagtcttgaaggagttcacaaggataagtctttcttgacgattttctttaatcctctttgcttggctcaaatactcaagtttttcctttgtgcaggccggtctgaagttggcctacacctactcccgggctaaatctattgcttccaggaacacggctctgtccaacaccatgagggcggaggtggacttggccaagaaggacgttgacgacgctagggtagaagtttgaactattcggatggagctgggtgaagccaacaagaagcattttaccgcctagaagaagatagttgagcttactaaggatctcaaggtttctgaccgtctttaggagaccatcgagactttatctgctgaagtgaacagtcttcaagatgagaggacatctcttcgagtcgtcctttgtcgggtggaggaggaagaaagcttaggaggaggagcttacggccgaggtgacgaagctaaaagagaaagttcatgccttagagacagtcggtcttgagctcttctacgacttttggaaggctaatccttaggcaaactttgactacttgggagaagctaaggacatgtaccttgagtgctgcacttcccaagtagcttatggtgaaaccgaggctgctgcttctaccttcggccaaaatgctgatatacctcccgttcgaacaacagatcctcc

SEQ ID NO: 334043 - DNA, 809 bp, Cannabis indica
tttgacgaacagaggcgtatgttcgccgagtggagagataaagagatggaggcattaagggctcaccatgcagaaatcgaagatcgtagtcggcaagctactgtgctgatacgaagagcctatcagactgtaggccagcaggcgctgaacgtcattccccttggaaaaatcgaagatgacccaacggtgaatgcttcccagacaaacaatggtcagccgtccaatccccggtcacgagttccactcgtgggccaagaggtaggcggacagaccttgtccgggaattcatcaggaggagtcatgctcgatggatccactcaaaataatggagccattccacctgccaaccaagcgaaccaatcgctaaggcagccaggttcttctgtgttcgaaaggttgggaacaccccgtgacctaagggacgacctaaacagaagaaggggagcagacgagcagaatactacaacgaatgtgcagtctggagcccatactcaaatccccgctcagaaagacgctgacgtagcccaacccgaccagaatgccaatgaagttagcccagccgtacatgcccagcttgacgaactgaagaatatgtttcatggcatggccgggcagcgtaacaatgatcttgagttagaccgcgcacgcagaactcctttctcgccagagatcaacctcctgccgctacctcacaagttcaagatgccaacgtggaagatgtacactgggagagaggatcctctctctcatctcaagtatttcgagatgcagatggatttacaaggagtgcgaggagacgtatgttgcag

SEQ ID NO: 334044 - DNA, 781 bp, Cannabis indica
gtgcgagtattcaacctagagtggcgagtactcaaactgggaatgagaaatgattaatagaaagctggaaataacattgagacaaggaattatagtggttcagtcagatcacggtctgcttagtccactgtagcaagagtttcgtaggtgccatttcacggtgggtcacccctttatgtacaaagcaggtgtccgatcggttatacaaggattgcattcattgtcaatccgtttttacacattgaattacaataattaaactatacccctttaacattaataaatgaacgacagttactaagttcatcaacgtatgcgtcttccaaatcagcgagttgacttgttcatgttctgatgttaactttgcagatttatctttatgtttaggatgtctgcgtccttagatagtcgccttttgtggacatcgcatgacgagctgatagaacctagacatgcaagtctatattggtttatcaaggctgcaggattcttaggaccaactcgcattatagaaagttggtctcctggtttatacatggacacggggaagatactcacatataacttgatatatgcgagctactctcttgtctcaaatgcgattagactttggtcatgctcgctgcctctcactgattctatcttatgcgaggtttaaaaacttcgaggagtccctcatggacacctcagcttttctttggaaatctgagtatacgtgtcctctaaatggggtctggtctcgtgtcctctaaatagaaatctcactataacacatgcccct

SEQ ID NO: 334045 - DNA, 546 bp, Cannabis indica
tcccattagaagtataaggccaaatcaataaatcctcggtatataagtcagttggaataccttggatccaagggatatcagccctatggaaatatttttcaacttcctccatgtcccaattgccttctgtggtaatgaatttttgaagcttagtattcggctgaatgctaggcctttgagtgagtattgcgcccgacggtctaggcagccatttgtcttcccaaacattgattgtttgtccatttcccactcgccatcttgccccttctttcaggatctgtcgtccccaaataattcctttccaaacccaagaagcccacggggggcattttgcatccataaatgttgagttgggaaagtagctttgtttgagaacccgagccaacaaagattgcggattatggatgaggcgccatccttgtttggctaaaagggcttggttgaattcagttagacttcgaaatccaagccctccttcctcctttggtttgcacagcttatcccacatactccaatgaagtttcttattatcttttgtatcacccc

SEQ ID NO: 334046 - DNA, 909 bp, Cannabis indica
aagtcaacccgaaagtcaaagtcaaatctcgagaaaaatcaacttaagatcaaaatcatgtaaatcaaactaggagactcatctacatcaagactacccaaaatcaaatggtataaatttattttagtctagttaaagtgttttgcataacacactaggtttcataaattcaaattttgacccattcactaacttgtgcaacaagttttcttacccgatagttcaaaaaaaattgattgaatttctaaatcacatttcatttaactaagagaacaaaattagaatttctaaaatcgaataatcgagtaaaaagttatgcacgttttagtctcgaaaaatgtaaatttttccaactgttagctatccaaaattctggttcccatccggaattccagttcacagcaaaatttttcttggaatgcaacctactggctacttttcaccccaacattatataaacttgattttcactcaaaaaattaagttggctaagcatttatgtcaaacacctaacctatccaagtgggattaatgagctttcaagtttaaaatcaaacaaacacttttcacacttttagccaaaatttatgtttattcatcttgagtgtgcttgcttatcactctaggtttttattgtattatcttaattctagagtgattttgcttgtaatttcaaacacattttcatattgtgattgaggtgaggttgacaccagtattgtaaacaacccggttatagtgagattgacactacaacaatcctacaaaagagattaatagttctcggtggtacaaaactattgtaagatgtttggaaacaccttggtgaaaatttctcgattgtaaagattagttaagcccgttaacttggctcgatattagaactcaaagctaggtccatagctttga

SEQ ID NO: 334047 - DNA, 538 bp, Cannabis indica
tgtaagaactttattcttaacggttagctggcgatctgtatgactattataatcagataaatcgacaaacgaaatctgggatgctctgcaaagaaatatgatactaaagaagctagaactaaaaaatatgatgtcagtcgctacctcaagtatcaaatggtcgatgacaaatttgtggaagccaatctcacgagcttcagaaaatcgcacatgagatcatctcagaaagtatgactttagatgaatagtttcaagttgttgtactaattgataagttacccccttcctagaaggatttcaaaagcactctcaggcataatactaaggaattttccttagaaagtttgatcacccgccttagtataaaggaggtgttgggttttgtgccctaaataaaactcatttcaatataatcagatttattagttaaaagatcagaactaacattttatgttgcatggttcacatgatttatttcatgattataaattctgctaagtccagaacatatgtacaatatttgttaatgattatagtg

SEQ ID NO: 334048 - DNA, 543 bp, Cannabis indica
tgccgagtacagtgatttagtgtggggaggttggataggatcgaggctgaccagaagggtatgtacgtttgtcatgccgagctgaagaaggcatatgagaccagccatgtagagctgaagggtggtcagaacgtaattatggagcagctcagaaatatattggccatgttgaatcgtctgccaacgacagcttcagcaccggaggccccagcagatccatctaccccactaccaactgcatcacccccactaccagctgcatcacctccactacaagaggaggaggtctttcctgacgggtatgatccttatgagggagctccagctactcccatcggtgcaggtgttatccatgtacatgacagcgagtcccagggtgaaattttggcgatagaggcacaacctgcaggggttaagagtcggaagaggaagagaaatccccctgtatggttccgtgactacacggagatgaagaagaaacagaggccttcttcgacgtttgatcccctggcgccaccggatgaataattgttggatactttc

SEQ ID NO: 334049 - DNA, 993 bp, Cannabis indica
agttcctccaagtcaataaataaaaggggcctcaccccaagtgatgcaactcacaaactcaatctcattcgctcggggacataacatggagtacactgtcaactgaaaattaaaataaatatattaatagatggaaattaacatgaaataaatgtaaagcgcaagaaacttatatttctagcaaacaatcgtatcacttcgtgcgtgccgagtgtcgtctttggcttactctcccagttgaccattctcagaaagcgatgcgacatctttactgcatactcgttgtccagcttcaggatggcgtcatatgcccaatactgcaacgctacagtattaccgtaagatgagtattttgcctccttctgactaactcccttttcaatcttcttatgcatcctatttttcacatttatgaaatctttattataagtttccatcaacttgtacgaaatctttccctacgggtactcgtagaagaatggaaggttttcaaccattcttatgacaaaaggaggaacgatagtcttctcctccttaccagtgagggcgcccataacaaataaggccatcccaaacttgtagacatcatcaatttttgtgcagctctcaaaaactcttagtagttagccaaagctgatggaaggattaccgttgaaatactccataatcaaccggtccgaacttcctttctcttcaatttcttattcagtaggtatggacaacaagtttaacccagtcactaaaccaaactccaccctaccgaatctgcatttcttcttcgcaaagtaaaagtgtacctcgtgtggcttgtcagatttgatcttgtgcaagatcaagtgatagatcaatgccctcgaaaattgtaatagttctctctcgaagaactctttgaaatgggattccttcaccctatcccatattcaaattccttaaatttggccttaatcttcaggtagtaataacttcctttgcgccaagtgacacagcctgtgt

SEQ ID NO: 334050 - DNA, 829 bp, Cannabis indica
tctgtctcatgttcaggtctcttcaggtgaggaagtatttcagacttttatgatcattgtatatctcacatttctcgccatataggtaatgccgccaaatctttagggcaaatactactgctgcgtgttctaagtcgtgagtagggtacctctgctcatagtcctttaactgccgagaagtataggctattacccttccagtttgcataagaacacagcccagaccctttctcaaggcatcacaatagacaataaacttttccttatctaaaggaagtgttaacattggagtggtaattaagcattgctttaactccagaaaacttttctcacaccgatcagtccaaacaaacttcaggttctttcgggtcagctccattaagggtacaacaatctttgagaagctgttaggttatatttagcctatgtttcgggtctgtaaagtaagcattttctcgtctattggtgtcttttggagcagttttacgcttgatttttattgtttcaggttcccggggtgtcaaagttcaatttcagtcaaatggtgaaaagacgggacaaactggcaaaaaattggaaaaatctgctcgagaggcattagtagtcgcgaccaccaatgagccaggtcgcgactctggtcgcgacatcgagattttggcaaaacctttgatttttgaggtttgcctgtagtcgtgaccagcttaaaggctagtcgcgactaggtacggacgtcatggttttgacctaattttgatttttctctcaattgaaggcacacctctcatccctatataaggaatacgactcagaaggtcaacctaagcagaaa

SEQ ID NO: 334051 - DNA, 540 bp, Cannabis indica
tggttcaagtcccccagaaccggtcgaccggttctgtgctgggaacacaaaaaccaactcccttaactcaattcaatcccaaaccttcctaaaacttccagagtacctatacaatgcataaacaacaatttccaacaagaatttcacagaataaaccaataaatctcaagttgccattaaagctcaaagcttgagtttcaaaactcaagcttgcttaaaactaacaccatgcatcaaaattaactaccagaacctttaatcaatcaaaattgagcataaaaacctaacactaaccatttctaaacttaatagcccctattactcaaaaacacaaactcaacctaagaaataagcttaaaacacatactcaagagttctagggctttacctcttgttgaatcctccttgaattctagctaaatctcagaaaatggaagggaaaaaaatctgatccccttaacttaaaactagggtatttctaaagctaggggtaaaatagccaaatcacataaccccgctcaaacccgatgatttattttc

SEQ ID NO: 334052 - DNA, 719 bp, Cannabis indica
tggcgtagtataagccctcaatcaggacgtcgccatctgtatcgactggctccccaacctcattatatcccccatagtttaggggtggaacctcctcccctccctccgcctcagaagggctactaggacaaaaattgtcctactcttcaatctcctagacctcggcatccccgtcatgatcctcctccttctcctagacgaacggatcttgtttaggactaagtaaggtggcatgtcgggccacttgaggatcagatgcgtcgattctgtgcattgtcttctttgtgcgagccatcatcctatggctagacctaagacttaagctaggatgtccgtcactcaaagaagttggactagaacaaagacgagggtgatccttgtgcaagggttgaagcagatcctggtcgatttggtgttcgcttccccaaaactcacctgggttcatctacaaaagacaacacacaagatgagtgttttgtcgggacatcgaacattaaaacaggcaaatatgccgactaggagtactgaacaggttaaagaataagaatattcaacaaaacgtcacaactcaggaagtttgaaatttttgcgagttagggcaaaaaatttcatgaagcttagaataagcaagatgagggacatgttgttaggttttatgccctaaataaaactccatttcaatgtaatctattttattcaatatcaataaagaaacaaaa

SEQ ID NO: 334053 - DNA, 1352 bp, Cannabis indica
tttcgtctgatctggtctttaaacatcttgtttaccaatctttggtatgttgccccagcatttttgagaccaaatcgcacgactttatagtaatatagacccaaatctgttcagaaacttgtatgatcttggtccggtggatgcattttgatttggttgtaccctgaataggcgtaaatgaagctcaatatttcgtgctctgctgttgcgtcacaagctgatcgatttttggaagtggaaaatagtctttggggcacgccttcttgacgtctgtgaaatcaatacacaaacctcttgggtgccagtacgggattagcaaccgaattcgggtagaaagttgggtctgggttcgggggtcagggttgtgtccctgtagtcaggtcctcagttttgggtccaaggtcaggtcccgcgtctcgagtctagggtaaagttttgggtctccaacccagttttagggcctagtttcatgtccaagtgccttcatctaggtcttgatccttggtccagatttgggtccaggttcgggtttggggcccaggtcccccatctaggtccgaatcctaggtcccggtcaaagtcaaggttaaggttcgagtttggctccaaagtttgggtccgagtctaggtcccagtatgggttcaagtttgagtctgggtccgggtctcgatctgagtccaagtccctattctggtctgggtcggggacacgatccgggtcccactcaaggtctagatcccagaccaggtctggtctaggtttgggtccgggtttaggtcctgagtttaggtctaggtttgggtttggatccgggtctgggtctgggtcttggattccaatctcggtatgggtattggtctaggcccgtgtccaggttagggtttagggttttgggtttagtgtttagggatttagggtttaggatctaaggcttaggtcttaggggtaactgtaaagagtttaggatttagggtttaaggtttagggtttagcgtttaatggtccacttccagttctggttccaatttttggtcagaaggtacaatttaaggttgggtgtgggtcttagtccgagtcctggttttggtataggtccgtgttttggttcaggtttgagtcttggtccccaatccaaacaccaaccacatgtcgagtctagttcgagttctggtatgggttctggttttggtccgagtctaggtccaggtcgaggttgaattccttcatttagacaccgactatgggtcgggtccaagcctcgggtcttgggtcctgtctcgggtcaaaatctagatcctggtccagttctagctcatgtcttgggtctggttcgggtcttaggtccaagtca

SEQ ID NO: 334054 - DNA, 578 bp, Cannabis indica
cacaacaataccttgcatcacgatgaggaggaattacgcgccgcagtaaaccttgcgtttgacgaacagaggcgtatattcgccgagtggagggacaaagagatggaggcattaagggctcaccatgcagaaatcgaagatcgtagtcggcaagccactgtgctgatacgaagagcctatcagactgtaggccagcaaacgctgagcgtcattcccctacgagaaaccgaggatgacccaacagtgaatgcttcccagataagcaacggtcagctgtccaatccccgatcacgagttccacttgtggaccaagaggtaggcagacagaccttatccgagaattcatctggaggggtcatgctcgacggatccacgtaaaataatggagtcattccacctgccaaccaagcgaaccaatctctaaggcagccaggttcttctgtgttcgataggttaggaacaacccatgacctaagggacgatctaaacagaagaaggggaacagacgaacagaatactacaacgaatgtgctgtccggagcccatactaaaatacccgctcagaaagatgctgatgt

SEQ ID NO: 334055 - DNA, 677 bp, Cannabis indica
tctctgaacccttgaaggtcattgcgttaagaaaagacaggcccttggaaaaaatataatacgcataataaaagtaactcaaacaccagaaaaggggaatctaacgcatcacacagaaactcaagacgaaaattcccagaaaattcaacatcaaacccagaaaaagcagatgaacagtgaagcatgcaatgaacacaaacaataaagtacaggatgcgaaaaacttacataaagctttagaactgggcgttgttgttaatcgacggtgaaatgttgactgacaatagcgagggaaggtcagtaagaagcctatggtgtttaagggttttctggctcgagggtttctttctctctggacaatttgaagagatttggtgaaagtctgaaagtaaccaaatgaagggagaatggtggcttttataggctgaagtgcatgtggaacaggcgcgatcacctaccaatcgtgcggttgggaaggcacacgattcgaattctcaggatccaacggctaaagtggtttgtcatcgaggcggtggaaacgcttgagtatccgtctgacacccattaatgcgccgtatcaattaaatggacaagaaatgaatcgacgcctgcaaaaagtgaatcgctgcagtaatggtgatcattaaatacaccttcacgcgcccgaagcacgtgcc

SEQ ID NO: 334056 - DNA, 1004 bp, Cannabis indica
gagtaaactatatataaatttatcagcaagttgaattttggtaagaaaagaaaagggtagagaaaatataggaaaaaaaagttaaaaataaaaaataataataaatctcatatttggtatggaatacagaaaaacatccaatccacaaaaatcttcatatcaaacttgaaaatttgatttatttatttttgttgtctacactttttttttcttatagtttctctacattttttttctcactaaaatttaatttctaaatatagtcatatttgaagaattgtattatgacttttttaaaattattgatttatatttctgagtaaaataaaaaatattatataaaaactattaaatttaaagtttgatataaatttataacttagttatcactaaacaaaatataactgcacgcgaagcgcagtttgtttcctaatttatttataataacgtgtatggataaagatgattcatctagatgaatgtacgtgattatagctattgttaattcaaaaaaaatttatagtgatgtggacatcaatgtttgacacgtgacatgaaggatgacatcacgtagttgagtagacccgagtcatagcaatccaactgggaggggaccctagctctacacccaagttgactctgagagcaacggaatggaaattcggacttcaataacttgaatccaactcgttatctttcagtattctataccatgaagacatgaagcaacctaatacaaggtttgggaactgaaattacacgaacctgcaacccggaaccaatctgggcaccgtagggtttccacccggtgcccaagttaacatccttgactagggtttcagtttctgagactgtcttattacaaagtggccaaaacatgcattaagacatcgacttgatagaccacagacatatttgaggcatcataattagattcggagcaagttgatttttgagcacccgaggccccgagcacccagcccctaggttgacaatctatcaat

SEQ ID NO: 334057 - DNA, 908 bp, Cannabis indica
ctgcaccacatagcacccgtgagtcacaagaacttagtaagaaaagtaataataataatataatcatatagtttatcattcgaatattgtcatttatataaaataggaatcaaaccatcaaacattgctcataagatgaaatctaaattaccactggcatctgccacgaataaacatcaatagatagaaatttcgtaatacaaaactattacacaataataaaattcatatttatttaatcatacaaattatatatagtttacctctataaaacaacaatcttcataacatcacattgcctaatcaagcaagtcgatgcttaaataggataattctatattgcatttcctaatcaggcaagcccgtgccatagcctgacacacatatattgcataactacatcacctaattaggtgagtttgggccaaaaacctgcacccatatatcatattattgcatcacttaatatcaggtgagcacgtgccacactttggcaccaatatatctcatcgcctaattagacgaccccgtacctatgcccggtacttatcatatgtcactgacatccgtatttacacgttaccaggaggaaaccctacaacggtttcattttatgccataacctggcaattttcatatcactgacgccgtatctacacatcgccaggagtaattgcctaatcggataaactcgtaactacgcccagtacatatcatatatcattgacgcccgtactcacgcctcatacgtttccaagaaaatcgcatcacctaatcaggttagcctgtacctacgctcagtactcattatatatcactgacgcccgtacttacgcctagtatgtcgccaggaaaattgcatcacctaatcaagtgagcctgtatatcacatgcataatatcatcaca

SEQ ID NO: 334058 - DNA, 839 bp, Cannabis indica
aaatgggtaaccaaacttaccatttttaccttttttccaaaaataggaaagctagacaactttccttccaagtttgaatacacaaaataggaaaccatattaaacacataccagccgaaattaataggaaataataaaatatttttgtcaattaaatatgataaaaatggaattaacattactcaacagttccctccatccctagctatgattaagtcaaggcttcccaacagttttgtttcgaacgtacttcttcaaagcttagggtaacttcccttactattttattcaatgaaaattttcttctatattgaatttaatcaattcattgctttgcagcaagcttatataagcaagccacaaccctagaaacgaacatgtggaaccggttttaatttatgtgtcacaatattttttgaattgattatctcttgtttttaaattataaccgatttctgagttattgtatattatttatttttagtcattttgttgtggaaatgagtttattttaatttatctaatctggttttttatttagtcaattcaaaaaataatttttgaattatttatttcagaaactagttttgaatttaattattttgggaactgatttttttatttagttaattcaaggaatcaatttttgatttatttattttatttaactagtttttgtgtgtgaatttttatcttagttgctttacggaacttgttattttgtctcaatttttaactagttaataactataatcggtttcgttatattatatttgagttattgtgtgttattatttgtgtttatttattttgttatggaaccaatttttttttttttt

SEQ ID NO: 334059 - DNA, 641 bp, Cannabis indica
aattcttgagatatatcatttggcatgtttagaaataaaaataaatctcatttgaagcatcattcgtattatcgtggcgatttgattgttttgcttggtcaatctctcatttgtttatatctaatatccatatgttttaagtcatattgtgagatggtttgactttcttctttgatgttgtgatagatactttggcatttcttagggggagcatttggtttaggaccatattatttttggcgtggattatgcttaatgaaaggggagaaatactgatcctttgtgtaaatggttgcgtttgttgtttggttgtttaaagtgtttgtttttcctgtttatttagagtctgttatattttgatagttgctttgttttgcattggtattgttgtcattgaccataatttgtcaagggggagattaagaaccagtattttctgtagtgacaaattatgtccagttgcgtctgggattcgtagtgttttgtctggagttagtactgttagtgttagtccacatcgttttaattgttcagatggtaacaactatctatttcgagattcttgatttagctaggtataaatacaactccttggtattatgttgaaaaaaatctttatgatcggagattagggattatgt

SEQ ID NO: 334060 - DNA, 901 bp, Cannabis indica
gatcatatatatatagaaatcctggccctaagggcccggggacaggccttaaccattgtttcccccaaaaaataaaataactatttaaataaagattgtctaaaataaaagcaaattagctgtaaataaaaaaaaaaaaagaaaagataagaaaaatacttggttgaaatgggttggattcagaacggcctagtcaatgcgaggaggaaggtgagggccaatgcacgcctcaagcatggcgtcaagcttcttcttcttctcccgtaattcagcaatcatctccgcaggttttgggtagaagtcaagcttgatactctggtcatttgttgaccaggccatgtagacgccatcatcaaagcgcttgatgcaacggctgcaagagataggagagaggagcttatctttcttagccttattcaaggcttggtctttaaagtccttgagctccttcagctccacgaccaagttagccctggactacaagtccgcctggtgcaattcctctaaggacctcaccttggcagccatttcgtctaaggcctccttagcctcctgaagctcgcgtttggccttggcgacagcctcgccctccgcccttaacgcttcccgatgcttcgcctccagcctatccctccgaaggacctcctctcggatcattgcctccgcttgggcttccctttgcttggcctcttccttgaacttggccttagcaagagcctcctaatgcgcaacctcttcctggaacgcccgcctttcagcagacaggtcctggaagatcttcacgacttcgtctatgcccccaaattcggacaagacgaagccgtgattaattatgtttttggaaaggcggccggcctctccagcaagctggaaaaggaagcaagagtgagtaaaggcctta

SEQ ID NO: 334061 - DNA, 968 bp, Cannabis indica
acttaggcatcaaaaagtacatttccaggacgttttctcacttacccagcgtccaagttgatgccatatgtcaacttgggcgctgggatgtcaacctgagtgttggatgtcaacttgggcgctgggcccagaacaacctttagtaaaacggtcataactcacccaatattgattcgattgatgcgagtcaaattgagttttgaaactatttcaatgatctatcaagtcattctcacacttcaatctcaattctgaagttattgacctcaaatttcaccccaagagagttacgaaaataaggtctgggttacccgcggtgggtcccgctaggctccgaaaatagctatcaacttcaaaagttaattttgattgttggattatcatttatagttaaaattagtcaatttagatttttttttccatatttttaattattttttccctatttttgtggacctccttcacctataaaagtagagctcttttagtttattattcatattcaaaaaattacccacaaggttattagagcatctgtctttaatttctctctctagaaactaaagtttaaacacttagcctttttttgtaattaccatctcgcaagaaataaaaactcaaagtagacgtaactcaattaccatcgagacatgaggagtgaactactataaattatgtgtgtctctctaaattttttacttaaactcattattcatctcgctaatttagtaagctggtagccacttttcagcgtcaatattttacatttgagttactcctctcattaagtatctctcattaagtatgataaaattgttagaatttattggggtcacaattgtatatataaaatgtgtgttgggtcatcaaataaataagtcaaatttatgtggtctattttggaataaagtttatgacttaagggcatgattgttatgattttaatatgtggataccaattagacaat

SEQ ID NO: 334062 - DNA, 1095 bp, Cannabis indica
caacctccattactgtacaaaaaaaaactcaaaagcaacaatcagtgaaaaaggaaatcgcattcagatgtgaataatcgaatagaagcagatctgtaaatcattgaaactcacacatggttgaatcagaaagagaattgaaggtaatacaatttttttgcaagaacatcgtgaaatcttttattgtcaaataattgaaatttgttattgattgatgaaaaccagatttaattgaaataataatgaaatgttggtgaatatcaaaaaaaaaaaaaaacattaacgcatataaataggtgctacagtgttttattctgtaaacaagttgtttacaagttgtgttcaagtaaaataatagttgtttgggatctgcaaactagaaaagatgaatctattgttattaattactgattgcttttaaaatagttgtttgatagttgatttaacagatttaaatagtcggccagatgaaagtgttagatgcataagttattgctggaaagagttgtttattggttgttttgacagattaaaatagttgtttgcaactacaaaaactgaaccaagtaaataatttacattatttcaggaaacggaaccattacaaatattggtgcagagcaatgggcattgggatgacaacaaaaactatgttgattatgaatcaagtggagaattaatttcgaccaagtgcacttttgaggaactaatgagaataatgatggaagaactccaatgcaaccatgaatcaacacaactacaactgaaatatcaactgaaggaaggaggccaaccactacaaatcaaggatgacaaaagtctgttgttctacataaagctattaacgaaggaggttgatttcacaaggtacccattgtgtgtgaacaaaaccagtaacacggcaccacctaaccaaacaatggtgtggaacaatatgatcatggaatcgtatgagaacaacgcagcacaggaagacttgcagcaacctggaaacaacacggcaacaacttccaagcaacaattctgcgcagacgatgggatctggtgaagttgatacatttttcctagaaacaggaacagtgtcatcagaatcaa

SEQ ID NO: 334063 - DNA, 807 bp, Cannabis indica
gtttgatagttgaaactttgacactattacaatgtctattttagttatataaatttgtttttttatataattattcgaaattagaatcaatattcgagttggaatcacatatgactaatgtttttttaaaaaaaattagtgttttgaattattattttctagtttttttttttaatcttttttagctactttctaaatttttattttagttattttattttattttttaatttttttttttgttatttgagttttttaatttttttttgaatttttacaaactatgtaaatcagtataatttaacaaaacatactaatacaatttaatactaaaaataatattgtacagaatttatataaaaattatacaatctaatataatataatacacaacataatagaagaaactaaaaaaaagactttgacaatatttttaaaattattgatgatgaatttttttataaatttgtcaacaattatatatattgatttcataataatatacaatttgaaaactaacagtataataatatatatttataataacttaattacttaataattattatttattaagtttaaaatatttagaaaatataaaactctataatatatatatttgtgttattaaaagtactacaaaaagttacttttagtgataaatttttatcacaacataaattttttgtaactaaatgttacttttagtcacaacaaaaagttactcgtaactaaaacttaatatttagatacaagttgtcactaatttagtttagtcacaacaagtattgtgactaaaaacacatt

SEQ ID NO: 334064 - DNA, 1246 bp, Cannabis indica
gaaattataagaggcagctttgcaaaatatgtttacaaaggaggtttacagaatgaggtttacataaggaggtttacagaaggaagtattaaaaaaattatgaaaaaatttggaaaaccgcgatcatgtgctctgcacctcctgacgcacgtccccatccaactgtcactgacgtcatcctttcttcagcccactttgacatgacctccatcccattcaactgacactgacgtcagcccccctcatccactaagcatgctcaacaaacaaaacatgaaagaaataaaataaaatgaaaaaatggtaaaactaacggtatattcaataatttaaaaaataacgttattattagaattaaatgaaaaaaaacgtgtccagatgtaattttattatatgatatttgaacaataatttttagtatattttaaagtttctaacacatgattttattatttttcataactggtttttttaagttactagttttcataattggtttttttattgttattcataattgagttttgagtttcaattaattgggatatttaacaaaaaaaacttaatttatttacgtttttatagtgtattggacttttttttttcttttttacttagtttctttgtgtttttttacttttttacataaaaacttttaaggaggaggatgacgtgccatttggcgcgtgtattgattaaatttgtcaggttttttttttttttttgaattgctagcgccacattttaaaaaattaaaaagtaacttagttatatataaattaaattagttatttaagatgaaagggtgagatatataatgtgtgcacagtactaatgactatatataaatgtagggatatgattttatcttgtgattgtactttcatggaatgtattccgtgatgtacggcagccgttagatgatggagttatttgatctgacggctgagattgatataggggtaattaaggttaaaaagtagaaacgtactctgacactcatttaatgtaccctgagacccatttaatgtaccacggaatacattccgtgaaagtacatcacgggaaaaaatcgtatccctataaatgtaatactaaattaaatttattttgattaaaaaaacactatattttattaactaatgacattattatttattttaatattttaatattatttaaatgtcatttgctttctttttattttttattttaaataattatttaatattttaaaaaataaaaa

SEQ ID NO: 334065 - DNA, 745 bp, Cannabis indica
taaaaataattttttttcctgtggcccactttattttagggtcagccatgtctgggttactacctctaagctggagttttctgatgctctttgtggggaagcaacgacttgctgtttagccatggaggaggcgaaggctcgtggcgttaagtttattattgttaagagttattcaagggtagtgatcaatgctcttaatgggaaggagtcccgttgggagcttgagaactatgtctcattttgtaatagatcctctcctttttttgttggttgtattttcgaacatataagtagacaatgtaatttcactgctcataatgtagctaagtggacgttttcctaacagaggtttgatttcatgtcgctatcctttatgcccgataaactcttttgtaacgaccgcgaggtctaactgcttttcatttatatatatgcacgattttcttaaaaaaaatatgcatatagtatacatatatgtcatatagaataaagtacgtacgagctatatagccattgtgtattgcttttcagttactttcttcagtaaattatggttcaaactacaaaatatataaataattgtgtccaagttatatattatggctcgagttgggtaagtaagaattgaagcatgatatgagctatgttatggttggcacatctataacatcattggaaggatggatatggcaagtcgttcttgtccttttgtgattttgttttaatttaaagtttgttttttttt

SEQ ID NO: 334066 - DNA, 1366 bp, Cannabis indica
cgatactagggtgcggttctaggtccctacccagtattgtgtcccgggtctggttccatgtttgggtctgagtttgagtctaggttcaggtcccgagttcaggtctaggtcacgatctaggtctggtcccggttagggtctaggtcagggttggagtacgggtcctggtccgattgcggttcggggtctaggtccaggtctggttacggtttgaggtccaggtccaagtctttcttccggtcccattcagggtcccggtctacttccggttttagttccaatttaaggtcacagggtacgggttcaggtttaagtttgggtgtgggactgggtttaggtctcggtctgcgttcggctctttgtttgggttcgggctggtgctggttcccagatccagacaccgactacgggttcggttctggtttagttctagttctaggtcctggtccctgtcctgttcttgggtctcgatccacttctagttttggttccagtttcaagtcatggggtacgggttcgggtcgagtttgggtccaagtttgggtttaggtcctcatttgggtccggggcaaggttcaggtctgggtttcagtctcggttagggttttagtttgggttcggttctgagtttgggttcgagtccaggtcctgatcccggtccggttccagttcaagtttcgggattttttcccgagtgtgggttttggtctgggtctgtgtctgggtcctggtttgagttcgagtttgggttcgggttcaggttctggtctaagtcccaaatccagaaaacaactacgggttttgtccaagccctgggtctagatctggatcccaatctcgggtcctggtttgattgcatttcgggtgttaggtgacgagcttggtcctaggttcaagccaagtctggggccagttactaggtcccagtcctagttctgttgcttaggtgcctatcgcgattttgggtctaggtcccagttctgctccgggtttgggtcctagtctagatttaggtttgagacctaatcttggttcgggtttgggtcccagtctgggtttttatctgggttcgggttcgggattaggtccgtgtccttatccttatcctagttctattccagttcatgttgtgattccaagtttgagtttgggtttgagttcaggccagggttcgagtccttgtccgaattctggtttgggtttgggtcctagtctaggttcaggtttcagtcctagtcttggttagggtttgggtccagtctgggtttttatcttggttcgggttcgagattaggtcctggtccttgtccttgtcctagttttattccagttctagttgtgatttcgagttcgagtttgggttcga

SEQ ID NO: 334067 - DNA, 873 bp, Cannabis indica
accccatctcaacccggttccagtagggggcccgttacctcaaggggcaccagggggtgtacccggagcactagcacccgttgtacccccaaggggagcaatccctcagcaagtcccggggctcccaccaagaaccaatgggagagtcgccatgatctctggtgggccccatattgggggaactaccagaaaagagttaaaacgctacgttagagccataaagcacgatgaagtgtgggaagtcacccagcttccagcacaaagacctcgactcatggaccagcccattactttcactgaagaggacgcgaaactggtgcgtttccctcgccatgaccctctggtcatagagactcctatcgccaataaaattgtggcaagaatattgctcgataatgggagtaccgtgaatttgttgttcaaagaatccttcacaaccataggcctcacggatagggatttgtcgcccagcggctcccggctcaaaggattcaatgggaccacacttatcccaatgggaaaagtgagagtgccagtcactctatgcctagatacccctcagagtacttttaagtactgcacctttgtggtggtagattgcccaaccgcatacaacgccatctttggccgggcggccatggttgacttcggtgcaatcacatccatctggcacttgtgcctgaaatttcccactcaggaagctggagtaggaaccgtgaggggtaatcagggagaggccaggcagtgctataatgttgcagcacatttgccggtgctagtggtccatgagggcattgaaccaactttggtggaagaagatgagttggatcccagcgtgggatccaaaaaaaactttagagcctatggaggaca

SEQ ID NO: 334068 - DNA, 760 bp, Cannabis indica
gagaaaacaagcatgcttcctctccgagagacgaagggcgtatgaaccccttcagactagcgaaactggagatgaacggttacctcgcatttaaggcagcatgagggaagcgtctgggaacacccataagaggacgtgttagacgtcataaacccgtcttttagcaattacacgataatcaagggtgcaagtgatggctccattatgaagaatcacatcaatcaagaaaggatgaagctaatctcacctaaaacctaggcagcctactacgtaggttgtgcatgccctgttttatacatttgggaacttgtgcgtgcccatggatggcacttaaagacaattaagacctttcttcttcctaccaatcgctataataccccttaacaaaattaatgaggggattggaaaaagaacacagaaacatcctctgtaagaaacacccacctattaataatagagactcgtggactacgactcattaatgcttgaaccacgtaaaaatatgtgcattactctccctaagctatcattattacattaaatatctggttgctgaaaacctcagtcaacattttggtacttttattgagagttgtgggaagctttgtccaaagaacaccaacagaagattcaaggtacaatggtggagactagaaaccatacacgccagtctcgtcccccccaagactcctagaatctaggggacgaagtgttgggttttatgccctaaataaaactctttacaatctgattagttatc

SEQ ID NO: 334069 - DNA, 1417 bp, Cannabis indica
aaaagaaggacgaggatcttgatcctcaggttcaagatgaaaagaacttattaaaactaattgaagaattggaagaagttgttcttgacccaggaaatcccgccaagtgtgtttacattgggaagaacttggacgagcaattaaaatagcaactaataagtttcttaagggcgaatcaggatcagttcgcctggagccatggagatatgataggggttgaccctaatattatctgccatcatttaaatgtcgatccaaactacccagcaaagaggtgaaaaaggagaccttggattctgagagacaaggggcgctaaaacaggaagtggacaagttattagtcaatgactttatacgcgaggtgttttacccctcatggatagccaatcctattctcgtcccaaaatctaacggaacttagagaacttgtattaacttttctgatatgaataaggcgtgcccaaaagattgtttcccactacccatgattgaccagttaatggatgcaactgccgggcacgagcttatgtcatttatagatgcatattctggatataaccaaataaaagtgcatgtccaagaccatgaacatacaagcttcgtaaccaacatgtgactatactgctacaaggtcatgtcgtttgggctgaagaatgctggggcaacatatcaacgattggtgaatgaaatgttcgcaaatcagattggacaaaacatgaaggtttacgttgataatatgttagtaaagtcagtataaagtgggaatcataccacagacctcgcggaatgcttcaaaatattaaagaattataatatgaagctaaactcgaaaaaatgctcgtttggagtatcctcaggaaaatttttgagattcatagtcaaagcgaggggtatcgaaacaaaccctgaaaaaatcaaggcattgatagacatgctatcaccaacaaagcctaaagaagtgcaagcattaacacgaaggatggttgcactcaatagattcatttcgaagtcaactgataagtgttttccattcttcaatgtattgcgaggcaacaagaaatttgagtggatagaagagtgtgaagaggcatttcagaacattaaaatgcatctagcgacgcctccagttttggcgaaaccaataactggagaaatgttactcctctatctggctatctcaaaagatgcgattagtgcggctatagtgcgagaagagggtaagcaccagcaacctattttctatgtaagtaaaaggttattgggggcagagtctagatatccccctctcaaaaaaatcactttgtgcctagtccacgcatctcgtaagctacgaccttacttccaggcacaccccataaaagtgttaaccgatcagcccttgagataagttttatcaaaaccagatgcttttggaaga

SEQ ID NO: 334070 - DNA, 592 bp, Cannabis indica
aaacaaatggtgacaaaaaattaggttgaaaccaggatcactcattccagtgaaaccattaatgttgaaactttccaaagtcatttcaagaggtatgccaccttctctatcagcattacctaattaagaaataataccaagtggattattattattaatttgttcataagaattttaatgaagaagatttagcttgacttatcacatatcttcacatcattaaataattaatactaactatagtatgaacataaaactttatatattgtgagagaaaataatgggtaaatactattttggactttgtgttttgtcaaaagttactgattggactctctgttttgttaaatgacaaaattgatcatgtattttccaaaatggtaaaaataggaccctgaactgatttttgttcaaaataaaatttaaataataattcgatcgaaaagtagtcatgacaaaacaagtttacattttcttgtatctgttcgtatatggttatattaaaaaaaaagttaagtcaaaattaaagttaaagggtccgtatttgtaccattttagtaaaataacagggtccgattttgttcatttaact

SEQ ID NO: 334071 - DNA, 524 bp, Cannabis indica
taaaaataaaaataaacataaaaaaacaacttcaaaaattaagataaaaatataatatgtatacattaaaggaatgcaatatatattaatactgttatcttattttaatatattaatggaatgcaatatatcttattttgtagataaaaattgcccttataataaactccaccaattatataagccataatctatttataaattaagatttgcattccatttatatatttaaaaatattaaaaaaaaaacatattataaacatataatattgtatataacacacactcaatgaaaaatacaaaccaaatctgccaaaaataacaaaatattttttttcttaattaagcataataaacaaataaaatattaaataataataataatagtgatcatcttatcttcatttaaaaagtgaaaaaaaaaaaagtgatcatcttttttttttttttgagttcagtgaaaattttatttaaacactttcagccattacaatagacttaaaatcagcagaaacattatgctg

SEQ ID NO: 334072 - DNA, 633 bp, Cannabis indica
aaaatagactcgttttcgttggctaaaagcgaggtcaacaacatatattaaaatatttgtattatgctaataaaattatatatcactattatccatagcaaaataaataataaattgggtaaataccattttagtttctgtattttgcaaaatttaccgattggaccatctgttttattaaatgacaaaatggaacaagtattttttaaaatggtaaaaataggaccctgagcttaattttcgatatttttttttaatacaaccaacttaacgataattcctaacacgaatagatacagaaaatgtaatagttttattttgacaaaaaactcagttcaggtcctatttgtactattttagaaaatacaggatcttttatgtcatttaacaaaatagagggtccaattgatcacttttacaaaacacagggtccaaatggtatttaccctaataaatatcatctaagaataataatatgccatacaacaaaataaaaatatattgtacaaaaaaatctatatactaacaacccacaacagcctataaaaagttaaaaaagtcgacatagctttagaataaattttttttaacaaaactaaaaaaagatataccataatctttaagtaatttgct

SEQ ID NO: 334073 - DNA, 1076 bp, Cannabis indica
aaataaggttttaaacttacccatgtgataaaactagccttccatcgcattttccgttgttgccgagcaaaaattacaaaaattgcataattcacatataagacaaataacacccctagggtttaataaaatctttcgaattgagaaattttaattctaatgctcatttcaaataatacgtccataaataattaaattcataaataattataaaaataacagaaattagtgcaaattgcctttactaattcaaattacttaagtggtcattacactgcccattgttttcttgactcgaatgttgttttgcaccattcattatctgttagttgttggctttggatggcgtctaatcatcttgattcaaattcttcctcttcgtagtagttgtacatgagatccttaaatgtttttaagaagatcggatctttaacctttttcgaagcatttgtattgagatgccaagcgcagagacggtgcgtaacatcaggcatgtgttcaacgatagcctgtttcatggccgcatcttggtcagtaactacaacacttggcttcttatctccatggcattctagaaatttttgaagtagccaagaatatgatggaagcttctcgtggaggaggagagcaaatccgaagatgcatgtgttgaaatggtggttgacgccaatgagaacagtgaggggcttattgtactcattcgtcatgtaggttgtgtcaaatcctagtacatccccaaaagctacatagtccacgcgtgagtttccatctgcccagaataagttagccaagcgattctcgtcgtcaacctgatagacaacgaagaaattaggatccttctctgcgagacaatcaagaaatcccagagccccttctgagtccgtctctatcttctcttctcgcttcgcaccagcaaccctgttgtacacatctcgaagttgacatggcattttctcgtaacctccactttgcaaagcaacatgagacattatgttggcagttttaattcctacggagttcatcgacctgacttgggcaagcaacccattggagacaactctatatgatctcaaaaa

SEQ ID NO: 334074 - DNA, 649 bp, Cannabis indica
gacatcttattcaaactttgatgtacagtttttgttttttgtttgctagatatgttgtttagagatttatttattgtgtacttttatttttataaaccatcttattttttctcactttctactaaattccttttacttttttgggtaattcttgtttccacataatatttatctaattcttcattagtcagtcaaatgatcaatcaaagatacttaatttgctaatcaattgttctacccaaaccaaacaaatacattttattgatcatgtagttgtacaaaaactctcttttggaattgattccattataactttgattatgaagattaggataaagttacaatattttgttttagcttttttaggttattctatcttgtctttaaataactttttatcaaaattaaaataaaaccttaaataaaacaaatattacgtggctagacacgtaacatctacatagtatatatatactcctaaaattattttagtatgaatttgatttttgatcttatcgtatcatataatatatatatatagaatacttctcaatgggtattacacattggtgggtaccaaatgaatttaaccataaatattaattttaaaaatattaaagcattagattttgatccaatgacaaataat

SEQ ID NO: 334075 - DNA, 1051 bp, Cannabis indica
attcaccaaatcaaaaattgaaaaatcaaagagggttgagatataaagagaggttcgggtatgagggcttgaaaccagaaaaatcaccttcatttttcttcaaattcacctctttaatttaatgtaaatcaataggtcaaaagaccattttgcccttagggcttaattactcacccacacacatacaagggtagaaatgtcatttcacatacacataaatccaaatatattttcagattattcaccaatatttaaaatgccactaaatcaattacaattgcatttcgggcccgaacccgattcggcccgagacactcggttgtgactataccgcgccaacctgtcagaacacacatgaaaaagacaacacagacatactatataataatatagtcccataagcacgtaaataaattaatttcactgttttacccttctcgagtcaaaattactaaaatgcccctagctcaccaacggagtcttacctagtataaatcatataaattctcatatattaaattatataataatataatttctcaattattcataattatctagttaaggttttgctaatccatttcataattctagggtagtacactatgggttttcaatccataagtcatcagacccctttacaagtatttttgtttcataccaccgtgataccctttcccaatcatcgtccctgaaacatcaaccgaatccccttacacaataatatctcacttgaataacatcacatgcattggtaatctgggtgttgacctgggtgacagtgttgccttccttgaagctaacaataattacgtgactgacctaagctcgcaactggctgggagaaaacttgggttccttgggtggagcttcacagcttaggtagagctttacggcggctaggtttagggaaagggaatggtggtggatatggatggctaagtttagggtaaatctgagtcgcaaagagagagattgagagagagtttctgaaagagagacggtgggggacttgtagagagtgaaagcttagagagagagagagagagag

SEQ ID NO: 334076 - DNA, 622 bp, Cannabis indica
aaagatcattttaatttttgttttataaatttgtatcaaaaatgttcggaaacattactaacaaaagcaattgcagattcaatatagtctcaaattaattgacttacactaataataatttcacattcacagaaaaaagaagacattccattcctggtcttttgcaatggacaacttgatgatcgaatgaattataaaaattatgaagctagtggacaatacatctcaatcgattgtagatatgatgaactaatacacaagcttaaagaggtcctggaatgcaaccaagaaaacattgtcctgcaactaaaataccaagtgaaagaaggataccaaccgttaaggataaaggatgatcaaagcctacatttctacatagaactaaaactgaaggaacataacttcacaacatatccattgtgtgtgaacgtcatcaacaacacaacaacaaccatcaatccatcattcttggaaaatagtaacacattagttgcgtagacaaatgcaatagaaccaatggaatacaatgcaacaacatcaaaagactcaataactcaataacatacaatgcaagggacaatgctggaagatggggaaattttttgacttcatggactatgca

SEQ ID NO: 334077 - DNA, 710 bp, Cannabis indica
gtaaataaaatagcaaaattgaaacatgtagggcccacttataggttcgaccacttaagggattaataagccattattttatctttttttaattccatataatttaccctagatgaaatcctataaatagaaagagatggctcttatttttttaatctttcatcagactaccttgtcagacaactaaaaaaacaaagagagagtctctcttgaattttgaaatctttttctttcttcttctaattttcgaaacctatattgagttgagtgctttcccacacatttcaagtcaatactcaaatatagtgtggaagattgtgaagaattccatcatccaaagagatcaaatcttggtaatactctacgacaaaaaggaacaaagattagagatctgaacggaaggagtcattacattctgctaccacaaatgtaaggttttatataactttatatgtgtttattgtaattttttaggaaattcacaggatgttagattataaaattataatcaacataaatgttagtaaatctagatcctcgttaaacaagttccaacaggttgttcatcttcggttggaccctgtcttgatagcacctgaccacgtcttttgacctttttaatttagaggcttcggggaaagatgttttctccttatactttttgctctgaggggtcggatgttaggttttatgccctaaataaactcttt

SEQ ID NO: 334078 - DNA, 1310 bp, Cannabis indica
tttaatatttcatagaaaaagaattaaaaaaagattattgttttttaatctccaataataatctattttcatctccatttatatataaatcaaactcacatatatgtactaatctttagatttacactaaaatatatatgtattcattactaaaataaataagtgagtattcatatttaaattcatgtgtctgtctatgtgaataagaatatttttttttgtattttttataaaacaaataaaatacaccaacccaatatatttctaaaaaagattaagaaattagaagtttatgtctttttttaatattactaaaaaaataatatatattatatattatagttgtttaaaaatatatataattaagtgctgattggattggatcggttactttttaaaatttacgaattggattggattggatcgtgcggattggattggatcggatacttagtgaacactcctaacaaaaagtgcggtttgaaattctttgcggtgcgttgcaatttgtgttttcgccaagcgcgcgatgtggtgttgtttgcgattttgaatttaataatcgcggttcaaattacaccgcattatatattacaaaaatattaaattttacattataatttctcttttttatatatgaacaactcatatgcttacaaaactatcaagtcatacaattaaatttaaggaacactcttataaattattctcattttttagttttttgttaacttcttattattagcatattattattgatgtgtatataatgtatatatatatgtacattatataattttttttagcgagaattcaatacaataacttaattattatatatattatgacattaaaagtttgataagatattttttgggttattatgtgttatttgttttacttatttttttttttggagtcgattctgtttatatttagagtaatttgcggcgaaaatacttaagtttaacttcgagttgtacttaaatacttaaatctttttttggcggtaaaaataccttctgttaggtttttagtacttccgtaggtacctaaccgttaagtgccaaattagtgtccacgcgtcactcatttattggttcatttcattaaatttttatttatgatttaaatgatcatgtaaatgtttaaaaataattttaaaatcataaaaattaaatataatcaaacttttatatttttaaccattatttctttaaatattatttaaaaattaaataaaactttttttttaaattaaaaaattacaaaattaacaaacacataaaacttaaaatctaattcctaca

SEQ ID NO: 334079 - DNA, 975 bp, Cannabis indica
gtcttccccttcagttgataaaaaagatcatcaattcgaggtaaaggatacttgttcttgatggtaagcttgttcaacttccgataatctatacacattcgcagagacccatctttcttcttcacaaataataccggagcacccaaaggagagtaactcagcctaatgaatcccagattcagtaattcttacagttgtatcttcaattcttttaattctactggagtcattcgatacggtgcctttgataatggttctgctcccaaaaccaactcaattacaaattcaatgtcccgggtaggtggcgatcccggtagatcttctggaaagacgtcaagaaactagcataccaatcttgtactctcaggtctagatgtcacaagttggctggtatccactacagtaactatgaatcctagacaatctctgctcatccggtccttagctttcaaaagtgttattcttggtatgcgtgcccactaaactttacccacaaacactgctgggttagcactatcaggctcaaacaccaccatctttcgcttggagtcaatcgttgccccatacttagatagaaaatccattccaaggattatatcaaaatcaaatagttgtaattctattagattggtggttcattcacaacagtcaatctacaaggacaaggaccgaatccacctagtggatactataaggtctcccgaaggtagcagggtaccaaacaccaaagcataaatatcacatggtttatggaaactttcaattactctactggacacataagaatgagtagctccgagtcaaacattatagtataagaacaaccatttatagacaactgacctgtcacaactgacggactagcatcagcatcagccagagtcttggtaaaaattcgtcctgggttatgagtagtattcttcttaggctcctctttcttcgcctgaggacaatctctgataaagtggcccacca

SEQ ID NO: 334080 - DNA, 1145 bp, Cannabis indica
accctagctggagtgggtctcgccggagcccttagtgcctctgatctgagctggggacaatccctcttgtagtgtccgagcatgccacactaaaagcatccctgacctctacactcacctagatagtgccttttacaactggggcgctatgggtaagaaaaccgcgtctccgcaccacactgatgactgcctatactctggttccctcggaacctcttgttctgtcccgagccaccggatgcagtggatgttctcctcttctgctccatggccgaaccactacctcccctgctgaaacctgatgcaggaacggtaggagccccgccactcactggagtcctaaccgactccgacatacatccaactacgccctcagctcgcagtgctttctccaccatctcagcataggtggtcttgtcgtctgtagtgatcattagatcatgcttgatctttacattaagtccatcaagatatttttccttcttactgaaatcagtgaaatcggtaggcacgattcctgaggctagcctcgccaaccgatcaaactgggtagtgtattccgtcacactcatattttctctctgggtcaggtgtgtgaactattttctcttggcacttctaacggcctcattatagtatttcgtgttgaagagctcctgaaacctttcccaggtcatagttgtgacgtcttgaatcttggataccatgtcccaccacactaaggcatcctcttgaaactgaaaggtggcacacaccaccctgtcattaccggtgacacccataaagttcaatattcttgtgatcatcgttagccactgctcggctttcatgatgtttgactcccagaaaaaccggaggtgcctgctttcggaacctttcatacaagcattccattctatttcccgctactactattttggcctgagcaacaggggcaggtgccacaggaacttctgcaccggcactgcaggagcaccctgctgcctcaatctctgaatctcactgtcttgctcctctattctggcttgcatttcagcaaacctagtttcccaattctaggcttcctgattggcttgggcagcctgtggcgggttatcatcaccccgaccacgagccctgcccctgggacctctaccacagcccct

SEQ ID NO: 334081 - DNA, 761 bp, Cannabis indica
atgtgtgtatatttttttattttcttttatgtgatatgatgaagaattattcagtggattgtatgaataatggtaagtttcttttgctcaattattgtcattgtaggataatggctcgcttaactgtaagtgaaagacaaattttgagaaagaagaagatcatgactctttatatgtattggatgaatgtgttgcatgtagtgcaatggttttttaaattatgggaaaaattattgaacatagtattgaatcaagctctttgggaagacaattatacatacttgatatttttgtcaataggcaaattgtgcaccaaatagcttatgagagtgatgtcatttgttttgatcaacttaggatgaataggaaagcatttagcactttatgcataatgcttgaaactaggggtgggttaaaagcatctaaatatttacaagtagatgaacaagtggctatgtttttacatgtaattgctcatcatgtgaaaaatagagtcgttagatttcgatttatgagatcgggtgagacaattagcaaatattttcataatgtgttacattcaatcattcggctacatggagagttattgaaaagacctgaacctgttcttgaaaattcaacagatgagaggtggaaatggttcaaggtataatatatatttcttgaattcttgaattaaaatggtttaggtggaaatggtttgtttgtttgaaatactaataaaaaaaaatttgtttatgatatggtagaattgcttagga

SEQ ID NO: 334082 - DNA, 656 bp, Cannabis indica
atagtgggatcgtgtgtatgtcacatccacgtaagttgatccctgagttgtagggattgagttggtgactcatgatgcgttaagctgaattcgctaagtgttgctcattctgcacggctcgttgagtattccattcgggatatgccagcgaggcatcctgctcggcatattgatccgaacagatgctccaggtagagtccacgtgtcaccattctcgtgatgccacgtcagagtgcaaaatttgggataacaaacagataggtggagattttccaagattgaaaatgaagctcgaaatcttctttattataatttttgaattaattgttttaatttatgaacaatttgatttcaattattaatttgcgatttttattccctatttttaatattattgcagacaattcattttattttggagaatattacaataaagtttctcttttggtaatgaattgcatttatgaattgagcttcatatttctttatcttgtgtatgccgacaccaattatatttgtatgtttataatgtttatatgtgtttgtgttttattattgatccaaaatatatggtatattcttctctgcaaagggataataccacataaacactttgaattttagttcaatgtttatgaataattgttaattctgaa

SEQ ID NO: 334083 - DNA, 727 bp, Cannabis indica
attcaatcttgttatcttctttcctttgaatctctttagagcttagagcagccttgacttctgtcatggtgagaaaatcttttccatatagaatagtgtcaacaaaatgttcataggctttaggcaaggagcttagtagaataattgcttggtcctcatcatcgatcttaaccccaatgttgcataaatctagaataattttgttgtagtcatcaagatgtcttcttaactctttggattcatcaattcttagagtgtagagtttcttcttgaggtataatttgttggccagagatttcttcatgtaaatctcagaaagtttgtcccataatcccaaggctttctcctcactagagacttctcttcagacttcctcacccaaacttaacagaattgcactgtgtgctttggtttctatttcaaacttcttcttcttatcatcaataactgctagagctttgaaatccaaggcctctgaaataccttgatgaaccaacaatgctttcattttgattctccatagaccaaagtcatttgtatcattgaacttgtcaatttcgaactttgagctggacattctcgatcttcttggtaagttctttgaagaacagatttgattcttaaattgccgagatgaacctcagctctgataccaatttgtggaggcttgaactcccaacaagaactaacacaacaccaagaataacacacaatgatcaagaacaca

SEQ ID NO: 334084 - DNA, 947 bp, Cannabis indica
taagtctattgacggctacactgtgaagagtcacatcagtgaaaagacaataaggatattccacataaaagccctacagtacctagggatttgaccatgcattactcatggtatattcattgggaatgcccatctttatggatatttacagatacacatgtacaataattctggggatcaccccaccaaaaacactataaatacccctcaaagctcattaaagggggtcgagaattttgggttgcataattgcaagaagagtaaatactcaccaagaacattctctatattcaatacatccataaatatacagactcgtggacgaaggctcattaacgccccaaccacgtaaaaatccttctctaattttcttacagttctctaagcttatattattttattggttgccgaaaacctcggtcaatattttggtgctttcattgagagctgaagaaagcttctacaaatacacgttacatttcaaaaatggtggagactagaagcactcgtcaacctcgccctctagaggatgctcaagatccaaatgaggaagacgtagcctcaagagcagctgagggctccgaggaagaagaaggaattcctgatgatgactacgagggaaacctcgatgagtatgcctacgatgaaggtagctactcagagttggtgcttctaaggcaaaaagctatcgatcacgaagctgagatcgaagcccaaaaagcacaaaaccaaaaaatgcaagaggtaatgctagccatgcaaaaagccatggaggcggctggcatccacgtgcatcccaaggcaatgactgctggacttggcaaggaaccagaggaatcctcgcctagcacccaacagcaaaagtctagggaacctagccccataaggtatcccgctgaagggaaccaaaagaaaaatcctacctctacccctgggagaaagaaaaa

SEQ ID NO: 334085 - DNA, 834 bp, Cannabis indica
taagttacatgatcaaaaccctaatctcgggaaaccgaaaaccatatactttctagtggttaatctaactctggaaataggaaaacacccaaccacgatacggaatggacgaaaattgagaaaatgaaaggcccggggaaccttgccaaaaccggctagcctgtacgtgttaaaccggttacccggtttgcaacagttcacccaagaaatttcatttcttgcgcactcctccaccaaatgcaaccaaacctttcagagttcctaattagggtatacacaatatattacagccagtatttcacagaaaaatccaatgaaactcaacttgccatgaatgatcaaagctttgagttcaaagctcaaacttgcataaattcaacacagcaccgctaaatcagccattagaagttaaaaaccaatccaaatgaaccctaaaatttgaaacctaaacatcgcaagccctaactgccagtaacccatgaaatcacaacataaaaccaattaaaccttgagaaaacttagttaaaaatgtcgagggttaccttagcttcaagggtgcttgatttcttagcttcaaaccagccaaacaccaagatttgagggtgattccctctgatttgtcccagccgaaagagagagagaaagagttttaagagatatgtattttttttttctaatttttgatttttccttcaaatgagaaaagagtttctctaaataattctttgctgactaaaggaggccacatgtcacctccctaggcagccaccacactacccctttaaatgactaaaatgccctttaggttaagacttaaatatttctaaagctagg

SEQ ID NO: 334086 - DNA, 1549 bp, Cannabis indica
ggaaatcactcatagagtctacgagaccacttttcttgatgtctttccatagctctccaagaatctcgatgccccccagtatggcagctagattcccttcttcagttaaccatgctacttttgtggcctttgtcatgaatctgcttatgtaagctcagagatgctcccctagtttttgcttcactttgagcaagtcttctaaatgcagtgggagttggcgagaagaagagaattgtgcatgaaacttcgaggagaaggctttccaagagttgaaccttcctagtgacaacttgaagtacaactactgtgcggcttctaaaagtgtggcagggaatactctgcagcgcatatctcctcgtaccccttacaaattcatttgcatttcaaaatacttgagatgcgataagggatcttctttcactgtgtacatcttccaggtcaccattttgaacttgaggggtagctatagaacattgatctcaggagtaaatggggatccacgtgctcggtccaactcgagatcattgagcttttgaccgactaggccttggaacatatttttcaattcatccaactatgcttgcacggatgggtgaacttgttcgacctcttggtcgatcagtgccacatcacgatctttttgagctggatcttggatgcggataccgagctgagtgcctggttgaacatattgtttgtctagatctctccttctattcagatcatccttgagatcatgagcagtttccagtctgtcaaatactgaaacaccaggttatctcagcgactggttggtttggccggtcagttggttagaaccgctagtctgggcggagttattgggtataaccccacctgatgaattgccaaataaggtctggccacctaccacttggcccacaggtggaacctgtgatcagggattggacggctgaccgttcagagtttgggcagtatgcccagcaagaatttcttccgagtcgcccagtgggatgctggacgcaggttgttggttatcaacttggtaggctctttgtatcagtacggtggcctatcttgtttggtcgtcgatggctgcctattgagccttcaacgtttccatctctctgtccctccattcagcaaagtgacgcctttgctcttcgaacacaaggttcactgcagcacggagctcttcctgatcatgatggaaggtattagttgttgaaattatttttccaggatctagatttactaacaagtatgtttttgacatcctaaacatgaacttctaaaacgatatgaaataaacacatataaagtttcagaaaccttacagtggttgcagcagaatttaatgtctccttccactcagatctctaacccttgtatcttgtctgtagcagagtatcaccaagatctgagtctgaatctccttctcttgaaactggattcttcacagcctactctagggttttggttttgaagagagaaagagagagaggatttcaaaataggtagagagaaggtggctcaaaattttactgaaggaaagagtttgcatcatctt

SEQ ID NO: 334087 - DNA, 514 bp, Cannabis indica
aaaattaagaaattattaaaattaatttgtccattacaataaaaaatatattatcttaaataaaattagaaaattgtctttaaataaactttaaaacataacacttgacataattaaaaaaaacctaactatcattgttcaaatcagtaaactctaaaaattcatctgcattcgagctaagtcttgaaccatcaatattctcacgggattgagcaggcggggtagggtaataaggttgtccagtctgcggcgtaggtaagatctccacatattgtcgagggtgcgggcgaaccaaaattggttgttgctgactctgagcactgaaaaagcttccatacataggctgttgtggagatcctcccatttgaccatacacaggttgttgctgcaacaatgacccaaattgaccgtacacagggtatggttgttgggatgagcctccaatattaccaaccataggttgtgtctgagatcctccagcggcatccgaaaaaaatataggaggagactgtga

SEQ ID NO: 334088 - DNA, 694 bp, Cannabis indica
gcaaaattacagtttctagaaatatacaaaaaattacaacaagtaaaagaagtagagagatgtttgcattgtcttgcgtagttctcaagctgccaaaaggattcgacaccctttaggttcttgatcaccatcttagaatcactctccaccataacaaaagggtgatgcattgtggccgccgtctccaaagctaacatacaagccgccgcttccccaataagagagtcagtgaaggaagcttgttagtcgccacccacaaaatcgattccgtatgatctctggcaattgccaccacacacatggattccaccccgactctgacatcgcagttgatcttgacccaatcctcaggcgggggggaccaacccagagtatcagcaacctgtcgagacttgagcaaactggatccataatcagcgtaacaataatttatagaatcaatataatgtttcaagctacccatattgttattatgaaccttgtcgtttcgagccctccaaatcgtgtcaaccacgatagaagcataaaggaataaaccatctgtatccactcctctggtcctaaggttccaaagaaaactaacccagtcccacatacgggccccagattccacaacaggcataactccccaaggggaagatctccaaaggtgagacgccagatcgcaatagagaaataaatgctccatagtttc

SEQ ID NO: 334089 - DNA, 606 bp, Cannabis indica
ttttgtggctgattatgagtgattgtggaatcttggaatttgccaactaattcccccattagctccggatttctagggatgagaatcgttgagggatcgcctttgctgggttggccttctcgccgagcttcgtcccgtacagcagcttccgaccggagccactgcgccccaaaagaagattgccgtcgttgtgttgttgccttcaattccaagctgtaaggcttctcatggaggtgtaatggcttcagaaacaacctcgggcagaacttctccgaatggcctatgatgccgcatatgaagcagaaggtaggcaacctctcgtacttaaagttcacccagtaccacgaagagtcctcgttgatgatcttcatacgacgcttgattggttttctaacatctaatcgaacccgaacacgtaaatagtccctccaaacacccacaaagttattcggatccgattccacgaacgatccaataaagtttcctagtgccgtaactacactgagtgtcatattcccggcttttaaattatggaattgcacccacatatcgacatgattaatctccacaaaccgaggattttcgccttcctttaatctagtaaaa

SEQ ID NO: 334090 - DNA, 854 bp, Cannabis indica
atgagacataatctttgaatttcatcgatattttattcgaacttctctgagaaatcttgaatgatgtatcgccatagctcatcaataactggtctgttgtccatgtatgctttgctggccaagtgtcagccaggccattaagcaaaatctgttaacatggttcaatcgctgacaatgtgaacattacttgaaaagaaagaaaaaaggactactaacgacaagaagtaaaaggccttctccataaataaggttctgttttattagtgttagtaaaaataaatttaaaaaagtcttcccactttaagaaaattgtgatgtatttcaatgaagtgttataatgtccgtgaaaaagcaaggtctctattttcaaggtgcaatgtatacccataacacttgtaaggaatagggaagaagctattctaccatctaaattcagtatactcttgcaaactcaaaaagtaaactgttatcaacataccggtttcttcccatcatactcgcaatagaactcttctaaagaaggattttcctttctatccacatttcccttgtcaaaatcaaaacccgccaatgtggtatagcacctgtatagtcttttatagaggaaccaagagttgaatcctgagacaaaagtaacaggcaatggaaaaagctattttagaagtactcaaaaaaaatatatataataatattaataataattgtcaaaaaaaacttaccctaataaggagaagtattataaatattccttttgggaaatttcggtgttagaatttttactgtgtttacaaaaaaaaatgtcaaccaaaatatttagaggagtacgaattacaacctcttagtcaacttccacg

SEQ ID NO: 334091 - DNA, 503 bp, Cannabis indica
tttaaacattgtattcataaaaaaaaaaaacaattaaagtttataatttagatccaagtgtattattattattattattatatatgtatttaatatatgtatatataatatatgactttttattaataaaacgtataatataattcattctttttcaaattatatatataaattatttttgagaaaatatttgaaaaaatgtcagctttttcttatgaaatagctctggatgttaataaatctcagcatttattagcaagcaaccatttgaatatatataatattaattaatagaaaaacggagggaatgtaagctgttaagtgattaattgttgtggttaattagttaaatgacatggcattgtttaattggtttgacagaaaattagacagcaaattttgacaggggatccaagtccctatcattatcttctttctccattcaaccatttattaatattggcaatagtttgactattttcatcatcatctttcctttgatc

SEQ ID NO: 334092 - DNA, 469 bp, Cannabis indica
gacatagatcaatcaagataatgtggtatgaaaattacatgcatggtgatctattcatgtcaattttcaattggtcctactttattttatggagatcaaaactttagcttaaatatacaaagtgaaataaactgaataaaataatttttgataagaaaaaatatccaaatacacacgtttcatgcatgaaactaataaaatacactaaggataataaagacaaactcccattgaatctagatattctcatagtctaaaacacccatacgagtagtgtgctcatgaaagaccttgggtggaaaacccttagtaaggggttctgctatcatggagtttgtacctaaatgttttatacaaatttatccactttgcaccctttcttttacaacaagaaacttgatatcaatgtgttttgacttcgtcaagctcctgttgttgttggaatacgatacagctgacttattgtcac

SEQ ID NO: 334093 - DNA, 700 bp, Cannabis indica
taagtttctcatctttttctcctataatgcttgaatcttctattttccgggtttccattgtagaaaattcaatagtcttgacttgttctagggaaaactgtagagaatctaggtttagaaatatgaaattttgactgcaatagatcatataactcggctattgtggcatttcgactttaacttcacgatattcgattctcactttgcccattcgaggtttagtgaagattaacccttaattcgaggttttgaaatttctgggttatgaacctaaatcacatgaaattttcctctttttaatattttgattggacctggtcggtatactttgcttgttttttgttcgacatctcggccaaatacttatcttgtgtcttatttttggtagatgaaccctggtgagttttggagaggagaacaacatatcgactaggatcttctccaacttttgtacgaggaccaacctagtctttgtgctagtctgtcttcctcaagtgacagactttctaattcaagttttgaggactgggaagtaagtagtgagggtacaccttcgctagaacatgagatcgcaggtgaaagctacaggcgtttcatttgggaactcagaaggggtggagacgatacttgcagtccaactgggcatatatcgtccgaccagacgtagctgacaccattcccgtgttgggttttatgccct

SEQ ID NO: 334094 - DNA, 565 bp, Cannabis indica
ggttaataccgttacgagtaattactcttgaaacgacggttaggtttcttacttatcgtttgcttcatcgggcaatgatagtgacatatacagctcgtggttaacgagtggtaaaaggagtactttataaagtaccaagattgtgcttttatgatgttatgtaaatgtgtaagcatgttgacatgagatagagctgatgggtattatcagttattgtttatttcacttttcttgttgagtctctgtgactcacatgtgctttatggtgcatgtaagaggaaagcaaaggttgagcagccatgagctcgaggtcgtagctgcaatgtacatatcagtcgcagtgtatcggtcaaatgaacaggatgattcgttttgatagtattttgggattacaaagtttatattgtaaaagtactagtaaactagtttgtactattttgaaaacaaggggtccccatagttctcattacttatcttctgctataaagaagttttaacatgcttgattttaattacaaaaaaaaatttaattacccacacttttggtataattatatagtatcta

SEQ ID NO: 334095 - DNA, 1013 bp, Cannabis indica
agaacataaaaaggcatctcgcaatgcctccaattttggcaaaaccaataacgggagagacgttgtttccctatttagccatctcgaaagatgtgagtagtgcaggtatagtgcgagaagagggcaagcaccaacaacctatttactacgtaagtaaaaggttactaggggcagaatctagatatcccctctagaaaaacttacgttgttcctagtccatgcgtctcgtaaactatggccatacttccaagctcaccccataaaagtgttaaccgatcagcccttgagacaagtgttatcaaaacttgatgcttctggaagattgataaagtggtcgattgaactgggctagttcgacataacataccatcctcaaacatctatcaagggccaagctttagctgacttcttgatagaaggtataagtctagaagaaattccatctgattagcgaggcgaggaaacctggaggttatacgtggatggcgcatcgaacgagcaaggttcgggtgcaggggtaatattaatatcaccagaaggctttaagtttcactgtgctatgagattccaatttgatgcatctaataacgaggctgaatatgaggccttgattgtcggattaaagacaacagaggcattgaaagtcaaaaatctcatttgtcatagtgattcacaactgatcgtgaaccaggtcctcgggaaataccaggccaaaggcttaaaaatggcgaggtatttagagaaagttcagaagaacttggaaagattcggttactttaaaatcaaacaaattccgagagaacaaaagtccaacgttgatgccttagctaaactagcctcgcagaatgacctggatgaactgaatctagtcccgatagagatgctacgcgagctaaatatatgtggaactgaagatgtcaagatgatagatagctctccaacatggatgacacctattatcaattatttactcgacggacaacttccatatgacaaaaacgaggtgcaaaaac

SEQ ID NO: 334096 - DNA, 879 bp, Cannabis indica
cgggcccacccttcgaatgagagcgtggtcccttataaccagcaaacacatgtcaaggaataccgtcgtcgctttttcttctcctccgggttccgggctgtggagcacccggagctccttacgaagtgggttaggatccctccgtacgagcggaccgcgcctactcagatctttcttcagcgggctaagacctttgcgacttacgatagggcagatctcgacgtcgggggattggtcacgacggagaactgccggaaggccaagctgatcctggctcaccagtcggtggagggctccaatctttctaaggtcctctgcccgaacataagggttccggccgcggagaagaccttccgctatgagatcatcgccaccgcggagaagaggtaccaggactacctctaccggaaggcccaagagaaggcttataccagggcccaggcagcttcagggaggccccttcgcgttgggagcctggtcgagaggaggagccaagcggctgccgggggatcccttcgcattgggagtctagttgagaagagggctcccaggccaaggccgatcatccaggtgccgatacaggggctcctgacgccaacacttccggctctggtaagtctcctttagcaatacattatgtccctcctgttagcgaatatgctagccttaggcctgtagggttcgatgaacttctccttaggtttagaatgccctcgacccagtggggagatcatgccaaggactattatttctccaacttaggagattatttaggtcggtcccggatgggttctggacctccggagcccgttcccctggacccttcggcctatctctcttctagctggttccgacctcggacaactatctcggggatga

SEQ ID NO: 334097 - DNA, 577 bp, Cannabis indica
cttaaaacatgcttttaccccaacaatttcagcaagaaattaacagtaagtttcaaataaattcaataagaaactacctcaattcctaattcaaagcttagcacaataaatttcccgagaatcaagctccaaccaaccttttcctcacaaaaacaagttgaaaaattgaaagggcaagagagaaagagagagtcgaccaagagagagtgaaaacccagaattttctttccattcccctcaaaaatcaattttatcaaatgtaattaattaaggtcaaaagaccaaaatacccctagggccaattcccatataatcacacatacaagggtaaaactatcatttcatacccaaatattttcaaataaaattcaggttattgttgggtttaatgccctaaatgaaactccatttcaatgtaatctctattattcaatatcaattaagaaacagaagcatttttcattcattcgtgagttatttggttcatgttatcaattacttgtctatttgatttataaattcatccaaacccttttcacatttatattcttgtttattgtgtcgtcagcacagtgga

SEQ ID NO: 334098 - DNA, 695 bp, Cannabis indica
gggaaaaacctaactggggggattagttattcaagccactttttaccatattacatttcttgcaagtaattttctagcaaatatagcattaattttagcaagttaattacaatcattttaattttgaatcatttctcaaccattctcatatttttctttttgctataagttgtaattagttggttttacatcatatttttgtttgcaatccctgtggagaccatcttacttataactttattacttttgtgactacgtatacttgcgtacgtaattttcacaatagggtgcaccgtataggggatggccgactagtgttgtcttttggcactaatcttgagcttgttttgttttcaggcctttatgaagctaagctttttgcatggtaaatccagggggtcttcgagtgctcatcggaagtaggtaaagacgctggaggctagttttttggcgaagggcaaggctttggctaatatggagactcttggcttgtagaatcaaaatatgatttctaatttggaggtcatgcttagcaccaagaatcaggagaacacccttgtaacgccctaaataattaggcacgctacccaaaaatgattatgaaaccctaatcccctaaccaggattactaattaaaaatagcgcagaatttaaacttttatattaaacggactgaaaataaacttgtaatatat

SEQ ID NO: 334099 - DNA, 703 bp, Cannabis indica
tcatcctcgtcgtcgttctagtcttcttcgagtgacaggcattcttccttaaatcttttgtcgagccatagtatgatggctcgtaccaaaaagacaatgcgtagggtcgatgcatctgaccctcaagtggcccggcacgccaccttacccagcgtagaacaagatccaaccgtccaggaggaggaggatcatgaaggggacgctgaggtccaagagatcgaggaacaggacgatgtctgtcctagaaattcctttgagacgaaggaagaggaggagattgcacccctaaactattggggatacaacgaggctggggagccgttgatgctgatggcgacgtcctagttgagggcgttgactacgccagtgaggaccttactgttgcagttcctcatagaaggcaaggtactttgggtgccagggtgggtgagccctccatccaggtttactgaggcgcgcctgcaagatctcgacaaggatggctacctgggcgaattggactgttacattcccgcccacaataatcgagccataaaccttgaaaggggaatttgcgcctggtcgggtgctcatgcccagcaaagggcattgctgcctttgcacccgtactttaggaatgtggcaacttcttccacctctatccgacccaattttctccaaagggcattaagtatttgtccgccctctttgttctctacgcctc

SEQ ID NO: 334100 - DNA, 797 bp, Cannabis indica
cacataattaatactatttataacaattttgatatttttgtgtcttaggttatttatatgctttctcttaacaatgagcaatcttaaccacttgaggctaactcaagtggccataggtaggtgtgtgtgtgttggaagtcttgggttcgagtctcagctaaaacatgattgtaatatataaacgcttaaattaaaaaaaataaataaataacaatgagcaatccataattaaatggctttttcccatgtattttgtaaaatagatttaaaaaaataaaattatatagtacacttttataatgtagtgttgtggtgataattcttgttgttttgttcatcattcggctaataaagtgatccatttactatttattatatattaatcattcaaaaaaccttgtaataaaaaatccatttacatataattccaagagcttttgttataaactacaataagttggcttaagaacttttcataattaatgattttaggattcgtttggtacgtcgtattgtaatgtattgtattgtgttagattgtattgtattgtattagtattatttaatagggatattggcggctaaactacctgaactttacgttttgtaacacttaaccacaaaaaccaaaattttggcggctaaactacctaaaccctggttgcgttttgctctgcacacatccgtccaaaaatcacagttaagtgccacggtggactgtccacgtgtacacacttgtacacgtggcaaatttttagtggtccacgtaatattagttttaaaaaaataattataaa

SEQ ID NO: 334101 - DNA, 1112 bp, Cannabis indica
acccacctgctggagataacaaactcaccagtaggcagcaaagttccaaaaccactagaaagtacatcactaggtctattcaacttctcaattattctacttgaaatataagaatgcgtcgcaccatattcaattagaacagtcaataaagtaccagcaacagaaagctgatctgtcatagtgcaaggaccaacatcagcctcagcctgagtcagggcaaacactcgggcaggagcgagtgtttcatccttcttttgctcttgtcataataggtgtgggcaattcctcttcatgcgacccactacccacagtgtaaacagaccctcgcctgacactcgccctgatggcgccttttacatctcaggcattcagggaaagtccgccacttttcgttcccaccacgacggatgccttgattatcctggaacctcttgtttgggcctgcagttgatgattcactaggtcttttcttgcggtcaccgagatcagtacccctaccagaaacaatacctgatgtttgcttccatgaatctcttctggcaatattcttctttcgtatctgatcttctgcaccctcagaaacttgggccagttcaactatctgggcataagttcgagcaacccccggttgtttagaagcaacaatcatatcccgtgcgatatgttcatccaaccctcgaatgaactttgctttcctagcagcttcagtagccacctaatctgaagcaaactttgcaagtcgatcaaacttagtggcatactctgtcacagtcatgctgccttgagtcaatcgtataaactcttctgcctttgccgcccgaatagactcattataatacttctcataaaataaagcctagaaggcatcccaggtcatgttattcaggtcatgaccctgaaacacaatctcccaccaaatacaggcatcatctcgcagcatataagtagcacacctaactcggtcattatccttgacccgcataaaatcaaaaatggatgttatcatactcatccactattccgccttgagtggttcggcaccaccctcaaatactggcgggttctgcttcctgaactgctcatacaacggttccaaacgattccctacatcc

SEQ ID NO: 334102 - DNA, 630 bp, Cannabis indica
gcacaaaacccaacagatttctcaagcaacaaaccttttccaattttgagtttcctggtcgggacacttgggtcgatttctatctctcccaattcttccactggcccaacatttgtatttggttccccaagttagggatccacatctttgttccctatctggcaatgcttttccccttgttcgaactctgaccggaggattcttcctttttggccttggtcagggcaaggttgtaacattctcgtgcaacttgttggtttcctcttaggcaccctaccccattctttgttgggaacttgatgcacgaatggaaaattgatgtaacagcttttaagtcatataaggttggtcggcctaagataacgttaaaggctgatggaacatcaattacaaggaatttggccatcacagttatgctcttcggatcttgtccaacagtgagaggtaggcgaatttgccctagaggtgaaacactatggccggagaaaccatacactgattgggtacaagggattagatctttgagttggagccccatgttctcgttgttgggttttatgccctaaataaaactcatttcacataatcagatttacttattaataaagatcagaaataacattttatgtt

SEQ ID NO: 334103 - DNA, 1071 bp, Cannabis indica
tcggaccacccatcggaccacccattggaccaccatcagacccatcggaccagatctgctaccaagttttttttttttttatgtttttgtacatacaaaagtagcatcaggtgaccatcggaccaccatcgggccaccatcggaccccatcggaccccatcggactaccattttttttttaaatgtttttgcactaaaaaaaagtatgggaaatttgagagaggtatttttgggttttagataaagtgatcatatattttcaatagtgatatgtattagtttagaaataaaatattaggtatatgtaagtatagaaaatcaaattttccttaatttattttattatgtgcgcaattaatagactactgtttattatacttgttacaaaaattaataaataaaaataaaacaaagtaatagttataatatcaatataggattccttacttatggtttttattattttcttgtattcatctcatttgtttatatatgtatgcttggaatctttggatatggttgaaaattaggcacaagactagttacatggcatgttctaacttcttaatacaaagtttcattattgttgttgttggatttttttcttttaagaaaatatatttttttcaagagattcattattgggaacatgtgtttttgtatataccaatttattttttaataactgtgcagtaacaaagaaaaaatagaaataaattgtgcaaatttaaaacttgacacaagagaattatatgtggtatcattattctttcaagcattactaattcactatagagaatgaaataaattaataaagttaggggtgttcattggatcacatcttatggatttggacttatccgatccaatccaatccaattgaattgagtcatccgatccaatccgatccaatggatgtattggattggatcggttccatccatcggatgctttaactggtttttattggattggaatagatccatccaatggatcaattgatgaatccaatccattttagccactatttaggctgatttcattaaaaaaaatatatgaaaaaacataatt

SEQ ID NO: 334104 - DNA, 797 bp, Cannabis indica
cttatggattcgcaggctaagtcctttaaaatggatgccccccaaaatacaagaagtcagggtgatatgattgagaccggaggtggtcagagaaatccccaaaatcctcgtggtcacggtcatggtcgtggcagagcttagggtggtcgccctgtaaatccaccacaagctcctccggattgggagcaaagatttgcagaaatgcaagatcggatccgccaacaagatgaagagattcagagattgaggcagcagggtcctcctgtcgtgcctcctcaacaagtttctcaggccgctgcagttccagcagtcccagcagagcaacctattgttggcaaccgtatggagccgttgtacgaaaagtttcggaagcaggcacctccagtgtttctgggaggtccttatgtaatgaaggcggagcagtggctcacagtgattgagcgtatccttaactttataggagtggttggtaatgatcggatgacttgcgccactttctagtttcaggaggacgctctcgtgtggtgggaattgataaccgtcactcgggacgtcacattgatgacctgggaggaattcaaggagttgtttaactctaaatattacaaagaggccgtctgcagtgcaaagcgaaaagagttcaccgaattggttcaaaccgagggaatgtctgttacttagtatacgacaaagtttgaccgtctggccaagctcgctgcgggaatcctgccaactgacttaagcaaaaaaaaagaaatatttggctggtttgagtgcgaagattaggcacgatttgg

SEQ ID NO: 334105 - DNA, 869 bp, Cannabis indica
aggcgttcataaagcttaggatctcgtgcccggctattgcatccacgagctaatctattcttggaagtggaaaacagtctttggggcacgccttgttgaggtcagtaaaatcatacatactcgccatttcttgttgggcttgggtaccagtacggaattggctacctagtctggatagaaagcttcatgatgaagttgttattgcgtagcttttctacttcttcctttaatgcttgtgcccgctctttgtacaacaatcttcttttttgctgaacgggacagaagttcgaatcaatgtttagggagtgtgaaattatagaaggatcgataccgaccatgtcttcatgcgaccatgcaaaaatgtctagatttactcttagaaattttatcaatgctgattttacttcaagcagcaaacctttgccgattttgagtttcctggtcgggacatttgggtcgatttctatctcttctaattcttctactagcccaacatttgtatttggttccccaagtcgaggatccacatcttcaatccccgccttgggcggctccctatttcgcaatgcttttccccctgtccgaactctggccagaggattcttcctttttagccttggtcagggcaaggttataacattcccgtgcaacttgttgatttccctttaggcaccctaccccattctttgttgggaacttaatgcacgaatggaaaattaatgtgatagtatttaggtcatttaaggctggtcgacctaacataacattaaaagctgatggaatatcaattatcagaaattgtgtcatcacagttatgctcctcgaaacttgtccaacagtgaggggtagacgaatttgccccaaaggtg

SEQ ID NO: 334106 - DNA, 690 bp, Cannabis indica
gttctaattttgggtcccaggtctttgtctgtgttcgggtttggttcttcgtgtgggttctgatcctagtttgagtcccacatctagacgactactactggtctgttccaggccctgttacccaaatcccgagccaagttctggatcactgtcccatttctgagtttgggttagggatcgagattggggtgcagtactaggtcctgaccctagttctgtgtccccagtctgattccatgtttgggtctaagttcaggtttggttttgggtctcgagtccaagtttgggttccgatccggttccggctccaaattcaggtctaggtcttatttggagtccgggtcctggtccggttacggttctggatctaggtcaaatttcagttatgattccaagtccaagtcatagttccactcttggtcaacttctggtgttggttccagtttttggtcacagggtacgggttcggatccacttttgggtttgggactaggttcatgtccgggtgtgggtttgggtccctgtcaaggtccaggtccagggcttggtcccaactccagacactgattatgggttttgtcctagccctgggtccagatatagatcccaatctctggtccgagtttgtttccatttatggtgccgggtcacgagctgcatcataggttcaagttcgggtctgggtcgggt

SEQ ID NO: 334107 - DNA, 913 bp, Cannabis indica
aacagtgaggggtagacgaatttgccccaaaggtgcgacactggtcggagaaaccatacacgttgggtacaggggatcagatctttgagttggagtcctatcttttcatatggtgttttgaacaaaatattcgaagaagctccattgtctatcatagtccgagccattgttttattttctatttgtacttccacgactaagggatcgttgtgcgggaatcgaacgtggatagcatcttcttcaatgaaggttatagtgggttcccctacccgtgttagttttagcttcctttcttttacagtcaaaactacttcattttgttcgtgttgtaaagttcgggcatacctctcccgagctttgcctgaatctccagcgatgtgtgggcccccaatgatgacttgtaatgcccgtccactagtggtggcttgggcagcccgcggccatgacatacttttgcacatgcaggttatttttccttatcaggaattaaattccccgcttcaggttgttgcattcatttgtgtcgtggtcatagtcaccgtgaaaatggcaaaatttggacatatcccgcttgcttatgtcctttttcatgggagcaggttttttgtacgggaccgcagactgggttgccgtgtagattgtctctaggttgtcagttagaacaaagaaggcagtgaatttggaggcattttctctaggggtttgttcgaatttgcttgcaaactttattttcttcccgttaccttgtttgccattgttattggatcttttattgctcagagttgagctgctaggatactggggtttctgagcagatgctcctgccgaggggacctgtggtttgcccgacctaagttcgacatctgctcgatgaatgcctcttcgagcttgataaacccatctgctcggtcta

SEQ ID NO: 334108 - DNA, 1023 bp, Cannabis indica
aaacattggcttaaggctatggatgatgaaactgaggccttagaaaaaaatcatacatggattgtcaccaaattaccccatggacacaaagtcattggatgtaaatgggtttacatagtcaaatacaatcaacaaggggaagccattcgttttaaggctcgccttgtagccaaaggattcaatcaaaaacaaggcatagattatgatcaaacttatgctcctgtagctaagtttaacacactcaaaaattttcttgcacttgctgcaatgtacaattgggatatccaccaagttgacatcaacaatgcatttctccatggtgatctccatgaagaagtgtatatgaaaatcccacctggttataaagcccctcccaacagtgtgtgtaaactcaacaagagtatatacggtctcaaacaagcctctagacaatggtacgaaaagttgagtaccaccttaaaaactgaaggtttccaacaatctctttctaacaattcactattcataaaaagaactccaactttccaacttgccattctcatatatgtggatgacatcatcatcgctagcaacaacaaggctgccatcactcaatttaaatccttcttggacaaaaattttccctcaaggacattggaccacttcggttctttcttggtttagagatagcaagaaccaataaaggcatatcaatatctccaaggcctttcaccttgcaactcctaactgacataggttacctaggagcaaagcccacttcaactcccatggaacctaatctcacggttagcaaggacaagggaaacctcttacccaatcctaccacttatatgtaaagaccgcttagtttaatttggaaattagcagtttatcatgtttaattatgaaaaattatttatagctatttaaataattatttatactgttattattgaattctgagatgcattttatgttattcagtagttttcataattttgcattttccggtgcccggtaacaaggaactcggtgtttggctca

SEQ ID NO: 334109 - DNA, 517 bp, Cannabis indica
tccagtgatgtgcgggcctccaacataacttgcagatgcccatctaccggtggaggtagtaaatcctggttattgtcgttcctctgaccctgatcggtcttcacatacttctgtaggtgtgggttgtttttacttatcaggaattcaatttcctacttcaagttattgcattcattagtgtcctggtcgtagtctctatggaatcgacaaaactttgtcatgtccctcttgctggcatctttcttcatgggcccgagcttcttatatggggccagcgactgagtttctaagtaaacactttctatatcttcagtcagaatagtgaatgcaatgtacttggcatgattttcctggggatcttgttcggatttgtcggtgaactttccctttttcccattcccttacttgtggttgttgttggaacgcttaccacttgaacttgaattattcaagtaatggggaagttgggcggatgttccaatagaaggagcctttgacttgccaggctttttctcac

SEQ ID NO: 334110 - DNA, 502 bp, Cannabis indica
ttttgaactcaatcttgaactttccatggtgaaattctattctgtgattgaagcttggttttatcacttagtttatgttcattagggtctaattagcaggtctggaaggttgcatgaagtttggggttgaattggttgagaaatgaaattttgaaaaattcctgcactgaatcggaattccagttcagggaggcctgtaagaaccggtcgactagttggggcttccaggaatttttccagaatcggaattccggttgtagaaccggtctaccggttggggaaaatttgggaaccctagttgttcccatttttgtgttatttagggtattgccatgttatttatcgatagagaatcttctagtttctagtttaagtccctggtaagttatttagtgtgtcacttaacaatgttgtgattattatgatttaggagcctgtaattcgccgagcagatcgttccactttggttgaccggcacacctgaattcggaatcgaggtaag

SEQ ID NO: 334111 - DNA, 710 bp, Cannabis indica
aaaacaagaattttgaaaacaacaaaatgttgttttctgttttaaaaaccaattcacttttagtcaatattgtttttaaaaaacattaaccaaacatgacttgtttttaaaaactttaaaaattattttttgttctcatttctaaaaacaattttttgaaaacaaaaaacagaaaacaataccaaacatgctcttagtaattaacttcaaacatatttattttaatttttttagctaaacatctaattattatgcatcataaagctatatataatgtagccaaccttttaataataataataatgggtgctcaattttgttttatgatattttagtacatatatattttggatatatgagtgttgttgggagacatgcagtcaaccctatttaatatttattattaattattataattttgtatgacgaaacacaatatttatttaattattaaaattttattacatgattaaaatttaagaattgttatataaaaaatataaattaatattttatttacaaaaatatatttataaggtgtggataatatttatacattttatgtacttttaattactaatatacctcttacactatcacttacacaatcagacgatggttgcagagtggttgttgggtgattaaccgaaggttgcataagacaaagatttcaatcagacgaaggttgctgggtggttggccgaatgttg

SEQ ID NO: 334112 - DNA, 540 bp, Cannabis indica
ttggggacggatacaagttcataaaaatacaaaatttccgccgggcggggagatccccatccgcgggcggcataaaaaataaataagcctgagagcaggcgataagcttgaggaatgagttggtatggcgcaaggccgacaaaaacaagaaaattaacaaagtagtcttgaagtgggagcatggcaccggccatcaggtgcgtctggctccaggctccgaagccgccgtaattatggttaggcgtctccgagtcgcgaggtggccggtgataggttcccgaggtggaaggcttgatccccgcaacctccacaatattctccagttgatggggacaggttaaggtggaatgaagctcagccgcttcccacccggttgctcgggacttatacccctcctgggcaacgggtcccagggaaacctcctccaaagtagccatgcgtttcccgctcttcttcgaggacttcgaaccagaggcagacattttctattctgtgaaaaacaaaagagaaagagaaaattccagcagttaggccccatac

SEQ ID NO: 334113 - DNA, 610 bp, Cannabis indica
ctaaaaatactcagctacacaggccacaatactcaccaaagaacactgtttaaccaaataaattttgaattgaaattctcaaacccggattcactttgagttggctgaaatgtgcaggcgtcaacttcttgctgctgaggtcgaatttgcttgctagggcttgtgacggtggctggttcgtggttgtgctgaaggtgtgcgaaatgagggctcggtggtgaaggcgagttcgaccctgtggatggatggacgagtgatggtgactcacggaatggtgaaggatgcagagtggtggttcggcctgtgagtcgaggtggttgggcggaggatgcgagcttggtggtgcgaaggtgaactggtgcgattttggtgattcgaatggtgggttgtgaatgaggtggttgggcggaatgaggtggggtagtgtgcggatgggagtggtctgtgcaggggtgggtggtgcggctgggttcgagcttggagattgactggggtgtagcaatggtggacggctagggagaggttgaaggtggtgtgcggctagggttttcaggagaggaagatgaaagggataggctgatttgggggttttcttctttccttttttttt

SEQ ID NO: 334114 - DNA, 663 bp, Cannabis indica
cacgagcaagaagaagtgattttttctatcaaagagaggaagccaaagataccacgggcaggagagcccaccataacatttactgatgaagatgctatcaagattaatttcccgcacaacgaccctttggttgtggaagtcctgatagccaacaagatggtggcgcgaaccatgatagataatggaacaatttttaatattggacgttccatttgcatttcatgtcatgttaggccaaccagctttatatgacttaaaagctattacgtcgatattccactcgtgccttaagttttcaacaaagaatggggtagggtgcgtaagaggaaatcaacaagtttctcgggagtgttacaaccttgctctaaccaaggcttaaaaagaagtatcctctagccagatttcgaacaagggaaaaaacattgccaagtagggaaccgcccaaggcggggatgaagatgtggatccccaacttggggagccaaacaccaacgttggtgcagtggaagaactagaagagatccaaatcgaccaaaatattttgaccagaaagctaaagattggaaaaagtttgttgctcgaggtaaaatcagcactgataaaatttctgagagcaaacctagatatttttgcatggtcacatgaggatatggtcagaatcga

SEQ ID NO: 334115 - DNA, 509 bp, Cannabis indica
gcatagacctacgtgttacgctcacacgtctaattacaataaggccttagaacggttcatctcagttctagttaccgagtccaacccgattatgccttcaacacataacccttaatttaaatatacatctatatacaacacggcataacaattacatattaataatttactagggtaataaccctaagctaataaaccgctcactttagagtaataactctaatcacggttgctagttttttatatttatcatattccatataagcgtcattgcgcatatctctacgtgctaactactgtcttacctgatgtcccgcaaatatggagattctaaatccccgggtgatcctgaccaagtaccggtaatcctagtacaattcggggatacacaagtatagggttaatccctaaatccatttctacaaattataaactcgcatttaaattctagatattcacatagagctcggaaagagctttccaacgatacaaaaaacgtcccaaacgga

SEQ ID NO: 334116 - DNA, 328 bp, Cannabis indica
attatctccacaaccaccccaaaaccatcactattatcattgttatcccaaatttgacactctgacgtggcatcacgagaatggtgacacgtgggctctgcttggagcatctgctcggaacgataggtcgagcaggacgcctcgctggcacatccggaataaaatattcagcgagccgtgcagagtgatcaacacttagcaaattcagcctgacgcatcatgagtcatcagctcaatccctacaactcagggatcaacttacgtggatgtggcatacatattatctaggaattatatattcagagatactattgaaagagctataaga

SEQ ID NO: 334117 - DNA, 941 bp, Cannabis indica
atttttgcatggtcacatgaggatatggtcagaatcgatccttctataatttcacatgtcctcaatattgatccaaatttctagcctggtcaacaaaagcgaagactgttggacaaggagggagccttggcactaaaagaaaaggtagagaagctacgcaacaataatttcataattgaagctttctacccgacctgggttgctaatcccgtactggtacccaagccgaacaagaaatggcgagtatgtattgatttcaccgacctcaacaaggcgtgcctaaaagactgttttccacttccaagaatagatcaacttgtggatgcaatagcagggcaagaaatattatgcttatggacgccgattcagggtacaatcaaatcataatgcatccactagaccaagaacatacaagttttcgaacagatatgggtctgtattgctatatggtcatgcgatttgatctcaagaacgttggagctacataccaaagattgttaaagaagatgttcaaagaccaaatcagacaaagcatggaagtatatgtggatgacatgcttgtcaaatcaaggaaggtcgggggcatatagatgacctagacaaatgcttcaaagtcctcaagaagtataacatgaaactcaatcccttaaagtgctccttcggagtcagctcgggtaagtttttaggcttcatcgtcaacgcctgaggaattgaagctaatcttgagaagattcaagccctcctggatatgaaatcgccaacaagaaccaaggaagttcaaagtttgactggtcagattgccgcactcagcaaatttgtttcaaaatcaacagacaagtgtgttctgttcttcaacgttctgcgaggaaataagtaatttgagtggacagaggaatgtgaaaaagcttttcaggagctaaaaaagcaactcgcaaaacctc

SEQ ID NO: 334118 - DNA, 1098 bp, Cannabis indica
gagcctgaagtactctttacgcagaggaactcaacatgaggcagaggcagtggctagagcttgttaaggactatgattgtgaaatctactaccatccggggaaggccaacatagtagcaaacgcgctaagtagacgcagttatgccagcttggcaatactggcacaaatggagaagcccctacaacaggaactccaaagaagtggtatagagatcattacacaaaaactagctaacctaaccattgtctcaacgctgctacaagaacttaaagatgcacagattgttgatgagttcttacagaagaaaagagcaggcttgccagagaaggaggcagaggatttctctgaaggtacagacagcatgctgaggtataagggaagagtgtgtgtagccaatgacatagagcttaaaagaaagatcatgatggaagcacacactacaccctactcaatgcatccagggtcaaccaaaatgtacaatgacttaaaaaccttgtattggtggccagggatgaagaaggatgtagctgaatttgtagctagatgcctcacatgtcaacaagttaaggctgaacatcagagaccagcagggatgttgcaacccctggaaatccctgaatggaagtgggaagatatagccatggattttgtgacaggctaccccgaacaaccaagcaacacgactcaatttgggtaattatagatagactcacaaagtcagcacactttgttccagtaaagtctacttacaacgcagagcagtacgctgacttgtacgtacaggagatattgaggttgcatggagttccaaagacgatagtctctgatagaggttcagtattcacctccaagttctgggagagtctacataaggcaatggggacgcgattgaaattaagtacagcatttcatccccaaacagatggacaatctgaacgcaccatccaaatactcgaggatatgcttcgagcgtgtgcactggacttcactggctcgtggagtaagtatttacctctaatggagttctcctacaataatagctatcaagccacaatcaaaatggcaccatatgagatgttgtatgtgttgggttttat

SEQ ID NO: 334119 - DNA, 357 bp, Cannabis indica
cttccatatttctgtcgatctactttaaacatcttgtttactaatctttggtacgtagctccagcattttttagaccaaacggcataactttgtagcagtagagacccaaatctgttcataaacttgtatgttcttggtctggcgggtgcgttttgatctaattgtagcctaaataagcgtccatgaagcttaaaattttgtgcccggctgttgcgtctacgagctgattgatcctttggaagtggaaaaaagtccttagggcatgctttgttgaggtctgtgaatcaatacagactcgccatttctagttcggcttgggcacaagtacgggattcgtgacccaagccgggtaaaaa

SEQ ID NO: 334120 - DNA, 517 bp, Cannabis indica
gatcttcaaaagacaacctggcgactctgataccaaattgtagcaccctaactattataggagtgtaagcgtgatttttaacgtactgtgcacctcgttgctaatcaacgagattattaaaaatcgtgaataattaaaagtttgcttaatttttttaaaacataatatattacatttataaaattctgggatcccgtttacaaaatatagttacaaaaatttactattcatatacaaaatatttgtcgcctagcgactaaacagcaaaagccctgatgtctaaaggatcgtacgttccaggcctaaccgcccagacatgtacaatcttcacctgctcgctctcacggctcctcaaatttagcttttcctttacctacacatagcaatagcaatgtgagtcgacagactcagtaagaaaatcataacatataatatacaaataacttgggttataacctggcgcccatacacccgatcataaccctaatccccgcgtcccacatggtactgagtctag

SEQ ID NO: 334121 - DNA, 643 bp, Cannabis indica
aacagggacttagtcttttgaatcatataatcacaatcacattccactgtgttgaaaatactgtaattgtgaataaatatatgttctggaattaactgattttgtgcatatattaaatatatatattaaaccatcaacatgaaaaatacatgttaacataaatcacttcaaatctcttaaattgataactagtcagactgtaatgggttttatttagggcacaaaacccaaccaaaacctagttgcatggctggccccaaatgattcctccatgatatgggccttataaaggagagtataggttttcgtggcacgacatgcttttgttttgtgaagggaaacctgggcctgcgcccttgcacaaacaattttacatatcctgaggttcattcgaataagttagagtcatgcaggattttgtaatggaaaacttttggctttcaataggaaaagctaaaggtgcatgaaaaattcagacactgactcttcctgcaaaagttggagggtgaaacatcgttgtgcgtgtgacagactttaggcagtccttccattctgggaaggagtgttgaagatgtgccatagccccagtgatctttcttgcacgaaaaacaacgtgacatcgagagtcatgttgaatttttat

SEQ ID NO: 334122 - DNA, 1221 bp, Cannabis indica
cttctcgaccttggttacttcagtattaaaattattaaaataatcctgtaaggactcaccgacttcctgcttgatgttagccaggattgtgtaaggcgatttatacgtcattgtggcttgggagtgcgtcaagaataaatccacaaaagtctcccaagtcgatatggatgcctcaggcaactggcttaactaatcgtgagccttctcctccaaggttgccgctaggatgcgacatttcgctaattgaggtacctgtctacttccataattgtattaaatttttttaagtaatctatgggattagtagtacctttatattttagcgattcagattgcctgaatcccttaggaagtcgagtttgttgcacttctgcagtgaaaggagaagtcccatagagcttgtaaatgggttgtctctgctgctcaattatttttaatgctcgtagcaggatgctctgatcaacaccccctggtacgacagtttcagttgtcgcaggtgcggtggcaatcgcagctatgttagctgggatcactacctcagtggttgcagctggtgagttaggcagatttacaacatttgttgggttattgccattgtttgtgccttgatcacccaattggggatcacgggctcatcgcggtttcggggcgtttcagaccgtgccttgaaaactgtgttaaggtgatcacaaagatcacccctgtgaacttggtatctcactcctcgcggcgtctccacaaagcaagacctggtatagacactaggagaacaacttttacgcggttgggccctgcttcgagggttgcatcgctcgggatcctcctcttgcggcacttcgcggttagagttctgtgcgacttgttccctctacgtaggctggtttaagtcgagtcccttctgtccagtcctgtgttctctgcgagagcgattattagtgttaggaaaatatgagatatcaatagaagaataacaataagatgaataaagagaccaagaaatatacaactctactatgcaacaaaattacaaggactataggttaaataaaagttacaatcccaagacacaatatacaaataaagagaaagaaataatgagaataaagttacaactcaaagtaaaatatacacataaatgtaaaagcaaaaagagaatatatatatatataataaagagatacatatgtatgatatatagtaaggaagaggtttcaatggtta

SEQ ID NO: 334123 - DNA, 557 bp, Cannabis indica
ttgtcatcaccgtatctcatatgttgtaatcatcgtatcttatctattgtcatcactatagctcaccaccactactatctttcataattctcaattttaatcttagattccatctcgaaatttaaacattttaatagacattatagtaactctgaactgattatttgtcaaaataaaaattaataataactcaatctagagtttttatgataaagctgggtatgttttttgtatctatttgtgctaaaaattgtaagttggttaattatattagcaaaacattatcaaaaattgagctcagcgtactattttagaaaatacatggtctaatttattatttaacaaaacttaaaatttccaatcgataatatttgcaaaacacaatatccaaaataatactaatttaacccatataaaaaagattactaaacacttacaaaagcaataataaaagaattattactttattttatatatatatatatatatattccgttggaaatttagtttggtgattatataaatatatataattattagaaaattataaaaaaaaa

SEQ ID NO: 334124 - DNA, 602 bp, Cannabis indica
tcctctcctggatttttctgatacctgctcacaattcctactgcatagcaaatgtcttttctagtgcataacattgcatacattagactcccaactgttgaagcataaggaactcttctcatgtcctatatgtcttgaggatcagtgggacactattccttagatagacggataccaaatctagaaggcatctgtgcccctttggcatttgtcatttagaatctctctaaaaccttattaatgtaagctgtttgagagagagcaagggatctgttcttcgagtttttgataatctgaataccaagaacataagcaacttcacccaaatccttcatttcaaattaagtgttaagccattccttgatgtcagtcatattcttgatattgttacacatgatcaaaatatcatcaacataacgaaccatgaatactacttcttgattatccttgagttggtaaacacaaggttcatcttcattttggttaaagccgtaggtcttgattatttcatcaaacctcttactccaggagcgagaagcttgcttaagtccataaatggacctactgagtttgcaaactttcttttcctgccctggaagaac

SEQ ID NO: 334125 - DNA, 788 bp, Cannabis indica
ttacttccttgggttacttttcaggtgtccttacttcggtgcgcaatggctcgtcatgagttttcagagtcttgtagatgtagaagggggattggggtttacctcaaagggaaagggatgtgctttccttgttccatcaccttcaccattcaaaaccattataggaggtcgagcgtggttgtttctcgtcagaagttggcagtgctttgaggcctcagtctttctgtcttgggcttgcattttgcctccttgtgcgttaggaggatggttgattaggttgttctatctttgttgtttgtttttttcttgagttttttagtttgtttgagttgtttgggtgtggtgcaccttatgtccttagtggcttttttttggggtgtttgcccctctttatgctcctgtgtgagctttgagcttaatgctcctttcgaatcgatgtggttggccgacagtttttatctcttagtgagattgcggtttatccactagacttgtaggagtttgccctttgatcaacattgaatgaagtttccatttaaaaaaaaaaagtaaaacaaaaaaacaaaaaaatagtatgtagcggcggcttgttgtcttgctttggatgttgcgaagcatcatggtttaaaatttattattgttgagagtgattcaagggtagttatcaatgctctcaatagggaggtctccgaatgggagattgagaactatgtctcattttatattagatcgtctctttattttgttagttgtatttttttaaaaattagtaggaactgtaattttat

SEQ ID NO: 334126 - DNA, 813 bp, Cannabis indica
tactttcttgaatttttgcaatagtcgcatactatagctaaatacttaaccaatttcccgcctctggctagatattcttcattctactggcatactacgatttgggaatcgctgaaagcctgtagatactcgattctcatctcgagagcaagcttcaatcctgcgattaaagcctcatattcggcttcattgttagatggagaaaattcaaatcgtaaagaagcgtgtaccttaaagttgttgggactgattagtaggatttcgccaccagaaccttcgctatttgaagccccatcgacgtacaacgtccatacttctccattgggcatagcagtgtcaaccttgtcgtttatgagtgccacttcggtgcttgggaactcgaggataaaatctgccaaggccttcccattgatcacagtcctcagtttatacctgatgtcgaattggcttaactctactgcccatttcaacaatctccctgacgtctctgattttgctaagacttgcctcaaaggatcgttcgttaaaacttcaatactgtgagcttgaaaataaggtcgcaactttctcgatgatatcactagggcgaacgccaatttttccatttgaggataatgggtctcgcatccagtaggcgtttactgacatagtacacagggtattgtcgtccttgatcttcacgtatttgtattgaactaatcgcatactctgacactactaggtaaatggataggacctcgccggtcatgggctttgataggattgggggctgccccaaatgtgatgattccaagtccaagtcctagttccagt

SEQ ID NO: 334127 - DNA, 676 bp, Cannabis indica
aggctcggatgcttgcttctcaaagtagccagaaaagttatactgatccgaagcgcagagacattaactttcaggcaagggaacatgttttcctgcaagtttctccagtaaagggtattaggcgctttggtaagaggggtaagttaagccctaggtgcattgcgccattcagatactcgagaaggcctggtaggtagcgtatcagctagccttaccaccaacgttatcgtctatccataatgtatttcatatttcaatgctgaggaaatatgtttcagacccgactcatgtcttgagttacgaagcccttgaactacaatcaaacttatcctacaaagaacatccagtttagatccttgatagaaaggaaaaaagttcttcaaaacaagaccatcgccttggtcaaagtgctttggagaaacatcaaggtggaggaagccacctggaagttagagtctgacatgtgcactcaatatccagagttgttcaggttagatttcgaggacaaaatccttttaatgggggaataattgtaatgaccacatttatagtatggattagtaaaggcaattaacactaattatctatatttttataattaattgtgaatttatttaatggtgggtctcattattaaaagtgggcattagagttataatttctcaatttcggagat

SEQ ID NO: 334128 - DNA, 503 bp, Cannabis indica
atgcaatcagaccagaaaaacaacaacgaacaatacaagataccacgcacaaacccgcacgatatatctggactaaccaagattatgaattagctagctaacccgtttacagaatgaaactagctatttatagacaatagttcaaccgacctaagaacaatttataccaacagttaaaacataacagattcacaaggactttaacagaaaactggtatgcagttataatagattaagaccacagatatgactggactcactattaatataatctgtcaaaacaatgattcttacaagcttcactcttcattttatcattaattctaataatacttatcatattattattatcggtacaatttaatatcatatgcgacagagttaataataaataatataaaattgctaactattaattaagagcatgtttggtattattttttgttttttattttcaaaaaattgtttttagaaatgagaacaaaaaatagtttttaaaattt

SEQ ID NO: 334129 - DNA, 615 bp, Cannabis indica
taagtatgggcgtcaatgatatatgatgagtaccgagtgtaggtacgggctcacctgattaggtgatgcgaatatctcggtgatgtactggacgtaagtactggcgttagtgatatatgatgagtaccgagtgtaggtacaggctcacctgattaggtgatgcgattttcctggtgacatactaggcataagtatgggcgtcagtgatatatgatgagtatcgagtgtaggtacgggctcacctgattaggtgatgcaattttcctagcgagatactggtcgtaagtacgggcgtcagtgacatgataagtaccaggggaggtacgagctcgtctaattagacgatgcgatatattggtgccagattgtggcacgggctcacctgattaggtgatgcaattatatgatatatgggtgcaggttttttgcacaagctaacctgattagatgatgcagttatgcgacatatgggtgccaggctatggcacgggctcgcctgattaggcgatacaatacaagattatcagatcaaagcatcgacttgcctgattaggaagtgtaatgaaatgaagatggttgctttatgaggtgacatatatattatttatatgatta

SEQ ID NO: 334130 - DNA, 1588 bp, Cannabis indica
tgggccatcactttaagttttctatggttcgcttctcttcgatttcatcaagtgattcggcaaggagtacgggatttgcttattggctatacgtcaatcttctgtgggattgtggctcgagttctacgggcaacattgcttcatatccatatgccatggcaaatggagtctgtctggttgccattttctcagttgtttggtacgaccataaaactttaggaagttcctccggccagcttcccttagcatcctcaagtattttctttagtgtgtccttcagtgtcttgttgaatgcttcaacttgaccattttcttggggatgtgctactacggaaaaacttttgatgataccatggtttgcacaaaaataagtgaaggattgactgtcaaacgatttgccattgtccaaaactattttgtacgaaaatttgaatcggcagattatgttcttcacaaaaaagtcttgaacttttttggatgtaatggttgctagtttctcggcttccgtccacttggtgaaatattcaatcgcaaccactacatactacactccacctttgaccttgggtaattttctgatcaggtcaattccccaaatggcaaaaggccacggactttgcatttgagtcaacttgttgggcaaagcttgcgatatctttgaaaatctctggcatttgtcacattttttaacaaaggccttggaatcctcgatcattgtcggccaaaaataaccttgccttagaattttcttagataaactctgcccggtggtgtgatttccacaaaatccatcgtgcacttcagacaaaagtcgtgcagcttcttcttgggtaactcatctgagcaatggcgtgcagccatccttctcatctttcgagcttcatttcgattatctaggagatccccaatgttgacataggtcactatttgcgtcatccagttttgggaagtatcaatcatttcaatctcttcagtgcaagtgatgttagcttctttgaggaactggataggaaccaaatttgctctatcatttacattactactcgctagccgagctaatgcgtcatcattttttcttcccttggaatttgtttgagagcgtaggttttgaactatgcgagcagatcgtgtattttggtcaaatatgctatcatcgtttctcccggagcctcgtagtccccatacacgtgatttaccaccagttgtgaatcactgtagatttcaatatgttcggccttcatctcccgggctagttttagaccagcgattaaagcttcatatttggcctcattattggatgctttaaatccaaacttgactgcagcgtgcaggtgttgccccctaggtgcgacaagggcgattcttgcaccggatagttgatctgaagccaacccgtccacatgtagtttccaagtcagcttgtcttcactgttacttcgctgaggtatttgtattggctcagggttgccttccgatatgctttcttccttgcatgtgcattctaccacaaagtctgctaagtcctggccttagattgctgttcggggttggaaagtaatttcatgctgacccagctctaccgcccact

SEQ ID NO: 334131 - DNA, 756 bp, Cannabis indica
tgtgccctgtgaagtttggagtgattacgataagttttgatagtgtttcggtgagtacgaaatttgagattttcgtgtttcatagtttttagaaattcttaggaaatcagaaatcgtatttttgtcataacttttcacttaggtgttcgttgtggacgttctatataccgttttgaagcttgcgatgatctttaaaatatggtgtatattttagagctaaaatataagttttattttaatttatttttaccgcggggtttgatagaaaatcctaaattgtcttatatgaatattaagtagtgttttaggataaacacttattggtttatcgttgtcatgacatagggccgagatcatcggggatagttctccacttgagttggttgatatgtatgagcttggattaaaggtaagaaaagtatattgtactgcatagtacgttatattataatataattaatagtgttatgaattgattaatattgagattgaggtatagttaatattgttatataatgaaaagattgattggttgagcaatggtaatgtatgaagctatgaatgtgatatacagactcacctgattaggtggtgcgatactcctagcgacgtaccgggcataggtacgggcattagtgacatatgagtgccgagcgtaggtatagtctcacttgattaggtgattcgatactcttggtgacgtgtagatacaacatcagtgatatgaaaatttccaggttatggcatagaatgaaa

SEQ ID NO: 334132 - DNA, 761 bp, Cannabis indica
ttttttttttctttcccctctttttggattgaagagggctgctgccctttgttgctgccacacttgactccaaaatttttccacttctcaagtttaccgttttacattgctctttgccatctcttcttgggttttcagtgtcactaggcaaagtgccttgtggtctattcttcaaatcattggccaattgccccaattaaatttcaagattctgaagggaggttgtctggctttaaattacagaatcattcttggccgtataatctctcattaagctctccaaagaacttgtttaagaggcttgaggttggtgtggttgttgaggtcttggttgttgagaaaattccagttgaaagggttatttttcttatgcttgtgctctacttgaacttgctccttgacctccccatgaaaaattcagatgatgcttccatgctggattgtaggagtttgaatatggattgttgttgcggttgaaattttggttacccacatagcaaaccgaagctggatttggaggacaattctcaaaagtgtgcccatcaccacaatgcacacaagaaattttttccctttgaagggcagcagctagttgtacacttcctcccatattcatgttcttcaaagtgttggtcattgtagccatttgagcggtcaaagcatctacttcaagaacacccgctactttttggcttgtaggagctctattagttgaccattgatagttgttgctagctatcctttccaaaatctcaaaagct

SEQ ID NO: 334133 - DNA, 1169 bp, Cannabis indica
aggatagaaagtcctatgaggatggagaacattccaatcgttgttgtctgatgcttatgaggtataacatggatgagtccattcgtgatagtattccccaaactgagattgcaaaagattatctcaatgcaatcaaggagaagtacaagaaattctcaaagaatgagaaaaatgaatgcctgactttgttccatcggactaattatgctgattcaggtgacattagatctcacattaacaaactgatgggttgttaccaaaagctcaagggcatgggattggatcttggtgaggattacatggtgtggtttgtgatggaaaccattccctctcagtttgattcgatcagatcaagctataatgctcaaaaggagcaatggaccgttgaggagatgactgcattcttgctaaggaagaggaggacttgaaaaagggaaaagcaagaagcatctccatggtaacgaacccaagcaattcttagaagagagagtccacttccaacaactctagtgaccaaaagtccacttagagaagaaaggcagtgacaaatcgaagaaggccgaatagttcggaagggtacgtatatatggaagacgatactaaagttagaatagagttttttttttgggaatgttagactacagttaaatacaaaatatttttggagttgcaagatgttgcttacttgccctctattcggaggaacttgttttcagtatctattttggatagactaggttatagtcttcttttggaactagaaatatgattttgtatcgtgactctatattggttggtaatggaagtttatgtggaaacttatataagcttgatttatatgatgttgtttctattacttctccctcttgcctttcccttcttctcttaatgttgttgttggttccaaacgtgtaagattagaattgatatcttccatgctttggcataaatgtttgggccatatttctagagatagaatggagagattggtgaaagatggtatacttcaatatctcgatttctctgaattcactgcccgtgttattgtataaaaggaaaataactgctaaggttagaaaagggtaagactaataagtgcacagatgtattggaagttattcacaatgacatttgtgggtcctttgttccacctgctatgggcggctata

SEQ ID NO: 334134 - DNA, 582 bp, Cannabis indica
gtatgctccagacctaactgccccgacatgtacaatctctatctgctcgttctcacggttgctcaaccttagctttgctgtttcctacacatgcaaacaataactgtgagttgacggacttagtaagaaacgcataaacaataacatagcaataacctagattataatcaggcacccataccaccaatcacaactctatcctcgtgtccaacacggtgctgagtctaaaatgttcatactgacagtactattgaccataatataagcctatactcagtacgctagtcatactctagtcgtatcgatgtgatactataaattagtacagtaatatcgaccataatatcaccctatactcggtacactagtcatactctagttgtactgatgtgatattgtcgaatagtacttaagcaaacatacatttcttatgtaatctaacaggcttaattaatatgcacaataaacatgtaaatagcataccattatactaatcttaccttgtttctgaattcatgtgtgttggccaacctgagtggaacagctgctcgacgaattataggcccctaaatcacatcattc

SEQ ID NO: 334135 - DNA, 610 bp, Cannabis indica
aattcccatgattggtcaattcactggattcagactggcatgataatcagcggtaaggtatacttacaccttggataagtgttatgtcctttccagggcattgacaaagtttaccagtatcagatgtatgaagtatacattagaagggacaaatatttatcttggataatgttacacctgaaatttggctggcacttcagaggaggacacgtgtcaatcttgcacaatacgaatcaacaaatataatgacaattaatggcaattatatttgacgatattcaaatggaataactaattaaatgcagagttgatagagtacatttataactcgctgactgcaaagtcttaagcgagataaggatatacaaactattgactgatgcgttgataagaaaacatttcgcgtcagaagacgcaattataaggatgatatgtgtaatacaaagtgaggcacccacctcgctacgtataaagagatgaagacgcgacatgttgactgttagaacacttagcgtataatatacattacacaaattaatcataatagttgaacgaatccaaacaaaaatagcgaggcatccatctttctataggaaggcctactcatggt

SEQ ID NO: 334136 - DNA, 863 bp, Cannabis indica
gccaaacacattgaaatctgcagtgattcacagctggtggtaaatcatgtatccggagaatacgaggctcagggagaaaagatgatagcatatctaagcaaaatacacaatctgctcgcacaatttaaaagctacgttctcatacaaactccaagagaagaaaatacaactgcagacgtgttagctcgattggcatgcagcaatgtgagtgacaaggcaaacctggttcctatccagttcctcgaagagcctagaatcactggcagggaagaaatcaaaatgattgacacatccccaaactggatgatgccaatagcagcctacctcaaatctggggaactcccacataaccgaaatgaagctcggaagatgagaaggaaggctgcacgttatatcatagtagagggagtcatgtacaaaagaggattctcgatgccactactcagatgtgttactcaagatgaagctgcacgactcctatctgaagttcacgacagattctgttgaaatcacaccgccggatagagcttatccaagaaaattctaaggcaaggttacttctgaccaacgatgatcgaagattcgacagcctacgttaagaagtgcgacaaatgccagagattttcaaagataccaggagctccgcccaacgagctaacacatatgcaaagtctgtggccctttgccatttggggaattgacctgattggacaattaactaaaggtaaaggcggagtgtagtacgtagtggtagcagttgactaccttactaagtggactgaagccgaaccactcgcaaccattacatcaaagaaagttcgagactttattgtgaagaacatcatatgccggttcagactacc

SEQ ID NO: 334137 - DNA, 593 bp, Cannabis indica
gaacgttcttaagggtagtacgactactgtaccatatgcactaaagtaccaactttgtacttgtgttggtagtgtcctaactgtactcccgagaatttactaagtgttgtaccacaatcacgacgtaccctgggtactcgtgatggtaacaccgtaattatattaacatccaaagcaagcataaacattcatataaacattcatatatatattcttacactatcttacctcgttccgtgctcaagtgtgccggtcagcctgagtggaagtgcagctcgacgtatagcagggccctaaaccattatattcaaaaaccgatgagagactcgctaaacacttatcgggaatataaaacgcaaactaaacttaaccctatcgatgaaaaagatgccaataccctaaaatactcaaaaacgggaaaaactatggctcgggaaaaagcctcaaccggcaggccggttcccaaccggaagtccggttcctgggaccaaccggtcgaccggttgacacaggctcccaggaaccggaattccggttctggtctgggaaccaaaaatctcttctccaaaactcaaatcaaacccaaatcttct

SEQ ID NO: 334138 - DNA, 2266 bp, Cannabis indica
tttatttatatattattaattgatgaaatttatttttaaatattataatattaatttactgtgtaattactaactatcatgccaaacatgatattaggaattcacatgtaattaccacttgacatctaaacacaccttgtattttaaaatacaatgtaattactatacaatgtaattactacttacactgcatagtaattacacagttgtttccaaacagaccctaatgtggtttagagttagatgtttgccactttatttcatttaaatgaaagaatgtgtctttctctattttaccacttatctaatctaattatttaaataccaattttattttaataattattaaataaaatacaatttaaatatatttattaattagacccacaaagtgtactaattaacaaataaacacatatttttttttctcaaaattgtccaaacttggtaaaaaatttcaaataagacatagtcaatttgcttattaaatcaattaattgagtctacaagatggtattatctcagacaatgcggggaccatggacctatgtgaccaagctcctaataagcagatcatgaaatttatcgagtaaatttcttaacttattaattcttcctgattcaactatagattcagaactgcactcctaattacatagacgctctatataccaaatatagatacactaaaattatctattatttcaatcacaacaatcattgatcttctatagacggtttgcgagtagggacaaaattaccgttttatcttttaatgtattttatccttaaaacacttagatacttctaaatgatatttcgagaaactaatataattatcgaaatgagtgctctatcatttatcgctttaagtcaagctctaaggtaccatcgtttcacttctaagtagttatagaagctatagatgtccatatctatgattaaaactctcacttaattgcactactgagttctcaagatgtaagtattagcctacatgtaagttgtaacgaacaagttaaagaacttgcacaatacatttaagttagagcttaactatttcagtattaagatcaaatgatctatgatcaactaagtgatattaacttagaaaagatataatgataagtttatgatgtattttctactgtcaatatcgatccagtccactatatagccgatacatccgatgctagtttactttactaatgtcttggaaaagacattccacttatctaagtgtaagtaaatcttatcgatgattatcacatcaatataaattcaatgcactaataaatcgtgagagtttatattgaaatatataattacaattacttttcactgtgacaaaatcactataattgtgaataactctatgttcaagatgtgatagaacttatatattaagcatacaatcacatataaaatatgtgaacaaagcatctaacaatatcaaaatatgatttttgatctttattgaaagtaaataagattataatgaaattgaatttatttagagcataaaatcctaacagtaacaaccaaatcaagaggaaatagaatattgttatgcaagccactaaggctagcttagtggcgagggagggatgagaaaagggagagataacccaagaccttaaagctacaagctattaattgattgtaaaaataccattacgttatactaaaaaaaaaaaaagtagaatattgttatgcactagtttatttcgcctgaatcgatgatcaattcaatttgatgcattgaaagcagattaatggactcaaggaaaacaacacatatcatcaaaggatcacctatttgatcatcagttatcacatagcttccagcaaaaagaaagcgaagaacaaccccataaagtatgatgaatgagttgtttttaattgaaaaaggagacatacctattagtaagattgcatttggtaggaaggaatccaatataattctattttttatcttacataattatatttttatcccaattaagtttacaatttttatttttatattcacatatttttattttaatgtctataaaaattatttttttatcaatacttttttaataatctttttttgctccactaaaaaatgttgttggctctctcacttgttcatgaagtagtgcattgtaaatgattagtaatattttataataattatattaaattaaattatataaaattaaatatttaattattttattattttttagtattaaattatataaaatagggtaaatactat

SEQ ID NO: 334139 - DNA, 694 bp, Cannabis indica
cctctataatttattttccaaatattaacacgtgcatcaataaaaacatgccattaggcccaactttgggctaaggcgggctaggcccatgcctaaggcccacccaaacccagggcccaaacttttaatttaataattttggaatgaaaaaatagtatttttgtaaaattttgtgaaaagaggcccattaatactcactttactttatatataacatacacaatttttttgaacctattattactcaaagtcggctctacatgctatgcgtatatttgtgtatacattaacaatacatattgggatttaacagcagcgttccaacagaattgtaaatatatagcaaaatagaataaaagttcagtaagttttactgtcaaaaaattaatttatagaattaagtgatataaaatttaagtagttttaccgctaatattttaaaatgataaaataaaaagaaaaactctaaacatatcatcaccttagtatttacatttaggctaattagcaatatttttccccgaactttgacatgtactaaatcatgttcattgaatttttttagccgttaaaaattccccctgaactattaagattgttagattgaaggatttttgtttaattttagtaaaaaaattctaacatggatgaaagttcagggggcattatttaatggtttagtacataaacaatc

SEQ ID NO: 334140 - DNA, 910 bp, Cannabis indica
tgggtctcggtgctagtttttgaggcccgggtcctgaatccaggtccccatcctagtccggttcctaggtcccagtccgagtctaggacccgcttggggttcaagtcctagtccgagttcgggtttgagttttcgatcccggtctgggtctagatctaggttcgagtcctgggtttgagtcttgattcaggttcgggtctgagtctcgggttccgatctgggtctgtgttctgaggcccgggtcaaggtcccccatccaggtctgggtcctaggtcctagtccgggtccatgtttgggttcaggtcctagtcctagttccgatttcgattctgcatccgggttcaggtttgggtctgggtctccgtctaggtcggggtttgagtcctagttcgagtccatggttgggtcttggtccaagtccagatcccgctcttgatctgggtttgggtccaggtccaagtccaagtcttgggtacgggtctaggtttgggtctaggtctctgtccgaatccaactcccaagtttcgatcccagtgggtatgggtctaggtctaggttcaagtctaggttcatatccagatccatgtctaggtccgagtttgggtctgcgatcgggtcccaggttcaagtctgacctgatcccggacccgaaactggaatcagactaggactgggactagaacccagatattggaccgtaacagggccaaaacctaaaacccaaactcaaaccagaacccataccgggacttggacccagaccacgacttgtgacctgggtgtaacaccccgatttcccgagatgtcacataggatagtccgtataaaacaatttaataatataaagacaaacaaatacttctttattgaaaaacatccaagcatgagatctcattgtttaaaacaaaa

SEQ ID NO: 334141 - DNA, 743 bp, Cannabis indica
aaatacttatgtttctttattgatattgaataaaatggattacattgaaatggagttttatttagggcataaaacccaacatgaaaagcctcatggtactctggcatgtttggctcttgaggactgaaaaaggacaatcacaatgggtgattataacttgcaatactatgaaggggaagaagtagcgtgtatctctaacatagtggctacaccaatgctacttcaacaagttaagcaatgttagtggcaagataaaaagttaagaattatctagaagcgaatctaggatggtgagcaactagatgggtggacagttagtggtgaagggtacctataccatatggaagactagttgttgcagatattcctgatcttaaggagtccattttgattgaggcccatagatccaagtttgttatacatcgtggaagtacaaagatgtacctagatttgaagagaaaatattggtgggaaggtatgaaaagagatgtggctagctttgtagctaagtgtatagtttgtcagtaagttaaggctaagcatcaaagactttcaagtttacttcaacctttgcctataccagaatggaagtgggacaatattacaatggactttgtaactgggttgccattgacacctttaaagcatgacgctgcttgggtgattgttgatcgtttgactatgtctgctcattttattccaataaaaaaggattacaaacttaccaagctagcttgacttta

SEQ ID NO: 334142 - DNA, 785 bp, Cannabis indica
tatgaagatcatcttgggccatatttattttgagcttttccaaattgggcttttgtatttttcttgggaaacttacaaaaatattgaattttgagtaaaggtttacatttatactgtcacacgataaaaattacatttatacttttcttttatactgtagatgccaaaaatcacataccaagcctctatcttccacacccacatacagaactatcccagcaatacgagaacacttgaaaacaaccattaattccaacaaaatggaacaaaaatagagaaatcgacgtcaaataaataatcatggcaaaacaaccgtaaaacaacactaacacaaattaaaaaaagaaatgattaaaaaaagctaaccatcatctatacaacttcaatactagatataatagcagctatatttatcagcccaattctgaaaaattagaataaaaaaattactaaaacaacacaaaaacaaatgtaaaacaatgaagcaaatgtaaccacttaaaaaaaatataaaagaaccacacccctcaagattttttttgccaatgagcttgtcaaatgtatttataggagaatcggaataaaaaaaatacaaaaacagtcatatagaaggaagaaaaaaatatatttatagtctccatcttctacacacacgtatagaaccaccacattaacacgagaacacttagaaaacaaccattaattctggtgagatggagcatgaacagtgaaattgatgtcaaataaataaatcatggcaaaacaaccgtaaaacaatactaaaa

SEQ ID NO: 334143 - DNA, 1310 bp, Cannabis indica
caactcggtttgctgatcgtctaataaaacaaatcctaacattattgagagaagacaataaaatttgacagtcatgaataatcaaaccaaaaatagaattcacagagtgattactacgaatgccttgcacagtgagcatactgtctgtctcaatctcaacatcagaccaattgttgctctttatccaactcagagcttctttgactcccattgcttcaacgacttctgcatcatagaccccgccgaagtacttggttttagcctcgatgagcccgccagagctatttcgggcgacaatcccgaacccgtaagaattatcctgtggaaagagagccgcatctacatttaacttgattttgtttgattcaggtttagtccaacgctcagctccatctcctctattctcaaagaatagcgaagatagggaaaagttatcttgagcgttacgccaatgatcaagagttgtttgtgcagatgcaatgacttcagcttgcgaggataccttattcttccatacaacaaggttacgggccttccaaattgcccaacagagcattgctgcccgtgaggcgagttcctcatcagatgccgtaagcactttgtcaaaccaaccaccaaaagagtatggatggtttgtatcataagagatgccaagagtgttccagcatgacatagcaaaagggcatgtgagaagagcatgaacaattgactctgcttggtttgtacacacaggacagagcccagaaatattcacatgttttgttactaattgaagacaagtgggaagacaatcagtaattgcacgccatagcagattctttaccttgggagggatcttcaattgccatagcttacgccaaaacccagagttatcagcgctagtaagctggggtttattcttctgcagcatgacataggcagttttaacagagaacaacccagagcggtctcccgaccaagaccagaaatcagaaccagaattgagagatagcggaagacccaagatcagattggcatctcggttgttaaacaggtcctcaacaacctcagggtcccaagctcgagcttccaatgagaagagagaactcacagtattatgtaaaagagctggatgagttgaagttacaagtctgttcccactatcaggtagccacggggtagagaggatcgtggtagtttcaccatttccaatgatacgcacagccccgagacgaaccacactttgagcagcccaaatacttcgccaaacaaaactgggattatttcccaattcggccgataggtagtcgctggtaggaaaatatttggct

SEQ ID NO: 334144 - DNA, 320 bp, Cannabis indica
aagagcactcccaacagattctctactctatcttttaaaagctttttctttaattttattaaatgaaaatatcattctaaagaaaaaaaaaatgaaattttgaatagcctaataaatagactaataataagaattattaaaatcaacaacgacggaaataataaatcaaagtggattatcatacatatattatatgtataaacatataacaagtattatatgtataaacatataacaagatgaataagctcatttatttacacttttatttacatttattatatacttaatattatctagtttatatattatttaatatt

SEQ ID NO: 334145 - DNA, 501 bp, Cannabis indica
ttagaactgaaaaagatagatgatttatcatagttgactttctgacctgaagccatctcgaagacattaagcagccgtaacacactacctgcttctctatcatttgcccgacaatagagatagctatcgtctgcaaatagcatatgagaaatgataggcgctccgttagccactttgcaaccatgtagctcaccaagcctttcgaatctcttaatcagtgatgtaagaccctcagcacataaaagaaacagataaggagacaaagggtctccttgacgaagaccacgagcaggagtaataggacccatctcacggccactattaacaaccatatactgaacagatgtaaccgtggtcaacaccaagttgacaaaacggttttcaaaccccagtctcagcatcatcattcgaagaaattcccactcaattctatcataagctttactaagatcaagcttcaccgccatgtagccttctttcccttttctcttccgttttagg

SEQ ID NO: 334146 - DNA, 478 bp, Cannabis indica
tttttaatccatataattcaaccctacgtcctagttaaaacactataaaaggaatgatgttctcatctcatccgcttgaattaatgtccacttgactattcaaccaaacctagatgagagagttccttctatagagatttcacctccttcattgttctacaccatattcaaaagctttagtgatgagtgccgtgcccacacatagcaagtcaattactcaatcatagtgagtaagatggtggtaacgaaacccgaaggagagaaagagatccaggttcagatcttgataatgctctgcgacagaaaggaatcaagggctagagatcctgaaaggaaggagtcattatattccgctacaatcaatgtaaggttttcttaaacccttatgtgcttatttcattgttttagagaattcatatttaggatgttaatgaaaaaaatattcccaacaactatatgaagtttcctcgtagcaaga

SEQ ID NO: 334147 - DNA, 913 bp, Cannabis indica
tagtaaaaagagctttttaataattacagagggcattttcgccaaagtcctttcttggaaaggacacctcctttgattttggcaattgtatagtttcgaggatcattatgaatcgcctattcatattctacatgattcccagccgttagatttcttaatctttggctttcttgtcactgaacttcgtgtataaaaggatggctcaagattctcatttttcacaaacctttttgctcttttgtgaaatccattttctgaatggattacttccttcctgtcaaaatgtcccttctgagttttgaagtttatctttccagactcataatacccagatgcctcaagtggagcctgaaatgatggattccaaggctgaggagcttctgagcaatccaaaccaggggaaccccgtgacctgccatgaccgatcctcacaagtgatcccagaggatatagatcttgtgagcaatctcaaagatcctcttcaggctgatgaagaattccaaaagaagatcggcatggtttcaggtaaatttgggaagttggcgtggtttctatcggagtaaccagccaacataagaccctatcctgtgccaggggatctttgcgtcagcctctcttcagtgttgagagatttcttgaggctgggaaatagatctcggcttcaggaaatgggatcttctaatgatgagggcaatgaggcatgtgcagagaccaaggctttctacgtgtagttggtatttctcaagctatgtgtagtcggtctttttccgagctacgtgtaggcagtctttttcaagctatatgaagacggtctttcacgagttcagcggcttcccctctcatcataagcttaggagaatgacttaatggttttccccttgtggcatttttttttgtaaagacaagtttgtaa

SEQ ID NO: 334148 - DNA, 1093 bp, Cannabis indica
cagtctcttgcacaccaggcgcgatttcatccacaggagtcatcacaccataatctgtcttcgacgattgttcaggattaatagctggcggaacccttgtgtttcctgggttctgcaatgcaggatccaccgcctgtagatttgctggatcaaccatacccctacgagtttgtaccaccatcgtacttgtggttaaatttataatgaagagcgattcttgagttcagctctcaatgaaagaattaaaatgttgacctcgcttttagccaacgacagtgagtctaatttagtaagcaacaagtagtttataacgattgatatatagtaaagcaatataaagacacatgaattttatagaggttcagccccgagcagttcggtaatagcctaatcctcgttatttgtattaactcaagaacaaggagaaaggttccttttcttatagctcttacaacaatatctctgaatatgaattcttagataatatctcttaagtaaaatctctcgaccctttgcccagtgaacatgcatcactatttatagggctatgagcttggagaggaagtatttcccttctcgttacaatggatataagcagaaagattgcataataaatacagaatacactgatcgtgggatttggacagcttgccatatctctgcaatctgatccccaagttatagggatttctttgatgactcacgatgcgaaagctgaattcgctaagtgttggtcgctctgcgcggattgctgatcgctttgcttcgagcatgcatacgaggcatcctgttcggaatatattctgcgagcagatattcggagtcgattccatgtgtcaccatcatgtgatgccacgtcagagtgtaaaaattgagataacagggtataatgcaaaatataagaaaaaaagcataaatattatagctaaggtatattcagttgtattgtcgttgttttctaatttttaatactgaatatattaatttataaacaaaaaagaaagaaaaattcgaatgaatctacagccacatacgtgtaattatgttccaagttttttcaagttgatttgtagttgcattatcgttttattat

SEQ ID NO: 334149 - DNA, 1810 bp, Cannabis indica
ttacgatatctataattggtaagaacatacattacaaatttagaatatataaattgaggcattcggacagctttccatatccttttgatacgatcctaggattgtagggattgctcatgtgctttacgatatcaatcttgaagttgctaagtcttgatacattgctcggagaaatgacctcgtttgctgtctggatcatctggccttgccctgctcggtcaagcagactttgtccgtatagatatatggttgagctctattcggaatatctctccagctaaatgtagagaatatcagacacgtgtcaccagtatatgtcatagtgcaaaaaatgggataatatttacccccaaagtctgcatgggacttccaaagtcgcacgtagacttcactcatcttaagttcgtgtctgaatgggtggcacgtgttcgatgtgagtgtttgtgatccgatgtgattctgaccaaaagtcccttcagtattcggctaattaatgctctgatcaattcgtacctcgagacactccaatcaattcccatgctttgacggttacccttctccaagtacttgattacttttaatttcccaatatttacttttgcagggaaatcgaggcgtttgaaattcgaaatgattgcaccattcactaatctgcctataaatagggcaaaaagtcctaataaaccacttttagcatttttcttgtttaatgagttcagagcatgaacatctttctctctcaaatccttcgaagaatttccagaaagtgtcgattagcgtcatccgagcaacctcaaaacttcaaacaatgagtaagtttctcatctttttctcctttaatatttgaatcttcaatttttcgggtttcctttgtagaaaattcagtagtgttgaacttgttctaggaaaactgtagagaatctagttttagaagtgtgaaacttcaattgtgattgatcatataacttgactgtggtggcattccaactttaacttcacgatattcggttctcactttgcccattcggggttagtgaagattaacccttaatttgaggttttaaaattctaggttatgaacctaattcacgcgaaattttcttctttttaatcttttgattggacctggtcagtatactttgcttctttttgttcaatatcctggccaaataatcatcttgtgtcctaccttttatagatgaaccctgatgagttttggggaggagaacatcatatcgactaggaccttctttaactcttgtacaaggaccaacctcggctttgcgctaatccatcctcctcaagtgacggactttctaattcgagtttcgaggactgggaagtgatcagtgagggtacatcttccccagaacctgaggtgcagcaccatttctattccgagcagatcgcaggtgaaggctacgggcattttatttgggaactcgagaaggggtggagatgatacttgccgtccaactggacatatatcgtccgaccagacgtagttgataccatccctgtgggctgtccaaggataggatgatggccgcagaaaagaaactatgcggaagattgctgcgactgactctcacgtggctcagcttgccacaatgcagagcgctgaacaggcccgacctgctgccaaggaggaggatgatgagggggacgttgaagtctaagaagcagaggattggggcgaggtccgtcctgatagtccctctgaggccaaggaggaaggagctgctcgaccattgcgcttcggaggttataatgaggcagggaaccggtgtctgccctaaataaaactcat

SEQ ID NO: 334150 - DNA, 1383 bp, Cannabis indica
ttttttttttttttgcctttttcatgtttgggtgttcgttctttggtgttctcttttttccttttctctttcaattatttttgctttcgagattatggcagagataaaatcagcgattgtttctgatgtggttcccgtgatgtctaaaatcacgatccataaattgattagttcaaattttttagaatggagtaagatgattcgattgtatttgaggagtactattgacaaagatgatcacttgactaacaatcatcccaaagaaaaagacgattcaaagaaaatatggctgtgtgaggatgctcacttgttcaaatttgaaattctatcgataatggggtaattagtttgattaatcaatgtgaattggttaaagaactaatagattaatacttggagtttttgtattctggcaaagacaacatatatatctcacatacatgatgtttgcaaagccttttatcgtgcggagaaataagatcagtctcttatgagttattttatggcatttaaaaaatatattaagagcttaatgtgttatttctatttagtcctgatgtgaaaattcaacggtaccaacgagagaagatggctattatgagtttttttgcagaactctcatctaaatttgactctgcaaagtcacaagctctctctggttttgatatctcctctttacaagatgtgttttctcgtgttcttcacaccagaactatctctttagctccttttaatagcgctttggtgagtcgtaacaattctgcactaagaaaaaactctacaccaagtggaattcacaaggacttaataattgaacaataaattatgggagcatcatgtgcaactattgtaagaaaccaggtcacactaagtttgagtttaggaaattacagttcaaaaattgacaacaacaatttgctaatattgttagcactagtgatgcatctgaaaaattaatccttatttctggtgatgaatttgcaaagttctcaaggtattaagaaacacataagtcttcatctccttctgtcgctgcgattgttgattcaagtaactctaattcatgccttctttctaaatcctcaaaatgggtcattaattctagtgccacagatcatatgacaggtaatttttgtttcttttccactttctagtctcatcgtcccacttctatagttaccttagctaataaatcaccatcttctgttcttagatctggcattgttgttcctacacctctactcactttgtcatcagtcttatatttacttaatttgtccattaattttctttctgttagtaaactcactcgcaatctaaattgttgcatctcattcttttccaatcattatttgtttcaggatcttatgacgaagaagatta

SEQ ID NO: 334151 - DNA, 714 bp, Cannabis indica
tacaatttggtgttgcgaaattcactcgacaacactctccatgctcttgtgtgcgagtatcctctccatgctcttgtaaaaacatagagactgaccctctataatgcgagttggtcccaatgaccctacagccttgataaacctatatagactcgcatgtctaggttctgtcagctcatcatgcgatgtccataaaggcgactacctaagaacgcaaacatcctaagcataattaagtgttaggcctgcgagtttaacattagaatatgaacagttaactcgcatgttaaaagggcgcatacgttgctgaatttagtaactgctattcatttattgatgttaacgttatttattttagttattgtaattcaatatgtaaacggattgacaatgaatgcaatctttgtataactaattggacacctactttgtatataaaggggtgatccatcgtgaaatgagagctacgaaactcttgctacagtggactaagcagaccgtgatctgactgaaccactataatcctctgtcttattgttatttctagttttctgttaagcatctcacattcccagttcgagtactcgccattctaggttgaatactcgcaattgttcttcatataattttcttcttgtcattaataatatcatatacatttggtgttgtgaattttgctcgacaacatttggcgccgtctatgggaaattcaga

SEQ ID NO: 334152 - DNA, 598 bp, Cannabis indica
tactagagcaagttgaagttggtgagcaaaataatgaacataaaaggctgatggtttctctttcaaaataagagttttaagacctttgaactctccttgcatattgttaacgcaaattttcgttaaccaaatttgagccagaatagtggtaaacttgcacagcaaaaatgaaaatagtaaagtgataaaaagaaaatgatgaacaccaagattttttacgtggttttgcagttaaaatttttcatagtccacgagtcaatcttattagatttctgatactgttcttggggtttttctcttatgaatttttttcgtgcctttttaagtctaacttgcctctatttataagtacatagtcagacagttaattacagagttgactgtaatctttacattaattatcccctaaaatcgtggggtttgattacatatcatgtaatataaatgcggttaatatttgaatatcacacagctgtgattaatccgcttttattgggtcaagataattgtgtattaaatacgttttaaatcaaattgttttggggcgtctcgataggaactcagtaccaatgacattgatagcaagttggagcatttc

SEQ ID NO: 334153 - DNA, 885 bp, Cannabis indica
ctgggagagaagatcctctctcccatctcaagtattttgagatgcaaatggatttacaaggagtgcgaggggttgtatgtagtagaatcttccccgccactctgtcgaaagcagcacaacaatcgtatttgaagttggctcctggaaagtttagttcatggaaaaccttctcttcagaattccatgcaccattctctacctcacgctagctcccattgcatctgggagatttggtcgaagtaaaacattgaccaggcgagccactctgtgcatacatcagcagattcatgacggaagcgaccaaggtgtcgcaagtaaccgaggatggaaagttatccgcgatactgggggcattgaagtccttggcgaactgtggaaggatacaaggaaaaatggaccggtcgactcaatgagtgatttccttgaccgggtcgaaggtttcataaacctcgaggaagccaatcagcgagcagaaggtgagcaaaagccgagcaaaacaaaggttccttccactggaacgtccgcccaacttcccattattctagcagttcaagtggcaagcgttcagacaacaaccacaagcaaggaaacgggaagaagggaaagctcaccgaaaagcccggacagactccccgtcatcaggccaaacacagtgcattcactatcataactgaagatatagagagtgtgtacatagcaactcagtcgttaattccgtacaagaagcccgggcccatgaagaaagatgccagcaaaagggacatgacaaaattttgtcgggtccacggagactacgaccacgacaccaacgaatgttacaacttgaagcgggaaatagaacttctgatcaagaaaaaaaacccacacttacagaagtatgtcaag

SEQ ID NO: 334154 - DNA, 706 bp, Cannabis indica
ttaataaaaatcagaaatcgcttttatattgcatgattcgcataatttattttatgactatgtttaatgtataaattctattaagtccggaacatatgtaaatatatgtatgtatatttgttcatggttatagtgctgtcagcacagcagaatataatcatgattatatgttcaaaagtttcattcccatgatttgtcaggtcactggatttagactggcatgataatcagcgatgaggtatacttacaccttggataagtgttatgtcctttccagggcattagcatagtttttaccagtatcagatgtatggaatatacattggaagggaccgatattgaactttgataagatatcataaacttactgttgcccctcattttgtccaaaatacgtggaccaaccggatgatgacacgtaggtagaaagggtttggtgtttatgtaattcagctaagttttcttaagcgtagggatcaaccttagacatgcctcccggagaaggcatgtaagtctcacatactccaggagagcaggattgcaacaaagcatctccaggaggtgtcagatcctatctgaacagtcatctcgcatttaatgccgcatcgaaggaggcgtattgaaactgccatatgtattaaagtccgatggcacaacccccactctgcatctactaggctatgatcaataaagtctagtgacgggt

SEQ ID NO: 334155 - DNA, 503 bp, Cannabis indica
tggcaaaaatgacttttcccagcgcttaaatgaactggtaaaagttagattttagccactgcaaatatacgctggtaaaactttgacctctttgccagtgcagtttgcaaaatgtgctgctaaaagttacttttaccagtgcagtagcaaactgtactggagtgacatttcttgtagtgattacaaaaatcttccttaactaaaaaatagagttctcttaaatttatattatttctccaaattaattagttaatttataaaaaaaattaagccctacattgatcttagcatatatatgaccaaatttatggaacctaacttgtgacagtcagtagtcctgtgatccgtaaggaaaaatatcgggtaagctttgcaatcccacatcgcctggggaaggtcaagtgtgatgattctgagactgtgtaggtatggaactatacgattgcagagagcttaaatagattgattgatactacctatatcaacaaggtgcatcttgtttt

SEQ ID NO: 334156 - DNA, 1048 bp, Cannabis indica
attttgggcgaattctggagcaacagtatcagacggcatattgcccaacgcttccatggccagaccttcaacccgatcccaggatggtgctcctccatcgtcgatcgacaaccaaactgcagaggtcacgtccgatcctgcaccagctccaaatcctcaagccaattccaatcgtaatccacaacttagggttccatctcagattgcagagccttttccccaacctcgttccaccattgcagatgacaacaccaaccaatgcctcacctctcgatctgttgccgatgatcactcaagccctttctacctcagcaatggggatcatcctggcttggtgctcgtttccacagttctcaatggcccaaattaccaaccctggaaacgcggtatcactatggcgcttgctgccaagaacaagatcgcattcatcaatggatctcttcctcgcccagaacctggtaacatttctctcaattcttggttaagatgtaacaatatggtcatgtcttggttggttaactctgtttcgtctgagattgcacaaagtattatgtactttgatttagccactgaaatgtggaacgatcttgctgagcgtttcaatgaaggcaatggccctcggatttttcaattgcagacccaaattacccgacttcaacagggtgatcaatcagtttctgcctactttacaaagctgaaatccctatgggatgaactcaaagagttccagccgattaccacttgcacttgtggtgcaatgaaagtgttcttggattgttacaaccagaaccaagtacttcagttcttgattggtttaaacgaatcttttgcttcggttcgagcacaaattctgctcattgaaccaatacctaatctctctcgcgtttttacaatgattattcaagaggaacgccaaagatctcttggttccactaaaccaattcctcttgcggctgctgctggtccttcgaatccatcaagggccaagaaaccaaggccatcatgttcaaattgtggcaaacctggacacttagtcgataagtgttac

SEQ ID NO: 334157 - DNA, 1028 bp, Cannabis indica
ttttttattttttaattaaaaatacaaatttacaaccggttaccaaacctagaataaccggttgccaacttaaataaataattaaaaattataactattctaacgtgggacctacctgccgtacacggattccaatccgtgttttgcacatttgggcacaaaatcggctgcctataatatataatatcccactacatttcatcactcacaaaaaaaaaaatgctatgaatgaaaaaaaacatgacaccaatacaccaatcgtatgttaaaagtaatgtatatattgactggtttcaattaataatgtcattgctaaagaccaaatcactccttttcatttatatataattagtattttcgttcatgtacaaatggtacaaaaagtataacatgtacatgactataaaatatttaattttatatgtcgatcttattgtgatcgtggtttaattaattaatttttgaagcattttcactgactgacaacgtttcagtctatcaatgaattagtctacacgattccataaatatataataatagttgtgaagctctcaaacaatgaagattacaaatattactggactaaaaaatatactgaaaactaacaaaaattatatttaataacatgcatgcgtattataaaaatttttacttttagtcgcaataaaatttgtgactatattaagaattatggggttccatctcaaaactaattagcaataagaagaggagtagcgcctattcatcttatatattacaatttatttccacacattaacaatgtaagactaactcttaataatagactaaaagtaaaaagattatgaataattataaattatatttttatgttgtgactaaaaagtgtgactaaatgtacctttagttataatacttgttttgactaaaaataaattagtgtaacaacttgtatttaaaaattatgttttaatcatgtaatttttttgttgtgattaaattaaaatcatatttaattacaaaaaaaaatatatattataactaaaag

SEQ ID NO: 334158 - DNA, 812 bp, Cannabis indica
agagaaatctcactataacagattgtaaactaaagatggtaatcttccaaccagaggatgaggaatcgtttgtctttgtcggatcgatttagggatctcagatctaagttatttcagtatcaacaactagagaattattacgagatggatgtttagggtttttggccgtggtattggataccacacggcctgaggtagttcggccaaaagacatcagggtggttcatgaatttttagatgtttttcctgatgaactttcgggtttaccaccatagagagaaattgattttataattgatttggcacctggagcagaactcgtttctaagcccccttatagaatggctccagtagaagttaaagaactaaaaattcaatttcaggggtttttgacataggattttcacggcctagtgtgttaccccagggagctccggtagtgtttgtcaaaaagaaataagatgggcctttgcgaatgttcattgactaccgggaattgaataaactgacaatcaagaataaatatcctttacctaggatcgacgatcttttcgatcaactttaggggaagacagtcttctcaaagattgatcttggatcggtctatcatcagttgagaatctgagaggacattccaaagacggccttctgtactatgtatgggcattatgaatttctggttatgtcttttggactaaccaatgctcccgcaacttttatggatctaatgaattgggtattcaaggattttctcaatatttgtgttattgtgtttatcgacgacatccttgtgtactctcaatcagaagagg

SEQ ID NO: 334159 - DNA, 535 bp, Cannabis indica
aaaccatggttaaagaatttcagacctacaacaggtggaaaagtaattcttggagacagcaatacctgcaacatagaaggaattggagatgttagcataaaaatgtttgatggcatcatcagaacactcaaagatgtaaggtatgtccctaaactcacaaagaatttgatatctgttggaactctagatgatgcagggtatacaaacaaaattgagcatggaatcatgaagatcaacaaaggttctatggttgtcatcaaaggagaaaagattaatgggctgtactacttgattggaaacaatatgcatggagaggctgctgtagcaacaaataaagaagatgagaagatagtcctttggcataggagattaggacacataagtgagaagggcttgaaagtcatctatgatcaagggctgctaggaaaggacaaaatcagcaaggtagacttttgtgaaagctgtattttgggtaaacatcatagattgagcttcaaagtaggtaaacacacatctaaaggaattttagattatg

SEQ ID NO: 334160 - DNA, 713 bp, Cannabis indica
gcaaagagtggggaagaagctccagacttgaaaatccttgctgaatgttgaacatgagaaagaccctgcataaaaaccattccaataccagtagcaggggcattagtattaagtgtagcatcaacaaaaagtgccgtagtagagggggtcaaaatatgatccacaacagcagagcaatgagttgtagtctgatgagagcctgggggaagaggttgggcctcctggtagtcctgcaaaaaacttgcaactgtatcttgaacattagcctgaggggaatgtttttgaaagagatgggcgtttctaatgttccaagtttgccagatgagaccaagaaataaggggagatggtctttgggaatcaacgaaaggctaagcagatagaaatcttaatgtcaagcctgtaatgatcaacaaaaaactgcttaaaaatggtatgatgccaaattggtttaactctggtacagtgaagaagagcatgagaaaccgattctgcatcacccccacaataagagcaagtgggagaagggatggcatgtttaagaaacaggtttagagaacacgggagaagatggttgaatgccttccaagtgaaatgcttaattttaggagggattttcaaggtccaaagagttttccaccaatccttataagggttaggattggaagtggaaggggagggattgagggccttggactgggctaaatgatatgct

SEQ ID NO: 334161 - DNA, 534 bp, Cannabis indica
aaagacatgttgtagaaacagaatgccaaatacaagaagaagaagctgagttcggatgttcagcatgagtgcaaatacacagcttatggcttcgcacctgcagtacaatattgggcgtatgaggccattttggaggttgggaagaggtatggcacgaatcatgagattcggtttcccaggatgcttagctagacgagcaagggtgatattggaaagaaagaagtcagttcgatattttctagacgtgtatgagtttcacttatgttcagagtaattatttaacataaatgcttgtgataattgctaaatggttttactctgatattttttgaaccataaacagaatcttgaagtggtgaaggggctacttccacggacagaagaggaggcatttgtgaggaccatctcttacgatggtgtggaaaacttggttgatgatggtgtggatgacacagaggctgaggcagatactcaggtaccagacactcaggtaccaatttttggaacttttttttatgattgtataacttgatt

SEQ ID NO: 334162 - DNA, 766 bp, Cannabis indica
agagtggctatgatctcgggaggaccccgacatcagaggaaacacccgcaaggagctgaagcggtacgcaggggccgtgaaacacgatgaagcttgggaagttactcaaatcccagctcaaaggccccggctaatggatcagcccattacattcacggaagaagatgctaaaacagtgcgttttcctcaccatgacccgttggtcatagagaccccccttgccaataagatcgtggccagagtcctgatcgacaatgggagtttcgtgaatctgctattcaaagaggccttcactgcaataggcctaacgtaccaagacttatcaccaagtggttcccaactcacagggttcaatggaacaacacttatccctatgggaaaagtgaggctcccagtcaccttgtgcccgaatacaccccagagcaccttcaagtactgcacgtttgtggtggtggactgcccaaaagcttataacgcaatcctcggccgactagccttggtggactttggagcagtcacatcaatacgacacttgtgcctgaaattcccaacccaggaagcgtgggagtagggaccgtggaaggggaaaccgaaggggaggtcaggcagtgctataatgttgctgcctacctacccgtgttgatggtctaagaaattattgagccaagaaatggcggaagaagatgagttggactccccgtgtgggatccgaaaaaattgtagaaccaatggaggacgtcgagggtgtgcgacctcgactccacca

SEQ ID NO: 334163 - DNA, 617 bp, Cannabis indica
atgatttcaaaaggtaaatcccaatctggtgtagtcacaatcggtgctgagattaaattctccttgagaatttgaaatgcttcaagacaatccttcccaaattcaaaaggtactctactagcgagaagattggataaaggtttggcaattttggagaaatctttgataaatcttttgtagaattcagcgtgacccaaaaaacttcgaactcccttaactgaaactggagggggcaagttctcaattgtagataccttggctttgtcaacctcaataccatcttttgaaatcttatgtcccaacactattccttctttaaccataaagtggcatttttcccagttcagcaccaaattagaatcttcacaccttgttaataccaattccaagttgcttaggcattgatcaaacgatgaaccgaataccgaaaagtcatccataaacacctcgatgcacttctctattagatctgaaaatatggccatcatacacctccggaatgttgctggagcgttacacagcccgaacgacattcgtcgaaaagaaaaagtaccatatggacatgtgaatgtcgtcttctcttgatcttctggtgctatagctatttggtgataccc

SEQ ID NO: 334164 - DNA, 555 bp, Cannabis indica
tcgagacccaggattctattttaggtgtttagatctcgccaagttgtttccaactcaccatatttcattattttgaactaaaaagacaagaagaatccatgtctaaggcctaaaaactgaaaagagagaaaaacaacatcctagaagtccacccactcgcctagggttttcaccctgtgcttagtttgacattcctaactagggtttcaattatcgagtctatcttagtgcaaatggctcaatatttgtacttagacatgaataagacctaccatgaacatgttagaggcaatgtaattacaatcgaaaaacttcccgtttggagcactcgggcacctagtgccccggccacctagtgatgcacccagcacccaggttgacatattgtcaacctggaacacttacaaccaaaatattgcagatgtaccccaagaattttcttcatctccattgaaaaagtgaaatcaagtgcttttgagaaagaaatgaatcgatctggaggccaaaactgggactcaactattggaaattatattaccaggatcttagatctac

SEQ ID NO: 334165 - DNA, 606 bp, Cannabis indica
aacaattctccaattgaagctcacgaccttgagagaaacaagaatccctggctaaaacatgagccaccttgtttgtagatcgtctgacaaaacacaactcaatattatttaaagataacagaagagtacgaatatcatgaactaatagaccaaaagaggatggcaaagtaatttggctatcagtttccaaaattaattgtccccacaaatgacggtcaatccagcttaaagcttcttttatgctaacaaattcatctatttcaggttgcacctgccatttcggcataaaaatccgtaccattttctccgctacctcattttcatcttcttttatagaccaaattcattttcaggttgcagataactactcgatgccatagacatccgaacgaacccagaaccaagaactagtaactaacgccagaaaccaataaaccaaaacaaatgagagatactataaaaccatgtcaaaagacaagaagaatgagaaaacttaattagatttcaacacataaaactaataattctaaccccataaaacactaatttgaattaaactaataacaataaaaataagtcatttcctttttctcccaattaaacact

SEQ ID NO: 334166 - DNA, 609 bp, Cannabis indica
tctaaaatttaaagtcaaagacttaaatttataccaaatatacaagagtgattattctagcttggaccaccactactaatcaaggtctaattttagagtgacatcacaagcagatgatttataaaccattcatccaatgatatactatttaagcaaattttaaatgaaaagcaaattagagaaaaactaaaggatcatttcgattaaaataagaatccaatgatgtcccatttaggtgagagtcaaagttattcttattttataaatttgttcattgtttcatattgtaagaagtagtctaaattgtcatctttggatgtacaactagatgttacatttataaatacttatctgtcgagatctaacactatatgtttctccaatggatgacaatcatgattatattctaatgtgaagaagatactataataatgaacaaataaatatacatatttatatatgttatggacttaatagaatttatacattaaacataatcatgaaataaatcatatgaaccatgcaacataaaagcgatttctaatcatatattaattagtaaatttgattatattgaaataagttttatttagggcacataacccaaca
